United States Patent Application Publication US 2014/0057251 A1 - sequence listing, part 48

SEQ ID NO: 58368 - DNA, 10761 bp, Cannabis sativa
tacgtagtatatatatatatatacaaattcttgtacacaaattttattatattatgccatcattattaattgataatgctttgagaggagtctctaatgtatcttttgcttcataatgataccaaaagataacataatttgctatatatcttttgaattattgcatatattaatataatatacctatctctataaatagtttttcttctgggtatctctataaatagttagataacattaattttcataaatcttcatgggccttagagtacttgaaaactgtagcgtcagtgttgaagaattggtttatagtgtggaaagcccaagaaagcccaaaagtctggccagtctcacaaagagaaaacagctataaagtgcaagaagcccaaagcccaatacctgatggagtttcatgttgttcttgggcaagaccaccaaggcccaaagaagcccagccatgagaaagcccacagtttcgtacaaagaatgatcatcaggaatcacatacgacaatggatactcagtccaggccgccatcactaacgaaaagcccactcccacaactgtgttaaacaagggcccagcatagcagcccgaaatcgcaatttgggctccatcgggcccaccatgtaaagccatggccacgttggctattagatcacccaaggagttaccccaggctagaaccgtgaggcctaaaatagatgggcttatcccaaaaacagtacccaaagcgagcaacaaggacaccaactcctcagccactagataagtccacgtcacactcatcacaaacccactcacaagccaagggaacaaacattgcttaggtggaccgtcacgattggtcgtaacataagccaagtttccaagaaccaatcccgtgagaccagatgtcatgtaagtcaacaactcggtcctcgagtcaacgttttctctttgtgtgtttaacaaaaccgccatcagaatcggggctagtgcaacggccaccaccgcgtacggcttcgaccattgatcctccgtcaccaccggaatagtcgctcttctcggcaagtcaaggggtaacatcaaagccttcaaagtcaacttaaccacacctaagatacgaccccgttttatttcgtcgttttgaggatgaacaatgtcattttcattttcattttcatccacgtaaccaagtaacggtattgttgatgtcgttttgtcaaaaacattgtcgtttgttgagaaaaagaagtgagtggcagagactgaacagacgtataaaaagtaaatggcaaaaaaggaaacggcagtgaagagattgactctaccaaagatgaatatggctagaagtgaagagagagaaaaaagaaaaaacgtaacatctcttataaaactagttttatcaataatgacacgactaaaatgacgtcttttctcaatcaaaacactgatgacaccaaccaccacactcgaaacaaagaaagcgcctcctaaaacactgttgagtcccacgtcagcatctccagatttcgtaaaggagatgatgatggcgaagacatcgggggcaccgttgccaagagacaggagagtgattcccgcaatggtcggagagagtttaaggatgttggacaagctctctaaggagggacaaaagtaaacggccgcggtgttgcctaacaagtagagcaaaatgacaagccatagaaggagcaaggcttggcctagaagtgggaaacgaccgaagtgacaatagaagagtttgaggtagtttatgtagccctttggtctgcatgtgtcgttttttatgagtgtgtctagggtttcgaggtaagcgcattttgtggtgtagtttgtgaagtcgtggagggctgcacacgtgtctcttttgaggattgttgatgttgttgtgagatgaatggaaatggttttattggttttggttttggaaagaggattagttgatgattgttgatgattatcacgatcatggtattgatgagtagttttgatgagtaagaggattagggagaagaaggctattgttttgagtgttgatattattagaagagaaggcatgtttatttaatttgaacttataatgcattccatattctttcatcaaaatatatatttgatgattttttacacgtggagttaattttgatacattattcattttcaaatgatgattatatatattgtaacgtaaaagtgggagaaagtgaaaaaaaaaggtacgtatatatggaataggatggaatgaaagaagaataagaagaagaagagctttattaatttgatcgatcaatacaatggtgtttttcattgttgcttgaatttcactcaaaccataataatagtatagatttgaaaaagggttagtctttatagtatgtgtggtggttatgttaattatgtacctataataagtacaaaccaacgaagtttccctatgattaatataatacagttatttcagttgagtaattagtaaagctcatgatcgatggtttaaaataagagtacttaatctctctgtgctaatcaccgaatccggccaaaaaatattgcaaaaaaatgagaaagtggattatgatgatctcttagccaattcgtcgagtgaaaaatgctcaattcacaattaacattcaacatatatcactaacaacagaaaaaaagaagtaaaagccattatttggaatacttgtaatgagcattttgttgagggtgggacaaagtcaggcttcaatcaaattctttggtctcggttcaagcgattgctagtgtgacgaataggccgaccttcccttttggtcaagtggtgcatgaatgtaagcttttgctagtttctttgcatttcgttaaattatcatttgttaaacattcggtaaataaagtcgctccttgtattgcttgtgattcttgtttgtattcacatcatagttttaatttagaaaatgctctagttgaagcaattgattaataaaattaccattcactttgaaaaaaaaaacagtgaccattttgcttgccacctttattacatagaatatttattatggttttaggtaattttaagtgtttttaattgcatttctttacaccatattgttgtaaatttacaacatattcattaaactaaagttaaataagaagtgagatattataattggcaaaattttaaaattagagttgtttgtttcaataaattgtttacggagttttttgaaaatcaaattaaaagaaaattaagctaacaaaaatgtatttaataaaataaataagaagagattttttttaagtgattgcagcgttaatagatcttagtccacaagttctttgactatggagtatttactcctttctcgtacaagatttttccaacaataataatcctaaccctttgcattaagggttaggattataagcaaaatgttagatatctaggctaacccaaacttgttaggatttagtttttgctaaaaaaactcactggtagtgtaaatataatataatattagttatattgagccaggtaggtgagacccaatgttgagaatagtcgttgttcgtatatgaaggtattgttgataacgacgtttgagtttgagttgtcgtttattgagagagaatgtcagagtagtaggtattgatccaaaaaatatgcaccttttcgaaacttggtagaggagatgtcataggagtgtcacataggctggcctcctgaataccattcgttcctggacgtctcttcatcttctgctcccagatgacccctgagggcatccacttttgattcttggatagcttgcctgctaagcgtgagctcatatcccgggacccaaatggttggtttgtcttcgaatattgaaaaaagctaaatgacatatggtgcctaacactcttatgaggtgtaatattgttattggtgcaaactctatatcggatctcacttattctactttaataaatattataaaaaatcgataaccaattataggacgacactctataatatttcgactaactgggctaagtgatctttttacccacacttatctctaaataacaaagaacaatttttcttcttcttctttcataatttaataaataattaactatttttcaaaaaaataaaaataaataattaactaggtaaaatgaaaatggagattttaagtaaaaaataaaaaataattaggtaaaaaaattaaagaattaattaattagcaataagctttgaaataaataaataaattaataattaggtaagagaagagtaataataacagaaaaccaaaacggataaacttactcacagagtttccatagccatacccattagccactcagaccaagcttgaagaagaagaagaagcaaaatgcaagcaccaaaccctactacccttacttacactcacaaacctcaccttcatcttcaacctctccctttccacttccctctctccccaatttcaattccatgtcgccgtctccccaattccactctccgtctcaagtctcactctttcttctctctccttctctctcaaaacaatagcactccctctcgcttcgcctgcagagctctacccgaaccattttccatcaaaatccccgtcggcgatagacatgtatgtgtatgctctcactctcacttgttctcttcattatgtgtttgtttgtttgtttgtataactcagaattacttgttccagattttggttgagactggacatattggtagacaagctagcgcttctgttacagccactgatggtgaaactgtaagtaaaaaagttgctgttttttgttgtaaagtttttggcttttgggtaaatgccattttccaggcttggtttttatgtatgaaagggatagattatattagggtctaataacacttataataacgatgagtatgatcatgttcaggagttcaacttaggaacatagggtggtttggttgggagtaatgaaaataaatgaaaaggaataagaattgaagttgatatttttatttgtgtattggaatgacaaaagtagtggaaatgccattccattgcaatgctttataaagcaaccaaacaaagaaatggaatggaaatgtcatagttgtggttttcaattattgtgatgatgacaccaaatagtagaccattactcaatcgtccgctttctgtttttcaaaaatatgtacggtgattctgcattcacaagggtctacttttaactcaatttttaaatttgaatatgaaaaattgatcttttatcaagcaactcaccacatatttaaaatgtttttcaattgatcgggtctggtcaactatcctggttttatgttgcttgcattgcatcccaatcccatcatacaatgtgccctgatgtaccagtatcttgcttgtgaattttaacagtttgttagatagcctaattcataaaattgaaagacagaatatggttgcatggaattgaaagcttcctaatgtgaagacataaaacatttttattttccttccagattgtctacacctctgtttgtttggctgatactccaagtgaaccttcagacttttttcctctttctgtattttatcaagagcgtttttcagcagcaggtcgaactaggtatcagttttgactttcttctactctgcttcttataacttttgtgcacttgtttcttgagttgacactttcatggtcatggtattactgtgacagtggagggtttttcaaaagagaaggaaggacaaaagatcacgaggtaatatttttttagtctaaaaaattcttgttccatttttttaaaggagtcttggtttttttaacctaaattacttattgttttattcactcttcctatataattattacaatagtttttattttctttttttttctgttgcatgcaggttctgatctgtagattgattgataggcctttgcgtccgacaatgctgaaaggcttctaccatgaaactcagatactttcttgggtgcgttaacatttacttttagttattgcaacaaatatatgcacatagcatgtattattacaagtatttgtttattacagagaaagagaaaagggaacaaattacacaaacaaactaggtattaagtctctatgaaaagcccgacggcttgctacttcctgctactctatgctttttatttgttaagaactatttaacacttattttctgaacaggtcagtatgttagagctgtttttctacattaatgttttgcatttcctggaaatttcattatcttcctatggatgcaggttctgagttatgatggtttgcactctccagatgctttggcaatcacagctgcaggaatagcagtgtaatttttttattattatttattattttatcacgtgcttccactttgatatcacatttagaacttgttagagtagcacatcctttagcctgattataaattttacagcgctttatcggaagtaccaaatgcaaagactattgctggagttcgaattggccttgttggagataagtttatcatcaatccaacaacaaaggagatggaggactccaagttggacttgttgttagcaggcacagatgatgcaatattaatgatagaggtagagacttgtactgcaaatcagcttgtattaaccgattgcatttctttttagcaggacacttatcaactaacttaatattttcataaattgattgtattgattatatatgctgagctggaatgtcatctagtagtaggaactttctcctacatagtagcttgtttgggatttagtttttatttgacttgttcattctcttttgcactcaagcttgcgacaccatgattagtatactacttaaaggtcatgaatatttacttactactgttgagtttaaaaacaaaatttgaggttaatttgtgactagattatcgttatctttcttttcctcttatattgtatgtgcatatattttatagacacataggtcacttgagacatttgatggtcttagatatggaatttggtgtatgtgcctaaatttgattgatacttattataaagagactgaatatactatgtttgtaatcgtgtaaaccactacagaaagtagaatatattttttgaggtgaactgaatttccacatgtgaacttcaatcttatttccttcgctcctgtctaaccaagaataggaaaagaaaagattgatatttttgattagtaagatgcactcacatttgaatcattgctatttctgctggctgttcataattttctggtgatgatttatccttttcccttatcattatctactatggttgcagggttactgtgattttcttcccgaggaaaagttactggaagctgtacaaattgggcaggttgttaacttcatttgagtatgtagctgtatgctggcatgttttttatttatttatttttaaacaattaattatgtgatcccacactatgcatgtgtttggaaatgtttgcagaacaatttgtttgtcttttttttttcgattgtaattagtgcaagaagtaaattggttatggttgatatgcaaatcagtattaaagcatttggcatatcttttatttagcaatagttgtagcaatgtattgtcacatgcaattcaatcttgaaaattcttgaaaattttaagtacatcatttcctcattttgtatggtcgtcaatttgtcacccatgtcactcctgctagttgtgtggaacatatttgaagtgaatttcatcatggtccatgtagttagttattaaaagatttcgcgatgataaaaatgtttcttttatttttaatctttggatatcaggatgctgtacgaggaatctgcaacgaggtggagtctttggttaagaagtgtgggaaaccaaaaatgtttgatgcaatcaaattgcctcctcctgagctctataagcatgttgaagtatgtactttcaatcaatgttggaataacttctttttaatagctatatacaaggactatttgtattgtactcatttgaaagaacctcaacccaaacatactagatgatgcaaatatttaagctatattttataacaataattatcatgcagaaaatgttgatcagaagagtgtgtattttgtgcaggatattatcggcaatgagttagtgcaggtcttgcagattaggagcaaaatacctagaaaaaaagccctgactttgcttgaagataaagttatagatatactgagcgaaaaagggtacattagctctgatacaacacctgtagttaatgaaacaatatctgatttgcttgaggatgaagatgaggatgaggaagtggttgtagatggtgaagtggacgaaggggatgttcatataaagcctacttcacgaaaaactactccattggtatggaagaactctacttttatctgtacatacaatttctattgatagcatcttgaattgctgtataatattctctaactatcattctgctgcggaaacgttactgtctattttctagctgttctcagaagtagatgtgaagctagtatttaaagaagttacatccaagtatctgcgcagatgcattgttgaggtatggatatttgtttgcaaagagaagtgcctctgactaaatgtcaccatttatccttttctgtaatttttaggacattttgttctatatgcttgtgcacttcttattcttacttgattattacattatataattatgtagttacatagacatataattttaattccttgtccatgtaacataaactgaaactagaagaacaccaacagaagcatagaaatgggttatgtctttatttatttgttacttgtgtgtttcttcacagaatggaagaagaagtgatggccgaactctagaagaaatacgcccaataaattcaagatgtggcctacttccaagagcacatgggagtgctctttttacacgtggtgaaactcaggtctaagggagtttaatttttgttaaacacgggttatatactacctgattgagtgtttgttttcatttatgtacatggattggtcttcctagaatccaaattttttcccatccacgcctgtttttttcctcattccagtacttatacttgtgcatattatgttgttaagtgaggtttgtcattattactataaccttttcctctgttgcttctattttgtcatattttcatcagttctttgtggatgtttcagtccttagccgtggctacacttggcgatcgtcaaatggcacagagaatagacaaccttgttggtgtagatgactggaagaggttctatctccaggtcattgtggattttattttattttattttttcctttttataattgtttgctacaattattaccatgtaacctttttaatatatttagaactcactatctttatttcttcttcttttagtacacgtttcctccttcttgtgttggggaagttgggcggattggtggtcctagtagacgagaaattggtcatggaatgcttgcagagagagctcttgaaccagtattgccttctgaagatgattttccttatactgtacgagttgagagtaccatcaccgagagcaatggctcctcaaggtctccttcgatccaatttcgtcaataaaagcttgcaattcttttttaattagattatgtaattcattaatttgggatacctttgaataagattttcattcttccactgagtgtaatagtaatgtatgtaattcccttaaaagagtgttaaagcagactacttaataccatacttttacttctgtaatagcatggcatcagtttgcggtggttgcttagcgttgcaggatgctggggttccaattaaatcccacatagctggcatagcaatgggtatggttctggatactaaggaatttgggggcgatggtagtccgattattctatctgacataactggatccgaagatgcctccggagatatggactttaaggtattgctgaaatctctagtgaacttgtatcctctatgtttaaagttaaactcattggaaaatgttcaaataaattcaagtttataaagcatgtggctgttagtaggctccaaactttacaagtggaatgtagcaaataattcaacgattacaggtcgcaggaaatgaagatggtgtaactgcatttcagatggacataaaggttagttagtctacatccatcctatattgttcttttccaacattttctcaatattaaagcctaatatgttcaattttgatgtattctttactagtcacacatatgtaatagcaagaattaatccatgaccacaatttctaggtggctggaattactttacccattatgagaaaggcacttctacaagcaaaggatggccggaagcatatccttggtaactatacaaagatgcatactaactagtgatgaaactttctcaaatttcatattgcagtattttttactatagctctaaaaattgtgcaccaaatttccagttcttatatgattgagtgtgtgtacacgaactaatgcagctgaaatgttgaagtgctcacctcctccatccagagcgctttcaaagcatgccccattgattcatgtcatgaaggtctgttaatgtttggagccatatatattgcttgctcctatgcttagaaatgatggttggcaacagtattctgattcctgttttcatcttgtttgacgacaggtcagatctgagaagattcatgtaatcattggtagtggcgggaagaaga

SEQ ID NO: 58369 - DNA, 691 bp, Cannabis sativa
cttttggtgttaagactattggggaaattttatatttatgggtttatttgttaatggaaaaagtttacaaaaaataaatatggcttttttttcttagaaaaatttattttataaaacacactcaaaaatttatgagaaaaacaatttaagtaactagaagataactggtaaccagttaaatggccattaaataacattttctttgagaaaaatgtcatattcttttttacaaattaatgtataaaaatgtcaatttctttaaataaagatttcactttatattaacatatgttattttgttagaaaatttacataatacacttaaaactatactttttttacatttttacgaattttctttttacatttttacgaattcttttttatagtttttatttcactgaaaaatgttggtttttttacgttgcttacccgtagcaacaacgttaaaacaacaatgttctgaaataatcgaaaaacaataatctttgtagttgtaaaaacaaattatgttatttttaagtagcaataatattttttcaaaaacaacaaaaaacaacactccgtatttctgttaaaaaaaatccttaaaaatataaaattatttgtttattttatatatttatgaaattatcccaattttgttctatacatagtcttatggatatttttctttggttatgtttagtgg

SEQ ID NO: 58370 - DNA, 637 bp, Cannabis sativa
ttttcttttttattttgataaaatggtttaggctaaatctacaatacattctttaaagaagtattttggtagattttttatctatttcggcaattatgagagcattttagtctattttttttttattatgtatgttataactatttaaaatcacatgtaaattttcaaaaaaattcaaataatttacatattttattgcatatgctactatttttcttatatgtgtggtaagtaacagtttaaaatttattttcggtagtataaactattcaaaattttttgaaaaatttacaagtagtcttaaatagctataacgcatgcaattatcagggccaatcctaagtaataatgggtccaacaatttgttttgtgtgtactatctctagagtaaaatatgagtattattaagtatctttttacaaaattttacaaaaatatcaattttgttttaatataaaaaagtatacagtatataaattttgagttctgaattatggtagtcttaagtacgggcttagctcaccttagtctaagatcaggtccggcaatcataaaaaaaataaactaaaaaattctcttaaatttcgaaatacataacaaatctcccaaaataaattttgagagttgtacaagagaa

SEQ ID NO: 58371 - DNA, 545 bp, Cannabis sativa
tctcaaacttgcactagatatacacttcaaatgtagtgtttctatcctacgcgggactcctactcacacacttcacttttctatttttacataatttcatacaaagttccaacaattcctccctctgagatcttgtacatttggttcaaaactatttttaggcttagatagaaagatcgtttggaatggttcttttccaaattagtctttgtaattgtaacctatttttattgctctttctttattgattactttacattaaaaaaaaaaagaaagtgaactaaaatagctcaaaatttaatattagtgttgctcctactctttaaacaatattttaataatttctcacttttctagttctatttttttcatttaatatatttaacttttttgtttgtataattaaaatatattataataaatataatatttaaatgctttagagaaataaataggttatgtgtggtattgttgcttggaattttttctaaaatagcaattcaagagtaaaacatgtgtcaatgggacatgataagtgtataaaa

SEQ ID NO: 58372 - DNA, 1753 bp, Cannabis sativa
  modified_base (1714)..(1721): a, c, t, g, unknown or other
ttgaactgtacaaaagaaaagacaacaaatttctctcaactaaaattaaatattctaaaaagaaacaaagtaaatttaatttttttttttactaatttcatttttaaatttataattattcaaacaacacattctcaccgtcttcaacctctgccatttctcctccaccaccaccgtcgacgtcggcgatgtcttcttcaagccaccgttctccaggattacagtcaactttatgccgaagtttccaatcgagcgcttgacatccacgcgagcagtaattaaccttcccacacactgagcaccttcgaaactcgtgcgaccgtgtctctggtcgaccgcacccgccatgggcgcagagtctgagcttctctcccacctcgtcgcgggctggctcgaaccactctttcaggaaccagttcgccggatggagctctctctccggcatgatgcagccgaaatcgctcaggagcgagcaaccgaccggctctggtggagataagcaccggcggtagtaattggacatccacatcggagaacggagaccagcggcgagctcgcgctcgttcgcctgaacaaggaggcggcatccctctgcaacgttttgccttgttccgtaaccgtcttggaggcaatgaccgagctcgcgtagtgcgtcgatttgatatttaagattggaaaaatgatacttttatctaattaaatctaacgatttgtttcattctcttccccgaatttttagcataattagttatttttggaatatgaacggaatatgtgtttttttttcaataaaataatataaattaattgggaatattctgttaaagttaacggaggaaacaaaacaagatcgttaaaccaagaattggcgttagataggcacttttaatatataaagaaatatatatttttgcataggatttttctaaggtagagaatttaaaaaatatcctttttatatcatttaatagtttgttctaattgggcaattgtattgtaacatatacatgatcttgaatgcaacatattcaaactaggattgattaaaatcttttatcttacttaaaaaaataattcaatattagcaatcattaaatgcagccagccaagaattgtcttattcaaaagaataattcaatattagcaatcattaaatataaccaaggaacaagtcattataatgtcaacctcagctcttatggattgtcattagacattcatattgaatattaaaataaagaatcggactccataaacataaaggaagataatttttttcgaaacagctgaagatgaacccaaaaaaaatactaacattatcagtaattgttcttgtttgttttctcttataaacagaaaatcatatggacaaaatgttgaattgaacgtttgataaagaagaatatgagtcttttgcaggtttacaaatttcaaaaaaatctcaatttttaaatttgatcgatttgaattttttattttcatttgaatttttcttacttttttagtttttttttttttgtttacaatctaaatctcaatcaacttggctttaaacaagtttttgttggttaacaatttttagtgtcttaaataataataataataattataataattattattattattattcatgctcaaaaatatagaagaaacaaccctaataatagataagctaattttgtcacttctatatatatatatatctattctnnnnnnnntgtgcctatataactgaaattcttggtttatg

SEQ ID NO: 58373 - DNA, 869 bp, Cannabis sativa
  modified_base (392)..(392): a, c, t, g, unknown or other
attcctctgtccactcaaattgcttattttttcgcaggatgttgaagaatggaacacacttgtctgttgattttgagacaaatctgctcagtgcgacgatccgaccagttaaacattgtacttccttggttcttgtcgacgatttcatatcaaggagggcttgaattttctctggattggctttaattcctcgggcatggacatcaaagcccagaaactttcccgagctgactccgaaggagcactttaagggatttagtttaatgttgtacttccttcggactttgaagcattcattcaggtcatctatgtgccccccagccttcgtgtatttgacgagcatgtcatccgcatatacttccatattttgtctgatctggtctttaaacatnttgtttaccaatctttggtatgtggctccagcgtttttgagaccaaatgtcatgactttatagcaatatagacccatgtctgctcgaaaacttgtatgttcttggtccgatggatgcattttgatttgattgtaccttgaataagcgtccatgaagcttaatattttgtgctcaactgttgcgtccacaagctgatcgattcttggcagtggaaaacactgtttagggcatgccttattgaggtgcgtgaactcaatacaaacttgccattttttgttcggcttaggtaccagtacgggattagcaacccacgccgggtagaaagcttcaattatgaagttgttatttctcagcttctctacctctgccttcaatccgggtagcaaccctccttgtccaacaaccttctcttttgttgaactggtcggaagttgggatcaatatttaggacacgtgaaattacagaaggatcaattc

SEQ ID NO: 58374 - DNA, 1711 bp, Cannabis sativa
aacataaacaaaaggaaaaatatctattcaattttttgtttcaataccgttcaaacttaatagatcaaattttaaaaatctaagtcaacagaacgaagagtgagcaccagtatcgaaatatagtgtatctacctccccaattctcaaaaaaaaaaaggtaagcgacaatgagatactcatatcacaaagctcaaaatcagacattattggaaatcaaatttgacacagacaccattaaattctaacagataaaagaaaaaacaaaaacaaatatggaaagaatacagaaacagaaccatcaccgacaaaaagatttaaaaaagataactccattctccaatctgattaagcaaaacatcacgaaatccaaaatcatgcgttcagaaaacaccaaacaaaaaaaaaaaaagcattgaacaatcaataatatttttcttcactatttgtttttaatcaaaatcttatcatatacaccaacagtaagcgaaaattacgaaatgcagaagaaatcagctcaccagagaagaaaaaagaaattaaatagctagggaaaagctggagtgataagaggtagtgaaactgtagtagtgagagagacgaaaactgagttctcttcagagattcaacaatggagatcccagattacgaagatttatttcttcaccttcaagtttcgattaaaagaaataaaaataaaaaaaaataaaaaagaaagagatagaaataaagatagagagatgaagaagaagaagccggaggagcgggagtcagtggtgccggtgggtaaggcttgagtgaaaaaatattcggacttaggtgtcacttaaaagggaaggacgttcgaaattatataataaaataaatattattttttttaaaaaaaaaaaaataataaatataattacttaaaaaataataaatataattactttcctttttctaaatataattactttcctttttcttttttatttcttatttatttattttttgggtgtgtgcttgtaattaaataagaatctgggatatttattaagagagaagagaagatggagtcagaggaaatgacgaatatgtccctaaaaaatatattataatttttttttttacgcttgtgggtgaagcaaaagaagaggaagagaaaatgagatgaggtgatgagctgtatccgataattaaaaaaaaaaaaaaaagtggtaatggtagtaatgaatggggtattttgttttgttttgtttttattgttttatttaattttttttatggtttggtttggttaaattacgaatttagacatttgattggaccacaccgtcgtcgtcgtcgtctcctcacctcaaggcttccagctcatcacttgacttgcttcgctggcttggctaatgtaaattggctactataaaagtactacacacactattatactgctaactctgccattgcggctattttcttctccactcactccattgtctctgctcctcactttcctttcttattattacttttaataatcttttttacactacagtaaaatctactctatataagtataatactatcttttggtagagtagagataggtggcagacatgaaaaaaatggcaacagaattatagggaaaaaaacaacaaaataaaatttgttaaatataatataataattattccttaaaaagttataaatatttaccatcgaaataacaattttg

SEQ ID NO: 58375 - DNA, 1010 bp, Cannabis sativa
ccctttaagttccaaactttatcctttattacctcaaaaatctctttttttttttcctgcctatgtaacttggcagccccaaatagattgcatgattaggaacccatcggaccccaagtgtgttggcaagttgttgtcctacttgctttgatatcctttttcccgtactcacttcggacttctcaagatttattttctgccccgaaagcctttcatattgctggaaaatctgcttcatggtcttacattcggcctccttcccttcaaagaaaacaaagctatcgtccgcaaagaaaaggtgcgaaacggtaacatcattccttccaaatcttacccctgtcactgttccagccctctcggcttcctggattaagcaagataatccctccgaacaaataagaaagaggtatggggagagagagtcaccttggcggaggccccgagaaggatggaatttcccaattctttcaccatttattaagaccgaaaaggatacactagtaacgcacctcataattttctcaatccacctttcatcatatcccaatccatgcatcatagtcataaggaagctccactcaacccgatcgtatgctttggacatgtctaactttagggccattttctttccattaccaaatcgtttcaacttcatactatgaaggctttcataaccgatgatagcattgtcttggatcaatcttcctccgataaaagcactttgaacctcagaaatagcttgatgaagactatgtttcatacgccccgctaaacactttgccacgatcttgtagaccacattgcataaacttatcgggcgaaattctgacatttggactggttttggaagtttcggtatgaggcaaattaatgtgtcattgatggcttcagcactctttccttcatttagaattcccaagcaaaccgtagtaacttcgtctccaataatcggccagaacttcctataaaacaggcccggcattccatcattgcccggggctttgtgtgga

SEQ ID NO: 58376 - DNA, 2085 bp, Cannabis sativa
aaaaggttaaaaattaatgagcttttgttgggaaggagaagaatgagagagataagaccaacgtctctcaattaatgatccctattaaatggacttttgcaatgaccaaggcagcttataaaaaaaaaaaaaattaacaaaattgggcccttttcttgtgtgggctctgtgcagtaggtatgcctgcacaccattagggccgggcctgtttaaaaccataaaatgaaagtttacatgtaaaaaatttactttcaaaatatcactagtcattttatacaacctaagcagaaaaattagaatttttatacaattccctgttggacccaactctcatggtctaacttggttagaacatgtacaattcatcttcaaaactctcaaactcatggccgaaccaacattgatttactattgcctgcacattagagcacctgtgagtcaagacccaacaaaataaaataataatatagtatgaataattataataattacatttcatacattacacctctgcgtatacaattgtgccatagtactgtttatcacattatttcatatataatgatgccactgcatttaatgtctatatatcatagacccacatgttacactcacacgtctctttttacatataataaggccttcttaatagagtttatcttagttttagttatcgtgtctaacttaattatgccttgatcgcataactcttatcatacatgcataattcatacattcttcacaaggatttatcctgatagtgcttatcaggcctaatctagttatatcttacacacacacacaactcttgacatatatgcacacaattcatttaacacatactcaaacatagaaacttttagggtaatagccctaactcgtttaaccatactcatttattcacattacatattattgcatattatgacaacacatatttaggataataaccccaattttacaatatttgtacttaaggtaataatcctaattcacgatagatatacttggggtaataacccttaacttgcaatatatatacttagggtaataatcctaattcacgatttcacaatagcaatcaaaatacatataactgcgtcattgtgctatactctatgtgcttaatttattgtcttacctcatttctaatgtataaggagaaatctcaattcctagtcacaatttatggatttcacacaatagggttagtgttaaatgctattttaaaatattcacatttaagattccaatattagaccaaataatagagcccagaacaagcttttcaacgatatataaaatatccaaaatgaagttcagagtgaaaagttatgctcaaaataaaataacaaaaattgaactgtcgctacatggtggttgcgaccatttatcattgcaaccagacccatgctctccaagactagattaggcaagggcttacccctgtttctggataaaaccgctgtggcgactataggtctggctacggggcttataacccaaaaaatactaatttactaaatttaaatattttccaaatcacaccaaacttcatcgaactacaaaaagtttatttctaaactatttctaagtataaacaagcttaaatttaacgaaataacacatgctctcatccatacatacaataaagctataattctactaaaatctcatatccaagctgaagagcataaatacaattatgctcaaatactaacaagaatacaaccatcaattcaagtaaaatttaacctatagttcagatttataatcaaaaatagcaacatagcaagcaatctcctaacttccacatgatatttcaacacacaaacatcaattactttcaacatgcatataaattcaagaaccaatttttctagcataaaaacccactgaattcaaacatcttaagaaagactcacaatagctgagatgttgctccaagcttattctagaaataaaactaattccttctttaattttcaagtttttgttggatattattttacgaggatcttagatctactcacaagtattgtttaacaccctaaatatgacctttctaaaacgataaaataaaca

SEQ ID NO: 58377 - DNA, 1327 bp, Cannabis sativa
tcatcatgggaaacaacattattgaggtcgcccatcacgcaccatggaagagaagatcgctgcttcaagtcacgcagcaagtcccaagtttcctgcctccttcctctattcggctgcccatacatcccagtgaacctccaaggaggtttaccctccactttaacctccacatcaataaaagaagaggaaaatcccaacaaagaaacctcctcatcaaaacgccaaagcaaagcaagtcccccacttctcccattaacatctacaacaatcaaaccttcaaacccaagagcagctcgagctctttccatttggtctctacggcaaagagtctcacaaaggaaaacataattgggcttcttttggataaccaaatccttaaggaattgtaaagcccatgggttcccaagcccatggcaattccaagacaaaatgctcataataattggtgggcctggtaaccagagcccacctgtaaaccattttttgacacagcttctttctcttgactaccattatcagccttcccttctttcggcccagcctccaagcccatctctctacatcttcttttcccatcagcaaccattaatatttcctcattaataggaatatcaactaactgctcattttgctcctgaatgttaggagaggaatccacaaacatctccttagcaacagccaaagatctctccccttgattctttccatatgcatttactgtattatcaccccgcataatttcctccgtgatcatggggacgtgaacagctgggagatttgaatcgcccactccaggttgtcctctgtcgccgttagcttcatcggaagtcaccatgaactgccgcagccacttcgaaccaatggtgtgattacgacgtcttggcttcactctcattccttctccataaggacgaaccaccctaccatctggggtatcaaaaagcctttcacaattacgatcagaatgacccagaattccacatatgaaacaaaaagttgggacatgttcatatttgaaatttgtgtaaaactccaccccctcgtcattacgaagcttcaaccgccttttcagaggcctgttgacattgagagtaactcgtactcgtagataattacgccacattcccataaagttcttcggatccgactcaacaaacttaccgatcctattagctatgtctctagccactgttgcagacataaatcctgattgtaaatcgtgcaactgaacccacatgtcaacttcatcaagcttcacttctcttggattctcaccccgtttcaaccgtttaaacaccagcaagaagttgttaaacgtccaaggact

SEQ ID NO: 58378 - DNA, 981 bp, Cannabis sativa
aacgtcaaatctcggacccaaactaacacttggaccctggacccgaacttgggtccagggtctggctctagggtttggggcttggtttggagatttgggtcgggctcgggctcgaagtctggatccaagtcctggatcccggatcctgacctcagacttgtacccgagactctttgtaaagattatatacaagctaatacaagtcatttgttatgtattaaacagtacgactcacattgtattaaaataataattaatacaatattttattcaaacatagttttatatattattgaatataatactactcttataacttactaaaccagttcctaaaattcttgtttgttatggtcgttacttctgctagacatcttttgactctttaattcgttatttcccgatgtatgaactaatgaggctatgcctatataaaattcatttgtaacgaagacaaacactagtaaatataagttgggatacagagccaagttagatataagtttttaagtcaagcattgaactttggttttttgaagcacacctttatgtaactttctttgtttaagacaagactctcatattgattcatcatttgagttttgtcttgaaagtgtatatgaaacatcaaacaagttctgatgaaaaaataacatacatagtactagtgaatatttttagaaatgaaatttgtttgttcagttggtcttactcacacactcactgttacttatcttatgatgggccgggctccgtctaggcctttcttacttgggccgggcctagatttgacacaggatgagattatgtgggtgggttcagtgtaataaatgtatgtttgggtttggttcatctgcctcttgtcgcttcagcttaattctttaggaaccaggaagaggaagtccttaattctttaatttgtttttacctgtaatagcaggttattaataggtagacattcttttttagaattaattaatt

SEQ ID NO: 58379 - DNA, 1724 bp, Cannabis sativa
aatatatacatgtgtatattttgacatataataccggtcaagcatataaaaaaatataattatacatttacaagaataacataaaataataacttatttgataaaatttatattttttcaaaaatattaaatgacggaaacataacattaactattttataaaaacaaccgacataatacatatccatatcgtaataagttaattattttattacatcacatgaggtgatatctcctttatgactatatattgatagaattaatggacattatgtcaaaaatagattaattattaaaaaattaatattagtaaaatttatatatcttaactattatatattaaaaataatataatatattttacatatcacttagataaaaattaattaacttgaaaaataataattattaaagattgcgtgaagcacaaattcattccctagtgttgagatttgtttagagagaaacagaagcaagaaaatagaagtaatgaaaagaatcaagctcgacctcaaacagaggaagagaagctttatttatagtagaatgaaatgaggagttacaaagagagagttagttaaaactaacttaacagaaaaactgttaaaacagttattacaacagtactgtaacagacaaaggacaaaaatgtcctaacacccccctcaagttacactgggactcctaagtgttaacttggatctgaaattttcgaactgtgatatgggcagaggctttgtaagaagatctgccatctggtgttttgctgaaatgtgtcgtatgtcaagttgtttagcaagcacccaatctctaataaaatgaagatcaacttctatatgtttcgtacgagcgtggaacaccgaattggatgcaagacaagtggccccaagattatcacaccagagaacaggggacggtagattaatcaagcctatttcagtaaacaaagactgtaaccaaatgagctctgtagtagcaagagcaatggctctatacttggattcggtactagagcgagcaaccacagtttgcttgcgagaacaccagtgaatgagattgtttccaaggaacacacaatatccataggtggattttcgatcatcaaatgagctggcccaatcagcatcagagtatgcaacaagttgaagcttggcagagggcttgaagtgaaggccaagatcacaggttcctgctaagtaacgaagaattcgtttgcaagcaagccagtgttcagatgttggagcttttagaaattgagataacttgttgacggcaaatgaaatatctggtctggacatggttagatactgtaaagctccaataacgcttctgtataaagatggatcagagagaggagttccacttgttatagacagcttggtaccatgaaccatgggagtagaagtaggagtggcatcagtcatattggtggaactaagcaagtctcttatctatttggattgagtgagatatatccctgttgagtttcgagtgacttcgaacccgagaaagtaactaacaggacccaagttctttaaagcaaactgtgcattcaagtcagtaatgactttgttgatgaaacttgtatcttcgcctgtgatgagaatgtcatcaacatatacaagcagaagtaagagcttgttgtgtcgtcttgtaaaaaatagagacgtgtcagccttggagttctgaaatcccaactgaattaagtgtgttttgagcttgtt

SEQ ID NO: 58380 - DNA, 862 bp, Cannabis sativa
ttgtatcactttcaaataacatagaaaaaaattagcataaatttagtatacgtgactcgcacgtagttttttactagtataaatatgtatatataaactttctcaacttttttctgtttcttctaaattttgcaatattaaaatcttttagttacaactttgaaatttacagtaagttacgatagtggtggtaaaaagatcacaaaaagatttcctgagaaataattttaattacatcctaattagctgtaataacaaacttaacaaaattacaacaattggctaaagataaattaataaaaactaacaaattaaagatagttaaattactggaaacctatgatgacaaactaacaaagactgccgaattattctttaacactctttgttgaaaactcttgtaaaaatgcttgataagtagacatattgtttagatgttttatatctcaaaaatattatattaaataaacgaaattgaaatgtgttaatacaaatgagaaagaaagtttaaatgttcaaaaagaaaatataatacataattactaaaaagaagaggaagaagaaaaacatttgcagcaaaagtatatggttattttattttcttttattttttttgacaaatatatggttattgtattagtttttcaggaaaataacatttttctttcactttcctaactctcaagtgtgggttgattgacagtaagtttttgggcaaaattcgtattccagttgatgggcctatataaagatgatatggctaattcatgacatatataattgtaattgggggtaagttgaaaaatgcctcttttattaatcaattaaccaaatttgcctctagttttatatttatttgaaa

SEQ ID NO: 58381 - DNA, 1123 bp, Cannabis sativa
  modified_base (60)..(64): a, c, t, g, unknown or other
  modified_base (179)..(182): a, c, t, g, unknown or other
  modified_base (269)..(272): a, c, t, g, unknown or other
ttacctattcataacctgctattataggttaaaaaatgtaactatatggttacaataaannnnnaaccattgaatagtcacccaataatacatatatattttttaataatgaacaataaacatttaaaataatatattaattgtaattgaacacatataataataatagtaataataannnnaataataataataataatagaaagtagataaatattttttaaaatctaaagaatacttaatactatattatataataataataatannnntaataataataataatatagtattgattattctttaaattttctttaaaaaaagtactatctatataacaatataaaacattagcaatttttaaaacactgcatcataatagtgttagacaccttcatacctcccaacaatgctctaattttataaaatattaactaaccctctttaaaaagaatgaagtccaaaattaaaaataaaaaggagttttacactacatactgaaattttaactttttttcttttttattgtaaggcggattttttttttttcaaaaatattatgtaaattttagactgtgtactttgttaagtttttattgttattccacggttgttttttggttgttctactattgtttttaattgttatattttgttattttacggttgttttattacatgcatacaaaataaaaagttaaataaataagtaaactgataaaattttattacatgcatatacttcattatgatggaatttattttctttatcagataaatggtttgatttactatcctatgctatacggacaaaataggacgtcctactttaaatattccctataaatatataaatataaggtaagattatagtagatctaacaaaaattttctatcggctaaaattgtaaacaaattattttctaaacttttcttttataaaattaataagatttatttttatactgtaacgccttaatgttaagacacgttacagtgcttaatattttgtagcatgccttgtacatgtcatggcggcgcgacctggagtgttcggtctcgggacatctgggctttaatattttgtagtctctgtgcgacctggttatgtattttgtata

SEQ ID NO: 58382 - DNA, 1017 bp, Cannabis sativa
  modified_base (382)..(383): a, c, t, g, unknown or other
tttgtttgttccaccacctcccacaagatacgagcatctttactcagcatgtatgatgcacacttcactcggtcattcccatcaacctttagcatttgtaaaatgctttctatacgactcatccactcttcagccaccactgagtctttgcctccctcaaactcaggtgggtgtgaaatctctctactaacatctcatgtctagcctctgtagaaggatataccaccgcagctggtggttctctattttttggctctgacggccttatttgaactggcgactccggttgacgtctcagctgacgaagttcttcattctgcctacgaatggttccttccaatacggcaaggcgctcttcccatccctgtggtgcttgaggtgnntcattgatccctccatcatcttggcctctatctcagccttggccttgacctcgacctcgacctcgacccaatctgactgaccttccaggaggcatttctaaactcctgaaccacacagaccaaaacacatcaagaaagatcattttgatcaacaaatttacatgaaaaggatattgcactctcgcgtgcagaatttaaaggcaacttaattataagtaataaccacttacagtacagtgagtcaagctcgtctcatggcggtaaactttacatgttagggctaaccacattctttaagaccgtgttgctctgataccatattgtaacaccctgatttcccgagatgtgacacaggatagtccgtataaaacaattgaataagataaagacaataaaatacttctttattgaaaaatatctaagcatgagatctcactgtttaaaacaaaaatatttttagtactgtaaacttaaataagaactagttaaatcaaaataacggatccacaatgtttaacatttaaaaactttaaaagaaatactgtgccagccccctaacatgcagtccacgcctcgagctctttagtctcactgcttagccttaccctttcctgcacacagagtacccataagc

SEQ ID NO: 58383 - DNA, 1126 bp, Cannabis sativa
atgttttgcacccgatgtttgcctttgtgaatcgctgggttccttttggcagacatcctgagggggcctctttccagcagataggggacccccattcccctttttgactttagggtttgatgtggggggctaactggtggatttttgttattttagatgagtgaagtccttcgagaccttcacatgcacgatttctttaggtttgaccaagaaatcttcaatcttcatcaagtccattccatgtctacccctgtggccatcagaaggaaatcttcgaaaaaggggccaaagaagttggccaccttggaggacgtcatgaagggccctatcatctacaagaagtttgcatgttattccaccggttgggaggctgacgaactgcactcaacgtcgacctgcacccatcaactggagaagattgtcaccattgtggggataaaaccctccagttccgaagtttaacatcgccttcccagggatgaggagatgccaaaccacaactataacgactttggggcatggagttagactcatctgatgtccggagccatgcttcccctctaggactatttcatcgagttgtttatctttgtcaaactttcaccctaccaactgatttcgcaagcctaccgcctgttgtcaggcttgtttattttttatgtagccaagaactgggctccgcccagtcctacaaaaattttgtacttttacaaacttctgaaggggacaaatttaaagatggcttttataaacttcagacccatccagccaatgatactccggtaacctttaacttctaaaagaatgtaaaggtgtatcgtcacagattcttcttatcctccaggttcaaagcctttgagcgtccagacctgctaacggactgggtcagaattccctccatgcaccgtaccggccccacccaacttttcttgaaccatgcgtaagtgtttgtcggttatgggaaggaagatttgaacgtgggagaccttgtcacgacagttaactgtaggagggccaagttgatcttggagagtcaatcgttgatgacttcaacttgtccaaagtgctctgccccaacgtctgaaatcttgggagtgagaaagcgctcagggaagatatcttgtcc

SEQ ID NO: 58384 - DNA, 1394 bp, Cannabis sativa
  modified_base (918)..(919): a, c, t, g, unknown or other
aggtagctcagtactttaacaagcaagtgaacgcacagaaattctttatgggagatatggtcctcataagggtattcttgaacaccaaagacagtacgacaggttttctggccgtggaagtagaaatccaattttctctcaccacgtttgacggttacacttgattgcttttgatttctaatattcacttttgggggaaccgaggcatctgaggtttctaaaatgattaccctttttcgttgtgttacctataaatactaccgagcatttttttacaaaatcattttcaccaaccttcattgttaagcaagtttagagcaaaaagagagatttttagcttcaagcttcttggaaaactttcacaagaactattcgttcagctttgcgtaaactgaatccagatgttaatccttgagtaagttctcgatttcttttacttttacacatttactttctgaatgcgatcttaactttgttgtagaagatatgtagaaaactctaggtttagaaactttacgattttcctttgtaacgattcatgcgtcttcaccattcataatgcttgctttttgaactgcacaatgtctgtctttcattttgcttatccaaagcttcatgaaatttttgccctaactcacaaaaatttcaaacttctgagttttgacttttcgtcgaatatttttattctttaatctgttgagtactcttggtcgacatattttcctgtttaatgttcgatatcccaaccaaacactcatctccgtgttgtcttttgtagatgaacgcgtgtgagttttagggaagcaaacaccaaattgaccaggatctgcttcaactcctgtacgaggatcaccctcgtctttattctagtccaccctcttcaagcaacagaaattttagttcaattttcccgtccanncacaggatgatggctcgcactaaacagacaatgcgtatgaccctcataggatccacccctgtaggaggacggggtcatgaaggggacgttgaggtccaagacatagaggaacagggcgatgtccgtcctggcagtccttccgaggtggaggaagaggaggcggatgcaccctaaaactttgagggatataacaaggttggggagccggtagacacggatggcgacgtcctggttgagggtgtggattacgtcactgaggagcttggtgccacagttcctcaaaggaggcaaagtgccttgggtgctaggtgggtgagccctccgtccaaggtcactgaagcacgtttacaggatcttgactagggcagctatttgagcgagctggactgttatgttcccgcctcgaacaatcgagcctccaaccctcagagcgggatgtgcgcctggtcgagtgctcatgctaaataaggggcac

SEQ ID NO: 58385 - DNA, 869 bp, Cannabis sativa
atgggagaccaagttttcactttactggtttctatggtgcacttgaaaccaataatgggtctcaagctcagacacttttttagcattttatggatgtggttccactccaaccatggttagcaattggagacttcaattaaatcctctccaacaacaataaatctggtggtccacttcgtaattagtcacaaatggaagcttttcgaactgtcctagataattattgcttacatgaagcttcttatgatggtgatccttatacttggattaaaagttgcaaatttgtgaaaacaataaaagaacgtctggattgatattttttcaaccactattgggagactcttttcaacacacactgtgtaatatttggactactaccattttgaccaccgtgccatttcagccactttcacccctactgcatcatcatcactcaatgaaaataataagagcatgtttaggtttgaaaagttatggttggctgatcccaaaagtaaggaaattattgcaaagaactagatttcttttgattcaaatgacctgattttctcagtccttcgtaacttggattcctgtgccaaaatccttcaaacttggcatattgggaaatatgataaaatgaagaaaaatatcaatgagagttaggttaaagttgctcacttgaataacgccactactcgcaccaacaatcatatgaatgaattgtaacaatttgaagcaattcttgaagactaattggaataagaaaaagtttactggcagcaacgttcaagggttgattggctggtctgtggtgataggaaaaccaaattcttccacgccaagcatttgctcaaaagtccaataacaaaatcacatttctctacaat

SEQ ID NO: 58386 - DNA, 698 bp, Cannabis sativa
  modified_base (183)..(184): a, c, t, g, unknown or other
cccttgaaccttagcatatgagctataatactttatatggttttggtaatatgaagaatgggcaaaagagagaggaaaagactcgtgttggtctgtagggccagtcgtcagttcatgaagcagccagagtgacgtactcgtgtataagaaccatcattctgtgggtgtaagggcccaatgganncttgaagcagggacgttacaataatggttttggttccaagctaaacatcttctctgcgaccctctcgccaagtttcatgtccatataaaaccaaagccttctcgcgcccattttcactctttgcataccccaaaattaaggtactccaccccacaacatccctctttggcattttcacaaacatatccaaagcatctcccaacaaactacactaaacatatcctcaatctgataggaatttagatagaaaaataacaacgcactccctacaagctcaaaactctccaaattcgacttcaaaaccagacaattaacctctttcccttcatccatcgaccttgatcgcccgcatacactaaggattgtcgaaaaagttatctcattcaatctcgttttccctctttgcatcatggaaacaagagacaaagcctcatcatatcttccccgcttcgagtatccaaaaatcattgtgctccacgatacaaccgttctgttgggcattccatcaaacaca

SEQ ID NO: 58387 - DNA, 1387 bp, Cannabis sativa
gaggaatgagtttgttgaagaagtagttttggtacttttacaaaggttgtgggctcaaatctcactaaaattagccatttatgtatgtgtatatattatatacttagatatattgttgccctaaatgtggttattggtcttcttgttcatcttaattataaagtatcactgatgtctaattatcacgagatagtgtaatgcatagttcacgatattctataataattacactctgaataatgttgagtggtgctagtagtattagtggtgttttttagtatttttcctaaataaataatagtcgagctagttgctaaggcatatcaattttgctcttaccttatctttcatcatgaagtttgtcaaactcaaaatttccttactaataattcgcaaaaagattagtaataataaaatcagaacattgattacttttagaatcaaaataacaatgagtattttttttatatcaaggcgtacggtagaattattagtaaatatgtatcttatacatttttgagaaattttaaattatttacgacataaaaaataaagttaaaaatagttaattgcacgtgtgtaaaatataaaaaagtacgcgtataactgattatttgaaacatattttttgcacattaagttactcataatttatcgaaaacacacatattatttactatataactataatgtataccattaattatataaaatgatttataattttttatatactgaaaataaaaaataaaaagtatccctaccaaataaaagtgatgttttaacctaaaatttttcctatatattttaaggaagaaaaatattaaaagatattagtagtgtctaatattttcttaattgttatatcgctatataaattaagtatcgagtcacatgtagggctgatcctgaattaaaataggtcttaagaaaaaaaaattgagcccttattataagaattttttttttttttttatttgagccccttaagataggtgggccttagcgcgggtttagcccgccttagcctagcttagggttggccctactctcatgtaatttaatttaataattttttaaaaaatataactaaccaattatacgtaagattctacataagtggtattaggtactactggtatccaacgacaataatttataaagaattattattatagaattgagaagttaacaagtggtatatgtacttatctgataaggtgagtggctctcatgattcatgcactaacttatcatgacttttgtttagtcaaaagtgctcttatatcgagatttggtcttttcctctccaaatttgggcgcaaatttaggatcaatttaattaaatacactaaaattaatgtttgaaaaaactctcaatggagac

SEQ ID NO: 58388 - DNA, 906 bp, Cannabis sativa
acattcgatactcacactactcactgactcaagcagacagtcacctattctaaacttttctctcaagcctcaccatcgtagttgctcctttagtccgtctctccgcttgtccactcatctgtccgactaccatttatattacatttattttctgttattattaatttttactataatcgtactaacttgagcgtcggagtccctttggctgacaccccaccggtgctcccaattgaacttttgtctctctctttgttcttgacaggttgttggtgcccgaattccgaaatcgtagatttcaccctctacaacgtcaccgccgcatacttctcctttatatatatatagatagatgtggcactttattaattaattaacagaacgataaattaagtgttaagtttagatatttgagaatatcaataggaactacaatgatgacattaactttatatgattggaatataaaaataatgcattatgaaaaaatttgattcataatctcacacctgtttcttcttttacataataaattttttctataaaaaacatacttttttatattctgtaaagttaaaaaaaaaattacacatatatatatataaataatgaataattatttaattttaatattattaatttagtttactttattattatgtgtttttttaaaaaataattaatttaaaatagatatttttatagaaaatttattaaaataataataaaatattttgtaaatttatgctctaataaaatgcttaaatattgagaaaattaaagataaaaaaaaataattttagagagattttaaactgctgccttatacttctccctttaataaatacatagatagatacgggttgctcttacagttcttttctattttattgtaaactatttgac

SEQ ID NO: 58389 - DNA, 1327 bp, Cannabis sativa
ttcattcctagccttccatatgtgatacacaagacttgcaagaacagttttcaccatacttttcctagctgcagagaaacgcttcgtgctttgacatgcttgtagcagctacttaatgcttgttgctggtgtgttccatggcagaaacttttttatctcttgtagacacttcctgctatagtcgcactcaataaacaggtgctctatggattcatcttcttttccacacaataaacatttttaatccatgttaggagtgtacttgctgattctatctttcctgttcagcctttcccaaagcaccagccaaagtataaatctatgtttaggaataatgagtctatcccaaaccagattacaccaaggcaatttctcatattcaaagaataacaattggtacccctgttagatcttatacttctgcatcacaaaaccattcatgtctaccttttgcttaatcttattcttgacaacaactatctttttccatgcccagctgcaatctaatggagttacataactccacccatcctgctccttcagatacacattgtgtatccatttaacaaagagacaatcttttttactagctatgtcccaaacatatctccccaaagctgctatattccagtggtgaacatttcgaaagcttaagcctcctgctactttaggtctgcatacagaatcccaggccactaaaccaggccagtcccttcttgagtgcctttccaaagaaaggatcgacaagttgcttctatgtctttcaagagcttctttggtagaataaaaatatgtgcccagtatgtatgtatagctagcaaaactaaattgatcaaggttactctacccatataagataggttccttgtactccacattcgtattctacttgtcatcttttctaacagactttcgcattcagtccgagatatcttctttgaacaaatagggataccaaggtatctaaatggtaatgagctccttgtaaacttagatgcctcaaggatcctggagacttcagattcaggcattcctgaacaataaatggttgttttctgttcatttagcagtaaaccagatgaggctgagaacatatggtcacctttacccctagcttaagtaaggtgggcgtctccaagaaggaaaaaatgatagattgacaccttcataagtgggatgaataatcaccacatacatacatgccaagttagtctaggggaagatgacactacccccaccatagacataatgacattctcaaaggtagatgaggacatccacataacactatgactactacaatgtacaaggggtctcggggggtcac

SEQ ID NO: 58390 - DNA, 1280 bp, Cannabis sativa
aaaaggattactaatccttaacttttcaaggaattctcaattagtggttgtgaatgactgatttttctcaatcttttcgaccttggttccataggtgcaagtcagaaaggttgagaaatagaaaaatctgatttgatttattctcatggataaaacagagaatatacttgagatatgtatatttctagatgtgttaaaaaagaaattttaggatttctacctaagacagatacggggctttgagatcaaggaatgatctttgatcaattgttattagttaagaacttaggaaatggatgcaagtcaaaataagtggagatgaacaagattcaagttgataataaggtggaaatttctcatagttaagggaacaaaatcaatgaggaattgtaagaggctaatgaagggagtgatggaaatggagttttattagcgaaagaatgaaagcaagaaatacaattgggaacaacaaagaagcatccactttctgataacccaccatgagcttaccttggagttaagcatacttaacttggggtaatctcaagatacgaaatcttctgggaaattatctcagaaagcgtacgagtcatgataaagtacgctagaaatattcatattaggatgaagaatcaatagtcattccagagattaccacgaggaaggaacgtgttagtaagtagagatttacaaggcattgggatgagaatgctataattgaatgtctatcagaaacggatacttagcttgttaataagttaagttagtagactttgttaggaggtcccacaagaggaatagaaatatgcaattatgaactatgtactgtgggatcttatggtttcgactgagtaataatagttggacataccgaattaatatgatgtctatcagtgtagacaatttatacgataaatgaggatatagaattcatacaaaggaatagtctacttttgtgaaatctcaaagttgatatctttgattatgatgttaaggattactgaacgttatcaagaactatgggaattaaagtgaagataggataatattttttattttattttatttaatttttgaaagatgggtaatttgggaggatcaatggaatattagaaacatgttgtgtgcatatctgataaagattagattatcttggaataatctgttccactgaaagagtgtttgtctaatgaaggtaattaaatgtaccattggtgtaacgccctgaccctcagggacgccacatgtgtgcttttataaacttattatcactaatctat

SEQ ID NO: 58391 - DNA, 1026 bp, Cannabis sativa
ataaaaacacaaaaaataataaaagaacgtataaaagtaatagaaaaacaacatcaaaacaacctaaaaaacaatatataaataataaaaaatcaacaataaaataataagactaaaacataaaaaatataaaataaaaaagtatattatgtaaataaaatttaaaaattataaaaatattaaaaaaaattggtacaaaccatatttttatatatatatattttttttatattatttcttcattataaaaaattatattagtgtagtatttaaaaccttaaggtgctaaatattaatgcttttcctttgacaagcaatatcaatgctcttttatatttgacgttttgtgaacattactaacaaagtcaaatcaaatgtattagactaccaaacaacaggttcgtgactttgtttatcaatatttcgatttctattaatggttaatgaaataaaagattatattatttccaaattcattgtccattctcctccttcgtgataaagtgtcaatcagatattttcttttcactattcttgttccatgattaaaaatatggatattttgtgatttaatgatgatatttgaatggttcagcaaaaataaaaaataatgatatttgaattaatataattcttatattaaataataaaacgtaaatgcaataaagtccaattaacaaataatttagatttttttttttttaaaaaaaaaacatacaatttagattaaatgcattattttttagacattcatacgttatcattattttgtcatttgttattatttttgtgtgtttgaagaagttttctaaaggaggattaacgccttttgttattattttttggagtttttgcttggtgatagtaggatatcagctttggctatatttggtgtgggggagggtcccgatctaggccaaggggtttcgaggatctgtccattattgtttggttttcgtccattggggaagtcattttcgcttttgatgggcggtctaacagaggcgttctcatatggatgctagg

SEQ ID NO: 58392 - DNA, 894 bp, Cannabis sativa
agtatggtaaagtattaagattttattttaaaaaataaagtgatgaaatgccataacaatgagagtgcatggcgtctttaaaaaaataataaaaaaatagttcaacatataattaagaaaagagtttttgatggctaaatccttttaaactgtcgttttacttgtatttttaaattcaaattttagtagtaaaatcctctaaactactacactagtagtaaatgttaagtgtcatctcgttaaatggtcaatataaactacttatgattacgttcttgtatacacataacacgtttatattagtacacctaatattattattaaaaaattattttcaaaattcattttgaaattaaataaaattataaaaattaaaaataaaatatattataaattttgaaatattaatttttatattttttaaataataatattcagtgtaacaatataaatatcacatatatatacaaaaagtgtacataagtgcaagtctatataagtaactaactataaaaaattaatgacacctaaaatttgttaccagaaaactctcaaaatttgaacttaagtccaagtaaaataatatttgagaggatttaattaactacaaaaatctcttaagaaaaagattgaaatagaatctttcaagtttttttttttaaaaaaattatttttcttgtgaaggttatataagtatatataaatctataggattttaaaaatgggaccatatatgtaaatatagttatatgctacacaaatttgaaaagtggcgagccatgctttatcgaccattacaaaagtttttttgcaaatgaatccttatcacatgggtcgatgagtgcacgccttcatgaacacatgtgaacaaagcctgatatatatatatatata

SEQ ID NO: 58393 - DNA, 1404 bp, Cannabis sativa
  modified_base (1353)..(1353): a, c, t, g, unknown or other
ttcttatacatgcataatatcattatgccaccttcacactatctatttttttttcctttcctatcattttttttctagtttcatttcaattttcattgtagctttctttttaaaacttctccctttcttaaaaccatttttggtcccaaaaaaaaaaaaaaaaaacgatttcgtctatcttcctcaactgtcttcctccattatctgaccacattttttctaatttttttctttcttttttttttctgttctataaatgaccattacttagtcttcatcttcttcatcatcattgctgaaaaaactttcaaaaataagtgttaaatctcttgccaacaaatctaaaggcaaacagcccgttgttgaagatgatgattcagactttgctgcgcctactaagaaaagtgatcattgccatgttaagaagaaattgaaagttaatgttgctgaaaatatttctctccctaaagttaagaaagggaagaacagtctgaatgtttctttctagtttctttatcgttttgctctaacattgccctaacttttcttattgctagtttctttaggaggaaataatcctatttattctatttttaaatatctctaaggactataagttttttttttttacaaaaatactgattattttttattttttaaatgactgattaattgtaccaccgagtgtgtggtgtagttggctggaatgctttgcataaggttccttatttagttgttcttcggagtttgatccacatggtaacacttatcttaggccttaaaagttgtgctatttttgtaataagaaacttttgaagatttaacagaatagtcaatgcaataagaaaagttttgaaattttacattaatgtgtcaaatatgatgttgataatgcattatgtttctgttaatattttagatatggcatatgttatcccaattttttgcctacttgacgtggcatgtccatataggcaagactgaggcaacgtagaatacaacgtgtcaataagtgagcaaagtcaccatgcacaacacatcaattaacaagagatccaaacactcaggcaagatcaagctatatggaaatggctaaacaggagggtctggtcggaccacaccctggccggctaaagaagtttatgtgttggccagccccaagcaaagggtaggtcgaccagcataggtaaagagcatcaaaggaagcccgattgaatgtcggggtccacaaccatctttttggatgggtcacaactcagtttcagttgcagaacaactctaacaacccacgaaagtagggattcaaccccaaactatctacatatcttttagggatattaattagttattttngtaacttaaatatatgataaaagggtgattttttctattttaagggatatt

SEQ ID NO: 58394 - DNA, 1554 bp, Cannabis sativa
atatatactgccaaagaaatatcacaaaacatgctttaattgcagtagtggtgtatttgtgaatggacactgcaaaagaaacaaacactggtataaagcctctagacataatacagacaatgtaatagtgtctgatataaagccctttggatattattgctgaccaaagacgaaacaaatcctccactagaaaattccaaacttaacaagagttaattaatcctacacaatactagttgttcataatgaattaatatgttatagtaaaagttgttataacccaaaagaagaagaagaaaaatcatgtgatttgagtaattgttaaacattacctgttgttactttcaaagatggataattgaattacttagatcaaactaaatttttaaatttggaatatccccatttgaaacataaattatattattttttttccaaaggcaacattattggttcttcccatttgagacaaagttacaagaggttctaacttctaagtctaaaccccactaataaaataataataatagcaccaagtccccacaccttgtttcttcttcgttaatttcattgaagatcgaaatttcaaaaattaaacttaaagatactttaataaataactcccactttaacaatgaaaaacacagctagtagaacgacaatccctctagccaaatcaagttaacatatttaattgagtttatattttgaggggtttaaaggaagatatgatcaaaaaagaaagaggtaatcagaaatcggaccaatggtgatgcgtagatgatgtgacaagagaagaataccaagaagaagggatgacaacaacattgatttgcaattgtcaagaccgataaccaatataaatgcagtctaagcatgagttttataattttaaaaaacaaaaaaaaaaaggaaaaccaacaaagagaattgtttcaacagtgattgcactaaattctctccttgttctcttattggaatttccacaaacacctagaagccaacctaatatgagccctctgccctcataacgataacaaacaatttaaagaaaaatcaaataaaagaaaattagagaacaaaaatggaagattagaagaaaacatactctgagaaattgagagagtcaacttgggtctgcagtagaagaagagcaatggaacttcgtttgtgaagaatgccaaactcagatattgagagaaacaaactgagactgcagtacaaaatttaccacttatatgcatatatatagttaatcaactcggttcagattacacagggagtaaactcggttcagaaagaacttacccagaatcagagaaggccgatcgagaaaagggctgggcagcaagcagcctgagccctgtcgtcgtcggagagagagaggaaacgagagagagaagtcgagaactgagcagtgagaagaaattagaatgtatttgggattttttttagggatttaggtttttttttaatatttgaaatcgggccggccagaaacctgataagagctcgaataattcgggcatcagtcggcccgtagggcttggggcc

SEQ ID NO: 58395 - DNA, 871 bp, Cannabis sativa
taagtagacaatagaaattaatcaaaatgagaagatagggaagagaatcctgttgatatgcttacccaattgttaatgctaattgctatcatatttcaatcaaaacgattacttgtgattgaaaaatatagcgtgcaaaaaaagaatcacttgtaatcctattgtctaaaattagtaagcataaatagttatcatcttgggggatgttagaaagtcacatattgataatgtgtaaaactgttggaaatattggctccaaatagtgttgtttatttgtgagtgtcgtgctggctcgactcatatttatctgtacttttttaaaaaatgaaccgttacttgcgactttgtgcctacagacctaaaaattaccttattgtccccttggaccacctctactataagactagtagagcctcccttataaataggaaattatccatctttcaaaaagtgttggaaatttttagactcgatgttgatgagtttctattattaacatatttccatgcattccaagcaatatggcgataaaatcatggtccaatctttagatatcataattagacatttgcatatgctcccaaacttttagaacaactttatatactctataatgatactttaaacccaaaaacacaattatttataattatgttctacattaagtcaaatttcacattcacttcgtgtaaaaattttgtaaggtttgtaggatttttttttctctgtaagggtttttttctctcctcttctaaagtcttttctagggtttcttatgcaccattgggcaccgtcggccagatctgggctggtggcgcccaggagtcctactctcggcatgctccacgttgtggaggaagtcccctcttgg

SEQ ID NO: 58396 - DNA, 1045 bp, Cannabis sativa
  modified_base (282)..(283): a, c, t, g, unknown or other
  modified_base (1012)..(1015): a, c, t, g, unknown or other
gttggttggggtgtatgacacattaccaaggttggcccaagcatataatagcttcgaccattgcacaaggcccctacattaaaagacccatctttttatcatcatatatagtataaatatttttttgataatatatagtatacataataaatattcataagagcaaatatgcacttagcatttacaaaaaaaaaaatcataaaattttacggtcccaatacacatgattgtaaaatttttgtatattttaatatttatgaagtattgattgatatatatatnnatatatattttttttaaataaaatgcccaattttaattttttgcccaaagtccccaaacagtgatgttggccccaaaatttaaatagccatgaccagggccgacccttatggtgtgcaagttgggctactgcacaggccccaaaaaaataaatggtccaatatattttttttaatgccttttatttttattaatgaatccaacttttcaaggggctaacaacttgtcattggagacttccatcccaatttccaaagccctttttttaattctattactgttttaaatgaaaaaaaattgttacttattattttttttcaaacattttatattattttttctattatttttttgttgtattggaatcaataacaattttaacaaaagaattggagtttttagtattttgtaaaatatgtaaccgtatgataatatttaaaaatattttattttataaattatactttttttataaaggtttaatttttaaagttagaacagggcatctaaaatatttaagacgaccctggccatgaccatatagtctgagaaccagtcctactttccatctcttaaaatctgaactaattttaaaatttgaccttcacatagaaaatattttaataacaaaatattattagtgagaatgttaggtttatgcatgtatattgttgcacctaattttgcccaatatatgtggaccaatcagacagggacacgtggatcaagnnnntcacaatatttgctaagtctttaggccata

SEQ ID NO: 58397 - DNA, 1189 bp, Cannabis sativa
gttcgtgctcagtggtctcttgtcctcgtcatcgctcacggtggttctcttatcttctttttctatttaagcttcaatgttaacaggaacacaatgctacctcttatatattcacttgtttgtttatcaagctcagtactgatattcattttcttggaaaattttcaggtatatcatccatatattggagtgtgtcgattcctttgttcttattgttttggttagtattttctcctactattcttacttgataagtttaatgcattattatgctatgcttttggtgtactttgtagtggatattgaattagaataaaacaattagtttagaacaaaattaattttattgtttaggttgataaaaatgaaaagatttaggggaaagtcagaaatttggcaattattttttacaaggattgttagtggtgatcatgatggtccttgagtggcatgctcaccataagaattgtgggactacaatctttaatgaaattgtggctatgaaggttagtttatttcaagaacactagtgattttggcacttctctgattctaaagtaataatactgatacaaaatcccaatttagttttttaaatacaaggccctaataatcaacttttgtttcaaacaaatcgacaaccaactaaggtgtttcttcatttgatctttggaaagtttgtatagcttacaagtctctgaaacgtatttttgtagtttcttgaataattcttgagagttttatagaatcaacttatgctagtgtaggttttgatcaagatcaattctggagctgagttttaactatgatattattagtgtcagacctggtgataccttattttctagctatgataaatggctttcaattcactgcatatatcttgtgctcttttaacctatttcatattccgtgttggtggaataaactgattaaatattgtgatgctttttgagttttatcctgaatcaatttttgctcactcaaatggcaaattattatgtaagaacttgatggtttattttacatcctaaagtccaatctctttggtatctatctagttttcctcaataaattgccaagtgacagttactctcatattggcgttaatagttgtagataatagtaaacaagcttggagagcataagcctaaggtagtcatctgctgtttgtccagtattagttttt

SEQ ID NO: 58398 - DNA, 1537 bp, Cannabis sativa
cctagtgtggtcgttcgaagatcactaaaaaccgttctagatatgagcatttgtcctaagttcatgttttcttatgtcaaactacaaaattactcacgttttattcattttagaaatgttttatgaaacttaatatgttaaataaaatattcaacatatcttaatgtttgaatattttctaaatatatctaccactatatatagaatacagtatagtatttaaatcatataaatcttaattaattgtactaataataatatagtatagcatttaaaaaattatttatttttttactaaaaattctattaagatataaaatatatattaaaaattcatttttgtaaaaataaattttgaggaaataagtttgagtttatttttttctctccaaaaatatagatttgtttaagtaaacataatatttttgtagtttaatttctaacttttattccaaaataattttatttttattgaattttgaattatttatttatttttttaaaaaaatatgagtttataaatataaataagtctattttttttttcaaaaaattttaatttgtttaaattgattattttattttcaataattttagtattatattttaagatacgtatttataaataaaataaaatttgaaatatattcgtcttagaaaaaatttaatttttctaaagtaaacataatatctttttaattaatttaatatttttattaattttttattaatttttttcagaattaatatattatattacaatttttaaaattatttttttttttggaattaaagaggaaatttttttgtattggtcaattttgaagggataaaaatactattttgtttttaacaagaagaaaattctttattcaaacagacaagaacaatacaaagaacaaaagcaaaacaaagcagctggccgaaacccccaaccctcaaagccaacctgaaattacattaaaaataaagctatcaagctttctctttctcccattacagccgcttaagaacttgatttttacaaaagatttaatctctttactcatagctctagttgtcttacatttcatctcaaagatacaacaatttctattagtccaaagagtgtacaatgttgccaaaactactgtattgagcactttctcttgcaggctgttggaagacctcgataaccactctctgatgtcggaaggccagtcaaaaatgccacaccagcttgttatctctttgattgcaacatttagttgtaaccttttactaatgatgatatttaaaatttttaaaactatcacataaaattcattgtaactaaaatatttttttgttatgagttgtgacaaaaatatatatttagtcacaaattatttctgttatagctaaaatgttatgataaaaaatctaattttttttgcagtgagccgacacctattttattccgttttgtgttggtggtaagggtcaatcttataaaccatcaataataatttaccccactattttaaagaatcgcccaaaccttttttttttttttttt

SEQ ID NO: 58399 - DNA, 1287 bp, Cannabis sativa
tgtttatttattaaaattatactctaattttattagactaaaaataagctccatatgcatgtttcataatattcaatatgacttttaagagaatattaaaatttggggagtcaaggtcataccgtacgaaagataattaaatgaaattaataataaaaataattaactctataaaaaaattaaataaaattaagcgaacatgaacatgagtagataattatatatacttacaggtaatcattgtcaacctcatgattagtagcaattatatcatcattgttgagaagatagcctctcttaattttgtgtttggtcttccatttttgtacagactcagctttccattcatcattattgttttctcctaattcaaactcttttataattaccagcaaatattaataatattagtttattttattaattattaacaacatatattggaaaatcaattaattaatattaattattaacatatatttaagtgatttattatttaccactttctgcagagaagctggcttcagcattccattgatttttatcattattagtattattattgtctccagcagtatcctataaaattaaattatttaacatactataatatattaactaatatgtttcaaaaaaaaaaaaaataagtatcaaaaaaatatgtttataattaatatcatatatgtaaaaataaataataatgtatatattataccaaactagtatcattatcagaatcatcttcaatgtcttcattctcatctctcctctctcttggccaacctatatatacacaccattatattacaatgtacatatatataccactaaaatataacataatggtacgtacaatatatatttatacacacaaaatattataagggattattattgcaatacatgcaccaagcatttttatatttttgatacatatggataattaattatatataattttaaatgatggtgtataatatgtatacctcccataaattttaaaaaaaatatatgaatataataaaaggattattaaaattattattacacaattaaaaatcgatacatgacacaaataacaaactatttaaatcataatttaatattgtaaatataattatataatattcataatttcttgaaaatttgtgtggaagattttacataactatacattataaacaatcatattataaaatatatatatataaaaaaataagttgcattaattttatccttatattgaaagtaagtatatataatatttaaaaacattaataaatgtag

SEQ ID NO: 58400 - DNA, 1577 bp, Cannabis sativa
cgctcccttctcccttccataaggtgtcccatagatacagaataaagtccaaggctccttgtgatcttcttcaatacggcactcaaaccccgaattgaatttgtttctaatactcagcttgataccctttctccaagcaacacaaaaccccccagccgtgcccatagaagaaatatctctaaattcttgaaatcccaatttcgtagtaattgcatacatcgattcctcatccaccttagtttccatcaggtaaatcacatcgaacccttcaccccgagaaagcctcttaatggctctctctgccgccggtctccgaagactgcgacaattccacgctaggcacctcatggcgaaggtgggggcatggctctggccgcctcctcgccatttccaaaattttggacatagttaatgggaacatcaacacattgagcaaggacttgatccaaattaataggattaccttcattcgcttctctgatcagtttctttctccttcttgtctttacgcccaaattcttcttcaaagctgaggatgaagccgccctaagccccttcttacgtctcccttttgtcgcgccatgacttgtgcctggattgaacggctgaatcaccacttcatgcccattattatcctttagcttgtcaatttctggggcagtagtcacattagtctctacaggggatcgattttcatcttcgaacggtgaatcaaggaatttttcagggatgggctgataacaagtgtgggctttccttttcttggaccccaaaaggtgtatgatcatctcagatacatttggtgggtttgagattaaagaaggttgagctttgtacatgtttgtgtagtccggccctaataactcacaataaagcttttgaagattagggtcatttgagggccatttgaagtttgtgggctctgggaaattatgaggtacttgagatttacaagcccaaatgtgaggaatgtccaaacactgaatcaaagaaggcccaacatcaggtaattccgccatttcctcccctggccccacgtgagcaaaatcaggggtaggtagctcaaatagaatttttgggggggaatattcaaaaattcaccacgtgcagtactaacttccactcctgggaccacttgcatgcccaaattctgggccacatcatccaaatccgtactccgcagacgtccaccaccatgcacagtaccatgcatagtaccatgccacgtgccaaccggagtaccttccccagcaatcgtcggtcgttcagccacaaccgccgccttcgaagacccctccaccttctccgattgaatggataatggtcttcttctccagctaccttttggacaatggttggctctcgagagcttcactccttcctcgacatgaatcacatcccttcgaaaagccactgttgagaaacaattcccaggcggaccatcagttttaatccatgggccatacatacgcaccgcttttcccgacggaggagtgacccaagcagtcggggctaagcactccctgttcgtgtgtgccaatttaccgcaattaaagcaaagatacgggagcttctcg

SEQ ID NO: 58401 - DNA, 969 bp, Cannabis sativa
tcagctactgaagactgtttgttcactactacaaaaagtataattcccgtcagtttttaagtgtcatttaaagaatttacgtcggttaaaaaaaccgacgtatataccacagtcgtaaataattttttattagcgtcgttttaaaagcatcgtttttaaaacgacacaaaaaacaattgtctacatttacaaaccgacgcaaattatgcacttttctaatttatcttctgcgtcggtttaaaaatgacgcaaaattatttatggcactttaaaactgtcacaaaacacttattacgtcggttcaaaaatgtcatatcaaatgctaaaatacttttttttttacttattgtgtcgcttataaaatgaagcacaaatagtaaacaacactcaaggttaaatatctactgttattattattaatattatttatttttaaatttagcactaattcagtaacataaacaaacaagagaagaggcaaagcctaatttaataccgtattcaatccaatatgtcattatatttaggtagtggtctaagttttttagatttactagacttgcagcagtcatcctttccatcaccataggcaattttgcaagatcttttctccaagtcatcttcgtagggatcagaaaagtatttatctttctcttcctcttcctctttacgtgacttccggtccaattccaatcttataatatattccaataaaaattattacaagtataaatcaacctctgcctctggctagcctctaacaaaatttagaaacacatatataacaccgagttagagaaaaatacttacataacaactcgtacacattggactcgagtgatattgccaacattattaagaattcaaacaaagcacatctccaagtaatacatttgagcctccatttagagaaccaaacaatagtcacatcaaaataaggggttccttaaataaaaatcttactgttta

SEQ ID NO: 58402 - DNA, 1026 bp, Cannabis sativa
  modified_base (785)..(787): a, c, t, g, unknown or other
cagtcgctgcagtgaactgaatggaaccactatatgaaaggttctacaagctggcacctctaattttttaagggggtcccgatgttatgaaagccgaacagtggctaatactgattactagcattctaaactttatgggcatcaccagcaatgatagagtggctagtgccacattccagttccaagaagacgctctgggggtggtgggacatggtgtccctgactcatgatgttactacaatgacctgggaaaggttccatgaactttttaatgcaaaatatggcaatgaggcaatcagaagcgtgaaaaggaaagaattcacttaactaactaagaaagaaaatatcagtgttactgaatacacaacccagtttgaccgcttggtaagattgcctcgggaatcatgccaaccaattttagcaataaagagaaatatcgagacggattaaatgcaaagataagacatgacctaatgatcactactgatgacaacaccacctatgctgatatggtgggtaaggcactgcgagttgagggcgcagtagagtgcaccctggagtcttgagggactcaggttgttggtggggctcctactcctcctacatcaggctttattaggggaggtagtggctcgaccactgaccaaaaaagaaaggcacctactgcatccagtggttcaggtcaaaataagaggtttcgagggaacttgggtcgaggcaatcgttagggtagctctgaaactcgatacacttactcagaatgccctagttgtaaaaagcatcannngggagagtgtagagggcaggggtgcttccagtgtggtatgccaggacactataaaagggattgcccccaacttaagaaggaagaatagaagactacagcgaaactcgctccagcaagggtgtttgcgttaactcaggctgatgtagaagatagccccaatgtggtaacaggtcagctctcgatcaacaactcttacttctctgtgttatttgactctggggccactcactcttatgtgg

SEQ ID NO: 58403 - DNA, 1109 bp, Cannabis sativa
ttgactcaaacaacaaggcaaccccttaacttaacctaaaccagcagcaaacaacataatcaaacaccagattacaaattagaataacccttgaacaaacagccaccaaatccttcaactcaaacctcaaaattcaacctagatttaaggatatcataaagaaggttgctagaaaaagatatattgagttgggaccttagaatttagctagacttcttgttgataagctgaaaattcacagccccaagctgcccctaggaaaaatcgagagagagcaagagagagagagagaagagagaggttgaagaagagtgatagttttctagggctttctaactttttcatgaataaagataatatctattcctattacttaatataccttaggtattaggctgaaaataataataagaataaaagaataaaaattaaaagaccaattaccccataaataaataccaaagatttggtaagaaagacttctaaggacattttagtcgtaaaaatattccggtgaaactcagatactatcaaacctaacaatgatgccccaaaaataataaaatgctataacatacaaaatacgactctctaacggcccaacgtcgctttccacagcttccgaacacaacaaagaaatagagcaaattacataaatagcataataaacatacatgaacttaaatatatttccacaatatgtattttataaataatataaatctcatgcttaaatcctaattatttaataatccaaaatattaaccttaggcggtctttacaattatccccctgttaacaggatttcgctcccgaaatctcacctgaacaactcaggatgctgagtcctcatatcagactctaactctcaagtggcttcctccactttgctattcctccagagcactttaaccaaagctatggttttacttcgaaggactttttctttcctatccagaatttgcactggttgctcatcataagatagggccggttgcaattccaatgcttcataacccaggacatgcattggatcagatacgtatttcctcaacatgaaaacatggaatacattatgcacagctgacaacgatggaggtaaggccaac

SEQ ID NO: 58404 - DNA, 1784 bp, Cannabis sativa
accacatcactttttgggggataagtttcctattctccttactcttgtttactttatggcgagataaaccacaattcaggcaataatccatgtctgcatatccccgatgatataaaatgcaatcttttggatatgcacaaattttttcatacttcaatcctatggaatttaaagtcttcttcacttcatatgtagattttgggaagcagttgtcaaatggaaatatatctttaaaagaagcaaaaaattgaataagacatttatcgctcactctatttttttgctttgatgttgtaaaatttaccattgttggtaatcttagttttttacaatcatcaaactggggtttatcggcatcacttagaaaattatcgaattttttaggatcattaagaaattcctcctgtgcttcgtcaaccaagttcaatggatgatcatcgaagtcattatccttaatatcatctacccccctcttcccaaatggatatggatcatcagctaaatattcgtcatgccaataccaagtagtataacttctattgaaaccttgtaaatacacatggtccttaatcatcataatatttccttaagatctattacaacaatctacacacaaacaatgaatacgttcaagagttttagaattctttaaggcaaactctaataaactatcgaactctacttgaaatcgcattgtgtctctctcctgacgcatccatggtttatccataacaaaaatcctaacaaaaaaattaagtatttagtaattaattataacaagttactacttaaataatgtaactaactaggtttctcacacctaattcatattaatttttatattactataattcatgttttagtttagttcatgttattaagttgtattagctgtaattaactaactagagtagtttttagttgattggaatagatccaggaatggaatgacttttcgtaaagtgaatctattcatttatttagtttgtcatttataataacaatgtttatatatatatatgtgtatataattatttgtgttatatcacctaatttcttaccactagctagtaattaactaattatttgtattatgtacttttccttcaatatttatacttttttagtaaaatttatcctaattctaccaaagtttcggcagcataacgacaattattggacattcccaaaatttttaaaaatacctaaaataataaagaaaacaaagaaaataatacagaataatacaaaatttatccacccatccaaccgcagtacatgtattcgcagaagatattcaaactcaactaacatgcatattattacacccatccgaccgcagtacaatatatcacagaacctacttcactacggatgaatatttacgatattcaaattccactaagaatgcattgataattagttataataacaaaaagttagtgaatgtatatacctatagcaacttaaaatctaattaacaccagattattctaagcataaaaaattagctcacaacttacaatataataaaagacaaagaaattataattttaattatttaattacttactagttataaaaaaaaaagtaacaagttaatagttactaaattatacagattgatttttagaaaaatcacatatatatatacatctataataaattatgtctcacactaacacaattttcaaaactttatttcttaactaattaaatctctcctatttcaatctagatatatatatatatatatattacttagaatatatacaatataatta

SEQ ID NO: 58405 - DNA, 1199 bp, Cannabis sativa
tgatgctgaagctagtcctttagtagtgacagatcagctttgagtcaacaaatctttttgactctgtcttgtttgattctggagcaacacattcctttgtggcagccagagtaattaacaagttggatagccatgtaacatatacgaaataaggtttggaatcttgttacttggtgagaattagttatctcgaaaaggtgggttaggtctatgccaattaggattgaggatagggatttgagtgctaacctagtagaattgggtatagcagagtttgatattatatttgatatggatttcttgttaagtacgttgctagtattgattgtaagcagaagatgttgacttttcaacctgtgcgtgaagatctgtttgtatttgtgagatcaattagggttctcgagttcttataatcttggtgctacaggctaaagacttgttgtaggatggatgcttagggtttttagcagtagtgttagataacactcaacccgaggaaattaggccagaagacattaaggtggtacaagatttctttaatgtatttctagaagaacttcctaggttaccactgcaacaggaaatagattttgtaattgatttaacatctagagtggagctagttatttctaaaggaccatatagaatggctcccgctgaactcaaggaatcgaagataaaacttcaaggaatgcttgacttagggttttcccgatccagtgtgtcatcctagggagctctggtgttgtttgttaagaagaaggatgggttgcttcgtatgtgtattgattaccaagaactgaacaagttgaaaattaagaacaactaccattttcctaggatcgatgatttgtttgatcaacttcaaggaaagacaatcttctctaagattgatctttgcttgggctattgttagttgagaacccgagaggaggacattcaaaagactatctttcgtaccaggtatggccactatgagtttttgggtatatcttttggactaaccaatgctctggtagcatttatggatctaatgaatatggtattcaaggattttctcgatacatttgtcatagtattaatcgatgatatccttgtgtactctcaatcgaaaatggagcatgagcaacatctacgaatagttgtacaatgactacaagaacataagctttattaaaaatttaagaagtgtgaatttt

SEQ ID NO: 58406 - DNA, 1033 bp, Cannabis sativa
tcaagactgatatgataattacaaaatattctacttttttagtcaaatttttacatttaaaattttggggtataaataaaatttctcataatataatactgagaatggttctaattacaaatatagccttttagcaattatctacaatagatatgaaaatctacacaaattttctacttccaaccggttagggtacatagggcacattattttatgtattctttatgtaataatgctgctgccagttggcccttgtacctagatagatatttacaaaagaatcaatgctattttattaattagaaataaaaatatatttatacacaaacaatgacatatattgattaattgaagtaaaacattaatgaataaaattgattgcttccatatcattcatataataagtcgtagtccttatcttcattttttttttgatacaaaaatatcaacaacgagttgttaagaataggggaccaccagctcattgatatcataatatagcctctacaacttactcattatcttcttattactttcataatataataaatgttaaaagtaagaggtgcctaacattatttattgttattattaaagtaaatagtagcaagtatttagaagtttaatttgtaagttatataaatttgatgtatattttttagtagtataaatagttattgtttataaaagtgtaattttgttctagttttgtaatatcagtattgatgaaactaaaagaaaaaaattatgtagctaaaaataaatattaaatttataccaattacaatgttaagtatttatactaatttttacctttattattattatttgtaaaatggagcctaatactttttttttttgttaaatgtctaatactattaagagtgttataattaaatattaagtctcatatattttaaatctaataattatttaaaaatgctaattatttgtactagtagcttctactgttaagtctagcactactggtatcttttagtattttcctgatactactagtgtctaaagaaag

SEQ ID NO: 58407 - DNA, 575 bp, Cannabis sativa
tttcttcagatttgcatagtattgggagtaacattgatggtgttagcaccaattggagctctaagaaccataattatgtcagccaaaacttataaattattcggttgaagatcccaccgccaccaaatattagtgtttatagttgttttttttttttctcttttaaatttaagtttatattattatttagtttttgttttaaggttggacctctactatatttatttagttggacaaaaatttatttatttataagtttttttttcttcacattaatagttttgaaattgtttgttattaacaagtaaattaatagaagtaattttaattttaaaaattctcttaattttttagtattttattaaacggttttactattacctattatttatataatcttttaataattatgccaaatatttcaactaaattcattttattattatattaaaaaaaaaaaaattgcctcaaaatgttatataaatcgaatcaactttaaaatatgttattaaaatactaattagaatttttgttttcagaacttttacataactaaattataccctcaaactttt

SEQ ID NO: 58408 - DNA, 2000 bp, Cannabis sativa
aaaaacatttattattgatagggcagtccaaagatcactcctaccttctacgttgtttgctccgtagataaaagtagcaaagtaatcttttctctgacctatcatttttatatgacaatgaacgtgttgcatggaatgctcaatgacttcaacattaacaaaattcttcctccagagcaagagaatccggccttccactttaatactagaataaaagtcccaacacgagaagttacttgacatcatttttgaattttttcccctttaatcttggtctccacaagagctccaatgccaactttattaactcgccaaacttcagaaactttatcttgcttctcctttttatccaaacccctaacgttccaacaactaatattgcaaaaatccattaacaacacaagctgaagtcattctctccctctgcttcttcaatctgtccccccattaatatcgcaaaggaattcctaagcactttctcacccttgtcactgcctctccttgtcgaaccagagcccttaaacacacggttcttaggggcaatctagtccctattaactgttttgacagtagcagttttttcttggccattggctttttttttccttagttactgcagtagcaacagtagcactctcaggggcagcagcctcaacctcttcactactaatagttgcaatctcaacattaattttctccactacagcttgaacaccagcaacatttccctcctttactgtcttgttttcttggattttttgctcctctttaggcttctcaaccttcctacattcagccattatatggccaaaccaaccacaatgtttacattcaaccgacaaccattcatattctattccttgctctaatagatgcccataatcattaacaaaccagaaagagcgctccaggttctccgttatatccatttcaacaagaacacgagcaaattgaactcttgttctttccttggtgtgcttatctaccataatcggcttccccatagtgctaatgtgggcactcaacgtttttcccccattattgaagaccaagattaggtagcctaatccaaagaggaaccgatttcacaatcccaataacattcaaatccactttccaaggtctaacaatgaccgattcctaatcaaattgtatcattccattttcaagaacctcatctcgtgttgcttcatcattgaatttaaccatcgtgagccccttagccattctagctatctgaacaatacttaagtgcccccaaattcaacgaataaagccttcaaacaccactactgggacattagcacccaaaaccatacaaattacagctcattttcaactttcttcttccaatttcatctcctccatatctatatgggctatcttcctaccctccttaatcattggttcagtatatgtcaatttagcatcagtatttaagaccttacctcttgagaagtgttgccaatgattttgagccaccgattgcaggttttccacttcctcggcccaacttctcctagctgatagtagagattcatcttcatcacgattctccatcgcgtgctgctctggaacttgtaccagaaagttttcatcaccgtcgagcgagcaatcagagctctccttctccagctctagtttctccgaagaaccaatcgccaccttcaagcctggccttaaacttggttttttcctcctcgccatggaggagagagagaaacgagattagaggagctttttcattattattattattgtctttctttatttctaacttttatgatatttcaaaattttttaattttaaaacttagattaagttaaaaattgattttgaattaattttagatcaacttaaatcaacaaattttcataaatgattaattaaagtagatagacaaaaatttattatattttaattagaaaattagaaatcagtttatgaattatctagatagatattttcaggtagaccttttggtatttttctagatata

SEQ ID NO: 58409 - DNA, 1009 bp, Cannabis sativa
aacaatacgatgacattcttattatgggcgcaattttccatgcatgcttggaagcagtaattgtatgcactgggaatgaaaaaattgcccaattacatcgaaagggcagttctcacgagatgattacaggacaccaataatcatgctcaaagcacttgcgtcacaggatctttaaattaatttggcatgtaatttttggtgttctcggatcaaataatgatctcaacgattggactcgacatccattattcactaacattttacagggcaaactccaagaattatttaagttttgattaatggcacacacaacaatgggtactacctagcgtatgatatctacctataatgatctacctataatgaagtgcatttgttctatgtcattgccttaaagagaagagaaaaatattcgtccaatatcaagaagcaatgccaaaaaagatttttagcacgtattttcaatctcatttttttattatacgtggtgcaattttagcaaatagatattcttcaagatattttatatatgcatgtattgtattgcacaacataattgtcaaggatatgaaataaatttatatgagctatttgattttaattatgacgaaggtcccatggacacccgaagagttgaagtatgttatggacctaattttaacttctcgactatgctttaaataatgttgaaatttgtaaatagaaatattcatagtaatttttcaccaaattttttttttcggcagacttaatagaacacatatgatctctaaatttgtaataatttaaattgacactttcttttaaatgatattagcttgattaatttataattatattatttttataacctacttgtaaatttggcataacttaaattttaggtaatatatttttttatattaatatatgaatttgaaaaatattagtgtgaatatctattattaaaaaatgatattgtttaattagtgtgtgggtcaatgctagcagcttgcttatacgtaataga

SEQ ID NO: 58410 - DNA, 772 bp, Cannabis sativa
aaactgtaaatcagtattttataatttgttgtgtggttttgggtatttatgaaaatatccctatgtcaaatgcccaaaatggctcttccatgggttttgggccaaaaattgataacaaaagttccataaaaaagggcccgtgaaatcatgacaaaaatgtacatttaacaagcattatggtattgttagaaaaaaaaaaaaaaaaacaaaaacataacatagaaaatgagaattaaataacagtgaaaagttatgaaaattacacttgagtttttggaaatatgcatttgttaatgtttctatggcttatttttcaactatttaaagaccatattttgaatagttcccttaagaatttcaaattattatcaaaatagttgagctctcacaaaaataaataacacagagatataatgacttaataaaagtaggatatgaatgtcacaaattttattctgaatgtcttgcaattttgttaatctctctacattaatttacatgttagttttcctcataaaaataaaataaaattacatgttagattcgatgagactgattctgataatgtggctatgtctcttttcttaatgtacctttttttgttactcctattattttggatatcttttacactttgtttccacttgctgatattagttattttttcgtggcttttgattcaaacttgataagattaaattgatatatatgacataaaaacttaattacactaaatatgacattttttaaaaaaacttacaaatataagaaa

SEQ ID NO: 58411 - DNA, 778 bp, Cannabis sativa
  modified_base (294)..(294): a, c, t, g, unknown or other
tctctactcactaacaacacaaataaatgagataattatcctcgcaccattaatatcccaaaaaaaaaacaaaaaaattaaatattatttaaatcttgatattacagtttctataatcgtcacctatacgatcgtcgtaaaatgggcaaaataggcgacgattaaaaaccgtcgctaatgtagactttccgatagtttaaaactgtcgcctataatagggtataggcgacagttttaaatcgtcgagtataagggtccattaaaaaatcacattttattaaaaaatgtcgcctnttttgtttactacgattttaaaccatcgggaatactaaatttttcccgacggttttaaaaagttacataatttttttaacgacggtcccaaaaaaaatcatttttagaaccgtcgcgaattctaatatttgtagtagtgtgagcagtccaaaggaatagtagagtcgaggagaacttcggggttctcgacattataggcaattggcccgctcaaacttactatgtaatgactacatagtttaaacatgagacttagcagacaattagagatttaattattattttttgattatatgttcattagtagaaaaataagacttgttgtctgaaatagacattagagagataatttttcaatcatcgagattatgtgaaattttagatgtatcatgcatgctatgtgtgaattttataatttttcatgattaatgctcgataagagtagaatgtgacgatttggctattagtgtcacagtgatacggt

SEQ ID NO: 58412 - DNA, 1577 bp, Cannabis sativa
  modified_base (677)..(684): a, c, t, g, unknown or other
actgcaatgcaagagactattcggcataagggtgagcaaattagagaattgagatagcagcgagctcagcctgccctaaaccctaatcctaatcctccggcacctctggtagtgccaccggatgcagggaatcgtttggaaccgttgtatgagcagttcaggaagcagaacccgccagtatttgagggtggtgccgaaccactcaaggcggaatagtggatgagtatgataacatccatttttgattttatgcgggtcaaggataatgaccgagttaggtgtgctacttatatgctgcgagatgatgcctgtatttggtgggagattgtgtttcagggtcatgacctgaataacatgacctgggatgtcttctaggctttattttatgagaagtattataatgagtctattcgggcggcgaaggcagaagagtttatacgatttactcaaggcagcatgactgtgacagagtatgccactaagtttgatcgacttgcaaagtttgcttcagattaggtggctactgaagctgctaggaaagcaaagttcattcgagggttggatgaacatatagcacgggatatgattgttgcttctaaacaaccgggggttgctcgaacttatgcccagatagttgaactggcccaagtttctgagggtgcagaagatcagatacnnnnnnnnaatattgccagaagagattcatggaagcaaacatcaggtattgtttctggtaggggtactgatctcggtgaccgcaagaaaagacctagtgaatcatcaactgcaggcccaaacaagaggttccaggataatcaaggcatccgtcgtggtgggaacgaaaagagtggcggactttccccctgaatgcctgagatgtaaaaggcgccatcagggcgagtgtcaggcgagggtctgtttacactgtgggtagtgggtcgcatgaagaggaattgcccacacctattatgacaagagcaaaagaaggatgaaacactcgctcctgcccgagtgtttgccctgactcaggctgaggctgatgttggtccttgcactatgacagatcagctttctgttgctggtactttattgactgttctaattgaatatggtgcgacgcattcttatatttcaagtagaataattgagaagttgaatagacctagtgatgtactttctagtggttttggaactttgctgcctactggtgagttggttatctccagcaggtgggttcgatcccttccaatatttgtggaaggaagggaattctcagttgatctgatagaattgaatctggaggattttgatgttatcttggggatggattggattgtaagagaaaaatggtaacttttcagcctgagggcgaggacccctttgtatttgtgggtaagatgaagggatcctgaattcccataaatttagcgcttaaggcaagagatttgttgtgtgaagggtgcatcggtttcttagcaaatgttgtggatactatctgggaaccacaagcgggactggagcatgtcccagtggttcgagaatttttggatgtttttccagaagagttaccggggtta

SEQ ID NO: 58413 - DNA, 1163 bp, Cannabis sativa
  modified_base (309)..(318): a, c, t, g, unknown or other
tgtgagtatatctgcattcaaattgaaatgaaaaaaaatgagaattcagaaagtgatgaaaaagttggttttttgaaatacttatttttgttcacttgttttcttttgttttcggtttggtatatggaaacttacaaaagtactggaatttgggttaatttttacaaaaatactgacacacggagatctttacaaaaatactgtgtttttataaaacactagtaaaatacaaagcagaacagctcaaaacaccagtagaacaccagtgaaaacataatacagtaaactgcagtatgaaacttataaaannnnnnnnnnaaaaagtaaaaaatactgcctagcagttttttttgtaaaaaaatggcaaaagttagtataccatgtaaatttcccttggtatagggcctgttttgggttaaggcccacctagcgtaggggcccaaaagaaggaaaaaaaaatcattttaatagtatatatttttagtggttttttaaaaggatttttaatactagattttaggtaaaagtttataattttaccgttacacgattttttttttacaaaaatactcttttctataaaaagagtcgtaaaacaacaaaaccaaacaattaaacaacagtgaaacaattaaaaaacaccgtgaaacaaccgtgtaaacttaatcgagtacacagtatttttgaaaaaaaattctgtctcacagtaaaaaagttagaaatttcagtatgtagtgtaaaaatctctttaaaatttagcgagaaaaaactaaattttgttatgtttcttacttatttatttcagagaaaaatacttattaaagtttagaaaaatatgttagattattacctgatatcctccaaccaaatgcaaaacaatgcaagcattagcgaagtctatgagccaataaggttcatagaatccgaatccagttaagaggtttccaggtgtgtcattaccaaaggctgcataaccgaagcaaccgcagcctaggtaaaaaaatgttgtcacaaagattgcgatcattgaacctttcttcatagttttgttctctgctggaggagccttcaaggtatcttgaatctcgagaaggataagcgcgtatggataggcgaaagcaatgtccccgagcgcttggaagactagaaatagtttgttcgcg

SEQ ID NO: 58414 - DNA, 592 bp, Cannabis sativa
catataattgctgacacttcaaaacaaatgttaccaattaaaaatgtcatttattctttctaaggtggcatttttgatgaaatgttgctaaattactattattatgacatttttatacaaatataattttgttgtagtgacacttgcattcaaggacaaacggacgtacacctaactcaagggggcttgctcctcattttctttaaacaaacatatatagaatgtatactgtatatttacaaatatatatttggcttaaatgtatatttccattaactaaaactaatatattatgtatggcataaatatcattaactaaaagattaaaaatgtgtattgactttctaataaataagtttagcagcttctaacaaactaattaaataagaaaaatatacataaaaagactactaaaactaaacaattataagtaggaaagaatgatcaataaataatgtttattgatgactctattgcatgctaattaaataattattaggattaattgcatcaacagactaaaatttaaaattaattgtcataatattgttaatcaattaattggcttatataccgatacacgcataccggt

SEQ ID NO: 58415 - DNA, 2540 bp, Cannabis sativa
taaagttggggtgaaaatgagaggtatatatagagagagaatcatctttcatcttatataaatatctttttttattacaaaggttacttttattagttcacagactctgaatttaattaatatataacaaagagaaaaactccattgagcattatctaggacctttcatatatatatatatatataaatatattttttttcttcttcttaagaaagctatatagctaggtttaataatattctccagaagaatcttattatatatcaatactctctactacttcttctcttataagaaacacactacttttacaaagtagagagagttttctaattagaagagaccaaggatataaatatatatatatatatatcaagaattattggataatataagtcatatatatatcatggagtacagaaatcttcatcttcatcatcatcatcagaatcagcaacaggtacaagaacagtcttctaattttccaatacttcatcatcatcctgacagaatcaacaacactactactgggaataattggaacccaagcatcaattttttgtaagtctacacatatatatctatatctatatctatataattatatatactttatagtgtctcagtctaattttaagtgcttaattgcatatatagttaacttggaatttttgtaaattaagtagcttaattaattgaagaagtatacaaagtttcatcatggattttattattacttagttattcactaattctaattaattagtactgctatttatatatatttagctatatatagctatgtatatagcaagagagtactagtgatatctatatatatctagctagaagagtatatataaattaggcacttactaaaaaactctattaatcaatttatttgaataaactataaagatcatatatatatataggtcttaatacattaaagacctatatatatatgatcaattccttctataatacattaaagtcgacctatatcaattccattaattaatttgttatatttatttattgtaaggattaattaatttgctaatttatcccttgataagtcttattatatatactataatgttaatttggttaattatgttattaggaataataatggaatcaataatagtagtattgtgtatccaaatggagaaattgggtattcaaggctatggccctcatcaacatcatcatcatcaatatcaccattaatcacaactcaagacttgatgattggctataacaacagtacttgtactactactacttctgatgatcatcttcaacaacaatcatcaaccaataataatgatcatgatcatgatggtgatgatcatgaaacaactctagttaaagaagagccaacagattctttctccaaattgaagataaacaataatattagtactactccttcttctccttattcagacattgaaaaatccaattaccttttctcaaccatgttcaataatatcaataagccaatcaataattaccaccatcatcatcatcattctcatcaagatttctactcctttattcaatctcaaaccaacaatagtacttttactgatcatgatcatgatcatgatattaatagtacttcattgttgatgttgaataataataactcttcttcttcttctcataataataacaataatgggggattcaatagcttattattacaaggaaatactactaataataatttagatctattgatttctcctacgagttgtagtagtagtagtccatcttcatcagtacataattctagtaataataataataataatcttagtctctatagccaaaccaactctactactcctttaggccatggtcatcatcatcatcatcatgacatgcaagaatattcaagatcaaacagctccaacatggtaaataattattacatacttatatttctaattatgatcattattattacatatatattgttagttatattatttaatttgattttgatttacttaattttcttaatcaagtatgtatacatagtggtgttcatgatataatgttggatttaattagctatttgattctttatatctgcataaacttaatttcattacattttcatagttataatatttgaaaataagaccaatattaattatcaatattattataaacagaaatttggatttgatatcaaaaaagcattatatatattacttaattatatatataggcagagcatagttgcattaattacaaatagtatatgctcaattaattttaattttaaacattaaataaataacacacactacacagcaaaaatatacactagtacgtacctaaaattcattaggttaattaatttttatatacatgcatgtatgtatgtaatgtaggatcctctcaaaatcaagtgcttatatatatacatacatatgtgtaattgttttgtgaaatcatgatcctacaattatatgatcaatagttgcattatgatcgatctctttttcaaaatgttctattt

SEQ ID NO: 58416 - DNA, 594 bp, Cannabis sativa
tttttaaagaaaatgcctatttttttcttttttttttcctattatatatataaataaaaaaaattataattaaaaatttatgaaggaatccttgaaaaaaaaactagtaatagaattgtagttttaatgtacacagttttttttttttttttttaaagagtccaatttaaaattttgcacaaggtccctaaaaatacttgactggctctagacttaatggtgaaggtatattgaataatcattcataaaaataagtatattttaataataatataattatacagaaaaaatattcctcaacatcttgattggaaactacagttttcttctctcaaaaaattatatcaataataaaaaaagtagaaaaaatcaaacagttaaaaaaaaaaagttaatcttaatctataatccaattcaaacaattctaagaaatcaaaatctatattccgaaaaataaagttcctagtccaaacaatataatccaaggatatatatatatatatgattaaacaaacttgggttctcgagcgggttctgggtgcactcggattttaaaattcttgaatttctccaacccgaaccctgctcagtgtg

SEQ ID NO: 58417 - DNA, 940 bp, Cannabis sativa
tatatatatattatataataagtttggggtgtgccaccccttgtaaaaaaaaaagagaagagtgattaaaattaagtttggagtgtgccacccattgaaaaaaaaagagaaaaaaagaagaaaaagaaaaaaaaattattatatacatacttaaataattacatatatataactttcaaatttctacagttacttatggttttgctatggtgttgatttttattgtaggtgcaaggcagaaaatgaagttattgaaatatgttgaaaagcaggatttgttgtttaaagcagcaggtcccaagagttatagcattggctcagcattttgaaacagtgatgcataagagaatgaattgctgaggcaatgctgcaacaactgggattattgagctcaaaaaaaaatctataaactgggagtatgaaagggaaagagacatgtgggtgaggcgtacgatgcaaaacaacttgcgcaaagttatcccgagatatcaaaattttccaaatcagattcttgggccttggcacccgattgatggcgaagagccagacccttgagggagttttcttctttccttaatctatttgatttcctgtaactatgtgtccattgtttagtttgaatgatgttagttatgtgttattgttgttgtgtgtgttcttgttgttatgtgtgttttatggttgtctctagttgtttgtgtagcaacattgtgtagttaaggtcatattagtaatgttatgtcgtcatgttgtgctatgttgtgttagcttgtaactgagaagtatatgtccttttgctttagcttggtttagcactgctcgatgatgaagaataacaatttcctttcatttgtgatgtgccctgatttttgtgtgttgaaaatgctaagtttaaatgctagtttaagaggaattttttcaaataggtgtacttgtgtta

SEQ ID NO: 58418 - DNA, 1350 bp, Cannabis sativa
ggcaagaaggcactttgtgagtcggagatgacataagggagaacatgtttgaagcgattaaccagtactttggtgacaagcttggagattacattacaaagactgattggtcggaagtcttgcattcgctgaggtttcttgatcttggggataagtgtaataagggttttgttgaaacttggttgatcagccccattattcaaaacgctcaagaccgctgttgtgactaaattaccaacaacatcccaattgtgttgatagaacataggagacataccatcgataccggggctcgtgtcgggagccatagaatgtagtgctacttcgacttcagaggcttcaaaaggctttagaagatcagcattcatctcagatgtgattgtagtaggaatgacatttaaggtgatagcaacagcatcctcatctaatgaagaagctgtaaaaatctcagcaaaataattgtggatagcagctgccatttcgtgcttagcagagacacgagtaccatcatcaagttgcagaaattttattgtgttattagacttcctggccgatgctttagcatgaaaaaacttggtgttgctatcccccgcatttaaccaatccacacgtgagcgttgttgccaatagatttcctcctgctccaataattcatccaaaaaagctttagtagtcttcaaagtattcattgattcagcacaacggtgaggactgtcattgatagcctcgactttggattgagcatcagtaatttttcttttcatgttaccatatttgtcaacatgccacttttgaagattcgaagcacaatcgtgaagattagaaagaacaacagcaataggatcagagtgtgatgaagagttccaacttgctaagattatttctttgctttgcgagtcagatagccaaagtttctcaaaacgaaacctgctgcgtcttttttctggttggaaccgagagctagcaggagcaaaagtagcggatatggcccggtgatctgagctatagtagtctagatgtaacacataaggggcttgaaaaagactctcccaatgatggttcacaaaacaccaatccaagcgctctttaatagtgttaacacccgaacgatttttaatccaagtaaagggatcaccttcaaagctagtctcatgtaatttgcaatggtcaagagccttacgaaacgattccatttgcctttcactcctgaggcagccacccgatttatcctcattggaaagaatttcattaaagtctccaatggctatccaagggagtactgatggagaaacatcagcaagacgttgcaagagcaaccatgaatctgccttatgttgcgcatcaggtgca

SEQ ID NO: 58419 - DNA, 2489 bp, Cannabis sativa
atgtttataactcggctggctgaaaagccttctacaagacagaaatgtacgaactgttaacttatgtattgacgagaaaccatgtgggtgcacgtgtgcatgatgaggcctcaacctgatattatacgatattatacgatatacaaactgagcgtagatagtgtggcgagtcaagataacagacaacgaggcatttgtctcgctagacgaaggtatgcatgcgaggaaggtcatctcgacaccagaaaatattgttatcaaagttaaaacaatattagtctcaataagccaaatgacaagcaactactcgctatctttaattacgcgttcatctcggcccaataaaagcaagatattcacagctatgtaaaaacttcatttatttagcttgatttgtaatccaatcctctaatttgagggaataatcgctgtaatgattattgccaactttagtaaattactgtccactatgtaattataaatggtggcagacaagatcaagaggggggacgaaaaaactcatatgaaagaggctctaaaaaaaatactcagaaatctgaataagattgacttgtggactatgtagaattttaactgcaaaatcacgttaaaaaccatgtgttcatattttatttttctatagcttttattttttctgtgtaaaattattaccgtgaggcttaaagttgattaacaaaaatctgcgttaacacctaccactacactacagaacacgttgttgtagtgattcataattagggatgccacttgcttacaatatctaaaattaaacaaccgaaataggttctccctttaaagagtagtcataaataatctaaaaattatgatctttattaacaaaatgtatataataattattgaaggctttatataacctgaaatcatccacaaaaataatattatcgtatccaagtaattctaaagtctgatctgatggacgatatttgccttattattattattatttattttttatttttttgggaaatcagcagtgtaattcataactccaataaactttttacaacttgtacaacacctttaatataaaggactaatatttctttctaatttttacaattcactaaagcataatgaatcttctatcgacagtttggtaggctatacactttggattctagtcttacatacatttttaacgttctatacaataatactcgggccatcatttgtttggtgccaaattttttcattttgagctctccatagttggtacactaacgctgcacacacaacatattagacctgccttcgaaacacattcaccttcttcttctctatgttgcgaaccaattcagccaagcagattgctttggtctgccaccccaatcaattatttattacttttaggcaatcaagggagaaagagctttgaaagaaaagatgctcacaagtttcaacatccccattacacataaggcatgttgaattcactgctattttgaatctaaatagcgtttcttttatcttcaacctattttgaatggcaagccaaaacatgaagctatgtttaggggtgtttaaacgactccacaattccacaattccttactccatttagcacgaccaactgtgggacaaagtattttatacccttctgcaactttgtatttagtctgagtgaaagtagaaggattaattaagttcatgagtataccttttagtgccacaatctttctccaatactagcttccatgttggggagccaggtaactccaccaattcccctctttgatgtatacactatagatctattttacccataggttatcttctttagttgttatggcccaaataaattgcctctttgtttcattcagcaactcttttgaagccaatacactagctattttggcttgacaaacatttttccatgctatttgccctactcctgacatcatttgctgccctttccaaaggaaagctttgcatacactttctatctctttgataatcttctttgggagtagcattacttggcttcaataggtgtgtatagctagcaaaaccgagttcacaagaacagcccagccagcaaaagagatgtgcctagtactccatgatctgattttgtgtttcattttatatatcaatcaagatggttcattccattgatgagagtcttttgtggctgatggggatacccaaataagtgaaaggaacttcacctctttggaaacccgatgcatcaagtatccgttgcacttctgtgggtgacataccatgacaatagataaccgatttggaaggattaggttgcaaacccgatgtctgagagaaaatcttgacaccctgtagtagatagtagatgctcttgaaatttccattgcagtagagtaacacgtcatctacaaacatgagatgatttagtttcagatctctgcatctatcatgaaaaatgaactcaaatttctgccctactctcttcatgatccttgtgaggtatt

SEQ ID NO: 58420 - DNA, 1337 bp, Cannabis sativa
taatcctagttttcctttaaaaatcaggataaagagtgattttttatcccaattttcctataataaccgggattaaaggtaaccaaaaaaaaaacaaaaagaaattatactaaaactaataagcaacgaaccacactacagagacaaattttttttccttaacaatatttttcataaaatatacaatcgtactgatctaaaccccaaataattagtacaacacacgaaccaccttggacaacaaccaatagtagcgaaccaccttcgacaaccgcgagtcatcgtcaacgaccataaacggtgaccacgaagcttcgtccaccatgaaaaaccatgaactcgtcgaccataaaccttcacacttgaggaaagagagaaggagagagagagagttgatcaacattttagaaaaaaaagaaagtagaacgagattagaggatgtggagcacaaatctctcaataataataaaaaaaagaagacaaatggtacctagaagttttagagggcatggagcttggatctaactccgttgactcgtccttcgcaagaatttgaccattggcctgagatgatgcatgaaaatagaagagtagggaaggactgaagttgagagatacgccatggtagaacctatttgatctttatgtggacagtcgcttagagagagagagagattgggtaagaggcaatgacaataaccctaataaaaatgaaaccctaaaagtcaattgttcattttatatgtgtagtcgacccaacaattaaaagacccagatatatggagactttttatcccggttcttatgtaaaatttgggataaaaagtcccacttaaaatattaaattgtgtttagaaaatgcataaaaatagccttttcaacattattttttgtctgttttccaaacaaggcccttattccaaacatttatttaaggctccaattgtataagtgggatcaaaaatttttatcccactttttatttttcaagtgtaaaacgtgggataaaaagtcccttttgttgtagtgcctaggagtcgccttaggtgaccactgccataagagaatgtcacaggtcgctcatcgcaaactatggaaggaaaattattcgagtgggttcccactgccataagcagggagaactactttaatcgagcttgtcctccatagcattcccaattacttcatgtaaactgctcaagtccctattactctttgtgaacaacttgatcgtattctcgctcatttctagtgggtgagaaatgctgacaaaagacactactccgcgctttaacatgcactggcattcgatttgccaaccaaagagatgtggaggc

SEQ ID NO: 58421 - DNA, 854 bp, Cannabis sativa
taacacaacctgcctcggattttctccttgtttcaccctctcaaagattaatggcgctctatcgaacgtccatgggcttccttcaataaccctttcaatgtccacttcatggtaaaattgaaacaagaataaattcggctctaattccttcacataaagtccccttcctggttgccatagagtggcgattttattttgcattgcctgaaaatcgatagcacgatttgttaaaaacgttcccaccaaaagccatctatcatctatttccgaagaatcctcagcaacattgtcaaaaatcagtccttcctcatcctcatcgtcaatcgaaagcgcagcagccatcctctccactgtatccccttgatccattgtgaccaactaaaaataaacttgagacaaacacgacaaagtaaagtgatcaaacccaaaaaactgtcaacgaacaaacaaccatgtcaaaaagacaggacatatatatcaaaataaattaaaatagggatacttatgctcctattgattattttaatacttttgctcatgttgctagaacaactaccataagggtgtttataaattaaattaattatttgaacgttctatagaagacaatttactcattaattaataaatgtttatttttgatttgtcctgaaaatgtttatctagaggtacttataaaacatatcataatgttattaaaaaatgtgatgatttaaaagtgataatagtaaagtaaataatattagggttcttttgccttaattaaaactctaattatatataaccattttcttatcaatataaagaaaattattttcacttcactaccaaaaaaatactacttatatgaccaa

SEQ ID NO: 58422 - DNA, 739 bp, Cannabis sativa
  modified_base (675)..(677): a, c, t, g, unknown or other
atatgcaatccttgattttgccctcagcaagcttctaaaaatatcaacaactaaaccatatgaactcgaaatcaacaaatctattcgagaagataggagctttatcatatcataattgtatcctagaaaatagggatgtttgctattctgtttactccttttatagagccatatgtaacaactctctccctataaatagtgagagcattcacaaggggaagggaccgaaaaatagagagagagctatactcatacttacgcatctgagagcactttgctgagagaaatctgtaaacactttgagagacatagctagaaaccaccttgtcttccttggtgatttgcccaatattatctcacaagtaacacaactaaagaggagtaggtcattacccatcactactacaaaaatagtttttttctgacgttttaaaacagttgtttaaagtattcccgtcggtttctataaccgtctcctatacgaccgtcgcaaaacgggcaaaatagacgacggttaaaaaccatcgctaatgtggacttcccgacggtttaaaaccgtcgagaatacaaaaaaaaaaagagagagaaaactacagatttttttgccattaatggaagaaaaatctgtattttcccccaattttttttcctgcatttgttttataattttacctnnnttaaaataaaacaactaattaattttattacaataacaactaactttaaaacacattaaatt

SEQ ID NO: 58423 - DNA, 3729 bp, Cannabis sativa
aacaaagcaaacccagacgaaattattcaacactacatcaaaagaagatatctttagctaaaacgaatcaaaatttgttgaatttagaaaacatctagtcaaaagaagatatataaagctaaaacaaaccaaacccaaacccagttggcagacaaaaagtgttaccacggcattgaagttatatctactgaaaccttcccacttctccaaatcataagcagtcaaatgcttacaacaagcagagaccattagatcatcactcccaccatcatctttcaaagctctcttctccccaaattcttcaccaacagttgatttccctccctgaaaacccttcacaaattcaacagcataagccgaagcgaccacggggtcctccccaggggtctcctggcctctcccccatctggggtccctaaaaatgttaatagtgggtgcccaaaacgtcaacccagcttgcccaacattatacatcgcacgagcctcgacccctatagccgatgcgattctgaaccagagggtccggttaaaagaagccaccgtcagaaggacttgggggaagctggtggcagacgaaacgacaccgccgaaggagacacctgggccgttggtggcgatgccgtggagagattcggaccaccattcgtagggagggataccaagcctggggatggagtcagcggtattggtgagttgaccaatcttttcttgaagggtgagaagagaaacgagggagtgagctcttgcggagatggaaagtgaggtgttgcagaaggggtaggagctatggtgaggtgggttacatgggaaattggagatggtggcagagtggattttgaagaggaagaagaagaagaagaagagaagggtggagagagtagccatgttttgcaattgtgttgagaagacagaagaaaaaacaaaggttgagccattatagtagtgtaactgtagtagtgcatcattgaatgtttttcttagttgtgtcgcaatctatgtgatttggcttcagtggattttttattttacttattttggctttgttttagaggttttgttttatgaaattgcttaatttgaatgaatgaatgacacatgaagaagagtgagtgagacgactgcaatatgattcggattccacaccaaccatttttctccaaacaaacaaaagaaaatctgaggtttcatatccttcaaatgggagaatggaactaatactcatgatgtggaaatagaagctttgtgactgtgagtgtggtgtatttgtgtaaacaagactcctgagttattcttattatcctcatagcatatctggtgtgttataacaccagtttttactttttaatcatcaattcataagtttttattcattgtcactttcttaataaatggaattacagaggatggacaaaactggggaagcaataacagtagtaacaatgggaaaataatggttcttattattggaggagtaagtgctttggatttcttatgatgatgatgatttggtgtagattatttatgtatttgacacaaatttgtttcctttaatccactcacaattatgcaacatgataatgttggctatagattttaagaatgctgtatttaagataaatagcagtaaaatcttgatttatttatttatacttaaaagaaaaccttgcaggtgagtcagtggtgtggtgagtaatctgagtgtttttgctttgtgtttttgttgtcagcggtgttcgtgctttggaggatgagtgtgctgttttggaggatgaggaaatctgtagatcggacctattttcaacctgcccagttaacagattgggcggtttgtaattttttcgaattatttcggcttgtaatttttatcgattttttcggtttggtttagacggattattcggtttagacagtttacgaatttttttgtacaaccctactttctagtatttcttcaatattttacaacttgcccgatgatgtaatgatttcattttcatccaaataagtcttcttctgcaacttgctctgtttgatacggtagtagctaagataaagataatgtgctcctaacaaaaaatcttccagcatagctacaccaaacacaaaaccaccaatcaaatattaataagagttacaagaaaaggtattagtattacaagtaagagttaacacaataaaaataaaattacaagaaaaactaaacagatcatacagtagtattatttttcatataaaaatatatgtcaaatctgctactacaaacaaattttgataattactatgtaaaagaaataataagaattgacagaaatgttcctcatctttgattcaaatgacaatgaaaatggtatggaacttttaaaggacctaacacaaatgtataccattttcaacaacaaccaataaaagagatactaagaaacaacaatactaccactgaatatctaagacaaacatttataaatatgaacgcatatatctttacaccatacatgttgctctgtaaaatgtgtaaggaaaaaaaaaaggaacaaatttaacaaaatagaaaccaagatggggagtgcctgtcaaaaataaatttgtatgtcaagctattacttgaagctacatttagtttgtaaataatagatggatcatggcttggatgcttactagatcagcttctaggctgattccttgaacgattgtctttctaacatcagttggatatcagtctaagacattaaaaatcaaaccataaagattatcaagtaagaaaatactagcctcgaatcatgactagaccaaaaaacttccacaaattgcttgaatgtaatcagcttaggatcatactcaacctgcaagattcataaaactgtataataaaactcaagtttcaaacatacaatttttttttatctaaatcaaaatgaaagaatcaagcaatatgaaataccattctatctaattctcaatagcctaattgagatattcactttcatctttgatctctctcctcctcaaagaaatacctcttaaaacacatcatcagtttatcaaaatcgaatttttttccccaattaaacaaaatcacgaaaagcgaatgaataaccctgttagagtaaattcataaccaaaaagattaattctgtaactctgtaattcagtaaaagccaaaatgaattcaaaaaatctctacacgtgtaagattttacaacacttacataaatttatgaacaaatctccacgcaggtaagcaaaggcgatataaatttatgaacacaattgaagatgcataaaaatttatgcaacccttcaaatcagatattaaaacatgtaaaaaatgtgaaattacaacacattgaaaataaagtgtgaaagcaaatttgataccttgagtccaagacccatatctagtctctctagcctcgtcgaataaaccatttgtgaaagagtgagaaccctaaacatgtgtcatcgagtcgctgagcacattcaaaggcaacaatgattgggacatgcgcagagagaaagatgtcgttgatctccatggcatagagcaattctgaagagattgacggtgaaaaataggaccagtgtaaatttctttaaatgtcattggcccttgaataattagcttttttagttcctgtacttatgacactatactataatgccccttaatttataagtgtagttaaaaatatccctaaaatatatcaattggaatagtataatccttctatc

SEQ ID NO: 58424 - DNA, 1361 bp, Cannabis sativa
aagtcacatctgaggtagcccctattcagaaaaccttgggctgtgaccgaccagctcaagggctgcttgattttccctttagaaggtactgaatcctggtagccatgtctacaaaagaaaagcaataaagtcagtatccacgttataaacaccaaaagcaagtaatggtagaagaattactaccaatagtttcctcaagataatctacccaaggacaaccatctaaaggccctctatcttcaaaagaagactcattagagctttcctcaattacaaaagccttgccttttcctttgtttgctggcacaggccgagcaagtctcactgacttctatccattaggctgaataaaaaataaggtgtcaccaaccatgccaccccatacaagatgcctctgtcaagctggatccctcctagtttctctacaagaaatctaagctagaggaacctcatcgtcagacttactttctccttttcaactgcagtttcttcttcttggcattttccttctcaataggagcattgcctggatcctcaagaggattagccggggcaacaacaccctcaccagaaaggtacatgccatactttctgaagttctcttcacaggccaaatcataaatgttatgccgagcagtttggagatgttaagatatgattggccctatcccttaattttaatttaggggttgatcgactgtaggttgggacctagtgagaaaactagcagacaccctttacaccgtatgccataaagtaactcttggcgtagcctccaatctttgacatgggtgtgtcaatagtgccacccaactactaatagccctgctggctaaagtagaagtaaccaatcctattctttcctggactagattttagctcaaaataataattcaccatgaaaggtgtagactgcgaccaactaagctcagcgtacatgacaaagagcactaaaaggtactttatcccctttggtgtaatctaagtcggacataacttgaagaagttagctatgtccatgaagtatgagtgcagaggaagtacacccccttgctcgacatgggggcgagaccatgctatgcagttcagctgaggatggtgagccaagtggtcttgagcaggcctaatacatcaaagctggctaacaagtccgctagcaatgatgttgtaaagtttggcagccaataaagtagagcgaggagatacccatctatctccatcccccatttgcaaaagccatggcacagcagcctcatcctcaatatggtcaaccccaacctcagaaggttgacccctgctattcagaggcactctagactcaccataagagccaacgggattaccctataccacgttgcact

SEQ ID NO: 58425 - DNA, 1004 bp, Cannabis sativa
tgtcccatttggtttaggcaccagtaccagattggctagccactccgggtagtacacatccgtgattaggccattggttaacaacttatccacctctttctctaaggcgtctgccttcactggatcaagaggacttcttttctactgtaccggaggcatgtctgggttgacattcaagacatgggtgaacacatgggggcttattccggtcatatccccctggcaccacgcgaagacatccgtggctgcccttaacgtatctatgatcttgcttctttcctctggctctaggttttttcctagacggataattttagtagagtcgaggtcgcacacacttacttcctctatatcctccataggttctacgactatttcggatcctataccgtgatccaactcggcttgttctgccaaagtgggctcctcattcatgtgtaccaccaacactgacaagtgtaatacgacattgtaacattgtctcgcctctccttcgtttcccctcatcgttcccacttcgacttcccaggtagggaacttgaggcataggtgtcgaatggaggtgatcgctccaaaattgaccaaggacggtcgcccaaggatggcgttgtaggcggtgggacaatctaccacaacaaaggtgcagtatttgaaagtgctctgtggggtgtcggggcacagggttacaggaagccttactttccccattgggataagtgtcgtcccgttaaatactgtaagctgcgaaccactaggtgacaggtccctatccctgagccctatggccatgaaggcctctttgaataatagatttacggagctcccattatctaccaatattctagtcacgaccttattggcgatgggagtttctataaccagagggtcgtgatgggggaagcgcactggttttgcgtcttcttccgtgaaggtgataggttggtccatgagtctaggcgtttgtgctgggagttgagtgacctcccatacttcatcgtgtttta

SEQ ID NO: 58426 - DNA, 919 bp, Cannabis sativa
tactagggatccaattgggtgcagataaaggaacattaataccaatacatcttccaaaccagaccctttttaagcaattgacggccccaaagaatactcctccaagtaaaggaagaattatggccaacaggagcattcaaaaaataagaatgtttgaagtatcgagctttaagaatagagtgaagaagaaagttcctatcattccaaactcgccaagcttgctttgctagaagggcttggttatgagaggacaaaatacgaaatcccaaacccccaaaaaatttagagacagagatgtcatcccaatttttccaatggactttttttgtgccctaagaaccccaccaaaatctggctatcaaactttgaattttctggcatatcaatttaggcactctgaaacatgacatagcaaaagaaggaatggcttggaccacagccttaattaaagtttccttgccaacacgagaaaagaacttttcattccaagaatttaatctagaggagaccttttggaggagataatggaaaatggaattagtaaccctgccaacacaatgagaaactccaagatacttactaataaaaccctccccatgaagttgtgaagattgacgaaattgaagctgggaatcaacagaggtgttaggggagaaaaggatagaggatttctctctattaaccaattggcccgttgctctgttgtaaagattaagaatgacattgagggcatcactggatcgagagttgacttgggagaaaagcatgctatcatcagcaaacagaaggtgagacaggggctgagcgcccctgcacatctgaattccagaaaaattagcatttgtctcttgcagacgaatagcagcagaaagaccctcagcaattaagaggaagagatagggagataaaggatcccctt

SEQ ID NO: 58427 - DNA, 1443 bp, Cannabis sativa
gatttgtcaagacttggttagacattatgggaggaagtctgctaaggctaattgcataatcaaacttgatttgcaaaaggcctatgacaccattgagtgggacttccttgaagaagttctgaggggtttactctttccagatcaattcatttctcttataatgaattgtgtccgaacgccaaaattctctctcttttcaatgtatccctccatggattattgaatcaaagagaggattaagacaaggacatccactatccccactcctttttgtcattggcatggagtatttgacaagaatcatgaagaaagtgggctgcgaaaaggactttgcattccatgacaaatgtgatagtattaaacttaaccatttatgttttgcagatgacgtcctactattttgtagaggagacttcaagagtatcattcttatgctacaaggattgaaactcttctcagcaacctctggattacaacccaataaagccaaatcttccattttttgcagcaacatggaagaacatgagataagaagagttttagaagcatcaggttttacaaggtagcataccccttttagatatcttggtgtccctatatgcaccaagaaaatctcaaagcaggaatgcaatgttttaatagaaaagatgacagcaagaatacgaacatggagcactaggaatatctcttttgcgggcagagctgtactcatcaattcagttctttcagccatccactcatattggtgtcaaattctcaaactcccaaagaagataattcatgagatcgaagctatatgtagggcttttctttggaaatgccaattcatgatgcaaggagctggattactatagcttgggacaaggtttgccaatcaagaatagaaggaggctcgggaatcaaaaggattgctgaatggaatttagctgctcttttcaaatatgtgtgggctctagctaataaagaggataatctttgggtcaaatggatacacaatgtgtatcttaaagaagatgactggtgggaataccaagctcctatcaatgggagttggtattggaaacaaatagtggcagcgaagaaccaaattaaaaatctggtggacacacaacagttctcacaaaccaggtacaaagtctcccacggatatgaactgctttgccccattcaaaacagggtgtattggagcaatgaagtttggaataggtttaacacacctaaacatagttttatactattgtttgccatacaaaataggttgaaaaccaaggaaagattgcagaaatttcatattgctattaatcctgtttgcagcctctgttcatagcaggatgagacaacaaagcacctgtttttcagctgctctttctcactaatttgcatgcggaaaatcaaagaatggctggcatggggggctcagaccacagagttgtcacagttgat

SEQ ID NO: 58428 - DNA, 1491 bp, Cannabis sativa
gttccaactctggagtaagttgggaaggaaaggtagaggaagaggaggctgccccaataacagctcggagctgagaaacatggaagacggggtgcaccgctgcactaggaggaaggtcaagcttgtaagccacttcgccaactcggctcaacacccgaaatggcccatagtagcgggctgccaacttttcattacgacggacagccaaagtcttctgtcggtagggacggagtttgacaaacaccaagtcaccaacctcaaaacggacctcacgacggtgggaatcagccgtggtcttcatgcggtgttgggctcgaaggaggtgcatcttgaggtcatcaaggaaggagtccctatcttccaacatttgatccacagtcaagaccgctgaaccgcccacaggatagcgcaccaagggtggaggatcacggccatagagcaccttgaaaggtgtacatcccaaagatgaatgctagtgttataccaatattccgcccatgacaaccacttagcccacactcgaggcttctccgaggcaaaacaacgcaaataggtctcaaggcaacggttaacgacctctgtttgaccatcggtttgcgggtggtatgccgtactacgcttcagaagcgttccttgctgcttaaacaattcagcccaaaagtgactaaggaaaacacgatcccggtcagaaacaatggaactcggaattccatggagcttgacaacgttgtcaatgaaggcttccgccacagttttggcagtaaatgggtggcggagaggaataaagtggctatatttgcttaaacgatcaaccactaccaagatcgtatccaccccttcggaacgaggcaagccttcgatgaaatccatggtgatatcatcccacacctgggcaggtagaggtaacggttgtagcaacccagctggagacatcgccatagacttattgcgttgacacacctcacaacgcctaacaaagtcaacaacatgttgcttcatccctgtccaaaacacatcagcccgaatccgttggtaagtgcgtgtttccccggagtgccccccaatgggagtctcatgatattccttcaaaaactgggataaaagggaagaagtggcagcaagcacaactcggcccttgtacctcaactgtccatgatcaaaggagaacccgggaacctccttgtgttgctccaaatcagcacaaatcttagccaataggggatcagctagcacttcttggtggatcatctcccaatcaagccaagaggatgtagtaaggacggcacaagctgcgggaagaacccttgacaaggcatcagcagccttgttagcaatgcccggtcgatattgtatctcaaaatcaaagccaagtaacttcaccaaccacttttggtgttccggagataccagacgttgttccaaaaggaacttcaagctttgttggtcggtgcgcaccaaaaacctccgacccaacaagtatggccgccattt

SEQ ID NO: 58429 - DNA, 1003 bp, Cannabis sativa
tcatttaaataaaatgatggattttggatatatctttgttgctacgttagtactattttctctcaatgtggaagacttattgcttgtttgaaattttaaataaaaactgttttttattttaaaaatagaaaactatttcttgagaaaaattaggcgcgtttggctatttttcagaaaataatttttaaaaaataaagttacagagaacaattaggcgtgtgtggccatgattcagcctttctattattgagagacttttattttttcttagaaagttctgggctcactagcgaacaaaggtaagtctgccatttatggtgcttccttgaaggatgaggtttgggaaagattgactagaatgactagttttatgagaggatctccactttttaactatttggggatgaaattagcaacatgtgtgtaacaaaggttgattgtcaatgcttggtagataagatgatgcagagacttcgtcttcagagctctagaaacttatcatttgctaaaaggtgtgttctaataaactctgttctattctctttaaatctattggtcccaaatagtgatattaccaaagatagttattaaaagaatcaatcaattttatcgagctttcttatggaaaggtaaagtttattataaggggcctatcgaagttgcttgggctgaaacttgtaagactaaaaaacacgtgggtcatggatttagagatgttggtttttggaacaaatgtgctatgggcaagtttttttgggcaatagagaaaaaaagaaagataacttgtcatgagttaaatagatcgattcacaatgtttacttgaaaggaaagaattagtggagctacaaaccttccacccctagcagctagtactggaataaaattttccacactaaagatgagctcatgaatgtgtttgttgcagtagacttgcaaagtaaaactatagttttgttggattgtacaagtttgttgaagaatttgatgatggcagctggcact

SEQ ID NO: 58430 - DNA, 1021 bp, Cannabis sativa
atgaccttataaataacattgcaaagagaaatgggtctgaattgactgggtctcttcggattcgggaccttagggataagcacaacattcgttgtatttatacctttatgcatttgaccatttctgaagaagtccgaaaccgcatcacagaaatcatcccccacagactcccagtaatgtttgaagaagagaactgacattccatccggacccggcgccttgtgactattcatagcgaacaaagtattctttatttcgtcccgagagggatggagaagagacccctcttggtcctcaagagaaatcctttctgggaataacctcctgcaatccagtttttcctttatcctaaaagaccaaaactttgctatatgagatcactacctaaacttagtcaaacatagttaaaaattttttgaagctcagaaaagcttagtcaaatatatgaaaatccatgtgtaactaaaacaacatatatttgaacttgatatggaactagtctatattcaagtatatagaccaccttgtaatattgatgatatagtcttaattaccacattgctgaaaattttattttttatgatcattcagtattataaataatattagaccataattagccaacattaatattttcataaaaattataataattcaaaattccaaatagtataaactataattgtaagaaagctgctaatcacaccctttatattctaaattgataatgtgtattagtaaatttatagagtatagatgtatataaaaatctttaatttattttagttcttccctcttaaattgaataaaattaattattattatatattcttgtccaacatcaataaattcctgatataatacatgcaattaaagtaaaattaactttaactcaatatacaaatatcttagagtttattttcgtttataaataatgactaaaaatttaattagctcaataaatgttaatttattattagaacattgtaatgaaaatcatttaattattttctttaatgag

SEQ ID NO: 58431 - DNA, 1029 bp, Cannabis sativa
ttcttaccttctttctagccttctttctagattcaagtctttctagattcaagtgtgttggccgacctgaacggaaagtctcttgttggatggataccctaatcacatgatgaaatcggctaaatcacatcctcgaaaccttaatccgggaaacccaaacctataaatctaggctctgttatatttactaaggatttacactaactcagaaaaatagggaaacacccaactaaggcactgaaatgatcgagaattgagaaaaatgagttgctcggggaatctgccaaaatcggctaaccggttttacaggccctggcaaaccagttagccggtttgcaccaggttttccccaacaactcatttcttgctcaaaactcttccaaatgccaccaaaccttctagagtacctaaacaatgcatatacaacataatccaaccactaattcacaaaaaaactcaatgaaactcaacataccattaatgacctaaactttgagttcaaagctcaaacttgagcaattccatccccatacaccaaaactaacatccacagcttaaaatcaactcaaataaagcttacaattcgaaccataatctactctaaccctaacagccctaatttccaaaatcacaagttaacatcaaactttaaagctcaaacactactaaacaaaggtactaaggcttaccttggcttcaagaacacttgaatccctgctgaatttccagaaaaatgggtgaagcttgattatttcccctggttttctagttggttgaacaaagagagagagaagggaaacagatgaactttctaattttggttttctttgatttttctcaaaatggaaaaatgattttctaacttagtccttgctgaaaaaaataaaaggccaagtgtcacactctagggcagcaaccaaaccatctcccttggcaaaagactaaaatgccctttaatttaaaactaaggtattttcaagactaggtgtaaaattgtcaaattctataaccccgctcaactctgatatt

SEQ ID NO: 58432 - DNA, 1038 bp, Cannabis sativa
  modified_base (85)..(93): a, c, t, g, unknown or other
aataataataataagtcatttttttcttttttgaaaaatgcggttaataataatattaagtctttttttttttttttatttaagnnnnnnnnnattacaacatgttttacttgggactcgaaccaaggacctccaacactcacacacccacctatggccacttgagctagcctcaagtggtaataataatattaagtaagtcctaccattttaaccctctattaataaagcaagactcttcaatcaaaaataaaaaaaaaataaataatgcagtactccatatggctttgctatatattttaaaacaaaagatgtttaaattgataacatcagcccgtctagctcagttggtagagcgcaaggctcttaaccttgtggtcgtgggttcgagccccacggtgggcgttgcagacttgcagttattttattaatttttttttaatttccaattaattcttattgtctttgtctatccacccacacctattggctattatgagattactcgcccatcaaactgaaagggacaacagtaagcacttgaatatattttgtttaagaggtcatattcagtttgatattgttttctcaatctatttatatatcaatataattcttttattagatatgtgagttataggtatgtcaagtgtcgctttatatttctaatattacaattcctttaagttataatttttctagatcaattactattttttacatttttctcaattatatttttccttttcctcctttttatattaatagtttttagaagttatatcataaacatttaaaataataattctttatttaaaacaaaaagctcaccctcaatgaaattatcacaacaatttttgtactaacgtatgggtattagagagacaaataactaataagagtcaattactcttatataattaattaagaaacaaatcacgcttcgcgtgcgattacatttcgtttagtgataactaaattataaaattatattatatttttaattttaatatcgttgatatatttttttaaaaaaaa

SEQ ID NO: 58433 - DNA, 1635 bp, Cannabis sativa
  modified_base (66)..(81): a, c, t, g, unknown or other
agatttcttaatgactaagaaatggtaaataacttttattaataaaattttattattattattatnnnnnnnnnnnnnnnnattattaatattattattattaaaatttaaagttatcatatatatatgttagaattttgaaaaagaaataaaaaacctaacctatctccctctccctctccctcatcgtgccataaaaaccaccactagcatcacccttttcttcaaattttcagcctaaaaccagctctagtagcagctgtgagcataggaaagttcaaggggggaaaacttgagggcctgggattattgatctttctccaagcaggttggtgaacatacctgaactggaatttgaggtaagaaaagtataatgtaccacacggcgtgagaggttttgagattatcgattgtctaattaggcaatgataatgtgaggatactatgaacataatatatgggctcacttaattaggtgatgcggtaaacctagcgacgtaccgggcgtaggtacgggcgttagtgacatatgatgagtaccgagcgtaggtacgggctcacctaattaggtgatgcaatattcctggctacgtatcgggcgtagctacgggcgtcagtgatatgaaattgcctggttatggcatagattaaaactattatagggttcttcctgacaacgtatctggcgtaagtacgggcgtcagtgacatatgataagtactgggcgtaggtacgggctagtctgattaggtggtgcaatgatattatacatgatattgtattatcacatgggcttgcctaattaggcaatgcaaatatgtgagcatattagtttttatgcatatgactggttacattatctattattgtggtttaatcattttatgataataaaatgtataattagttatttaatgtatctttctttattacttttcttgctgagtctatttgactcacgggtgctctgtggtgcaggtaagggcaaggaaaagttagaacaaccatgagatgacggccttctcctacaatgtacatattgacccaccgacctgtgcactaagttgccaggagttgttttggactggctgtatctgctgtatcttgaattgcgttttgaattgctattgtatatattcttttggttaaatcttttataacagggatccccgaaacaccctttattgtcgttataatatttgttttttagtattttattttagtcaagtttttttgttatcctcacagtttttaataattaatcaatatattagtattaaattagtttttaaaattatacacgtggcgtccccatagaatagggcgttacaacttggtatcagagcagccatggttttaaaggtcctaaagactggtcgaatatgtatatttattgcgaagacaggtcgactcatgatttagtcagtatttatgttatctgctattgccttatcttttaagaaaatcgtagtgtataatgggaagacgtagtgtatgaatggcttatgcatattgatattgatattgtctaaattctaaatggttgaaggtttttttaggttacaggatattagatcatgcagcagcggtctagccatttaaaccgcgagctggggctcagggtaggtggtgggg

SEQ ID NO: 58434 - DNA, 1737 bp, Cannabis sativa
aatagatatatatagatatatagaataatacttaaatagagtcaccaactgtttcaaaaaaaaaaaatagtcaccaaaacttttgtatatacagatattttttttattattatgtgttattctattattttataccaataattaaaattcttatttttatttcttttttttttaataatttggtgacctctaataaagaaaattactaatatttaacattgtagactcttaagcctcatttactaaaagatttttaaatgagatgtcttacacgagaattttttttttaagaaatactttgcaatattttttgtttgatcaatgtgatatgtatgtatgttattttttttctcttttatatataaatgatagaaaagatgagtcataaattattaggattttttaattgcatcttgattggtaaacaaatcatatgtatgctgatacaacataagtatttatcgaaagtcatactaacaaagtaatatacatgaattgtgctaaaaaaaatcagtattatttgattaattaattatacagtcaaatgtatttaaaccttaattttatatgtccaatgtgtttaaaatgtttaatcttcaagtttcactatatatatcaaacgaaaatattacaaaagtgttactttaaaaaaaaaaattcacgtgtaaaatacctcatttaaatattttttagtaaatgggtcttaatggtccacaatattaaatgttagtaactttctttattagaaatcactaaattatttaaaaaataaataaaaaaattaattaattaatagtataacacataataaaaaaaatatttatataaacagtttctcgtgatattacttaaattaaatattttcttatcttaatttaattatatatataaatatatagatttacactcacaaattattatgtgtatcacaaatatcaaccatctaatagtatggtcaaattaatgacacaatttcataattatttatttctatatatgtataattaagaaaacattcctctactagtgagtaagttttggaaattttcccctatactacataagtctttgtcagtttctttattgacaaatcgttaggttttatgtacattttaaagtcaaaacagtaaatgatttcagaacctactaaagaaatctttataaatatacctttgaacttgtaaaaagtttaatatctaacatctgaaaatgaagttttttttttaaaaaaaaaaaaaaaaaatagtgcatgctttgtatcataattaaaaaataatttttttatttttaaaaatataaaattattttttgaaattaatttaacttgtttggccttattttttttaaatatttttcaaaaaataaagttacaaaaaataaaaattttaaaaataacaaaatattggtaccgtttggtaatacttttgttttttaattttttaataacaaaatgaaagtcaaattttgcttttgaaaaataaaaatgctttctgtaaccgcttttgttttttaattttaaaaacagaaaacaaaagtgtgttctataaaattcattttcattttttgattttatttacggtctaggtccggggtcgaattttggttcaagtcaaaggtcaggttcagagcaagggccgtgggagattcgggtccggatctgatcgaagtccaagatatttatttaagaaaaaaaaactatttaaaaaaattttgaaagtgtttttttttttttaaaaa

SEQ ID NO: 58435 - DNA, 2321 bp, Cannabis sativa
cttacactttatattaacttgactacgtatacttgcgtatataatttttcacttatagagtatttagcaaagctttcgctatgtaaatttttttcatcccccctttgtgaggaaataaaggggtttatataggctaaagtatgagtatgggcatacccgtgacctgcctaggattttttacaaaaagtccacccactattggagtaaaatacataaaaatactaactattgagcccctaagaaggctcttcttcatggggcgaagggtctgtatagtcgggaccactattggcgcaggatgcgtgtcgtgtggaggctgcacctagtagacaaaacccttagaggagtcgtcaggtagaaaggtgtatttagaggaggtatgcgcactaccatggtttaacgtaggggataagatctgaacctgtgtcagaaaagtgtggctgccacaagagccttccaaatctagcttcatgacagtcctcctgtttctcatgtacagttggcatctgtcttaaactctttgtaaggctcataggtgtctccctgtaagaatagttgatgcgaccttctccgggtcctggatggtacatttccttcgtgtgaatcttcagtcttaacctggatctggacttctgtcgggttagtttagtccttctacgactctctccaattaaggggacttaatcgagagttgttaggatcgtcaccttctgccttttgccacatgtccttcatccaaaaacatgaatgacatttacccccaaactttcagaatcttgagtggtggaagctttcagtctccttcctgattatcaaggtacactttgggacacgtggacaaatctcaaaaatgcaaaagcatcaaaaacattttatgggaaacaactggtagtgcacatgtgtcatgtttcctttgaactgcgaacaccacacacttgaaggtagcgtgtttatcatagagaagcaaaatgatgacaaagttatgatgtgaagactctttaatgcacacggagcccgaggaaaataatgatgattacatgcattaattctactaaggagcattaaatgtgaatttgttaactcctcagccgttggatcattttgtgcttttttccggacttgatctaggactttgattttaaatcacatgaatcgcttaccccattataaataggcacgaaacccccattattttccttttttaccatttctaatcttttcgaattccttcactttcaaatttgaactaaagtttctcctctcaaaatttaagactagaagaacttcgaacccacaccctttttttaccaatgaatgtttgaggatttcatttccatcataaaccatcttctgcaaatttaagcgtgaaatttcccagacgcgtcacctataggcctcagtacgactcacccccagttagacgaggacttcaacgttcaggtgggttttgactgagtcattagctaggcacacaactttcaaaatttccacaacaaccatctcatttcttcgaatcaaagtacaagtaagtttctgaacttgttgaacttttcaattttatgctagggtagaaaatttgttcgagctacgttctgaattcttcttgcatgcgactgttaggaaaagtgtctaggagattactaggcatggaactgtttttttttatgaatcaggtgattttatttcaaataatctataatttgtacaaactatagcaccatagcatgtgagccatggtttaactcttttctatacacaaaatttacaaagaattaaccactcttcatctttttggctaactttcctatgctacactaatacaatcatctgcttcacattctctttaattctattaactaactgtatcatgtttggatcctttccttgccatattacatcattcctggttttccggagattatacacaaggctagcaagactagcagccattaccttttttcttaaattttcttgctttggctcgttgtatccatcttgttatttgaggcagtattatatcagtggctctccattgcatccatgttgcaattttagtaaaacataccataggtgtgctatagccaaaaaaacaaatgatcatttgtttcctcatggttgctgcacaatacacactggggatcccctataattccatatttgtataatttgtcctttgttctcaacctctcatgaacatcaatccaaaaataaagctatgcttaggagtattgaaccttccccacacctgctcactccacatcttcttgtcttgagtagagctgtaatgagcgctttagtaatttggattagaaaaggcaatt

SEQ ID NO: 58436 - DNA, 937 bp, Cannabis sativa
ttaacagctaaatttggacgaagtgttaaattgctaacagtttcttgattttgggggtttacccgcagaaatttaggttttgagggtttaatgaaaccaaaacaaaaatattggagattttgttgccatttacccaaaaaaaaaaaaaaaaaaataatctattatgtatagtattggatctgctatatgctttcattcttattttttggtatagtacttttttattttattttactttcatattttttatcacatataattaattattctcttactactacaactattaattatttttgtcatttacatctcatctcaattactaccacaactattaattatttttgtcatttacatctcatctcaatttttatgttttttatcatagcttaatatttatagtattttaaaaagaaaacaaatagtataaattgttggctaaaagtgagaaatttgtgtattaaccctctcctatatttatgcaggatcacgtgggaaaaaaacagtatgatctattccattggcaattcatctacgaactatgcgaaaggagtctaccgtcgggttcttgatattgatggagagtctaatcctttaatcacctataaagaaactgatgaggacaaaggttcgtaccttacaattttagtttcttttctcctatcattacccaagtatattctctgaatttttttttcctttagcaggtcatatattcaagtctcttaatacctttggtctgtagcaagacaagaccaaaaggaagtcaatcgcagattgaattgattgcaggtctctttaatacctttggtcttgtaccaagacaaaggatgttgattacagatcagagttaatagaatctgacaagaattttaaaattagtaggaatttctacttatttgtttgcttacttatattagtattaataagagagcgg

SEQ ID NO: 58437 - DNA, 1524 bp, Cannabis sativa
  modified_base (811)..(815): a, c, t, g, unknown or other
cccagagtaagcatcatctcatcaatagactttctaacatcatggaaagtttagagacttgatttggtgtagtctaagagtaataaaataccacccttatcaactaagatatagttcctcttctttatcttaagattcatttgattgtcttccaatgttccttttcttgattaatttgataccgactcatttctcccacttaacagtaggtgtttggtctaatgcatagcaaagcatacctgagacctctgactgttgattctaaggaattctttcttttgcctttatctttttcggaatagttgaaactgtcccttactcaaataaaatatatgtctagaagtcgagaagcttctatatattgccattaaaaaaatgcttcagcgacttactttacttactaaagtaagtcccttgcactagagtaagtaaattacatggcataccaaaagccacgggtttagataatcttaaacctataataatactaggattatgaatttttgttaagtccattgaaatgacctattttaaaaatttactttcttatccttgtaatagaaaacttttggttactccatataaatggttttaactgtagttctcttggctttgcttcttctttcattattctaactatccattacttgtttaaactaacaatggattttcatcacaagtgtcttcaaagtcataacagggtgagttccttgaaaccctcccactacgacaaggtacagtgacattctgtgtaagaacataaatggtattatcctcatcagttgtatcaaaacaacagaggcagtgggannnnnttatatagaataagatgatagaacccttttggaatcaagaaaaaaaatatctcctctactttgctactttatttttagaaaaatatcttagtcattttcttagaaaagtagtatttgttgaaacaaacgctttcatatcttaatgacgatgggatggtccacccctaatcacttagaataactgtcaaacatacaaaccttagttaacagttctagcttttcttaaggccacgatcaacacatccataaatctagtaatggtttacactgagtacataaccattccatcattctaaaattttcctatcactagggtatatcctttgacagacttaggcaactactagtaactaatcattgaccttttgctctccccaatatgcaaatcgagtttctggggatgtaagtttggatataattcaaaattaacttaatgatctttgaactacatatccacaaaatatttctccacccctatcattttgcaagatatttaactacttaccttaatgtttttttaacattgcttgaaattcatgaaatttcgtaaacatttgaaatttcattgcataaggtagaatctatagcgatcgacttaagaatttaacgataactcatatccattcctaaatgtacaactatatgtcaaatacagatgattctacttttaagtggatataggcacattggctctttgcagagaatgatc

SEQ ID NO: 58438 - DNA, 673 bp, Cannabis sativa
ttgattaaattagtttatcatttattgattaaattatctattctatagtctattacaataatatacattttatattttatataaaaataaaatatatttttcatcttatttaataattttgtgagaattttatattatttacacatgatttctatatattaatataaagaaaagcacacaagagtgtaggtgactttctataattttttcttcacatttttctaattttttgagagtaccgtgttaatgtactaagaaaacatgattattcaatttactttttgtaataatctcacattatttagaaagtatagtgagacattacatatgtattataaataatttttttctcatgctattttaatttgtcccaaaatatgtatttgaacttaagatgcatcttctttttcagtgtgagtgtagtagtactaacttatgtctatgaccactgttaaatgataatttagaccatatgttttacaacatgaaatataataatatcataagcttaatattagtgaaaacaattacaattaagatagattaaaaatcgggtaacaatttttaatgagggttaggaagaaaatgtttaaagattagagtaaaatatttgattacaattagactcagtgtatggttatattttattttgtaatattgagaaatatggctt

SEQ ID NO: 58439 - DNA, 1026 bp, Cannabis sativa
tttattagatccaaagccgcctctactaattaatcaataatttaattacaatcttaaaataccaataattaatacaaaaaaaaaaaaaaccatgtatttttacaatatatttgaagatatgtctatatttagctttgtttttattcttcctctctttttcacttaaactcaatttttttttatctctcttccgatagaacaatcttaactatataatgtaaaagtaaaatatttattttaattagatagtaaaattaaacagaaaaactttaattgttccttcttagtactaaaaaaatctacttttagtgataattttttagtcacaccataaatttattgtgattaaatgtaatttttagtcccaataataaattaactgtaattacaaacataatatttagatacaagttgtcattaatttagttttataaattgtattttttgtaactaataatcttaattatggacatttttgtgataacatgagaatgatatttataattagtcacaattttttatttttagtcataaattttattgtgactaaaaaaaattgtagtgtagaaacgttgataaaaacctttggaatgtccagaaaaaaagggataaaactaacaatatgtagtttttactagagtattttacagcataaatactttagtttacttctagttgcaaataaatagctaagtttaattttggtcggtaataatatctaagttataatttaagaacttttgtagataccgggttttgaaaaccctagatcaggactgagagattgagagagagagagagagaggagatcatgagagagatagcgatgcaatgaacagactagaaagaaaaaaagaaaagaaagaaaggaaaaaaaatctatggaaaagaaaaaaaaaaatgcatattttttattttaattttttaaatgaaacaaaaaacaaaaaaagaatttttttttttatttttatttacaattttataattttaaataatttttttattttttatgtggaccaataaaat

SEQ ID NO: 58440 - DNA, 810 bp, Cannabis sativa
aagttcatatttaggatgttaagcaacatacttgtgagtagatctaagatcctgataaaataatttccaaaatggacgatgaagtataatccttggttcagccaactttgttctcttaccactttcttatggttgaaagattgtgttccattttgacttatcctttaggaatatctagctgtgtacatgccaaaaaaatagaattgttatttttcaaatttatacatttcatgtaccttctcaatattaaattcagcggccaatactaaccaaaattctgccaccatgtacaaccataagaacacatcttaacaatatagaaaaactcaaaaaaaaaattacaaaattaaaaataaagcaatttacattaaaaaaaattattagagattggatttataccttaatggatattgggattcaacgatttctccaccaaaaatgacattcggagctacaatcaccacaatgaccaactctaataagctcagtttaccctaaaaaaaaaataaaacaaaagacgatcaaacacatatatgacattgggcgagggttttgtcagtttgagaagaagaaaggttgttggttattttggagtttgagaaagacgatagatggagaggtttatataaacacatatgacatcggttattacaaaataccgagccatatgtgtttttttattaaaattagaaaattatcaccctataacatcgattattacaaaataactgattttttttgaaaggtaaaatcaactttcattaaccttcgaaatcagtcaccaagataggcaacaactcagttggaata

SEQ ID NO: 58441 - DNA, 1192 bp, Cannabis sativa
  modified_base (49)..(51): a, c, t, g, unknown or other
attttttataatttttaaataattgtattaagtggaccaatataaatannncatgtgtacatgatgtacatgtaggcagtccatgtcagcagttaacgaagataaatgatgacaccttaaatttgctaacggtttagcactttggagggttttcccaccaaaatataaggtttgatggttatttgaaagtgaattaagagttgagggagttttgccgccaattactcaatattaattttgtatgcattgattggagtaaaattggttcactaattcaaaactattcaaaatttgtaaaataatttatcttttactaaaagtccattttacccctctcattccaaaaactcactctctgtcttcctcccctttctctcgaactctctcgaacccaccaccaccacttggcttctcgatcgacaaccgaacccactgtgagacactggaccaaacccaccacccactcgacccaccagtaagaggagcacaatgacgaccaaggtaagatttcccctgtggtatttttgaatgtttttcttattgattatggttaaaatattatttattgatagatttagggtctgatatgtgcattttgaattagatttagggttagatattgtatctgtgatttttgggagagaaaatgtatttttaggcaggcacgatgtatcgtgatgctaagttggttttggggttgaagacaaaggcccgatgatcaatccgattgtctgaccaactcccaaaagttttgacttaacccaataggctcaatatagggtacgatggtgcccgatgtttatttagaattttgtttttttgttatggcccgatgtgggctcgatagggtatgatatttagaccctgtgtgttttctctttcataattttaggtttgggtacgataggcccgacataggacccaattgttggtccgatagtaattttgaatttttatatattggtgtggcctgatattggcccaatgtaaggtacaatgtttggctcgatatttattctctttcataatttttggtgagggtctgataggctcgacatagggcccgattgccatattgaatatatttttttttgttagggctcgataggttcgatacatggactgattgtagtctgatgtttatgcacaaattttttgtattttttgtagtcttccaaagttccacgccttt

SEQ ID NO: 58442 - DNA, 862 bp, Cannabis sativa
tttattgcattattgcttgatgtataatgtcatttctaggttctacataagattaaatcatttcttttatttgcaagaacttgtacgctcaaaaatataatgaactttaatgttaaatcatttatcaactttgtgaatcaagggtacaaaatagctaaacaagcatatggatgattcttgaagcctttctttcttttactattaattgcacctttatttactctcttttaatatttattatgaaatcaaaaatcacaaaatcaattgttcctattatcacctatttattaactttgtttttatttttctactaacttttttgtctataatcgcctccctgtggaatcgaccgcccgatctatactacaaccaccgctagtggaagtcacattttgggcgtacatatcaacaagttaaggctcccgctccacctttggaattgcacacggagaccaaaagaggcagagacatgctcaaccactatgtgagccgatcgatcccagaggtgaacgaacagttggttggggcggataatgacttgtctctggagctggtcatgggaggagtcttgaaagagctttcgggggtaagtcttttctgatatttttcttttattattccttgactagttcagatttttaatgccttttttccgcacagactggtttgaagattttcccgagctaagtcggctgctgctaaaaaccttgccatttccaacgcaatgcgaacggaaggggacttggccaaaaaagatgtcgagaatgcgctggttcaacttggggctgtgcggatagagctgggagaggtcaataagaaacttctagcggctgagactaaagttgccgagctgaccaaggaa

SEQ ID NO: 58443 - DNA, 1302 bp, Cannabis sativa
gaatctttttattggattaattacaattgagaatcctattttaattctgctttattctgttaggccttaggattagtatggtgggctagcatctattaaataaaagggtatttgagtctttgtcttgagggtagtgtttaggaatacaatagtatatataggtgagtagtagagagggtatacaatctattgagtgaatctctatttgcatcaaaggggcctaagggctcccatactttgtaattgggtttctcatacatttaagatatattttctattcttttgctactgttctactcctattattgctgctgtttgtgctatttattactgttttattgtgttcttgagcttggagttctcaggtcttatcatattcaatgccttttcttgtgttgaattagttctggatttggagttctgggatgctgagaaaactatattcatgttttttcttgcctataatttctgggttaatattcaaatacacatcaaatatatgtttgtatctttgtatctattttgctcttagtgaaaataaaccatttttttagacaaaactatgcaaatgaaatttctttatatgtttctaatttgttttttttatcaatgtgaaaattttcattaatcaaacatgcagatcacatcaattcaagagcatacccctaaatatctataattttattaatcaaatagctacatattatttacaagtttcataagtactgtatctatatctttcttaaacaaattactcttcttaaaaaaaactaacacatgtcttaatgctcatcttaactacgttaatttaccaaaaaacaaagggaccaaacattattttttaaaaacacataaattccaattatactatattccatacacaacttcagctattacatagtacaaatggtagagaagagtcttaggtagtgtttggttgagagaaatgaaaatataaaaataagaatgagaataaaaataaaatagaataaatttacaatctataaaaaaattattaaattttttcaaatcttacgttggaatgatcttttcttctactttaaaatagaatagtcattttttcaaaataatagaaaaatcattctattagactttaaaatacaactaaaaaaataaaaagaataaaaattattttctttctatgttctcccacttaatccattcctcctgatgttttctaatttgttatgtaggaatattgttggcatttttgtttggctttgacagttgattgtgtatttttactttatataattaaaatcaatcaaacctatataaatt

SEQ ID NO: 58444 - DNA, 884 bp, Cannabis sativa
ggctccaggcaaactgatcctggtgtacctttagaaaacaattaattgctattttagttcttcctccaaattcttcctaatgtaaacacaatttttgggattctttggatctaaaataacttcttcaaactcttcaattggtttgagctggttattttcatcttgaattcttgggtccaaatctttttcctccctctcactttcttcagtcaggattacaattagttgatggttggctctcctattctgaagttctattcaataacactcccgagccaacaactggtcacctctgactactcctatacctgtctgtgttggaaagtttaaggacaagtgtttgattgagcttactgcccccagtccaattagtgctgggcgacccatcaatacgttgtatactgatggaagatcaacaactaagaactcctacatttgtgtcattgataagggtagctttcctacagtcaatgggagctcgatgatgcctaggctggcgacactcttgcctgtaaatccacataggctcaccatgcatggtttcaactttgcagcctctaatcccatttttttcaatgtgtccttgtagaggatgttgactgaactcccattgtccaccaacaccctttacacccttttattagcgagctggactgttatgacgaggggatcaacatgtggatattgtacatattttgtgtcttcctctgagaaaataattggaggttcatttgattttgcctttttcagtgggtctggagcaaatgccgattgtccattctttatttcatttatatacctcttctgggcattattattatttccagcgaggtgtggccctcccgaaatgaccaagatatacttgcccttaacaggaggaggtt

SEQ ID NO: 58445 - DNA, 916 bp, Cannabis sativa
tttcatcatgttcttcttgtaaagatttcattcaaattcaataaagctttctttcactttcgtaagatggtatcagagcgggaaaggcaagctttcccctgatccttttctctttcgctgccattgtcgtgcttcttctctgacgtctttcccgtgtgactgtttcagtcccggtgttcttctttcatccgttttccccttccttcttcaatgtcgaatacactagaagacagaagcgatatccctgaagctgggattggaaattctgcaaatccaatcatacaaaaccagcactaaattgttcaacagaggaaccccctcgaagatccaaccgatccatactacctgcaccatggagataatctaggtaacattttagtttctcaattactcactggacaagataattacatgtcttggagtagggctatgtaattagccatttctgttaataacaaactaggattcttggaaggtagcattcctaacccatgcctaatgatgctgttatgtataatgcatggcttaggaataacaacatagtaatttcttggattttatactctatttctaaagagatttcttctagcatattgtatggtgaatccgctactgccatatggattgatctgaaaattcgttttcaacaaagaaatggtcctcatatatacaacttgaggaaaggtttgatgaacctaagacaggataatcaaactttcagcatgtattttaccaagcttaaaaccatatcggaacaactttcgaattacagacctacttgcgtttgtaatggctgcacctatggtggtgtcaagaaatttcaagaacaccaccatatggagtacatcatgtctttcctcatggttctttcagactctttttcccatgttcatagcagtattctgctgatggaccc

SEQ ID NO: 58446 - DNA, 1184 bp, Cannabis sativa
ttaatatttaattactatgagcatctctattaaagtgtcatatattttagtatatttgtttttaagaaaaataatattttaaaaattatataattttttaacatattcataaattataaaaaatacataataaatatacattatgtattatttatagtactattaaaaattacatgaatatcttaaaaataaaagagttacagtacattttttcaaataatttaatacaaataattaagttataacataattatttatttattttaaaatatttaatttatttattattttttttaatttttttttagttatgactttgaaatgaaaaaaaaaaaaacatttataacattttaaaatataaaaagcaaggtggatggattaaacttcaatctctcacttaatagaatgccccaataaccatcaatgccataagattttcatgtatttaattaaatgaaatatttatatattataagtttttatatatgtatatatagattaattttaattttttagagggctaaaaaattatgggacttgcggttacgtacaccttgactgttctaccctttggtcggacctgtgtcaaattatacatctttatgactagtacaattaatttttttaattggtgatcatattttaaagtttttggaatattttatatatatgttggtaattttttatctaatatgtgttggtagttattaagttaaatttattattttagataatattttttatttattatcaatttattattattttaaaaatatcattacctatttatttttgtttattattatattatttttagttatatttattagagtaataaaattattgagttattgaaatagaaatttttgagttttggcgacttgaaatgatatgcctgctttgctagaaaataatatttttagcagataagttttttttaatagtactttcaaccttgttagaaatagtttttagtgatttttattagtatttttgtagtttatgcaattttaaacatcttattttcaattagattaattgaaagaagtagaacaagtattaattgttaacttattagtggaagatagagattttcagtatttcagacatattgtctgacaatatatgtaacgttggatagattttctatttaaaattcattatataggttttttttttttttt

SEQ ID NO: 58447 - DNA, 1458 bp, Cannabis sativa
aaatggggtagaagggacagtttctaatatgggggattataaatcgaaatggttatatgcatttaagatgctaggggttaggattgacttcaatcactgacctcgtacgtcgcgtacttttacacttagtatttattttcattgctttatagatgcttgttcacagattgaccagctcgatctgtataaacccaattcgtttagaaatcactgaagtcttaagcggccttcttgtgcaagatcgcgactggcgtttgttgtgtactactacgaaattacgagagcacaagttcatcctaaaggacgctaaagttcagcgagaaccagtgtacaaagagccttctgatccaagcaaacttcgagaccaacatcaggtaaatataatttagtatgttgccgacaatattgtcttaccctttcaagtccttatttgtcattcttctcgcatacatgactttcttgaaacaagctccagttttcaattgcaagtctaaggttggcactgcgacgccatcttctgcgactcctcaaaagaggaaaagtgatgtcgttcctacccaggcagatgacttgtcgaagaagcagcaaaaggttgctcaggataagggaaagaaagttgtgatcgatcctactgtcaaggctcgcaatatcatggctttataggataagttcgtgagcaatgactttgtcactagagttgagggaactcctgtcgaggacctcttgtctcgatcggttgatctcatctcccaattaatgaccgtctatttgcgggcttatgttgttggttttaaagacctcgatctcttgaagaaatagaactcaactcttcaagagggccttaaaaaggaaaagttagacgcggctaccaaaggcaaggaagtcgaggatctcgacaaggccaaaggttaggcggaagagcaagtcaagactctgaatgagcgagttaagaagttggaggaggagaatgttggtcttacccgcaatcttgaggttgagaaagagaatgcgaagaaggcttatgaccaggcggtctctgactacactgaccaagctgctagattttgacttcgcagtctttggaccagaggcagtcaagatggccactgttttccttaccatgtcgcctaccgagactcaagggctaggtggaaatctttttctaaacgatgctgaagatgtgactgttgctgaagtcgcagatggtacaagtaaggtcgcaggtgattccaacgctcatgtcacttaatctttttatttcttttgtcgaacttcttttaagcggtacatgggtactcatattttttatttggcaataccttaagacaacttgcttcgccatattttcccttcggttggatactccttttgttaagtactttttatcgctaaatttgatgtgtgcttttaattgtaacttactacttcaaaaatacttaatcttgcataacttgttat

SEQ ID NO: 58448 - DNA, 873 bp, Cannabis sativa
  modified_base (366)..(370): a, c, t, g, unknown or other
attattatttatgttccttactttcgtcctatctcctcctaagaagccccatatgggccatacctacccttaagtcatgtttgcttggcaatcgtaatggaatcattactactattacattgtttagtttaacttttaaaattcggtaaatgctttgcattgtaatgaccgttacattagatcatctctaatgggagatataataaaaattgtgctatatttggcacaaaaagtagttttgtggtaaatttacaccaaattttagctttgtgctccaatgcacaattaaaaaattttgatgtaaaatttaatgtctaattaatgttttatataaaaaaaaaatctaataactttataatcaatttnnnnnttattttaatatgtaagacaataaaaaaataatataaaggtttcataacttaatgtgatagttaaatatattattaaaataatagaaatgacgtaaatgtaaatgaaaaagtagtgcatttattgtggtggaaattgtagaattatataaatattttatatttattgtgtatcaattatttaggaattaaaattatcttattctttaatatatgttgtatatccctgatttttaagagattagttcacctacgttatttgtatagctttgtaatctatctatttatatgtaattctttggtgaataaaataattcaagccattattcaaaaatcttcatggtatcagagccggttaaaaatttctatgccctaatcgcttaattttttttttcttttcttctctcccctaatcgcaccagtcccatctcagtcgcattttttttttaaccagcctaaaattgcaccagcccctaaattcgcaccagcccttctcatcttttca

SEQ ID NO: 58449 - DNA, 687 bp, Cannabis sativa
aacttaatctaaaattaatactaaaaataacctaacagttatagtgcaattttttttcctagaaatttgagatcagtctccattaaaattgacacatggatccaatcctcaagggatggatgagctgttaattaataactccctgagagtttaccttgcttgactcaaactcacaagatgatgcgacctttgacagagtctagtcacatactgtgtctagcatagtataaaataagcaggactaagaggggtttatacaagtcgcgcatatacaaggacatatgtgataactacgtagccttctcctacgactaagtaaagatcgcttctttacataatgaactagtctaaatgacaaagcgtatttgataacttgataaggactcgtgtgtctcatgttgttgacgcgtatgaggtgtccatatatgtgactcaaacagaacgtagacaccttagcacgaggctcattagccctccgaaagatagaatgctcccaaagtttgtgagcttgtgcgagaatatgaatatgcaactcgcaccctataggtcgcatacattgctatacttattaaaacggatttaaattattcttcatttattcttttacttttattctaattaaatgttaattttaattgtaaaacagttttataaccaattagttatgtgtaactaaaaggacaattg

SEQ ID NO: 58450 - DNA, 1428 bp, Cannabis sativa
aaaagaaaatttgagaatgaagctgctaagggtccagttcaaaagaaacaacaacaggattctataggttgtttcttttgtaaccaccctggacatttgaagaaagattgtgccaaatatcacacatggcgtgtaaaggaaggtatttatcttactttggtctattctgaggttaatttagcttcagtacctagaaacacttggtggatagattctggtgctgctacacataagtgtttctatgcagggttgtttgagctaccgaaagccaagtgatggtgaaagatacatctttgtgggtgatggagaaatggtggaagtggaagcaattgggcattttagattattattaggaactggttttttatttggatttaaaagacatttttgttgtgctgtcttttagactgaatttagtttctatttctttgttgcacaaatttggatattcactactccaaaatttgtttttttccaacggttaataagggggttaattatgaaaaccgttgaaaaaggtaagtagatatttttctcaacggtttagagctgaagtaaaaaaactattgggaaaatccaatccaaatggtggagaaccgtgggcaatagtaaatgaatttttttaaaagaaaacagtgaatgccaccagtttataactgttgggaatactaagtataaatgttctttttaatatacaaaagaaaaattcagatttaataaaaaaagatttttttttgcctaataaaaattaaaaaaaaattgtattcaataaaagaagatactaacataaaagtttcagtttcaaaaaaaaatcgaaagaatttgtacttttttttgtttaataaaagaaatttatatttaataaaataaaataccaaaaaaagttccatattaaaaaataaaaatatatatttttttgcttaataaacttataaattgagaatttataaaattgggaaagttgaaatttatatatttttaattagagaataattttagaaattagttgttttaaaaattcattgtgaaagttatttaaaaaaattatctgaaaaggaaaattattggagattagacaaatatttttgattaaaatgtgattggagaattaatttggggtctttaattaaaaattgtggacattttatttttatatattatttggggtatttaattatatcagatttttatttattaaaattaatttatatagaaaatttgaaaggtatacatagaaaatgataagaaaaaccctaagtgaaaatctaatcccctttctcttccattctctcccgattaccctatctttgtcttctctttgtgcggggtgacgtataacaacaaattcggccactactggtgctagtggttcaaacaaccaaaaaacaagtttcccccacgctgaataccccaaccctctccctcttc

SEQ ID NO: 58451 - DNA, 1306 bp, Cannabis sativa
  modified_base (766)..(773): a, c, t, g, unknown or other
  modified_base (991)..(995): a, c, t, g, unknown or other
gataagattagtcattgcaaatacctaaaatcatagaatgtctattatgattgaggcatgtagcttaaggtttattgtgcatcgtggtagtgcaaagatgcaccaagacttgaagaggaaataataatgtgaaagtatgaagtaggatgtggctagctttgttgctaggagtattgtttatcagcagggtattgctgagcaccaaagatcttcaggtttgcttctgtctttacctatactagagttgaaatgagatagtatcactatggactttgtaactgggttaccattgaaaaacccttaggttatgtcattgtctggtgattattgatcatttcagtaagttttcttattttataccaattagaaagaattataagcttgccaaactagctcaactttgtgtggacaatatagtttgactacatggagttcccttaggcattttttctaatagagatcctcaagcatttgcaaaaagatggacagtctgagaagaccttagagactttggaagagatgctttgttcttatgttttggattttgcaaattgttggggagaacacttgtcattaatggaaatccacttataacaacaaatactgagctagtgtaggcatgaacccttatgagtatttatataaggaacaatgtagatttctattatgttgagctaagctagatgagtgttaggttattttgagtatttattttagattaaatttattatatttttaatttagttttaatcgtgtttggagcatnnnnnnnnttgttatcttttatttttgctgatttaaaatagaaaaagattaaaaaatatcaaaggaataaatggaaaaaagatgaaaaaattctcacaaaaaagatgatatataaaatagagaaaattgtgcaaaaaaataaagctgaaacttcaagcctgaattcgactatcttctgattagattttgaaaaaggtcaaagcataaaagttctagatctctcttnnnnntttccggaacatcttgaatcatccaattctgagcaatatcacttatggccaaaatactattagttgacgcagcaaaaaaatcatcgtcgaaacgaagccatctggtgaaactccaacacgggtcgcggcccgcccacctaaaccgcccaaaaatcgtatttttctctcacgtggattttggtagtttcctaatttgaatgggcatttaatatgtgcatttttatatctttttaatcactgaaagcctatataaagtagggctgtacctcggtcggtttgggcggttcatcctatatattttctaacccaat

SEQ ID NO: 58452 - DNA, 1080 bp, Cannabis sativa
atcgataaaacttctcaaacaagaattaatgctaataagtattaccaaacatgcataaacatatttaccaatctttatcaaaactaatcatggttctctaacagcttacacatctcaaataagcaggcaattcaaacaattaacaaatagtctattaatcaactaaaaactgacacttactaaaccaagagtcgaacgagtttttgcagccaatgtacatatcaaaccagtctttaggatctttaaacctaggtcgctatgataccatgttgtaacgccctctcccacagggacgccacgtgtgtgcttttacaaatttatttttaatctaatctattagtttaaggaaagtgtggtttaattaaaaacgtttgattaaattaaaaaccataacttttataaaaggaaaatcattgttaagtacgaggatcccatgtataaaaactttttcattctgttccaaaattagtattacaacataggattacattttcaaaatacaatcaaaagggtggatcctgttctttgaaagccgaggcaccgcgattgatatgtacatcgctggaatacctctaactcattgctaaaccatagtttctttcccctttacctgcactacgaagcacccatgagtgacaaagactcagtaagaaaagcaagtaaatacaaaacacatatattacgcattatgagaaaatcatagcaattcatagccaacaacttcatcatcataataaatagatattgaccctatacataatcatacattacacaataaattaattgtcttataagataacccaacttttatgcttgataaaacatccttaccactcgttgtccatgagctatgtatgtcactatcgttacctgataaagaatctgataagtaagaaacttatctatagtttcaagggagtaattactcattctcattaatagtaatgaccgtatctttatttctaaataatggtaatgacaacatatttccctcgatcataatcgagtcacaaatgataataattgatacatcgatcataatcaagtcacaaactataataatcgtttctcacattatat

SEQ ID NO: 58453 - DNA, 1290 bp, Cannabis sativa
gtactgtatttgtagtgttgttcttatgtttttgcacccccaatgaattaagtatgtagtatttctaatagctcttcatacttacaatcttttggtatgaattctccagtagcgtcataattgacataattatgttcttcttcccatcgtccattgctctttatcaaaactggtatagattcccataatctgacatttttcacaatatttcatttacttgagctttttttcaattagaacaactgtaaaataacacaaaaaataaaataaaatatgaaaatcgtttttctgttggccttttttattattttgttgattcccctaattagcaatgaatttatggttatacgccaagaacgactacataacaacctggaattttgtaatgtacactacttatcgtttatcagggatgatctatatgaatatttttcttttctatattttaaatggcatgtatcattatacattttcagatgatactctttttaatttttcgaattcaagatctaaatctgggtgtgttttttgttttttttaattgaaatattgtagttttaggtgtatttacctcttttgtttccttttgaatatggcttaaatgtagttgttgggtcttgatttgtcgtcgctttactcttttttcttctttgccagaatttatgggtgtttttcctagtgtattttaggttttcggtgttgctctgtccgtccccgatgaagaaggaggcgtcgtttgtccgattttactattcacagtataaaagaaaaacaaatgggcctgaacagtttaaaggttatttttgccgtgtgacagtatttttattaaaattggagcaaaaatcagtatttttataagtttccctttaatatatacatgaaaaaaccccaaaagaaaaatgacaacaagtagccctttttctacttggacaaatgttatccattggatttcaaaaacaataattttttgttaaatccaatgattaatatgattcttgaggtttcacgtttcacatccttcaaaattatgtgagtgacttcaaaatttgcatatgcatgacaagttctttatgtggctagatgtagttctgtaaatacgggtaaggccttttaatatgatataaaattaatacgagcctggaagtcaagagcatgattaggcacaaataaatgtggatttgggcataacacgacacgatgctacaaattaccacggtacgatacgaaaactatgtccttaagaatgacattatacgataaaacatgaaagacatgacacataagcacgaa

SEQ ID NO: 58454 - DNA, 1309 bp, Cannabis sativa
taaataacacataataactcaaattgattataattaaaaaaaaaaaaatcagttcctaaaatactgaaatataaattaaaattaaaactaccacaataaaatgagtaaaaaaacgaataacacaagatatcccataaaccgaataaacttaaaaataaaatggggatcaattctaaaaatactaatctaaacagatcgggttccataacaaaataagtaaaaataaataatagacaataaatcaaatataagataaaaaactgattatatatatcaactagacaaagaaactgattccgtaaaacaactaagataaaaatttacacacaaaaactagttaaataaaataaataaaataaaatccggttccttaaattaactaaaacaaaaaaaaaaattctgaaataactaaattaagtttcttaaattaattaaatcaaatatcgatttcaaaaataaatgatttaagaaccgttttctgaaatgactaaataaaaaactagctgttacataaattaaaatagaactgcttccacaacagaatgacttaaaagaaatactacaaaataacttagaattcagttatgataaaaaaaaaaaacaagagggaatcagttccaaatattctaatacttaaaataaaagagaatcgattcttaaacaaaatgagtaaagaaaacaagcaataactcaaaaacgtattctaattaaaagataagagaggattaatttctaataacattgagatataaattaaatagaaccgtttcaacaacaaaatgagtaaaaacatacaacatagaattactcagaaactaattataattaaaaaaatataatatatattatgttggtgaaactatgtacctaggattaaaaaaatacgttcattacaattttgtcactccaataacactctaagagttattacccaattagacaacatgaggcaatgaaggaataaaatgatatagatgtattttttttttcattatggttaatcatcgaacacaacgagcatattaagcaaactacttttgtaatatcttgaaaatctaattatgaataattaaagcatattatataaaatatggaataataagtgtgttaggggtatcaataggtaagattataatcttacaaatctaattatgtgataattagagatttccgtgaaaatggataaataagcttactttataaattacggaaattttattggaatatgtcagcatcaaacatgctatttatgaaataaaaatattttttaggttcggaaattatgaagacccgattggtggctaaaaat

SEQ ID NO: 58455 - DNA, 1543 bp, Cannabis sativa
  modified_base (1066)..(1068): a, c, t, g, unknown or other
tttatttttactagttattatgtccaaactcttatctattaattcatatagatgtgtaaatttatcttgcgtctgttgatgatattttgtatcagttaattgtatatttgttgttctatcgactgtttgtactgtagaatagaacttcaaatttacagtaacatggttgcagaaaacttcaattcagggttgttttgtttgtggtgcggattaggctgcattgttccgtctttattttttttttggcaagcaaagaatattattgcaccaacaaaactgttacaaatatcacagatatcatgtttatttcttcccactatataatctactctattccgcactctccaaatatgaagagctgccaaaccagtcaagtgaacgctttgccatggccaaccatcttaacaacagcccactatccaggggccatggcagtggcattccaacccagccacttctttatttgccttagacactcttgactataaatgtaggaaaatataggtggtttacatcctctcggtgagcccacaagatgtgataattgggtctactagtattatagcaagtgtgatgtcttttttaggacaatggtgaagtagacttgtatcaaatgtacaagtttatattggactagagtgatataaacttaccgttatatttattataagtcaatatcactcagttgatcatagatcaatttaatttatcctaacatgattaaattttaagctaattctgctattcaagttttagattttatgctcacccctactgcctcgttataagtgttcgattccatgtcatccatttccaaatttgttagaagtgcataagccagttcttcactccatatgttgtagttgtacttctgattagtcttcgaagtcctcttagtcatatcccttgtcaaatgatagtttgtaaggtcctcttcggtgtcttcatccctgatctcttgttaagcatcagttcctccccctcgaccattgttatcggactgctggttttagtttggttccacctgaaccattcccggtgtgtctccattttgttccacctgatnnnaacctgttttaacttctaggtttgtacctgcagggttagtatcttccattcctgcactatacttttcattaggtaaacaagaaaaaatattttcttggaatataactattcatagttttaaattcccctttttcctttacccaaagtctatagccttttaccctttcacggtaccctaagaaaacacactttaaagccttaagtttaagttttcctatactctgatgtgcataagcaacacatccaaaaacttttaaatgagaaaggtctggaggtttacctaaccatttttcctcaggagttttaccttcagttgttgttgatgggcttctattgattaggtgaactgctgtcaaggcagcttctctccaaaatctttgagataatcttgactgaagtagcatacatctcactttgttcagtatggtgcggttcattctttcagccaccccgttttgctgaggtgtaatcctca

SEQ ID NO: 58456 - DNA, 898 bp, Cannabis sativa
ttatgttggttactgttatggcttggattactctgctatcaaagtgtactaaaccatgtggaaattgtggggtttagaacacttagttaacattctctaactaccttgatagttggtagttaagtcgattggcttttgtcctaactaaccgagctatataaatagaaggtttctaattcacttgtgtaagagatcaacttagtgagggaacaacacaaagaaaattagattgtaatggagatgaattctcttagtgattagtgtgattgagggttgtaaaaggcattttcatgtatttgattggattgcctcaagtgagattatgattgtaattggtgtgtatcaccattcaccactagagttctttgagttcttggtccaagtgtttgtaattataattcttaccattcaatactaaaatcatcacagccaacaaagatgttttctactcggggattaggtcaaagttttaattaaaatttgtgattgaacctcgttataattgttgtctattttcatttctggtttactggtttgctagtgtatgtttcagtctttatttttctttgtgctcttgcattcttgttagtgcttaagtgcacagcatatacatacattaaattgatttgcataaataaactaatcatcaataaaatataattttagaaaaaccaacattaatttgccaaattcagttagcaaataaaaattgtcaaacgttatttctgttcacttcactcattcttacttcacagtaattcattaacattttttgagttaacaaaagtaactattgaaatttcatctccaatttatgaagaagaggtttatttaatcattcggaagattaatttttagataggactccaaattaaaaaaaaaaatagtgaagaaagaa

SEQ ID NO: 58457 - DNA, 921 bp, Cannabis sativa
tacagatttttctaccattaatggcagaaaaaactgtattttttttctcttttttttacattcctgacgatttaaaattgtcgcatatacccagttataggcgacagttttaaaccgtcgggaagtccacattagcgatagtttttaaccgtcgcctattttgtccattttgcgatagtcgtataggtgacagttatagaaaccgacaggaatactttaaacgactgtttaaaaatgttgacattatatataagatatataatgggtgacagttatagtatgatggggttgttctcaataatctcttttctccatactattatattttagatgcttggaaagtttgatagtgattcgcactgaagaaccaatactcaatgttgatgtatgtttatgatttatataaatgttctaaataaaatgtgatcttggttgaattacaatatttaacaattaatattatgaacaaggtcacttgatcttagaactttatattttgagtaataataattttgtctcaaatttattttttgtccaattatattcaaaataattgctaacttggtgtagaaattgaatttattttgtgttatacgagtatgggtgaatatttcttttttcgggttctagtatatatcaaaacaacattttggacaaataattttcaaattatttgttttgttgataaagaaaattggatttgaagctattaagtttgtacgtgttttgggtaatttctcacgagctattttgttgcttatacagagtttttgaaagttcatcaatggtggataacccatttttgagtttgttatttttcatgggttattggacgaaaatcaagggaaaaattatcttagatctaacagaaatgcaaagaggaccaaaaacctaaaacgacggtgaaaatcgccccaaaat

SEQ ID NO: 58458 - DNA, 2731 bp, Cannabis sativa
  modified_base (949)..(958): a, c, t, g, unknown or other
tctctctctctctctctcttgcaggcatggtggtgtgtggcgggggatgtctttatcacttcttctctctcatctcgtcttcgttctcctttttgttctttctagctcaagatcatcaccgccccgcagatcttacccctcgtgttgtggctctcaccatcttaagtatgtgtatatacatatctatatatacatgattttaatatagtacatagtaaatattatacatacgtataaaaatagaaattctaacaaaatattataaataaacttaacaagattttaataacaattatctccattacgattagaaagtcgtcagagttgtcatcacagttgggaaagtcacatgaaaatcaacaaaaagccattaaagttgtcattgtcaccacaaagtatgttactggtgttattacacccataaagaaaagttgttggagtttttgtcattgtgaaagttacctgagttagaaatcaaagtagtcattagagttagacgttagaatttaacagagagtaatcgattacatttattagataattacaaaatctgatacaaaaaaactaataatgtaatgcaacaaaattaaaaaaaaaaaaaaaaacatataaacactaattgaataatatgctcaatgtaattaagacatctttttttcctttaagaaacctttttattcatcatacttacaaatacattcacaaaattataagataaaataaaatatgatcatggatgaagctccttttattcatgattagaggtgtcaatgctactagaggttgtctttcgtactaattgtgggacttgaaaagaaagtaaatattaatgaaataagaaatctagatttgaccattgactttttctcacaaaccaaaaaatctcatagaaaaccaccacccctaatgatagtggtgacccttctatgtgagagagagagagagagannnnnnnnnngagagagagagagagatgagtgattggactgagagagaaggagaagaaaaaaataaacaaagagagaaaagataaatggaaaatatttatttagaatattttttttaacaaaaacaatgagcatattttttttaaaaaataaactcaaacatgtaccgcaataagcatatttataatactaaaacattaaacaatacttgatatcacatactctacattaaataaatataaagtttatttttcactacaagaaaatgacccatatgcatcgattttcaacgacatacacgtctattgtgtcggctgatagagccgatgtatattttactgacataaagatgggcagttgttgtgttgcttgggaactgacacatttaagaatctcgcgtctctcaagagccgacacaaaaggtgtaaaataaaattttatatcatttgcgcggattttgtactgaaacaaacttttaaaaaatagaattaaataaattcctccacaacagaataactataatatataataaatctgagatctccatcagtgcatataataaatatgagatctccacaagtttattaaccatgtgcttcgcagtttcaaggctttggacaagttttatgggtggatccaacagtgcatatctatgacaaccttcaatattttccttaatggaggtaaggttagcagacttaactcggagtgtagtattaggtaagcgaatcccctttcactatatctttttatctggggtgcagaaatactctcccatatctttgagaatgccttagaagtcggtatcattagaggaatcaagttgagaaggaatggccctcggctctcatacttgctctttacagatgattaaattttaggtggtagagccacgatggaggaagctacgagggtttggtaatgtctagagaaattctgtgattggtcgaaccaacgtattaataaactaaaaatctctattttcttcagcaagaataccagtgatggaatgaaaagaagtattaagcaagttcttgagctcagcacagtagttggtaacatgaactacctcggtctcccattgttccaaaatcgtaataaagatgatgatttcaattttatcatggataacctggtcttaaagctgcaggggtggaagttgaaatccttatctaaagctggtcgtgctactctgataaaattggtgggactttcattaccagtttatgcgatgtaaactacaaagttgtccaagaaacttgcagctaaaatagatggtatgattagagatttttggtggggctgtgaataaggaaactgtggtatctatttaaaggcttgcgatcagttgtgcctcccgaagtctaaaggtgggcttggcttctggaggactttcgaaatgaatcaggctttcatagttgaatgggattgggctttccttaacgaggatcaatcattgtgttgtaaggttttgagtgctaagtacctaaaaggtatacctttcttaaagtgttctcccaagaatttagactcgtagttctaaaagaatgtggtgaagtctaaaaaaattcttatgaaaggagcctctaaactcatatcgaatggaaaggatacaaacatttgggatgatccgtgggtaattcatggttgggacttttatccctatcctataaacgggcaacttgagggtttggagaaggtagaagacttactgacaaacattggtaattgggatgtttcgaaagtcaactacatgtttgacctggagacaatcaataatatca

SEQ ID NO: 58459 - DNA, 1004 bp, Cannabis sativa
  modified_base (58)..(58): a, c, t, g, unknown or other
  modified_base (955)..(955): a, c, t, g, unknown or other
cttcttaggaccatatctcccacgaagaatttctgagccttcacttgtttgttgaaanaccgagctactttttgttgatggctatcaactttaggttagttatggctcatttctcttcgatttcatcaagtgattcggccagtagtacgtgattggtatcttggttgtacgtcaatcttctgtgggatggtggctaaagttctacaggcagtatagcttcatatccatatgccatagcaaatggagtttgtacggttgccatttttcagttgtccgatatgaccatagaacttcaggaagttcttctgcccaatttcctttgccatcttcgagttttttgttcactgtatccttcaaggtcttgttcactgcttcaacttggccatttccttgaggatgtgccactgcggagaaacttttgatgatatcgtagttcacgcaaaagtcggtgaaggattggctgtcgaactgcttgccattatctgaaactattttgtacgacaatccgaaactgcagattatgttttacacaatgaagtcttgaactttctttaatgtaatggttgcgagtggttcggcttccatccacttagtgaagtaatcaaccactaccactgcatactgcactcctcctttgcctttgggtaattgtccgatcaagtcaattccccaaatggcaaagggccacggactctgcatctgagttaactcgttaggtggagatcgaggtatctttgaaaatctctggcatttgtaaaatttcttaacatagtattttgaatcttcaatcatcgtaggccagaaataaccttgccttagaattttcttagataaactttgcctggcaacatgatttcaacagaattcgtggtgcacctcagataggagtcgcgcagcttcttcttgagtaacacatttgagcaatggcatggagaatcctcttctgtacataatnccctctactatgatataccgtgcgtccttccttctcatttttcaaactt

SEQ ID NO: 58460 - DNA, 853 bp, Cannabis sativa
ctgcttgcacgaaatgcatggctaaataggattgtacgttggtcggtttatgctatattttatttaacccaatgtaaagatcgggttgcaaaaatctaagtgcaacccgcccaattaagaaagaaaaatagtaagccgcccaatgaaattggtcggtttagtcaagttaaccggtctaaacagaccactaaaattttttgttaatttttttatttttatattcagttgttatattttagttaattgtaataatgagatatatatatatataaattgaatttagagttcaaatcaactaccatgaaaataaacatattagtttcaacttgatattttttaagtagtcatataaattatatgatatataaatgtatatcataaaaatataaaaatatatatataaaaaaaaaaactcttttaatcgggtaggtagagttagttcggattgattaggttggttggtattattttcaacccgcccaaataaaaattgggtgggttatattttcatcggattttttagtttgtatttttaatcaaattatcttgatttagtttaggtagataattttattcgacagtattaaaaagtttacgtagagcgctaattgcacataccctttccactagctataatatgtgaataatcaactactatgatctaacaaaatacatctacacacacatttatttaacttgtaattggtctattttctttcctcatagcatgaggacaaaataagaggacccagggtagatttaccctatatatatataggacaagactatggtaggacttagcatatgttccctatcagtaggaaagcttttttgaccattaattttaaatcat

SEQ ID NO: 58461 - DNA, 2249 bp, Cannabis sativa
aagtcgagcatagacattgtgcattgtgcaagacatttggagaagaattttatcaaagtgtttagagataaaaaattaaatgaccttttgtggaaggctgcgagagaggttactattcctaggttttaggctgtaatgaaagagataaagcagctcgataagggtgcctatgaattgttaatggaagtaggaccccaacattggagcatgtcaaattttaggactcatctgaagtgtgacattcttctgaacaacttgtgcgagacattcaatgggatctcagcaatattagtagtaagagagagacctatattgtccatgttggaaaggattagaatttatctactcaaaagacttaccaagaataggcatttggcattgatgtggtagtcgaacattgctccaaggatacaagaaattcttgaaaagaacaaggacatagctagtggacatatctcattgaagtcttcagacttgatttagaaaatttaaaccatgtacggaagcttgtattatctagacttgaaggagatgaattgctcttgtagaaagtgggatctcactggaattccatgtagtcatgcaatagtttccatatggaataaacatggggaactagaaaattatgtaagtaaatggtacacaaaagagtattatttgaaggttgatagacatcgaatatttccaattagaaattaagattagtggcctaaaagtggtaaggttggaatagtgaagcctatttccaaacaaattgacaaagaaataggattgaatgatgattctcattttgaagccattttaaaaccttttgtgtaatacaaagtttgctggtttatgataaacttatatgaccatatgaatttactttatggtagacatttacctagtacatgatttggtattttgtaggcttccgatttttattagaatggttttatgttatggaacttggttgttgttaagttagcttgctgctatgtatattttgagaattgctcatattacagtatatcaaaccagtttctcattatgttatttcagctgccataatcttttgttgatgagcatttctatatcaaaatcataattgaatatgactcaaaatattagagcacatcaataaactcaacaactcatgtttatcatgaaaatgaaaccaacattagaaataacttatagacataattataattgtcttgactttatgataacttaaacaatacaaagaaaaaaaaaaagaaccaatgtacaaattccaatttttactagttgcataaaactcaaaatgcttgcaatatcttaattttttttttctgaataaccttctgcagctgtctaacaacatcttcaatttcttctaaccttgtaatcaaaccatttaaatttggattgaatccttattgagtagtgtctatccaaatgagaaaattacaacctttatcaacatttctctaaaataaaatagaagataaaaaaggaaatgctgagatgaaatgaaatcaaaatatcacacaatgaattgcatgaattcattctgtgatattggtgtaagatttataatatatactaagcaaaacaaattcttgattagaatcagtttataaattgccttaaaattgcatgaattgcgtagatcctcttttaatgggcatgatttattattattattattttacaaaaagaagaaagaattacctcaaacctcttaaccaattacaaagaaaatattccaaaaaaatacttgcaaattaaaaaagaaacacattccagaaaaaaaaaaggaaacacaatcaaaataataataaaaaaattaccttgtatctaggacatccataaaactttctacctggattatctttagtttgagatgtatgtataactgtcacacacccacaatcacagataggattattattcgaaagttgatcttcatattttctatttgatactcatttgcttgaagaagaaaaggaagacatgatgctcaccgaaatttggggacaaatgaatgacacaaagaaagaagtttttttagaaatgaacaagttgcagaataatagaaagaaattagggtttaaagcatgaagaatgaagaagatgatgacagaggcgtcacttatatgtcaagggtattaataatttcaacaaccatcagtttcctcacctacatagaaatcagtattgaaatcgttaatattttagatagaaccagatggaaggaggactttcattgtttatcatagatc

SEQ ID NO: 58462 - DNA, 728 bp, Cannabis sativa
aaagtcataattagagatctatctagccctaacaactaagaaaactagccacacatagtgtggtttatcatctcaaaatattgtttagaatctgaataataattgacaaataaagaagaaagaagaagaataaacgaaaactcttgaatgcagcttcaaattgcttacttgatctcttagacttgtttctctcttcaaagttgcgctttctgtctctccagtcgtcctctccttctggagttgaagttataatgttctttttacatactaagaaaaatgaaaaaataacttttgaaaatcaggtttaaatttaaattccatacggtcagtagtatggcacctaagatacatcgagatgccaccaagtgagattctccaaggttttatttttgtccaaaaaaaaaagtaatttcttagttctggccctgtagcaccacgccaaaagctatttttttgtcatttttaactgtttcgatcttgcttagtaaaatatgcataattttcgcgtctgggttcaaaatgagatgatataacatgttttggaaaactgagaaagaggtctatcattttgtatttcacaaactctttaaaaaaaatgaaggaaacatggtcaaaattatcttaaagatctcagtccatcacaaaatcgtcttttaagaacaatcctacacacttagagaaaacacattaaatttagggaatatgtgttacaaattttatgtttatta

SEQ ID NO: 58463 - DNA, 1149 bp, Cannabis sativa
  modified_base (401)..(410): a, c, t, g, unknown or other
tgatcgagaaagtatgggaaccagtaaatccgcgagccactcaaagacaaagtctatgagtaagacgcgatctgcgagtaagacaaggtctgctagcaattactcccaactggatctgcgagagcacttgaattggaagaaacctaaccttcgccaatagcttggtccaaagcaagaggatcccatccaattgcagataaacgagttggaggacaagtttaggagatatcaagtgggggaattagggaaactatctggatacgactctcacgaggagcttgagccgtattatccaaacataatgaataccacttttccttcgggattcaaaaactcgcatgtctcgtcatataacgggaccactgatccagtggcacatttgaataactttaacacaatannnnnnnnnngtaatgtgacgaacaatttacgccatattttgttccccaccttgcttgttggagcagcgagtagctggtttaacaagtttactcatcattcaataacttcctgggagcagctgtccacggatttcaagaaacaattccaggctgctagggataggtaacccgaagcggtctcactaaccaatataaagcagcaaccccgcgagatacttaaggcgtacttaagtcgttttagcacggttgcaactagggttaggaatttggatgacagaacgcaacttacatcccttcaggctgggatctctactgatccattaaccgtagggggcaagttgtgggatgacttacaaggtcgtccagtgagaagcatcactgatttcaataaaagggctcaatagttcgttcggaaggaagaagcttgaaaggaaatgaatctgttgagaacaagctcgggaggcaaacctagcaatgtttcaacgtgaactgtttccatgagaattgataatatgggggcttctggttcaaagagaaagcacagagttaaggaaccgtcgaaggctaaaaagaaacaaaagaagcatgataagtatgtgttggtatatactatttataccgagcttaacaaaactcaggagaatacttacctcgcacatgagcaaaaggtggccttcggcaagcccgagcccatgaggaattcgaggagtaagagggatcctaacaagtattgtaaattccataagga

SEQ ID NO: 58464 - DNA, 1474 bp, Cannabis sativa
aagaactgaagtcggagaagaaagatttctcgactcttcgctggattcgtacccagataccaatgctgaagctcttcttgtaatctctggctcggccgaattttctttcgcccaaggagtgacgaagttggtcaaagcgtgtggtccacgaagcttaatggcagcgttgtcgtacaccatgggagcttcctctgccgtatcgtacgtacccaaccagagtcgtacacgtctagctggatctcgaatctcagcttgaagaaagtttgaaagggtggtggcgtagggcttgtggagctcaccggggagagcttccaaagatgaatgaatacgttttagaaaaactgagaaagtgcagtaactaattatcattggataggaaaggtaaaatgcttacacttctcaattaatttacattaaaaataattatcattggataggaaaggtaaaatgcttcagaaactaattggagaacatcctattcccaactgatggttaaacttggttgaataattagctttgtttttcaccatgccagtttcagtcgtggcaattgtttcctcttgatgcccctttggtgaattcctatcataaagtacatcacaaaaaggtaaaacaggtgtttatgactaccttgttaagagtggtaaattgctttattgattgcaatattttgttaaattggagtgtttcttgtactcttatattcttttatggcatatattagcatcattagtaaatagtctcagaatctcaggtaataatctcaattaaagtagaagcttatgataataagaggtttaccattgacaaattctgttatggggcaggaatatactgttctttagagtcttttcttctctcacattacatggggctatctttgccttgttcataggtcatgagcgattcgagtttgagcttctaatgttttaatatctcccacatttttaatctagtcatctgcatttattgcaaataaaattgcgtacatgaaaaatttatgacttaaccatgtcagcaaaagattttaagtaaacaatcctatttataattcaaatggctcgacacttgatttgtacaatttattttccttttcttttttcaattatatattatatggtgatcaagtatagaaaaagttaaagtcacatggtaactagattcaattagaggggtagtgatatatggcatctacgatgtaagtatatagtttaagtgagatggaaaaattccataatacttgctgttttttcctccacatcatcaaattgcataatatttaagtgcagctaagtgatcttcctgaaattgattgcatgttaattacacaaagccttgatgatcactgtcatttgaagactttgaatctcctctctgctaagtaccccaatcttagagtgcttgcaactccaacctatatatcactctaattgttagttatataagcacgtggtggtttgctgagtcttgtctt

SEQ ID NO: 58465 - DNA, 737 bp, Cannabis sativa
ataacaaaatttttgatttatgaggaattattggtaattttttttaaaaaaaaaaattctattcaaaaataatgtattctatatttcaatagctcaaattgatatggaggcatttaaattgttgaatgacttttttttttaaaattagtagtatctaaatttaaaaataaaatatcccaaaattattcagcatatttcaactctagatataattacatttataactctagaaattaaaatatatataatattttttttttgaggaaataaaattgttatcataaattaaaaagtaaagtcatttacaataacagagtttataggcgaaggtatacaataataaattgaactttaaaccgcatatacaattagtttgttgagagaaataaaaaaaaaaaaagaataatatatggaattattttttaccaaatcgtttaggtttcctctcggtatttattttcatttatattttttttttcgatcacagtccactcccactacaagcaaattcttattgccgtctagatggatgagtgaatctgcgaaaaatggacgatctgatgcaaatttgtcgtgagaaatttaaaaaaatcgtctcccaatttcaagttcttatccaatttgggttttctttttactcgtaaatcattctccaattattatgattaatttttcattttctaacattttgaagatttttgtctaagatcggaagagcgtcgtgtagggaaagagtg

SEQ ID NO: 58466 - DNA, 986 bp, Cannabis sativa
gcaaaactatacagtgagggtggctagcttgaggcatggattacaatgttaggggattgtcacgatattttggttttaaaaaatattttgttaaagattatgattcgatcacttttgcaaaatgttaatgtctaaaaaaatttaaatgaatcaagtgtttttttttttaaataatgagatctcatgctttagttatttttaataaattaatttattgttttaattataaatagttttaaacagattatgtagtgtgacgtctcggaaaatcggagcgttacaaaaatattcttatagtttaattatgtttatctctccttttcactattgtgatttttgatataagtgtttgatattatgagttaattattttaagatatatatttatttttatggatttgttaaatttatctctaattgagtatgaatattttaatctttattcgttataatgtttgataacatttttcttttctattttgattaggaactatatggtgagtttcttataaaattattttgattaagaattacatgatgggttttttgccagtacacaccaccattgacgaaagtgtttatcatgccaaattttttctacataaaaatgtatgtatcaaagctttctgcttttggttatataagtctctcttatcttcgaactttttttatttgatttagtattcatggttattgtgaatttaatcttcttgcttttcattttaatcattgctatttatttattttactttgccaaaacataactgattaggggtatttgcctcaaaatactttgatttaatttgagtttatggttgttgtgattttttttctattactagagaattaaactgcggtgttatttaaattttataatctttttatatatgtactcttaatgggtattaaccatgaaggggtaaaattagaaaattttgagtttttatgtttaatttttctatttaattaaaaaaaaatctctcatt

SEQ ID NO: 58467 - DNA, 1242 bp, Cannabis sativa
  modified_base (106)..(108): a, c, t, g, unknown or other
  modified_base (1192)..(1193): a, c, t, g, unknown or other
ttgtgcaatataactttctgattcctcaaaaaaaaatatacatataaaacaattttatacacattaaataaaaaaactaacatttcataaataagttactaattannnacctttcatatatctcatatatatcatattgatataatattgtaaactagatgtattttaaaatacattattatacatacggattagtatacgaaacaaagaataatataattttgttaatataactttaataatttgcaaacataactttttattgttacttgaaattagttttcaagatactaagcatactggtaaagtaattagttgataatagcatgccttaaaatttttatactttttgttgccttcatatcaagtaagatgttcacaatcaacatttttttaaagctgatatgtttacaattattaatggggtttataattttcttttattttcaaaataaatattgaatatattcatgatactggtttacaaaactgatatacaaaagaaacatagattatataaagtaattgatacagaaaacatactattagttaagttaataaatctattagtttatttttgcatattgaaacaaattttatttttctattggaacaacaatttatttcatttcatatatagcctacaattatatatgttaataaatctactagttatcgtttgttgggggaataacattttatttttttcaatacagagtaaaccataatcaagcataatgatatacgccaagaaacccattagtctattttttgtgtatataggaacaacaatttattttttatttcaaacgcagtgtgtgcctataaaataacaaactaattaatctatttttttttcaagttgagatatcaaatctagttgtatacaaagtacattattgtaaatgtcttatatagtaaacctgaataacaatatatgcacttgtcaaagatttgaatatgatgaaattccttggtcctaagtttatttggtatatatgcatatactcatatgtgccaaataaacttattactttattttgacatattgaaatatattttcattctttgtttacacagtagcctttttgtatagcctatcatcgtatatgctaataaatctattagtttattttagcatactggaaacaaatttttatttttctttttgtatattggaataataattcanntcatttcatatagtctaccattatatatgtcaataaatttagtagattc

SEQ ID NO: 58468 - DNA, 867 bp, Cannabis sativa
aaaaaaaagttaccttattctctatattcgtaacatctaaaacttcctcaacctgtatataatttcacattacactacaaaaataataaaaataatcctaataatttacaccaatattaaaatttaaaaaagttaccttattatctaccaacatttcatccccagctttttcaacctaaacaaaagtttaactttatattacaaatattatcaaaaataaacaaaacagtttacacaaaaacagtttacataaaaaaaaacagtttacataaaacccaataattaatctaacaactaattaaaaaacagtaaacataatagtttcttaattaactaaaattacctccacaactggctcttcttcatttgtcaaaacaaggtcatcatcattctgaaaataaaatacaatacacacaataaaaacacagcattataactaatcacatactcaataaataaaaaatacacactatcaaataaaaataatcttaaacacataccatattaaaagtatcctcatcgctcactacaacatttccaccatcatttccacttaaaaagcaatttctcaactcattgaacttcatgtccaaataaaacttcaaacttccatcaatttttgcatcgatataagacttcatattcaactcacattccttaacactacacttcatctcagtactcaaaaactcaaagactcatcaaattttgtttgattaccaacaagcatcttcacattgttctttaactctactagatcagatttccccacaccataacttctctgtataccagatgggtcacctttctcataatgcttcctttgtaatggctcatcatcaaaatcatcttcagaagtttccaaca

SEQ ID NO: 58469 - DNA, 1257 bp, Cannabis sativa
aattaataatgagaaaataaataaaattgtatttaattctcacacaaaataaaaatctttttttttttaaaaaaaaataattgataaatctaaaaaaatatatgattcaaaacggctaataataataataataataataataataataatgacaacgtgtaatagtatatatggtgtattttaaaattaatattaaaataatataaaattattaatttgtaaatttatgttctaataaaatattaaagatgagacaattaaaaagagaagagaaaaataaattactaaaataataataaattatcaatttatagatttatgctctaataaaatattaaaaatgagaaaattaaggtgagaagagaaaaataattttggagagattttaaggtgtcacgtcaccgcctcatatctctcctttatatatataaatacttgtaatataatagtatatatatatttttataatatttattaatactcgtaaaataaaataaattatacgctactatataacttttttttttttataatttaaaagaaaataaaattaatatatattctttttataaaacaataaaaaaatcaaacataacacaaaagataattaattaatgaatgaaaaataaatatataaaaaaaattaacttaatattatgaacgataacgaattaagaacttggtaatcaatttattaaaaaataaattttggggataaatttgaagaccaattgccatattaaaaaaaaaattaccaacaattcccattttgagagcttcaccaacacatgaaacaagtaaggttgcttatcagatcctatcgctaatattcaaatatgactaagggaaaaaaacctcaccagcaatattgccaagcaatgacaacaaaccttgccttctttaccataaaagctaggtgagaatttatataagcttatccattttaatagacaatgttgtgaattcttctattggtgatgctcttatatgctaaatatttagaagaagctctttattgcggccaacttttttcaaacttttttcattattatatctatcatataagttttgttcagttctttctattgtttcaaacaaaattaatcaatttatatatttatatatatatatatatattaagaattaaatatgtctatagcagggatattgattttgtccctatggtagtgatgtttttaaagttatagatatttgatttgtaaaataaatatgtatctttatactagtaaaaagtta

SEQ ID NO: 58470 - DNA, 1722 bp, Cannabis sativa
ggggccttatgtaaaacctcacttgatttgaggttttacatccctcacataagacaaggaaaacaacaatgtagatataggttagtataggcacttttataatgggaatgtacaatatttattgtcatacaaataatatttaatttttaatttttgtttatttgaaattaagtcactttttggggataaatgtgtcaattggttttttttgggtagatgtattttcaactactagagatgtatcttgaaagaaatagagggtatctattctaacttgtaatattatctctttatgtgtataataaatttgtattttattactttgtttatttattttacaaatatgattattgattttcctgttatttggtacgattattattgctacatagattaaatcttatgtacatttataaacatgttttttttttatctaattatcaattcttagtacctcaaataattattatttaaatttatttatatatagtttaaaaattagttatttaaaatctgttataaatttttgcaaaattttactatgcactcttatttattttgatatttaagagtacttttagactaatttttttttttatatatataatcatgtacatttacttatttaaggtattttataaaattttgaaaaaaaaattaaaaaattaataggttgaacataaggtccaaacagtttattgcatgcatgtctattttatttttttacgtgtgaaatagactatttgaacattattttctatatcgtaaattattctaaatttctcaaaatttacaggatatcttaaataactacaacgtacacgaccatgaaaaaaatttaaaatttaaaattttcctagttgttaaaacagtatgggttgcatcaatgcagcatttctaaggagaaatgttaaagggcactcatggtgtctagcaccattatgaggtttaatatctctattttgtgcaatttaatattgagtctcacttattttaatctaataaatattatagaaaaccgcaaactaattataagacgctatgtcatagaggtgataaagacctttatgccccatagaagcaggaacaacttaaaccatgtcaaaagataagacttacataatgttaaacatgttaaactttactgtaaaaatgtaaaaaaattaaattaattaaataaatattaattatatacatttttttggcattctaattgtataaataagcatcaatcaaaacagacatatttatggtacaaattcatatttttatggcaacaaaattataagtttatgatatgtatatagcatatttttttgaattatttaatgtaattttgcactccttttatgtagagataaataaattctttgtgtattaaaaatttaaaattgcagtaaaagtctaaaaaagttaactttgatgcaaataagtccttgaccttgaaaaatagcggtaatagtccctaagctcgagattcttttaagtttgttagtcttcattttaagagatttattaattgctccaaaaatatcacgtgttgatattaaatgcagtataagtcttcaaaaaggttactttaatgcatataagtttctaatctttaaaaattgtagtactagcctcaagctcaagattctcgttagtccgtaggtacccaatttaattgctctgtttgttgctccaaaaaatgacacatgttgatattttattagtccaaat

SEQ ID NO: 58471 - DNA, 1093 bp, Cannabis sativa
gaatcagatggatctgcagcagtatcagaagcaatccgattcatctcggtatcagtagacaaatctgaatttgaggaagtaggtttgggacccctacaacgctttagagcctttcgcattgacattttttcaggaagtctctttgaaactcgatttggtgactggttttctttaccatatggagcagcagtagtcatgcaagtggtggaatcggacatgataggagcattagttggttgacaagccatgtttggtgcaatgttgaaaatgttaattttgtttgcatcaggtggatatgtagcaatatatcccagtggttgtccaatgtttggcatgaatatttcagacaggtcactctcatttggagatgctggtaatgtattgggagatggtggaatggtgccaaccttattttttccttgaatcagtgaaggtgaggcttcaatagttgttgcagatggtgaaagaataggtaactcatgactttgaatacttccctgattcccaagagcaattttatgtttattttttgaaccaataaaatcagaatcattcttaagaataggtggatccatgcccacttttgtcttattttttcctacaacatcagtaacagttggtgtcacagccattctaacatcattatgaaccagagattcagtgttcaaggttgttaaataattagataacatgatcgcctaagaaaaaattgacttgatttatgattttcttttcttcaactatttatgtttttagtgtgagatttatatctctacttgctatttgtatcatacatattttttttaaataatttttttttaatttctacttgatttgattgcaagaaaataaaaaaaattaaattgaagattcaattaaacaacttattttttttatcatacattataataataaacataaagtaatgtatagagagaacaagccaagtaactagttattttatactatttcctcatatttttaacttttttttttttaaaaaaaaaatttataaaagaatttttttgaaaaaaaaacaaactttcttgcaaaattgtgctttaaaatccataaaattaaaaattcctccaaa

SEQ ID NO: 58472 - DNA, 980 bp, Cannabis sativa
attttttaataagaaaaaaactttgtttgctcaaggcgaataaactaaatctagatgaatgccaactacttaattttaattgattaattcttaacccccactattttaattagatgagtgttgccgtcaatctcctattacaatctcttagttaacttccacactcaaaaacacatatcagaatattttttttttaaaaaaaaattcacggtggtgttcgttatgcttacaatattaatcctgtaaatttttaaaaattttcgaatagtttacagtacttaaaatacggttgaagttttttgaacacgcgtgataaattaaaatatcaagaattctatttttagcactgtaaactatttagaatttttcaaaaatttacagaaaactataacgaatatcgctataaaatttgtttttttaaaaaaatattccgatatatgattttgaacgtagaggttgactaagaggttgtaataggagattgtaattagcactcctcttttaattatctactgaaaagaaacttagtctcgagaactccaaactcaaaaacatgatcaacaaaaggaatttaagattacaataattttattttcatatatcatccccataaaaacaatcaaacaatgtggaaatttaatgtctttttgtgttgagttgcaaatttttcaaataaaaatgaattatttatttatatattatgttataataatattttctataacttctttttattttttttataaaggaatataataactagcctaaagctatgaaacttacgttcgttttttaaattaaatataaatttgagatatacgtttcgttatatttatttttttctaaaaaataaaaatcttaggtaattaatgaacttacacttggaggacacgtgtctcgatttcatagagcttcttcctcgatccacgggtgaatatctgagtatatataaaaattatatatttttaactgacactctt

SEQ ID NO: 58473 - DNA, 609 bp, Cannabis sativa
atcgaaaagtactagaataaaggtaaaaatgagcaattatatcttgtaagacgtttcctaacatcttgggctatagacttcgatgtgatgaggtatatgatggcttttttatttcaaccggttaaaggaatgtatgttaaagaattggagcataatcagtacatattccaattttaccatgagttagatctgaaacgtgttattgtagtagcccttggactttcaataagttttagtttgttttcgatcatctgaaaccaagggttgatcctcgtactgtgatgatcaaccatcttgatatatgggtgcaagttcatggactccaatttggttttaagtcagatcaagtgcttaaggatctagggaactatatttgatcttttgtcgaaactgatgcaaaaaacttttagggtttgtggagagattacctacagcgcgtgaaagtggatatcacagtgcccctgaaacttcatatgaagatcagatgtactggcagcgagtggttctgggaaaatttcaagtacgtatacgttctaactttttattttgtctctggcattataggccattcaaaacgtttttgttcgaaagtctttgacatcccattgg

SEQ ID NO: 58474 - DNA, 1103 bp, Cannabis sativa
ggttcctaagcttttgccatgtttggatctcagactgatttgcaggctttcctttctgtctttcagctatttcccaaacccaggaatcctaattcctgctcttctccacccttttttttaaacccccaaatatttccttttggcaaaataatgttagcccacttcttataacttcatctcttttattactagaattgtttaggggttaaatggtatttgatgttatgtgcaaaattataacttaaacattttcacatgtaattaattcttagtagaagtaatgattttaacagtttcacatgtttgtttggaattattttccaggattattatattgtatgttaatgtcatctcctttgtgagtaaattatggctcaaacaccagtcagaattcaagtgattagatgcttttggaatattttggtacttgtattaaatacataatggcaaagtatacagttttcattcaaatggaccaaaattcttattaactctgttttcctttggactttttcgggaaagtaaaaagtacatgcattgctggccttgttgagaagcttcagactagtaggatatattcatgatattttatgaataattaattagtaactttctataataattgttgatcaaagtttttttgcaacctaaaatttgagaaaattacagagattaaagagtggttaagaggaatttagatgagatctttaggtaggtggttaaataaataactgtagtttttagagttgtgaaagttcacaataatgggtgttccttagatttcaacagcattttgacttaaaagaattgaaatcgactacctctatagtaggaagatgggtcgtatttatagtcggccatgtatgaaagtgagccacattaacaaaggcctcaaataaattaattgtgttttagctcactaatggagcaattaattatgcacctaattcccggccttgttgagaagcttaaaaaatgttggtgataagactaaaaaaaaaaatacaaaaacatgacttaattttagaatttttgtaattttatttacagaaaatataatatttaaatttatttttatattatattcttattaatttattgtt

SEQ ID NO: 58475 - DNA, 604 bp, Cannabis sativa
aactctctattatacactctttcacacttttcttcagcaactctctattatacactctttcacacttttcttcagcaagacatatgtaattaaacacacattgttattcattaacatgatctcatgattgaatagttgattaataattaattaagatgtacttgattaattaattagcatgagtaatttcagagtgggtaggttcagaattccattggatgggagtccatatgggaagcttgaagcagcattagatgccaatgaacatgggagaggcatggatatgtgtagcataaatccatcttacttaggccaaaaatacagatatgcttatgcttgtggtgctcaacgcccatgcaacttccccaacaccattactaaggtacataattgatgataacaaacaaattaatactatatattaattaccacaaaaaaaagtgtacaattactaaataattaatatttgaattgcagattgatttagtagagaaaaaggctaaaaattggtacgaggaaggtgtagtaccttccgaaccatacttcgtggctcgaccaggagcaacagaagaagatgacggtgagtatttacgaccacaatctc

SEQ ID NO: 58476 - DNA, 2045 bp, Cannabis sativa
  modified_base (1595)..(1596): a, c, t, g, unknown or other
gaaggcatggtttccaatatgggggattggaaatccaaatggttttatgtgtttaaggttccaggaattaggactgactttaatcgtcgacatagtacatcgcatatttcttcacttagtcaattttcaagttaccttgtgactttgatctaacccgttcttttttattgtcgcagatagaccggctcgacctacactagacgcgactcgcagagaaaccgctgaaattctcggaagttaccttgtgacaagatcgtgactggcgactactgtgcacgaccttaaagttgcgggaacacaagctaattctagagaacgcaagcagccttcaaagagagccagtgtacaaggagccgtttgagaaacaaagagagcggatagacaaacgcctttccaagcagacttctcgaccaacatcaggtaacatatcgcatgtataaactagtgcattaaaatttattattatttgtacttatcttttcttgtcctcgcagagatgactttcctgaagtccgcaccggtcctcaaccgtaagccaaagactggaacagcgacgacatcacctgtcgttcctcagaagaggaaaagcgatgtcatggctattcctgctgcggattcctctaagaagctagctaagcctacgcaggacaagggaaagaaagtcgtgattgatccgaccgtccgagctcgcaacatcctaactcttcaagagaagttcatgggtgatgagtttatatcaagggtcgacaggacccctactgaggagctaatgcctcgttctgcggaattggcttcacaattcattgctatgttttcgagggcttttgtcgctggttccaaggaagttgagcttttaaaaaggcagaatgttcagcttcaagaggacatagagaagccgaagcaagatgcgactaccaaggacaaagagctcgaggaactttgcaagtctaaggagcaagtcgaacttgaggccaaaaattctcagatgaagatcgaggagatgtcccgcgacttggaggtcgagaaggagaatggaaagaagcagtacgactaggcggtctctgactacatttatacaactctttccaagattttggacttcgacttctcgatccttggggcgaaggtggctgagatggctaaggctttttgagccatgtcacccacgcagactcaaggcggtggaggaaatctttttcccgaggatgctgatgctgcggacactgaggaaattgtggacgaggctgctagcaaagtcgcggatggatctaccaccccaactgcccctgttgctcccaatgcttaacttttactttactatttacttttgctagacttttttatgcggtacaagggtactcgcaacttttacttagacaaatttatgcttatttttcttttgaacaaatttacatcccttcgaggatatttatttatgttataacatcttcgcagtacacgggtactcgcatttttttgtttataacatctcgattgccgtttcattacagcttggtgtaataagtattaaggtagaaaaatttcaaaatctcaaaaaatttcatgactctttattgatcaatagtacaaagtgnntgggttatataccccctatacttagaatatttatgtaaataaattgactaagtataaatacacagcgagtacaaacgatacaatgcaagtactattgataataaaattttaagctttcgccattccaggctctttgaattatagtaccatcgagttctctgagtcggtatgttgcgttaccaattttttctgcgatgagataaggttcttcccaaatgtctccaaagaccccattctttccttgaccttagagttgaaataccttgcggttcgttgctgataagccgcatattttaggtgagcctgatcgcacttttcttctagaaggtcgaggtaaagcgagtgtttttctttgttctgttcaacgttgaaaacatctctttgtagggaacctgccccaacctcgactggtatcatggcctcgaatccataagagagcgagaaaggag

SEQ ID NO: 58477 - DNA, 723 bp, Cannabis sativa
  modified_base (40)..(61): a, c, t, g, unknown or other
  modified_base (697)..(697): a, c, t, g, unknown or other
tttagaaagttcatatttaggttgttaataaacatacttnnnnnnnnnnnnnnnnnnnnnntaaaataatttccaacacttcccatactggcccatacaacattgcttctctcactagatgaaccattaaacgtatcatgatctccaaaaaagatggcagaaaaaacttttcaaggttgcacaaggttttgactacatgttcatgtaatgtatctaatttatctatttataattccttcccgaataacttattaaggaaaatgcaaacatgtgtcaaacactcgaatattttttggcaagtctgatctaatggcaattggaagtaaatgttgcattaacgcatgacaatcatgtgattttatacccattagtttcaaccatatttaccaagttcttgatgttagatgggtatccatcaagtactttcatctctgaaaatgatttgcaaaccctttgtttttctttttttttttttttggactaagtgaaacaagcagaatgcaaatataatcgttcacctttcttttcaggggccagagattgtctaatatctatttcaacgagatctaaacgactagataaaccatccttaatgttgtcggcggaaatatcaagtatggtaccgataatactctcatacaaattttttcaatatgcatgacatctaaacaatgtcatgttgggttttatgccctanataaaactctttacaatctgattagt

SEQ ID NO: 58478 - DNA, 2914 bp, Cannabis sativa
  modified_base (27)..(35): a, c, t, g, unknown or other
ttcaatcagtaacttttgcaaaacacnnnnnnnnnaatagtatttaccctaaaataaaactaaagaaactaatgtgaaaagaaaatttaaaaaagtatattaaaagtgatttttaaaaattaatttaagttaattattttttaatattagagtgcaatgcatctataactttataagtgcaaatataatttctctaaaatttattttaaaagtatatataaaaaaaacattaaaatattacacatttattattcaatataataattactatatccaaaataaatcttaaaaatttgtgaaaaaattactaatatactaaaaaaaaatataaaaaatattaatcaaatcctcttcgcgacggaagatctccgtctccacctcatttaatattttgtggacaaaaaataattcccgtccttgactccctatctatttttttatttagacggggaattacaaccccaatataaaagtgagtccccgcaagaccccatccttatagagaaagtttgcatctcttgggagcaagtagtagtgtatctaggatttagttgaggggtggatattttttataatataatatgttaaaataattataaaaattaacacaaactaattatctagtattatatataatttaaagttaaaagaaataaataaaaatgtttggcttaatagttaagttcctaatatatatagttgtggtaagggtttgaattttaggatcattttttttttccgaatatataagaatagaatatacatttgctttattaagttttaaaatattgttttattatatttattaaacttttaaattactatttttttacattaaaatattatttctatatataattttttaattttttttttataaagatgtgtggattggattgaatcggttacttttacatgtcaatcaacattcaattcgcatttgaattttctaatccgcacaagtgcgagtatccacactttgcagattagattgaatcggctattttataaacacccctaaatgtaattatgtgtggggtcaaacaaataactttggtggttgcttacactgcgtatgctcgtataaattaaggaaccaatgttattccttacagccaatggcagagcttaatttgttttcttaaatatttcatatgtaaactgaactgaaaaagtatattgtgataactcaagattagggaaatttatgataaagctctccaaacatactaaaataaatgttagccccctaaatgatatttttttctagctccattatgggagggccagaaaactacagaaatattcatttagaaatggacaaagtttcctaacaatgttggcaagaaatacttaaatttaatagattgtttcaagacaaaaaaacaaatacataaataattaaaaacaaggcatataaagatgtggtcctcatggattgatcaccagcttggcaaccttctcgagtcaccatgttttgatttatatgctttaacatagccaagtgttcaagtgttgaaatcattcatatgtcattctatatagaatgtttctccaacttatattatttcatggtgaattgtacattcataaagaaaacaatccataatcgacacaacaccaaggtgtacaacacttacacctcatttacttatttaattaaattatactttgttttgagatgttgtaaaccaaaccaagtctaagtgaagctaaaactactcctccatcattaattaatgagacgagtattgttattaaaaattggtagtgttcaacatcaacccgaagtaacactttgcatgattattgatatataataattatcaattaaaatatgcggaatttaatacttaattacatcaatatagatatggtattttaccgagcaataatactcttaattaatacttgtagagtaactgcttagagctctactttttatatttatttagtttacttttaagcttaatatatattttttttgttttagaaaaattaagtggttgtagacttgtagttatacctaactaaatcaatgaataaataagggttgtttgtatcgtatatgattctattgtggtccgcttcttacacaagacaaaggccgtacaaataattaactaaaaaactatacgttaaaataatatcgaaaacacagccaatatgtaccacaaatttgattgcaatgcaatgaaagccactaatttatttactaatttttataaatcactatctactttaatactttaaagtaaattgatactcattgtgctcttaaccactaagaaaatatactttgatttcttgaatattaatttataattcccatttagtactaatatatcaacggtgattatattcaacttttttctgattaatttagaaagactacaatacaatcaattaaagatggtatttactttttcttactttatattaattaatgattgttaatggaaagattaccctagctagtgctattaataactacaaatcactaaagataatagtggtataagtaaattccagtattagattaaaaaaaagcctgacaaagaagtcatctgtactaataaaatatattaaagttgggtagaaaacaaaagaggaattctccacggcaccaacgagttttttcttgtttatttgattgtttttttacttttaagttgaaatgggtaagagaaaagagaaggcataaaatggagtgatgaaagcaatgaaaacacaaaagaaggatgagtgcgaaaaaaagtaattattgagttaaattatttgaaaactcatttattactttattactttttttttaaattaaaagaaaaaaaaaagtataaatagtaaagaaattagaaatgtgactcataatattataaagagtcttttttatttacactttaaaacagttttt

SEQ ID NO: 58479 - DNA, 1714 bp, Cannabis sativa
aaaaagattatttaaaattcctttattttttcatttttttacattaaattcctttattttttttttatttggtggcaaaaatttcttttgtttatttttgggtaaatagtggcataattactcaaagttttagatttgtaagcggcataaactcaatgattttttttagtggcagaagtaccaatgtttataaaaccgtaattttcttccaatttcatcagtacatactctgttattgtctaaaacaggacacatataagacccaaattttagattatttggtatggacgaaaaatatgtagtatcagttacttccaattttttttttaataaatttaaaacggagcctgtactgacgaaaatagagaaaaattaaaattttacaaacattaggtacttatgcaactaaataaaatcattgggtttataccgcttacaaactcaaaactttgagtacttatgccgctatttaccttttattttttatacaaatttgatgtgtcaatatcaccgttaaatactaaatgaattattattatattgactttgaagaatttctttcacattcaatagtcatcccgttggtatttaacggtaatatttaactcacgtctcaatctttaaagaaaattaaacttaaggaaattttatcacaaaaaaaaaataaataaataagtgtataaaaaattgaaagataaaaaattgaaagataaaaaatttcatcgccaattactctaaagaatcatttaaaaatacttaaaaattaaaaaattaataaataaaatttttctctccccatatagacatcatcacgagattccttgcttgaagatagggtcagtcttgaaattttgtaggttatagaaaaaaaaaaattgagccctcacttttaaaaatatgatatttttcaaaattagtaaaagaaaataaatgtttttgaaaggggataatttttttcacctctaagttagttgggccctaaacacatcctaacccgtttatacttagagtcgggcctacttgaaaaccttcacatccgaggatttcctataattgtttacatataaaatagaaaaaatctaaattaactaaaaactgccaataagcacttacttgacacttacaaaaagactgcaacaaatgtgtaataaaatgtatttttacggttaaaaacttagcattatcaactcaaattactctatgattatttatttatttattttttttgtctctataccaatataacataattattagattttaattaacttaaattttggtaaatgctttgttgtgttcatttaccattggagacctgagagaggaggagacgagtaaagaaaaaaagaaaaaactagagaagaaaaagaaattaaaaactcaccctataacgacaacacatagtaaattttcttcttggttcgcatttgttcacaaaattttaatcactgtagagcattgacaagaggagatggagcagatgactcgagcaatagggtgagtttttacagtaaatagcaaaacaaaataggagttcaataaattttactatcaaaaattgtgtttatgtgttaaaaaatataaaattcatgtagttttgttgcccatgtcccttaacggaaccacactaatttaggatagttttagggtaaaatactttcaactaagacaataataattgttaagcaaaaaataaataaaactaaaacaataa

SEQ ID NO: 58480 - DNA, 801 bp, Cannabis sativa
ttgaatgatttgatgatattttttttatttataagttgttatttaggatgtgagttatctgaaaagacattatattaatattctattaatgaatgatttgataatttatttaaataaattaataaaaatctttaataaataagaaaatgaaaaaaataaaaaatagaaaagatagctcatgtgtaatgccactagcctctcttatacattcttttatatatatactaggtaactaagtcgcgccttatacgaatttgaccctaattttgtaaattttctgattaagtaatataatgtaaaatataatattttgatatatatatatattataaataaagtaaaaattttaaaattagaaatataaagaaaagaagagaacaaacaacaacacaacatataggccaacatgtgatcattttttatccatataacaaaatatttttcttcatatcatcataatattctaaaccacctctctctacatgtgtacagtataattgtgtatgtaaaaatcaatgtttgaactaaaaataaaaggcaattgaaaagcaatatcaatgccaacctattcttcattcacaaatctcacttaaatgtgacaatggagggagaggagggaattaacacaatgaaaaaaatgctctttttttccttaattaaaattgacttggtcaaactaaaaaagcccaagtcataatatttgacaatgaaatgatatattcaaatgaattttagtttagacacacgtaatgtagcagtagtagtagtggaatatctagtagaagagtagaagtagaagta

SEQ ID NO: 58481 - DNA, 689 bp, Cannabis sativa
ggaagcatccctccaaactaaatctttgactttaggaggcactctcaaatctcacaactctttttaaaagaccaagttaccaactctaattaactcacctttaagctcttgaaaaagtctatacccactcttgaccgaatatacatcagaactctcaccattctactgccaaatatcgtcaaacattgaggaaaacaaataaaaaagagaaatagagtgaagagaaagaaaaaaaaaaatcagtcaaaactgattataaaaaatataaagaagagaaaagattttttttaaaaaaaattttaataagaagaaaatagtaaaaaaaaaaataagtaggaaaaatataaagttaaaaacagattgatagttaataaattaaataaatataaatgatgtggatgccttcacaaacaaaaaattaaaataataaataataaagagatggatcattcttctttatactatgttgatgttatatttttttttaattagactcaattaagtgatgttaagtgcaatatatgtatgtttatttttttttttaattaggaaatgtattttttttttaatttttgaaatggagtttgagattttgatttttaagaattttttttagctattgctcattcattggtgtgtcatttgaatgtgattatatatacgtatttttaaattttaattttttaatt

SEQ ID NO: 58482 - DNA, 898 bp, Cannabis sativa
cggaagatgcacttttattacttatactataacctgcacacattttaataactgttggtattgattttatttttgcatatattatatgtattatgtgtagatatatatttaaaattcaaaataaacctggcatttaattttttctttttcaacgcatatcttcccgcggatttatagccttcttagacagacgatgattgatataaatttatacacaatattatacacatatatatatatatatgttttaattaataggatgaattctattaatcaatcaagtttgtcattccaatgtcaatgaaaacacaatgtgtataaataatggtgacgagtaatataatgttcaatcttattcacggaacctttaacaattttaataaaatttaaagaagctaaacgaattctacaatccttaattaaggaaccaaacaaaaatgacatatgcaatgtcctatgaattgcttgcacaataactaagtaatcacttttaataataacatgttgccaatttttatgcttaatttaacctaaagactctttaattccaactatttctttcatatcagcttgaacacgacaacatgactaataaagaaaaatttcaccaagcggccatatcaacttgagctaccccacttgctccgaaaagaccttgtgacgtaaagattgttccattaacattaattatcttataatcatattcaaatctggtttagtccaatgctctagacattattcacaccatcagacataaaaatgactacatcttccttagtttagcactttgccattgattaagcaccgctctagctgataaaataacctatgctgccgaagaaagcttatcattccaaaccatatcattctgagacttccgaattgcccaagccaccat

SEQ ID NO: 58483 - DNA, 1408 bp, Cannabis sativa
ccttatatttattcatttatctttcctttctattgtaatcttacatcctgacttggaacactttaaaacatatattagaaaatgaaacctacattcttctttcaagaaatgcacattcaattcaacaaaacaaaaacaatgattgagaagaaatgtgagatgaatgagaagttgaaaagtttcaatcatacatgagtgtaatgtcctacttagtggaacgccacgtatcgtgattacattacgttaatctcattaatcgggacaaataagccaagtgattaaaacaaaataatcttaattaattaaaacaacttgtagtaataaaatttagctttaacttaaaaccaaaataatatcaatacatatttgggatcatgtgaaatcttttacaaaatattacaagccatttacatatacactgacctaagcaaaaaaaatagagttcttatgcaattcccttgttagacccaaccctcgtggcctagcttggccggaacatgtacaattcatcttcaaaatcttcaaactcatagttgactcgacattgctttacctttgcctacacaatagagcacccgtgagccaagacccagtaagaaagcatgatcaatcaaatataacatatagcatacatatcacacataatatgccactatataaataactgtgtcattgcactaatatagcacgcaactgcacttataatgatgacactctatcttaagtctataatattatatagaaactacgtgttattctcacacgcatattattacataaggccttattaggggttctctcatttttggtcaccgagctaacctagtcatgccttgtcatataactcttgacataaacacaattaaatcatttaatgtacatgcatagacataggaaccttaggataataaccataattcacgtttttattaaattatccacataatatacaaatatgccattacactataatctatgtgcaaggttcattttcttgcctaaattctaaagtaagaggagaattcccaattcacaggtgatctcgagcaaggtaccggtattcctagtcataaatcaatacggtttccttgctttggtgaagctaggttgcatgaaccaacctaccttgaaacatgataagactgagttgtatggtgaaagtatgaaaggatgtttcagtggcagatatgatttggattctaagcgtgcaagtggtcttcaagcgatacataacttcaataatgtttttgtttcttaaaacaatttatatgaagcatttctctttaattttacaaatttcatataatgttttccttaaattatacttaagactatttttcctttttaactactaaaactttacacattagtttcctttcaataattttactaatattttgatttttag

SEQ ID NO: 58484 - DNA, 1068 bp, Cannabis sativa
aataacaaaatgcccacaaatctatatcatttggtacaccttcaagtgttggatttgtctctaaatgacatatctggaaacataccaacttgtattggtaactttacatcaatgagaaagaatgaagatgatagttttattgactatacaactattacccattctggaaatggaagctcctcctatgacgatgaaatttcgttgacctggaaaggaagtctatctgagtacaaaagtactcttcgacttgtaaagatgattgatctttcgagcaacaagttgacaggagaacttccaagagaaattgttgaacttaatggtttggtttctttgaacttgtcaagaaacaatttaagtgggaaaattcctactgagattgggaagttggtatctctagatgctcttgatttgtcaaggaacaacttttcaggaaaaattccttcaacattatcagaagtggatcgtctcaatacattagacttgtccaacaataatttgtctggaaaaattccaacaggccctcaactccaaactcgagatgaagctgcatacatggggaatccaaaactctgtggatccccacttcagaaaaaatgtccaggtgaagaagaagaacctactacttctaagcttggtggccacctagaaaatgaagatgcatttataagcaaaggatttttcatcagcttagcagttggatttatggttggattttggggaatctgttgcactttaatcttcaagaaatcttggaggtatgcatttttcaagctcttgaatgatgtagaagattggacgtacgtaaatgcacaagtaataaggcgaaaatactacaattgataaaaaaattgtcaggtaaaacatactattcttttattgatatattttttctgttttttttttttttttttttttgaacaagatatattttttctgttgaattatttgtatgaagcaatatttttctattgaagagtgttctttggcaggagatacatccttcatttggagagagtagcacttgttgtggacttttcttcataaaataagttgtaaagttaaaactat

SEQ ID NO: 58485 - DNA, 1124 bp, Cannabis sativa
ttacatctaaagatgttgctcgtgctcccgttttgattgagagtacaccaggatatcatcgataaatacaataacacagattttgaggaaatccttgaataccctattcaacaaatccataaaagttgcaggagtgttggttagtccaaaagacataactaggaagtcatagtgcccatacctagtgtggaaagcagtcttttgaatgtcctcccctcagattctcaactaatgatagtccaattggagatcaatcttttacaagaccatcttcccttgaagttgatcaaataaatcattgatcgtaggttatggatatttgttcgtgatagctagtttatttaattcctgatattcaataaacaataggggagctccccagggttacacactaagctgtaaaaaccctaggtcaagtaacccctaaagctgtatctttcaattatttaagctctgtcagagccattctgtacagtgccttagaaattagttctactacaggtgctaaatcaataacataatttatttctctctggggtggtaagcctagaagtttatcaggaaaaacatttagaaattcttgaaccaccctgatgtcttctgggcgacttattgcaggttgtgtggtatccaatacaattgctagaaaccctaagcacctttcttgtaacaatcttcttattttcaatacctatattactagaatagggatccctaaaccgatcccacaaatacaaacgatttctcaccctcagattggaagatcaccatcttccattaacaatcaatgctagttgagtactgtaacaactgagggcctagcctctctatcagcctgagtaagaacaaacaactttattggagcgggctttgttactgtctcgtgttccactttcttgagctgcagacattctcctttatagtgtctaggcaaaccacactagaaatatcctcaccctcaacactcacccagattatgcttcttacaattgacacatcttgagtatgtatattgagtttaaaaatcaccctgatgattacctcgaccctggttccctcggaacctcttgttctgacttgagtcacagggtgcaaatggtgccttttcttcctggtcggtggtc

SEQ ID NO: 58486 - DNA, 1227 bp, Cannabis sativa
  modified_base (1184)..(1197): a, c, t, g, unknown or other
cttgaagcggggtcgttacaaatgatatctgattaagcgagtaaaagaaaaatgtaaatgagaattggattaagtgatttttgttctcatgttattcttagaaagagtgattttgataatatattttattccactttcattagttggatggattagtaaatgtttcttttatagtgatatatgtagctcattcatgaaagtacgttcacttgtgtgcttctaaggctgtatgttagctagttcgcatgtgtaaggagactttttacgatctttatagagctttcattcagttcatgtaatttatagaagacatatggtctgtatgaatgacatcagtttgttgatatattagatcgtgtgtagggctacattcttaattattaaactacaaaacttagaaataggtagtctattgattgcattgaattggatcatttcgatgatggaattcatataagaggggaacaattgtctggactgaaaatgtaaaagtaaatttcgaggaccaaattttttctagtgggggataattgtaatatccatttttttaaggaaaacttaagaatttaattccatattttttttttacttcggtttattttattttattttagtattttgaataatcatgatattgtgaactaagaatttttaatggcaaataaatttttttttatagtgacgaatatttttttaattaatagagatgaattacttggcatgtgcatatttcttagaagtaattagttgtgacaaaggaactatttattttgtgagtgttgttcttattgtaagcataataataataatacttgtaaaattaatttatatatagtatagtttgacatatttttttatggtatggttaatatatacctattatttaaaaagattataaataataatttatgattcattatgtaatatatagaagtattattttaaattatgatttaaagtttaaattatgtgataactgataatgaagataaatatctatttattcgttattattaacattattattatttataaaaaataggtgtgtatttgagaaaccgatatttagggagtgattcgttcaagctaatcagttattgttatattatttctttttgtttaaaccaccagtacacgacaattaatggattagaaatcgtccatattgtgacagtcagtagtcnnnnnnnnnnnnnngggaaataccaggtaagctgtgcaatccca

SEQ ID NO: 58487 - DNA, 778 bp, Cannabis sativa
tcatcatgacgcttataatggtatgaatgaactaccctcattcattacttacaacactattcaaatattttactgaaaatgatgtataggaaatattcaaaaccataataattactcttcaatatttattatacctaataatatatgaaaaatattaattacaatctcttagccaatcttcatgctcgaaatcacatgccaaaatattttttattacaatatccctgtaaatttttaaaaaattctaaatagtttatggtattgaaagtaaagttcttgatatttcaatttaccacacgtgtttagaaaacttcaaatttattttcggcactgtaaactattggaaatatttccaaaatttacaaagataatattataaatataacgaacaccgccacaaaaaaaaaatttaaaaatattccaacatttattttcaaatacggaaggttgacagtaacatttctcatatatatatatataatatataaaatatatcttccattcaaacattatagttctcttcagtcaacaataaccacgtactaaccaactagtcagcaagcaaagacctagctcaaaaaatataagaggaaacttttgaaccaaaaactagctaccacggacaaggaagttgaagcaagtgttgactgttagtactggaaagaaagaaaggtgttttattgaaggagcaattaagcaaatgggatttggcaaaaagatgataggaaagtatgagatcggtcggactatcggcgaaggtacatttgccaaggttaag

SEQ ID NO: 58488 - DNA, 1118 bp, Cannabis sativa
aatgaatcagtttcaatgaagtcagcagttaagccaaggctgatgaaccattgcagagataaagccatagcagtagcttccatctcttcaggtttgaaacaccccaaaatcgattttgaaagagcagctttgatgtagccattggaatccctcaacacagcacctataccaattaatttatttgatctgttgcaggctgcatcagtattaagcttccatttacccataggaggtgcaatccaaggactagctgagggtgcatttgatgagacaattgctggaggggggtctgtaactgcagtaaaaccagaaacctgttgcgagttgtgcacggtttgatatttcgagaggtatccagtagcaaacatgaagatggcagcaggctatttgggcaatttaccatgaaactcagcatttctctcaaaccaaatactccaacagagagttagaaactgctcaaattctggtgtagatgtattggtcgagacatagagcaggaattcctctgatgtagtggtagcgaccaatttaaaattcaaattatgaggataaagacaccaaacctccttagctcttgtgcagaggaacaaagcatgatttattgtttctttctgcattttacacaaaggacagtaaggtgtgtctgcaatatgcttgcggttgagttcagcagccactggtaggacattatgaaataattccagacaaagatacgaagtttcgaaggtaacttcaacttccaaaacttagtccaccaattttcacttgaaaaagtactgctagcatcatgaagttcagccagtgaagagacaaggtaatagccagatttgaccatgtaattacccgaattagtgccattctaaattaaaatattatttgagggatagatggtaagagggatggagagtattctatctatatcagcttgtccaaagttagctgagatagtcgttaaatcccattgtctatgctgagtgatcagatcagcaacttggagtgaattatcattgcctatgaaactgaaaggtgtgaaatcagtatgaccaggaagccacggatcagacttgcaattgattcgatttccaattcctactctccaacgaaggcccttagcaaga

SEQ ID NO: 58489 - DNA, 1520 bp, Cannabis sativa
tatcctggggtagcggagaattgtattccgctcatttgaggagtggtaagagatggggctcccagaagctgtgctccaagtacatatcctgattctccggtcgagtagtatcctccgtaagccactatttgggcttcttccaagttaatatatttttggacccttttctgaaagtcctagaggttagctactccctcttgcggattccagcttgaagaagggccagctgttgtccgtcatccaccttcttggtctttgaggcctcctctttgaatctttttatgaagttctttaaggttttcgtgggcagttattttatgttagtcaaggcgctgacctcgaggtttatcttccttgccgcaacaatctgtctccggaaactgaattgtaatttgttctaacagtccactgatcctagctcaaactttttaaaccattcctcagctgaaccgtccaacgttagtggaaagcataaacactttacgtcattgctgaccctcatgacggttatcaccttgttaaaccgagatagatggtcactggggtccgaatctcccgtgtaagttaccatttcgggcatcttaaaatttttggggagttctgcatctagtatgtgtcgggtgcatggttcccgatcctcacaatcagtctgaatcatctgtttttttctctgggagactctaccaatgtctttgcgtagtattgccaattcagccaagattccttcgtttaaggtgcctctaaggactggcaatgcgcgttttttcttttcaagatggtttcttaagtcaccatgcttctcattgattttttgtcttagatgagccgggggatacctctgacttttcctccccctttccctgggttcttggtgcacgaatacgctatttcggtcctctcgatcctgagagccaagactcgctcgagggagcttgcccctctacggacctttccgttttgggaaattagggtggactttttgcggattctgtgccttcctatttctcctagggatcgaagtagggtttttttttttcagggttctcctcgaaagggtaccgtatagggcttggttccctggtcttgggcctctgagtgcttggcgaggattcttcttgtatttcctctggtcccacggggatgacattggaatgtacatgtattccagccatttctatagctttttgcatggcgaccattatctcttgcatcctcttattctgttctttttgggcagctagttcggcttcatgatcagtcgccttttgccttaggaccagcagttcagtatagctatttctgtcgtaagtgtcgtacccttcaaagttttcttcatattcctcatcgtttgtctcatctcgttcctcagagcccacatttactcatgaggctacttcttcgccttccaagttccgagttctgagtatcctggcgaggatgaggttggtgtgtgttgtttgagtttccaccattgttgttctgattctttgactgttgtcttctcaacaacgcttccgaca

SEQ ID NO: 58490 - DNA, 1679 bp, Cannabis sativa
aaatctcaatagttaaagggaaaattctctgttcataaacaagttactttacaacaacaacaagctctcattctagttattcgtaaactgagtcggtagtactcgagaacaatagacaagaaaaatgaaatttcaacggtttcaaaagagaatattgctagaaactcagtcggtagtactcaagaacaataatcattataaagcaattatgaactaggatctgctctgggacgcatctttgttattgatataacaactacatgtaagcagaaaataaataaatacagagaggtttttttaaaaataattcctcatcaagacgagatcttatgcatcaattagtatctaaggaaatactataccaatatactacataaatagcccaagttatattaaataacaaaataaagaagaggtcaacactattataatgatgccttatagaaagtcaggtggttttatctaaaacagaacaaagattatcatagcaactaaaaaggaagaactttaattactggtgttcaattttatcacaatattacaaaaattttgacctctttcttttttttaccaaatttgcgtaagaattaaaaacagagcatatcatacaaaaaaaaaaaaaaaaagaaaatgggaaaagaagtactcactcctccattggccagtgcaatggccataatagttgctgcttccataacccatgatagagggttccacataaaccttaagaacttcaaaaatttactttcctgaaaagacaaaagaaaaaaaaaatcattttaactagaacatataacaatgctattaagtttaaccagaacatagccacctctttagccaaaataaaacatgtgcttcatcaaataagggttccttttcggaagtggatcatccaattgcttcctcgacaaatgattccaaatcttatatgacatactctgtaaaatctcttagacaaatacatagtgtgccaacttaagctcacaatctcatattctcgatctaagcagaataaactgctcttaaaaatcaaataagggaatgtcacacatgaaaggagtactggtcttgaacaaatacatactgctcttaaaaatcaaaaaatcgtaatttgctaagaattcatttctaagaatcaaatatcgaaaacctaaccgtaaataaatatagaaacaaagtgagaacaacaaaattgaaacgcaaacctgtctgacaagatgatcaatggttcgatagaaacagcgaagaggaatcaattcgtttatcgactatagtttccaacctaatttcaaaaacctaattgcgaatatatatagaaagaaaatgagaacagagtgaaatcaaaactctctttcgcaaagcaacaatgtatattaaagtactgtctagatatacatcaatcgaaagcaaatcaaaagtgagcgagactaaaaacttgtatgaaatagagaaaatgattgtttgagaagacaatttgtccaattggaagatgatgatcaaaatttaatttgagtaaaatctacaaacccataaatttcagatattctagataataattaaacagatgtcaaagtgagaaagataacttacctagccggagtgaagaatggagaccgactgatggagaagaacgatgcaaatttcaggggataatcgccatggtagcgtttgttcgtgaa

SEQ ID NO: 58491 - DNA, 2646 bp, Cannabis sativa
tcacgtataccgaccagagtaaatgcagttggaatatctttatagataccttccataaatcttcaagtatgcaagtcatgattatactgctaattttgtgagacaaattcgcattgacaagaaataagaggaaacgtacttagttttccttttttactttatttgtttaaggaaagtaaacatgttttctattttaattcttattaggtttaggaaacctaactaatgtacttattccctataaatagtggaatcatttcactatttagggatcttaaatcattcatttctgagagcacttaagctgctaaaactattgtaagctttcgaaaaaaaaattaagaacttcttccttcttttctcataagtcagtacaagaaaaaaggaagcatgctattattaccatcacgtgtcgaacctctataacaatcttctttttgtttaaacttaaaatatgatatttctattttttctacaaaagtatgacattaactagtttgtaagatccaacccaatcagaatataattttataggggtttttagaaaaatactgaatttttggtaaaagtttacaattttatcgttacgattttttttacaaaaatactgtttttttataaaataacagtaaaacaacaaaataaaataattaaaaataacaatgaaacaactataacacaaccgtagaacaaaagtaaaaactaaacactgaaaaatataaataaaaaatttcatgtggtttaaaaaaactttttttataattaatttttggccacggcaccttttttgagcttctcgaacgacgtcgtttccggtgtttaatatagtcagtttaacgttgttattgtcaagcgatgtgggattatctacgttgactgcggtggcttgagtgtttgacaacaattactgtactggggttgttagttactccgccatagccattgaagaacttaatttgcagcgatgtttaaggttccagtgctaccaacagtggggatgttattggcggagtgtgcccaagttgggttaatgatggtcagtaaagccgccatgtctgacggaatgagcaatattattttcatcttctactccaacgctctcgcctctctcatactcctcccttcttctttactttttcataggtaattagtaattactcaaaccccatcctttaataagaatatcactactcactttgctttttttttttttgtttttgttcccattttcttggcagatcacagcgtccttcacttactttctcaatcattggtgggttccttttgcttggtctacttgggtatgtggaaaagaaaattactgttgcatagaaaattaaaaatttacattttggtgtttttttttcaacatttacttttcccacaaaaatccaacttttaaacatagccttaaagtttggtgcttttctttatttggtgatgaaaaaacttgttatttttgcagtttctttgctcagttctttggttatgctgggattaatttgagttctcccactcttggcacagcattactcaatcttattcctggtttcacttacatacttgcggttaccctaaggtttatgctcctctctcttactctctctcaattatattgtatgattggctttaattgatttgtgtcttcaatttcttggtggaaccattttagctaacttatgatagtaaagcaaagccagtgatcttagtttgagaaaaagaaaggttcataggcaattgcatagtgttgtctacttgggataggatagttactcctcccctattcaagttagagcttacattcatatcaaatgtatttgtttttatccatctttcccaatttttataataaggaaaagtgaattgtgctcctttcttcttctcaattgttctgtaaatgcggataagtttaagtgtaatttcaccaaaatcgctatttagtcgaaatttcacacaaactcatagctatcaaatgtaatagtgtagtctccttggactattcgggcaggttttgtggtaggctatgttaatttttttcttgttaacttagtttttctcaattgattcataggaaaacaagcattgtggttgatctttctcttccatttttcaaaatagtcatctcttatacattccaccatgctccttccgattccttgattagttaaaaagtgcaatgttctaggtgtaaagtctgtgcaggagctgaactgagtgtgtgagaacttagttggtgtaaagttttgtacatgagtgtctcgggttgaagggctctgttggcttttctatgcctccatgaagaagttttccaagtagccaaatatggtcatgctgttgttaaagtatttgaacaagctcaggtggaggattgaagagcttcaaggtcattaggactcttaatgaacgaattttatttctatttattaaattcccttatttcagtatctgtaggctaaatatcttttgcatttttgtacttatttacattgagttatgaaatatatttaatttgaaggtgaggtagaactgacctttagcatatctgattttcttctcttttcgaatatagaaccgaaattgttacctgattcttattatacaaccgatctttcaggatggaatcattaaattggagaagctcctcta

SEQ ID NO: 58492 - DNA, 747 bp, Cannabis sativa
agagaaagaaaaaatgaattaaaaaattaaaggcatttatcaagaaaaaacatataacgaaagaaaataagaatctattaagcactacataacatcaaattgaaagaattaggagaaaataatcttaaggaaataaagacacgtgtagtaaaatcacccaaccaattacgctaagtccctcatttagttacttttcgaaattcaaatttccatgatagtacttattttgaaccttaaaaaggcactcctttgaaagtaatgaaaatttgtgcaccctatttgataggtcatgatatccctacatgagagggattccgctgacaaacaatgtataagccccaattaactactcggtggtctttgggattgctattaagttaaaagagtgaaattaaaatgtgcaccatgtgatttgctttttagttataaaaaaaattaaattaaatccatagatataaaacaacaaatgcttatttaatttgtacttttgctataaaaacttaataaaaataaattgattcaaaaatcattgaaattattacttgctagctacaaaggtaaaaaagaggagaaaaattaaacaatttaattagtattcaactaatccaatctaaaagattcatatttaagttggactaaataaatctgaatctgtggagttattagaaatgatgtaagaagagttattgttggttgtattattccaattcgagaaaatatgagatgttggtgtgtagctgttcagat

SEQ ID NO: 58493 - DNA, 882 bp, Cannabis sativa
  modified_base (654)..(665): a, c, t, g, unknown or other
  modified_base (707)..(709): a, c, t, g, unknown or other
  modified_base (785)..(798): a, c, t, g, unknown or other
  modified_base (846)..(849): a, c, t, g, unknown or other
gagagagagagggatctgatgagatttagagtttgttttctttataaacatttttttatatatgtattgaaatataataaatttataatatatattttttattttaatattggatgatattggatggttattggattagatcggtcggttggatccattggatttacatgtcattcaaaaaccgatcgatccaatattggattttcaaaaatatcatatgatccaaaccaatcatgattggatatccaatttttagcagtcgattgatattggatcggtcggtttgttattggattggatcatttctgcacactctactgggaactgagtcccttaatcggagcaaaacacagtcggggtcctactagagttgtgcaactttgatcggcgatgatcagatgaggaacctgactagataatgaggtcgttggatcattaaataaaaaaatagacagacggtcgaaacaacatcagattcagataagcagaaaccaattaaccaggccatttgttgacctgggcgctgggcccttcaaatcgagcttttataagattctatttttgataatcctaaggtttctaaagttaaggacgagatttctgctggggattattttactaggatctaaatttactaccatgtatgttatttannnnnnnnnnnntgaatttctaaaacaatgtaaacacatataaagtttaagaannnttacattggttgcagcgaaattaaatgactcattctggtcagatctctaactctcgtatcctttctgtagcagagnnnnnnnnnnnnnngagcccgattctccttcagttgaattggattcttcatagtcttacacnnnntgattgagtaccaacttgctatatgtgggcatg

SEQ ID NO: 58494 - DNA, 872 bp, Cannabis sativa
accacccactcgaacgatgaatccgccaccgcacggagggaactcgccaccccacggaggaaacccgccaccccaaccgaacacaagaccccaacgacccgaacccagaatacacgagcaaggaaaattccccctttcattttttatttttttatgttattgattagggttaaaatgttgtttatttataggtctagggtgtcatatgattacatctagggttagaacatgtggatctaggttctgtgatgaatttgggtaagatttcaaattttctaggttggcccgatgcatcccgatgcaggtccgatgtatgttcaatgcatcgggatgaatatgatgataatgtgttgaagatgaaggcctgataggggctcgataggggcccgatgcatgccttttgaattttgtaaaatgtctggcccgatagggggctcgataggggcccgatgcatgccttttgaattttgaaaaatgcctgggcccgatagggccccaaaggggcccgatttcgagcccgatgcatgcctttcaatctcgtaaatgtctgggctcgataggggcccggtgcatactttggatgactaagtccgatgggcccgataaggcccgatgcctttacaatattaaattttcacaattatttcatatgatggccggatgggcccgatgtagggcccgatagtgcccgatggtcatttaattttttttttcaagtttatatttttaaggggtccgatgggtccgatagggtcccgatgcattgcccgatgcctccacttaattttgtttttaatttttttttctgtttatatttttgcagcatgtatttaaattttgtgtcattatttttttatatattttttaacatg

SEQ ID NO: 58495 - DNA, 1253 bp, Cannabis sativa
tcacacttttatagagagttggatttttgagaggagtacccattgtagtagagagcttggtgtttggacacattggggttggtgtggctgtagctcctgccatgtttgttcgagcaagaaagtcaaatgtgtacttagcttgagtgagatatagtctattagaatttttggtgacttcaaaccccaaaaaatatcgaacagggcccaagtttttgagagcgaattgttgatgtagcttggagattaggtgatgaataaattatgaatctgcaccagttaataaaatatcatcaacatatatgaggaataaatgagcttgccatttttcttgataaaaaataagggtgtgcctgctttagaattactaaaatcccaatgcaacaatgagtgtttgagtttgtcaaaccactcccgaggttcttgttttaagccatagatggctgcttacatacgtggtgatgatgagtggagctttgaaagccaactaattgggccatgtatacacattctttaaggtctccattgaaaaatgtattattaatgtcaatttgttgaattagccaattataagagacaacaagagaggacataacaaggatcatatagggtttaatcactgtacaaaacatttcaaaatagtctaagctaggaatttgttgaaaccctttggtcgccagtcgtgatttgaatttatccactgtaccattaagattgtatttgatgtgatgcacccatttgttgtctataaatgtcattcctgattggtatggaacaagagtccatgtcttgtttttaatgagtgccaatattttaatcttcatagcattcagccacaataggtcttgaagagtttttttgagtgtcttaggctcaagacttatattagaggtcacagtgagagcctttggtttgcgaatcccagccttggctctagttatcatatagtgttgatttgcaacctgttgtgatggagcaggttaggtaggtggttcatgatctggagcaggttggggtagagacagggccggctagagggtggggcagccggggcctcggccccaggccccacaattttggaggccctgaaaaaattaaaattaatatatacacatgcagttcggatggtaagtggaactttaattggccttgacgttctaggttcaatccttaccttagtcaccttttatatttttttttttaattttaaaatcttaacgtacatttttaacgatactgttaataataaataaaat

SEQ ID NO: 58496 - DNA, 1683 bp, Cannabis sativa
aaatatttaaaattccgtgaaactttatttttgttgtttttttttgttatttttgtgcatttgtgaaattaaccctaaattccatggagaaccttcattaatctttattattttatatgaagttgttcatagtatttatttcatatatgttaaaagtttttgtgaaatttaaaaaattataatttcgaaaataaagtttaaatagattattgaaccgtgtttttattttattattattataaacacgtatgaaatatattttatgaatcttattttttatattttaaattatatcatggttttcttgaatatttaaattatgtcttaaataaatacaatgtacacaactaaaaaaactaaaattagaattatgactattcatatgccaaaacgcgaagggaatgaactttgggcacaacgtttgtgaagttaaaaattaaatttataattttacgttcatttttttttcttacattaatttttatggtgttacataaaaataacaataaaattgcatgaaagtaacagaaaagtaatatccaaacaacatcaaaacaccgtattttctgtaagtaaaatttgtaattttttgttatttttgtatatttttaaaataatcctaatttaatttaagctagaaataaggtgtagttaattaaacagtgtagttaatatatcaaatgcataaaaagataagacaaaaaaatagttgacaaaatatattttcaatgactcattttaatgggtgacacaattggtgacattaaaaaaattaattttgactagcttggtaagacaatagaagggctaggagacactaaaaaagggaaactataataaatccacctgcagactcgcctttgaccgtagcatctcgactcaaaggtctctctcatctctcttcatccatctacatacaactctagtggctaggcttgggcaatgtttattttacactcgtgtgcactagtttggtagtttttcaaatatataattgcatatatatatatatatatatatatataggtgtaattttaatgtgtattgctcatgaataggtaatattaaaaaattttgaatttttatgcttaatttttttatttaattagaaaaatctctcatttttatattgtatgaattggagtattgttccattggctgaaaaaaaaataaaaaaacaagttttcgacaaaaaaatataatgaaagtatagtttaactaatatatttttcatataaacatattgttgatatagtgtaagaaaaaatattttttgatatcttttttaattaaataattaaattaagtataaaaaatttaaatttctcttttattattcgtcataagatcaaaatctattgatttaatatttttaaaattaatatttatagttaaatttttttagtacccatcaatgagtaatactcattgagaaatatttcatatgtatattatggaagagtttatgattttgaggtaagaaaaaagattgtcttattaattttaatgaaaaggttacaagagaggtatttatacatgaacaaaaataattacattaagggccagtttggcacagctgtgctgtgggaaaaagtagctgtacctatgctgtgaggaaaagtagctgtagtagaactgtggaaaaaagctaagctgagtgtttggtaaattataatttttaaa

SEQ ID NO: 58497 - DNA, 697 bp, Cannabis sativa
gatctgaatctaagactaaaacccgaactaggacctcccctggacctaggaatccaaagttttgacccagtcccagacccgaaaccttccctggacccaaactaggacaagaacctaaacacgaacccacaccaggatgaaaccaaaactcggaccggaacccgaaatcgaacccaaaccggggacccaaacttagatccaggccaagaatcagacccaaaactaaacctgcacccgaacccgaactcgaacccaaactgggattggaacctaggacttagactcgaaaataaacacggactcagatcgagatcgaaacctggtactcagacccgaacctggacccacagccaagacgctaacccacacacggatcccgatccagacctaaacttagattcagacccgaacccaaactcagacacagactcgaaccccgactcgaactcgaacccaaattccaactcataattgcaactaaaattggaaccggactaggactaggaccaagaccgaaaccaggacccaaacccgaacccaaacccaaataaaaacccagaccgagaaccaaacccaaactgcgactaggacgcaaacccgaacttagattgggacccaaaccaagaccagacctaggacctggaccaaaaatcgggatagggacctatgaaacggaactaggaccgggacctaagac

SEQ ID NO: 58498 - DNA, 1408 bp, Cannabis sativa
ttgaaaccggtgttttgtttagtatttatgttgtttgttgtttttttttttttgatttttatgaaattgcttttattttatttttttattaggttcgttctgtcgaagaagaaaatactattgaagtaaaaacaaggaagtctcctcgtaaatccaaagtatgttatatgtgttttttgaatatgttttttttttttctctttattcatgattttctttatttattttattgggatgaaactggtttttacttgttttgtttaaggatggtaatgtcggggaagatattcccttgaaagctccaacgagaagatctccccgaaaacttaacgtatgtattatattttgctgaatccggttttgcatgtattttatgttccattgtggtttgttatttaaattgtgtttatattttctaagtatttgttcctcgaatattggtttttatcatatatatgtttgttattggattcactatgttatataaaactggttttatatgtttgttaatttttcaggatgataatcaagaagttaaatgtgatgttactgatcatgtttctcacaaacaccgtagtaaaaaagtcagtaagaaggctactaatgtccttcaagaagcgagtgattatgattttcagactcagaaggttgtggcagaaggtgtttcaagcaagaaaaggaaagctgttagtaatcttgacgctaatgcgttaaagaaaattaaaactaaggatgtggtggaggactctaatttggtatgtcttctttttttcttatatttcttggttgtttttgtttatgttaatagttttgttttattcattttcatttaactgttttgtgttttatgtttatttaggataatttttgtgaacctaatgttgctgatgatcagaagcttgttaatgttgctaagaaagtcaagaagaaaccgatttccaaatcgcatggcaagaagaagagcgaggctcttgctgttgacgctccattggtaatttttattttttttaagaaaccggttttttaatttattattttgcatgttacaggttttctatttacagttttatttaaatctttttttttttttaatatatatgtttttattttcagtttttagtttttctctttgtggtgggtaactagttttcgatttttttttttgcgtaattttaatttcgattgtttatattgttttttctctcacaggaatattattttaaaattgatgttaagaagatgtttgctaggaaaccacaactttacaatccttataatgtcgtcgatgatatcaatgagaatctttcagatgatcagaaggaattgtttcacaagtctccatttggccattttcttgatgtgagcaactttaactatcagatatagctgattcatctcgttcttttgc

SEQ ID NO: 58499 - DNA, 594 bp, Cannabis sativa
ctattcacatcataaatcttaagagaaaaaagccattgggtttttggccgtcttgattttaatgaggggattatatttctttaaaattctttgaggactgccaaaattagttctgcagcaaagaatgcaatgaaggcttattctatttcgctccctttattttttgatctccgatgattttggaacaatacgtcccatgttcctgatttagattctgaccctaaagctcctctaagagttgtggagattgctagtcttccatctcagcagaaaaagtgagttgttgtttttaagtttttttatgttgtataatagttgtttaactgttttattttccttttttgaaaacagttattgcggagcaattgtggctgcatttgcgaagttcttcatccatgggaaagatgtccctggtgactttgacattgaagtttaccgtactcgacttgctgccctcttgttctcgtatggtcataggaaaaatgatgaaagtgttgatagtgaggatgagaagcagagcaagtcttccaaggcttctaaattgaaaaagtagggtcattttatgggaaactttattgttcttggttgattttc

SEQ ID NO: 58500 - DNA, 629 bp, Cannabis sativa
gatagcggtaaatagttcgataaccgattgttcatggatttctgtacgacacatggaatcatcaagagtttcttaacagtggcacacactcaaaaaataatgggcaggtcgaagcagacaagacactcaaagacaccatgaacaaacatcttgaagaaactaaagggaactgaccagaggaatttccaaaagtattgtggtcattcaaaataactaaaagaacgacaaccgggaagacaccttttgccatggcttattgttttaggtaattgtgcctgtggaattagaacccgcattccacaaaagactaacttatgatcacgaaactaatcatgccctcctagcataatcacttgatgaaatcaaagaaaaaagaacttcagcaaacctaaagctagtagcccatcatcaaaaggtagctcaatacttcaataagcaagtgagggcaagaaaattctttaagggagatatgggcctcagaagagtgctcttaaacacaaaagataacacagttggcgtgcttggacctaattgggaggaaccatatcaagtaacagaagttacagactctggagcatacaaacttggttggtacgatgaaaatatgaaactgattctagtaccaaggt

SEQ ID NO: 58501 - DNA, 1838 bp, Cannabis sativa
aaatataacaaagaggatcagaaactaaaatcaaagaaaagaaaaagaaataaagaaaattaaagagacaaaaatacaataaaacccataaaagaataaaataaaaaataaaaaacagtagaatgtgataaaccagttagtaaacaaccaaaataagaataaatagataaaaatcagtttcctaaaataatcaaataaaaaaaattgaaactcaaaactcaattatgaacaacaacaaaaaaaatgagctatgaaaataatacaataatatgtgtgtcagaaactaattatttaaaatgaaacaaaaattgttattcaaatatcatacaataataaaactgatttatacaaattaaattaaatatataataacatcataaaactggagcaaccccattacagaacagttaaaacatgtgaaaccaattttgacgctacgaaaaatcataacaaaatataaatgttaaataataaagttaactgaataactgaaatcagacaactaaataaaaaatgaaaaaaaaaaaaaaagacacacaagaatacaaaagaaaatactaatcacaaatataatcaaaacaacacacaatgcataccaataatctgaaaacaaaatataagtgtaagtttcgaacctagaaataaaataataaaaaagtaacttgaaataaaaaatgtgcaataacattataaaatggaacaactccattacaaaactctcaaaacgtataaaaccagtttcgaacccttgaactcggtgaaaccagtttcgaccctatgaaaaatcataacaaaatataaatgataaaaaatgaaatcaactgaaatcaatttcatcattcaaccaaatgaagaaaaaaaaaacacacacacacacacgaataaaaataaaaataaaaatattgatcacaaatataatcaaaaacaacacacaatacaatttagaagaaaaaaaactcacacaatgcacaatgcagaacacataatgcaatatagcaaaagaaaacatcacacaatgcactaataaatttttatggagtctattcatctaaaattacataatgatcaacattctattcgtagccgacgcatttcaaaacggaaggtgggacttgaatgcaatatttgacgagcaagagctcagatgtcctccctggaacagtctcttgaaatccaaactagtcccatagagcaactccaataatcatgtcctttacatttacttctgtaatttaataactaacatttaagaaactaagctatgagcaaataaagataacttggtgataatgcctagcaatatttattttataatgtttaccagtaacctaaatattttcaaaaaaaaaaaaaaagttagctacaacttcaatttttaagagtaacctaaatgttgctaaaaaaatgaactacattttatatattttatatatatgtaaatatataaaaactatatgaattttactaataaactaggtaactaacttattttttaatttaatctatctttcatatatttattattgatatatataaaagagtattcaaaaatttgatatacaatttttattgacatcataattttttttttaaaagtaacccaagtattgctaaaaaaaaataacttaaaaatattctaaacacaaaaaaaaaaaaaaatccaaaaacaaagttttataatgtatgtttaagatataatttagttactattagagattttattacactagaagataaatcaaggtatataaaactcaattgtaaaaataatacaaagactaaaataaaagattgattaataaatatatgttacaactcacatatatacactatatata

SEQ ID NO: 58502 - DNA, 531 bp, Cannabis sativa
aataaaatttatataccatataaaaaaaatatataccttataatagaaatatatataactagttaacaggccgcgcttcgcgtgcggctatttatatacattttaaattatatgtatgaatatttattaaataataaaatcgtattaaataatttcaaatttatttttatgtataattttaaaatatatatttattgaaaacttatcatataattttaaaataactgttattaccctatttcatttgtagtcactactacatttaatgatatcatcactgtatctcacttgtagtcgtcgttaatatcttttccaattgaattgctctgtacataaaataaatcaaacattgattggtaaatactcacttttatacataagtgaaacatattctattataaattaattacctaaaataacttttaacggtcacatcatagtctcattcttcaactttatacatagacatagatagatactacccattgccttgaataatctaaagaaataaaatgtaacgccctaatgcta

SEQ ID NO: 58503 - DNA, 1327 bp, Cannabis sativa
caccactttttttaatgggttcggctacagtgatagaagagaaaaaaaccaaatttttttagtgtatagatttaggtattgaaaacaaaaaattttaaaaggaaaatgaggtaaaatggtgtagaaatgagggagatataaggttttttagtggtggttggcaagggtttggtgagtttttgagaaagaagatgtagtgaagaagatgaagtctgagggttatatttatatatcctatggcatcagttattaggaaataataaccgacggtttaggtgcacacgtgtcaataaaggtgtgcacctatgttgttggttatttcctaataaccgacgacatagagtataataaataatgctgaaaatttttccaatccacagccgactctaaagggtatagttaatttctataattacggtttttaccaaaaaaattgcctctaaatgttaatttcgaaccaaacgggtattatcacaccaataagttaaaaaaacagtttctaaagactcatattatagtagtgggtggtcatgagaatagagacatgaatttcactaaatacttgttggtagtagtggtgtttgtttgtatgaatttgtgttgtaatttcttgaatagataaagattatatctaatatataataaatttacacatttgtaatagatgattgcttgatgaaatttcaaagctttgttccactgataatgattttaaagttttaaagattttaactagtaatttcttttatttatttgaaagattttaataaacaattgtgggttgcacttattaaatttttttttttaaaaaatatttattttggtcttttaaattttggattgcaattataattatatgaggtgtatagggcaaactcaattgagccgttttctcggttcatgcaagatataaaaaggtgatcagtttttttcttatttttgtttcaatttggttattaatttgttcatgcaagaccatttttattgttttgttttgtgttgatacagccaacaactcacaaaatcaatatcaaatcaaatcatcaatgtcacccatagccatatatatatataagatgcaaatttcatttattttttgttttttgaacaacacaacactacatgatcatgattcatgcatatatatatattcttattatcagatgatcatagtctcaacaaagccaaccagaaagaagtaacctgcaacgatgacaagaacaacacaacacattatcgttggtttctgatttggatcccaagaaaaataataattaaatattttctttgaaaaatataaatgaaattaaaagataaatatttttac

SEQ ID NO: 58504 - DNA, 2197 bp, Cannabis sativa
aaaaaataaataataaataaaatagctttgcccttctagcgattatgattgaacatttacattaagcgttatttctttttccaagcgtacgggaaaatggctcgaggaaaacaccaaaaataccaggttgactgaagcttccctcgtattcacgaaattttgatacctatggtactgatagtagacttgaacttgaatcacaagaagtgacaacgtagtccaagttgtaacaagcaatgctttaaattgtatataatgtgtgagcaaatatttgtttgaatttgtattttgctttgtaaatttaatattcatggagatgcttaaataaatttacttatataaagagataagaaaaatatgataatttgtgattcaataaacttatattatttcatttttcattagttaattatgcctgaattcctcctatttaatttattgccgtttttcttttctcacagcaaaatgtagtatatataaattataatgatatatatatatacatacaaaatttacacaaatatactaagtacatctaaattttttccgtaggctgaaagttgaattttggtgaagaaagaaaaaagtaagaaaaatgtaaaaaaaataaaaaataaaaaataaaaagttataaattctcttatttatttatttattttttttgttctccacactttctttctccaacaaaatccaacttccgaacctaggctaaatattctatcatattaaaaagattccaaaaagttaagaatacgcatatatggattgtgatttacaccgaactatcattgtccatggaccatgctaagaaatggtggcctcgtttaccttagtgacttgttcttgttgcttggtttgtgttagctgtatgctttcgcttatgcattttatcaaataaataaataataattgaaccagtcattatatattcttatccacgtgaagagatccatataaggttagaatatgcaaatgcatttcaattttgattaaaataatacattggtgagagactgtattgcagcatgctgatgttgaatatatttctgttatccttcttcttgtttcatttccaatattgctatccaatttataacatatcttcatcccaaccattatctcaaacacaaactctagtctcctctaaccaaatttttgagttaggctttttcaatccaaataattctgcaaatcagtatgtgggcatgtggtacaagggaatttctccgcttactgtgttatgggtggctaacagagagaaaccgctaaaaatggcagactctgcattggcaagtctagtgattggaagtaatggaaatctggagcttttgagtggtgacaagtctgttatctggtcaactagtattcatgtcggatcaaatacttcagtagcaactctttcagacgacggtaacttggttctcaatgatggaatatcaagagaaaccttatggcaaagctttcaacattcaggagacacgtacatgcctggagcattcttaggttataatgtcaaaactggagagaattatgtgttgacatcttggaagagtgacaacgatacatcacctggtaatttcacttctggaatctcgaaacagtcaccgccacaatctttcgtatggatcaatgaaacaacgcctcactggagaagtggaccatgggataaaaccaagttcattggaatacctgagatggacaattcatatactagttcactctatctccaacaagacatagagaagggaacaaattatgtctatttcaataagtttgacaaatctattctcatcaaagtgtatgtttcatcacaaggtcttctaagatatatcatcaaatacaatggtagtgcctcttggtatagtgcctgggaggtaccaaaaactcaatgcgacgtatatggaacttgtggagcttttggggtatgcaaaacatctgaatctccaatttgcaagtgtttaaaagggttcgtaccaaaatcagaccaagactggaggaatggaatttggagcggaggatgcgttagaaggactgacttactttgtgagaaaaataatagtagcaattcatcaagtggagaaaaaacagatggatttcacaagatgagtacgctaaaacttccagacctgtatacgtatgtagacataaaaatcgacaatgattgctacaaatggtgcctgaataattgttcttg

SEQ ID NO: 58505 - DNA, 2680 bp, Cannabis sativa
  modified_base (1417)..(1424): a, c, t, g, unknown or other
  modified_base (2441)..(2441): a, c, t, g, unknown or other
aaaagaggatttctcttttcatgacaggtgtggagaattgaagattaattatctggcttttgcagatgatgtattactattttgtaaaggagagacaaagagtatgatgtacatgctacaagcctttaaacttttctcaacaacatctggcctatacccgaatgctaataaaactgctctttattatagtaacatggaggctgaagacattgaccagattatcagagcctcgggtttcccatgaggggtgttgccctttatatacttaggaatcccaatcaatgtaaagaaaatttctagggcggagtgtgagatccttgtagagaaaatgacagcaagaatacgtacttggagcacaagaaacttgtcatttgcagctaaaactgtgttgataaactctgtcttcatagccatccaagcttattggagccaaatttgcatcttaccaaagaaagtatataggaggattgtagcaatatgcagatcttttttgtggaaagacctagcaaactatgaaggaggtggctcaattgaatggagcaaagtttgcacccccaaatcagtatgggggtttagggataaaaaagattgaggaatggaacaacgctgccatgtccaagtatgtttgggcaattgcaaatagacaagaaagtctatggatgaaatgggttcatagtgtgtaccttaagaaagatgaatggtggagtcacacggcttcaattcatgcaagttggcattggaaaaagcttgtggctctgaaaaaccagctgaaagatctcactagcatccaacaattcaccagccagcagtactctatagctaatgaatacaagttattcacctcggatggcatcaaaaacaattggagtaatgaggtatgggctcgattgaacactcctaaacattgttatattttgtggttggctatgcacaataggttgaaaacaaaggatagactcctcaaattcgggttacacatggaggaggtttgctgtgtatgtaacaaagagaaagagtcaagtgagcacttgtttttccaatgtccatttgctcgagaatgcttgcaggagattaaagggtggctcggttggactgttgtgagtaacagccttccccaactcattcggtggattggcagggcaaaaaccagcaagtttaaaaaacttttactggcagcagcgtgtgctgctttggtttataatgtttgatcaacaaggaacttggttatttggagaaaggaggagagtacagtaaatagaattgttgagggtataaagcaatgtatcaaactaagagttactatgttcatgcctaagaaaacaaagagagaagatagaatatggttccaaactcgaatctgatcccggacctagacccgatttaaataaaatcaaaaaataaaaatgaactttacagnnnnnnnntttgttttctgtttttaaaattaaaaaaataaaagcaattacagaatgcatttttattttttcaaaaataaaatttttaatgacaaaaattttactgattaaaaaattaaaaaacaaatatgttatcaaacgacactaaaaatctagacacaaagcaccactgaaaatcttgttgatataaataattaattggacttgagagtatggaatttatactaggcccatttttttttttttgagaagattctattcatcgtaatgacctacatgagagagagaggagagagagtagaagagacgttgttatcaataaggtcgtgtgtgacctaattcaaatttagtcagtttgtgttaggtaaaaaaaagaaaacaaaagttgtaggttggatcatagagtttgcgtgtatctaaaacaagtcatgtgtgtttgggagacatggcatatgggacacaaggatgtatttactttacttagtaacctcctacattgtgtttccattttgaaaaaaaagaaccctgcactcattgttattatatcacataatatttgtatgtttatagctacacaaaatttcactttccattgatatgattgaaccccaccataagaagttgagttgtgaactaatttaaaaaattaaaggttttgtattgctaaatttatagctacaaaatgttgttgttgttgttgtttttttattttattttttttgagatttttacacgagatgttaaattttggtatttttttttttttatatttttatttatgtttgattttttaaacttttttatataatctgtttttcaattttattttttaaaaaaagttctttaattataaaaatacttttattgtttatgtttagtcttttttacatgttaactactcccgttttcactttttttttttattttcttttttatctcttcatttttctctctctttaattaaaaaaacaattgaaatattaattaaataagagatatttactcaattcaaccaaaaatcacatnttattactttcttattagtgagcggcattttaaataattttaacattgattgtttttttaatacattttaaaagtttaaaaatttaaaaattactacttacccattattgttgatataaatgtacctttcaccaattttttttttcaatttttacatgttagacatgattttctttctctcgtcactcaaatgctcatttcttttttgttctactcttttacattcatcacatttctct

SEQ ID NO: 58506 - DNA, 1207 bp, Cannabis sativa
ccttattctaaaaggagtataaactctttgagctgtctcgaccttttaccaaatacttatagaatgttaagggagctgtttagcctcttgggccgcactcaaccttttttgggttattgtatgttaagaaagttgtttaacctcttgggtcctacttaaccttttttaagattcaacattttattgagggagattatggcccttaggcaatgctagacctcttacattgcatttgtggcgcataaagtgcgttttaaatgctagaagattggtactccttggatataagggagcttatggttgttaggtggcgctcaaccttttttaagatttaagattttattgaaggagcttgtggtgcttaggcggtgcttgatcccttacattgcattcgaggcacttaaagtgcgtggtgaatgttagaagatcaatacaccttttagagaagcgtccctcttagattcgtatccaatgcctcttttattccactacttcattcactttgacaatctcgattgacaagtatagcgagcaagtcaagcaaacatgtggagaatgataactgccatatgtgaagtgaaaacttaatattttgactgataaggcaaacatgtgattgcccgaatacatatgccctcattatttttatacaatgtgctaaaggtgaacttgccatttctaggaatattttcctgtatagtgaaacttcactttgaggaagaacttggatatctaatttttacgggttgtagagcaaaggctttccttgaatgtatcagcctataattgttgggggcatcatctaatagaccctgtagggatctgacgagcttcccgaagaacacttgttgttatccgtttccaagactatgtttccttcctccacacagatgtaattctttgctatctcataaaagtctttaatgccaagtaattcccttttcagcatattcccccatagtccacttccagggcgtactccaacgactatggtgaacttgagttcatcttcaaacatcttccccactttggtgacttcggcgttgaagtgctggatgtagcttcacaagatttcttgttccccttgcttcattttggtgatacttgttacatgctgatgagtgcacatttgtacactcattcttagtcaattattagatagattagtatttatttttgtatagatttaatgtgttttctccaagtg

SEQ ID NO: 58507 - DNA, 1262 bp, Cannabis sativa
  modified_base (1017)..(1023): a, c, t, g, unknown or other
cttgagcttctttctttctctcttacggctgaggcaaaactaggggaaacacttagggttttcatctgatttttgagttttcatcaaagatttgaggaagttctaaccaaggtaagccctagaaactcttacatcttgaactctctaagtactaattggttatggcatgcaattttaagttttagtggctgttagggttagaattggttttgtttcagtatctaggttcattttaagttgatattgagttttggttggtgattttgatgtattgtgtagaaattgaacaagtttgggtttggaaagtcaaacttgggtctttaatggtacttttggattttaagtttttctcttgctgttatttcttagaatatattgtgaaagttctttataggtgttctagagtgtttggtgggatttggacatgttttaagcaggtttggaattgtttggggaaacttggtgcaaaccggttaactggtttgccaggacctgtaaaaccagttaaccagttttggcagattccccgaacaattcatttcctaaatttgtgtccatttcagaaccttagttgggtgattccctttttcttagggtattgtagtttcagttatcattaacagagcttttggttggaggtttgggttttttggattagggtttcggtgtgttatgtacccagttatattatgtgattagggaatccaactagcacgagactttccgtttaggtcggccaactcacttgaactcaaaaacgaggtaataataatatagaacaaatgatatatatgtgaatgtatgtatgtgtgatatatatgcatgcttattatgattcatacactaccaacactagtacggtagcggtaaagagttcattggtatagtgtacgatgtctaagggatacattacggtgttaccaacactagtacaggtaggtacagagtgcatgtggtacagtggtacatggtcgtatcttagttaagaacgttcttactcatttgttaagccttgtnnnnnnntgtatgggcgcctagatacaagtatgatattatatgatatgttataagcttttattattgagtttgtagactcacaattctactttcttgtgtaggtaacgaagtctgaacaggagtgagcctcgagcaagggtgatgttgtacatgtcatggcggcgcaacctggagtgttcggtctagggacatctggggttttcattttgtagtcgctgtgtgacctgactattgtattttggagt

SEQ ID NO: 58508 - DNA, 1857 bp, Cannabis sativa
  modified_base (40)..(45): a, c, t, g, unknown or other
  modified_base (1382)..(1382): a, c, t, g, unknown or other
accataaacatgaaaaccacatgtaaacataaatgacttnnnnnnttctattgataacaaatcagattacattgaaactggttttatttagggcataaaatcccaacaaggtaacgctcgcctcctcacgtcccatccttcttccttgggtatggctcgttgtattttccctgctggggtttgtatgtgccccttccctgttggtttgagaaggacattgtcgatgcctcgttggtgacccacgtgtcccaggttaagtcctaggatttccttcattcccacgagggattccctgttccctggtttctagttgccttctgttttcgtttctatgagaaggctctggttgatcatttggttgttcgtttttaaggggacccacagtttccccaggttgttcttcctgagtgttttgaggattctcctaagccgtctcctccctcatggttcgtgagccacgaggtttgcctcgtggtcttctcactccagggtcaggttgattttgagcgttgttctcctgtgccgccttggctgcggctgcctcacgttccagctcagcattctgtcagtttgcctcttccagacggcacctaagatggcagttttctaactcgacgattggcacgtatcttgtaggatcataagcgccatcattatcatgtttagtaggttgggggcctccaagatcgagttcttcatcccctactcctgggttctggccattctcatgctgagtccttattgaacgtgtggaccgtgaacaaaggccaccttcaggttggctcctcctggaacgagtggaccgtgtacttgggccaccttcaggttgagtcctcctagaacgagtggtccgcgtagaccgcgagttgggaggcctccgggagtccatgggctcttttctggcacgacgttgggtggtctcttcaggatgcgtatccacattttctccattgtcagctatggagaaagttttttttttatcaggagggtttttttttctgagcttttttcacgaagactctcaatgaaagcaccaaactgtttacgtaaattttcgttaactaaattaaagcctatttcgtgatggatttgcacaaatataatgatagtaaaagaaaaagaaataacataaagcttttttacgtgattttgcaattaaaattctgcatagtccatgagtttatcttattagatttttaatacaaaaactagagctttttctctaaaggattttccgtcccttttttagtgtatcctacccctatttatagttacataggagaacagttaattacaaatcagactgatatcctacaacaataatcccctgaaattatgggatttgattacgtcccatgtaaaataaatgcggttattatttnaaaatcacacagctgtgatttattcgcttttaccgggtcaatacatatgtggattaaatacgctgcaaagtgtaccgtgatgggacatctccctgggaacatagcaaccataaccatggcagcgagctagagcttttcccatgtcttttcaaggtttataatgtaaatcttgtcgtttctgcgattgaagacataacgctccatctgacaatcgtagttcttggtgacaaggtgaacttcagcagtcaacatcatttgaatgtcagcttctttccgagagagatgactcgacagagcagttggtatcattgaaagatgtttgaagccgattagtggaggcatcaggagtgtgccttcctatagcgaaacggatgcctcgctattcgttgtctaagttcactcaagtgttatggttagtgtgtataatgtatattatacgctaagtcttttgacagtcaacatgtctcgtctacct

SEQ ID NO: 58509 - DNA, 1406 bp, Cannabis sativa
atgcttctttatgagccaacaaatcttttccctcatggtgttgtttaatagatccagcatcccttccccatcaggaattacgaatttgaaaattagcctaatgttagctccccatttagcaagcacagagctacacttagagatcttttgctgaatagaatctgacacatatgaatcttaacaactcaaaacaagttgtttacacataggttctctcaaccatgcattctcaaatttgaaaaagacttgaccacccacaccagtagcaacgacaaggataagtaaaataggagtatggtctgaagttaagaattccaaattttgaagcttggctaatgggaaagcttgaatccaaaaattagacaccatagccttatcgattctttcctcagtccacatataagtatttcttcccctctcccaagtaaaagaatagcctttaggatccaaatcaaaaaggccacaatcacttaaagcttcacacaaccccacaatcaactgctctggatacttatgcccgccccttttctcgccttgagctcccaagttattcaaaatacctattaggcaccaaggaagatcaatttcttccttaagagaacgaagcaactcccacgtatgccatcttgaatctcgatttggttccccataaattcctgtaagcctccgattcaccataccatctatatgaacgacaatgtcaatatagtccttagaaaacttccttaaaacaacatcactctccaccttccataaaagagtcagacccacgctatggcttttggcctccacaacaaaacacccctcaaagcccaactaggtcctaaccctttccaccacaacacttttacaaattgtttcacaaagaaataaagtattgggcttcttttatgacattaagtccactaggaattgaacggcctgtgggttcccaagcctacgacaattctaacttagaatactcatggctcttagcgggcttgagcaccgaaactcgccaatacctcattttttttgaaaacccaataacaccatgtccatattatcatcttaattttccagctcattttcttgacccaattttgcatcctcatttattggcatttttcttttactctcaatcacactaaatatctcagattggaaatttttccttttctacttatttttaacctacctttatcaatgctatttcttaatcgtgaagattgatatgctaggctagactcccagttacaaatcccttgtaatctggctccaacattttggccaatcaatacctccattttctcggtttattacccacatggaaaattttcttaggaagatcgtccctaccaatttcttactgcccaccaatatacgaactagctcctattgcaacacttgttcttaatcattgagca

SEQ ID NO: 58510 - DNA, 525 bp, Cannabis sativa
tatgtaaattacgatttttaaatggaaaatatttttagtttcgtcttgaaagtatttttttctagaaattagataaaaaattaataaatttaagcttttatagaacttaatttggatttttattaaattagttagtgaataaataagcgtaatttattaattacagatatttatatagcatgtgtgaatataatatgaattgtttgtggagtaaatatttttaggtttggggaccttggagactcgattgggggccaaaatgtcataataagttaaattagtgactttgatgggaatatcatgataagtcgatagtatacatattgaggtaattagaagtatttgaatttgacttaatgccctagaagtagagatttcttagtggctaagaaatagtaaaataatttttattaataaagttataattagtattattattattattataatttataataaaacttatacttatcagcttaatatgtatatgttttaagtttttaaaaatcaaaagaaaaagagaac

SEQ ID NO: 58511 - DNA, 3279 bp, Cannabis sativa
gtcacatttagtcacaaaaaattttgttgtgactaaaagtcacactggggtgttcattatacttataacatcatccctataaattttttaaaaatttcgaattgtttacagtgcctaaatatgtttaaagtttttgaacccgcgtggtaaactggaatatcagaaaatctattttcggtactgtaaactattccgaattttttaaaaatttacagggatgataatgtaactataactaatatcgctatgagaaaaatttgaaaaaaaaatatttccgcatgtgatttcgaacataaaagttaactcagaagttgtaataggaagttgtaattgacatttctccgctattttttcaagaaaggatttggcgagagctgaaggccaaaattgcaaaaaaacaaaaaaaaaaagtagcctactgaagttggtgcttttatggttaaaacaagaaatatccattattagcagtattatttgtattgttattaatagcttttaattagaggaatagatatattaatttaaatatattataaaataatattattaataaaaaagaataaaaatgttaataatttcttgttaatattaacagaacataataaaaatatcgtcatctttgtataaaataatataaatagattttttaatcttttaacaaaataggtcgtccaaaagtaaatttttaaaaatataaaaggttaaaaggcccaaaatttgaattaagatgacttgttaaaagtggtattgttaaattaatttaaatttgacatattaattaattttttatttattaataatttaaccatagtttatatatttaatataaattagattaattaatgtgtcaaattttaataggtttaatacagaatttaacaccaattgtgaatagagaatcttcgcacaatcggaggcaaaatctactattaactttttgagcattgctattaggcatcagtggtgtctaacaccataacgatattgacgcataggaggtgctagataacattggtgtcctttagcatttctctaactttttacccatacatttaattaattaataggaatcaatgaataactaataaaattaattttgattccaactcgatttttgatttaattaaagacaaggtagaacaggaaaaacccacatataatatgaaaaagctgtctttattacacacatgcatgtaaagttcttacataataatttcagcaaagaaacacacagaacagaacagaacagaggtatgatgtgttggcatctacaagagccaatcttattttagttactattatatatatatagatagatatgatagcagatagctattgattacccatgcgtgtactgggaacgtgacagtagtagtggtctggtagataatagcaaatagaaagagagacagccacacatttccattattagtgatgagcattgaggggaccatcgatgtggcaacacttgtaactgaggtaagtctccatggcacggcgacaatctgggcaattcatgctatcaggaaccttcccagcaacggtaggaacatcaagacggatacagtggcgaacagtttgagtgaccgttgtgtgaacctctgtgaaagcaacttcaaacgatcccttcaccttaatcacttccttcaactgatcaatgtcctcaaccactttcaggacggtagagccatggccggatgtcaccactgcagaacctttggccagaattgcccaggcagtttcgttcttgtaagaaagaagcttttgaatctctttagtgaccgggtcagtgtctttgtgattcttggtgaagaacaagctctctattccctcccagaacttggttagaatgccatggtcttctcctcctttggctgtctttcccacgcaaaacagttcgatgttaatgttggcactcttgatgaagggatcgttctgaagagcagtgacttttttggtgaatgtttggatgaaatcgttgtcttttcctccgtaaatgaaggtgtacttctccttatctttcacctgttcacagttatatattccaccaatattaattaaacataaaaatatatatcatataatatatctatcactaataatctctaacatgtgacgagacttttctttcaagtgaaatttatgaattaaaatcttctcttaaaaaaagagtatatcatagtatattaaaccaatttatcaattagagagtattttaaggaaaaaaaaagagtctacatggttaatagtatttaagaaaattagttagttaagttaatatatgtaaattggtttaatacattatgggagactaattttttataggtgatgaaaattagaaatttataagaaaaaaaaaaattctaaaggcactttaagtgagtgtcaaatttgtgtaattaaatataagtgtcacattttttttttataaagaagtcccatatttttttatttaataaataacataggaaacacttaaccattcattgaacgagccactatggtgttgagcgcctagggacatagtgacaggaaagaataaataaagaaggaaaaagtttaccgattgcgctaaatttggatgaacgttgtttaggacaccaggaaggaaattggtttctatgtgcacgacttcttcagcttttttatcaaaaggaaaggccttgataccccaaacacgaataagatgaagtgcgttgaggttctcaaccttcccttgaggagtagtcactaccagcataggcttgcccttgtattcccattgttccttgacaaatctaagccctgcaattggactaaatagatgcaaactgtaccatggcatcttcatcctcaaactctcatacttctttttcagctcatcggtccactgctccacaattggaatccacacgattgtgtagcttactctttctttctttgtcaggtcatacaccggtttcagaatagaaatatcttcatctgttatgtctagcccagtaatgaacatatacacattcttccttctcaggacatcaatgttcacctaaataatatatacattatccaatgaagtattatatactgtgaccctttaattcttatcatttattaatagaaaagattataagaaagaaagaaagaaagaatatccaattacctgtctgtttgtggaaccatcaataagtggccttacactatccttactgtaaaaaatcaaggccttgaaaatctccatgatttcagttggagtacggaagagcttacaaagcctcctgtaagtctcggcctcagctgtac

SEQ ID NO: 58512 - DNA, 596 bp, Cannabis sativa
tagaaaaaaattagtatttttttttttttttttgtaaaaaatcctattcattctaaagtttattcggagaaatgttaaaatgtattagtaataatattttattactattgatgtaattaaatattgagtctcacataatttaatttaaaaactattataaaatatcgttaatcatttacaaagtgtcacctttaagtggtacttaatagcactactatttattaggctaagaacttcagctaagctaattgcaaacatattcgatagcatgtagtttctaatggaaacaggtatataaaaagtgtgcagtgggagatctttataggtagtcaagctattttacttaactcgactcaagctttacttagcccatcaactcccatgtctttcttggttggaacaacccaattggcaattttcgacatgtctctcgatttgggagaatttttttaaaaagaataaacagaaatgaaataatttttggttaaattttttatactaatttacagtataagtcttatttatctctacacttccactatctaagagggagaaatattttttatcttttccttgtaaaaacactaatgtcccta

SEQ ID NO: 58513 - DNA, 849 bp, Cannabis sativa
  modified_base (798)..(800): a, c, t, g, unknown or other
ccacattggaccccacattggaccctacatcggccacccattggaactacgtctcctacctcgcaactttacagattcattgaacccatcggaccccatcagacctaaatcggatgtgcagcagaccttgccccgaaatcacagatctgacattctaaacctaaatctatccctaaatctaacataatatatctttaactgtaaaatcacaaataaaatcaataaaaaactaaaaaacaaaacatgaactcacctttgacattgtgtccgatttgtccgaggaacctccgtgcaccgtgggttatgggttgggtctcactttagttgtacgtgcgtcgagtgtcgtgtataggatcgattggggtccatcgtgggtcgattggggtctgccgtaggtatgtcgtgggtctattggggtgcgtcgtgagtatgagagagagggaaagagagaaggaaaccctaatttattttttgaaatgtgagggatattatgggaaaaataaaaatgttgacacatatggccaattttaatacatataggtttagggaaataattttaaggtaatatatgcataaacagtcaaatttctcaatgggaggtagctattaatatttgggtttaataagtttagtgggcatttatttaatctaattgcttcacctttatttaatctaattgctttagcttaggaaaagaaaaaaaaataatgtaagttttaagtttgatatatgggtaataaactattttagactctgtgttttgcaaaagttactaattgaaccatctgttttgttaannnacaaaatagaccctatatttttcagaagagatattggcggctaaaccac

SEQ ID NO: 58514 - DNA, 903 bp, Cannabis sativa
aataagaagaagaccaatatcaaattacctcctgagaaatcttgactccttgttagaactgacatggggtgaagtgaaaactgatggaggagatccaaaactaagagagctaaaggtctgagtaatgtgaagagacttcactggcttgataggagaaaggctactgatataattgaagacaggagaatcctgcacaatattgaaaaagattttagtacaaggaaacgagaagtgaaaaagagagacaagtttacacaaatacaatcaaccattaaaagcacagtaccatttaaaatgaatataatacttttttagaaatactaacttctggtcaaaaaattcacaataacacagaagtagatctaaaaaaagaaaaaaaaaaattggtgtgtgtaaataaataattgtgaaaagaatttttgcacataatggtttagttacagcaacaaaatcagtataaagagaaaatattttagtctcaaaagtcactacaactaagagaaagtaaatgaaaacctccattgaaattgaggggttttcaattttgtatctcttgcaacagacgcatgggtataaagaagaaaagaaaaaacacttctctgcacaaccttaccagaaatcccctaataatgtgctcattattattgaaaatatcgaaacaagtaaaaaaaaacagaaaaaatgcaatgccgaaacggcaaagtttttaaaagaagaatggtaaagcaatttatacttaaaattgcatgctttaggttgaaatcgagatccaaacttcattctaacaattttcacagaagcaaaaaaccaggagggcagtttccttttcaacatgacaagtttttataaacctcttgaacatatactcaattatggataacaacattcgtgataaactaagat

SEQ ID NO: 58515 - DNA, 547 bp, Cannabis sativa
attttttcgtgcccatgggccgggctgggcttgacctatggaaatatgggccagcacggcacggcccataattctatacgagccagcacgacacgacccacatttttcgggctttttgaaaacgggtcgggctgggccgtgtgccaacacgattttacagctctgttggtgattaataagatatatcttcataaaaataagattcgaatgttcgaattcctctcccctaatatcaaaaataaaaataaaaaataaggctatgttttcttctttttttttttaaaaaaaaaaaaaaactactatattaagtgtaatttctcatgtatgcagtatgctatatatacttatgaattttatataattaaaaaattttaggattttttttaaatataatatttaacattttataattaatgcatatataaaaatttgattggttcaaactcttcccatggcaatacatataaagagaaaatatatgtgcaaagtaaaatataaaaatgatacaaaatatataaaataaaaaacacaattaataaggtcttta

SEQ ID NO: 58516 - DNA, 762 bp, Cannabis sativa
  modified_base (708)..(720): a, c, t, g, unknown or other
tttaaattatatgtatatattttactaagactaagttgatgttacttgcaatgcacgtataattagtttttctgttaattaggtttaattaagtgatgttaagtgcaatacatgatgtatgttcaattttttcttaattaagtaatgtatttttatttttttaatttttgaaataggatttgagattttgatctttgacaattttttttagctattacggctacactgatgtgttcttcagatgtgattatatacgtattttatatgtacaataaaagaatgaatttcattgttatacgtattttatattgatctctatatataaagattatattagaaaatattttaacaaaatctgaatttgattagaggattaattacttttaaaataaattttatatattatgtcgacacatatatttaaaaaaaaaataatgatagtgatagaaacattcttaatttgtaattggaagagtgtaattataataaagtgtacaaattataaaaagtatatatatatcattaataatttttttaacaatatccttaattaattttaaaataaaaaatttatcgtgaaattatagtttaaatatatattgtatatatatgtaattatatatagatataatttttatttttaaatatatagtaaaataaaaaaattttatataaaatatttatattatttttatttttaaatatatnnnnnnnnnnnnnaaaattaataaaaaaaatattatgttaagtaattaggatatt

SEQ ID NO: 58517 - DNA, 1023 bp, Cannabis sativa
aggtgcattgtcttgaacgctcacggaccgactccttgagtcggaacggtaactctcccccatgaagctcactgtcctctgttgttgcggcccccgaggtgtaggccgttgttgggcatacgactacgttgcggcagtctgagatcctgataagtaactatcatctcgggtgagtgaggttgtacacgctatggtctaatctctctgggtgctggtcttggacagacatagttatcacgggagatggtgcatcatctttcccgtccatgtcccctaggttgaggtacatgtcgagcatggttgtctcaatagtcctcttgcccgttttgagggggtcgaggcaagtattaacttggaagacgactgggaggtgcttccctctgtcgtgacctctcccttggggctggttgatgtggtgctggtgcattagtacatggaggctcatgatgccttattggtgatggggggaacctgattggtgaaggagggttccgaacatgatctcttcccctctcatccacaccaacatccctaggtgttggaggtggttgagatggtgggatcccatcattgcgtgttgtgcccctctcctaacgggagtctccccgtgggggatctacagcattgtcttgtggggcagtaggtccttgtgcatccctcctagtttgttgctgtgtaggagggggtacattattcctcctattctcatgacctgaggttgttactcgtggtctttgccgagatggagggcgctcgctcctccaaccatggttgtcgttctcacgagaaggtcgttgtggtatggcactagcatcacgaccttgggttgttggtgacctagatctctcttgaccttcgggagggtaacatgttgaacgactcccacggggtcgtccccttctcaatgtaccaagacgcccgccggttccccttctttgtggccttgtggcctcctgggctccatacctctcttgccactctctgttgagtctaagagtttcatctaaacgctggcgcaatgcc

SEQ ID NO: 58518 - DNA, 1358 bp, Cannabis sativa
ctcctgttcgagttggaaccttactttctgttataataagttaaataatgttttagtagatactaattttgctgttagttggatttcaagtgtttttaatgaaagagctcattatcttgttaaataataagtctatggcattctagtaatagtttacttcatttttaggaagtgagtctcgatgggttcaccaaatttttggttttgatttaataaattgaggtttttcaataaaaaaaaaaataaatgataataataaaaaagttggaggctcccaaatatgcccctatgctataataagtgttaataagtgccacatttatttatttatcttttgaataataagtgttacattactattctaacaaattgattaatatgtgtcataattatattctacctaagttaattctgcagtttccacgtcaggacatcatgattagtgtccaaaaatttgcttggcttcgaattttattttcttttaatgaacttttattatctacatgaaaacattagaaagcattaaattccatattatatgtaatgtgtaacgtaaatatatatttatagaatgctattaaaatagtcattcattggcataaaaatttctttaaatatttgtaattatgtagattatattaatgttaccagggatatctcttaggccgggtgccaataccgcattattagggtggaggaatgtttctttttttttaaaaaataaaaaataaaaaataaaatagaggaatgatacttatttctacactttctcaaagtgcacactataatatataattataattaattatgtaacacttttaaactttaaagtgaaactcccatatgatttcaaaaaaaaaaagtgagactcccatattttaatttttatggttataaaaaattatgcaaaataatgcatatagttcaaattttaattattattgtctttcttttttataattgtgtattgtatttgttgactgagattttcagtagctattaattaaagttgtttgaagtaattaatgagtattaaagaagagaatttttacgtcgttaggagattaatgagttttagtccacgagttactatattaatgagcgtttttgtttacagagaattttttaaaagtctcttcttctatacattattggagtatttatagctcataatcgtaataaaaggccaccattgtcgaggttgtatgaaccatgctttgtacaatttcccaaatttaatcttaggacatgattatttttttgtatgatgtatttaggccaactataagtatttggtgagttgttccacttaggttgaccgacacacctgaattcgaaattgaggtaagattagtata

SEQ ID NO: 58519 - DNA, 1982 bp, Cannabis sativa
  modified_base (1892)..(1902): a, c, t, g, unknown or other
aatatcaagttgttcaactttaaactctatttgagctgccaaggacaacattaatcttatcattttgtactttaccacaggtgagaagatttcagtcttgttgattccttccacatgagtaaaacccttagccacttacctggatttgaacagcactagttcattctcattgattgcatcttttactttgagaattgatttgcactccacaatctatttgttcttcagctttggtacaacaacacaattcttgttcttctggagtgaggtcatctcctcatacatggcctggagccattttgacttattttcacacaaaaatgctttttcatagcttctggctcttcaatttcagtatgttgtactactaccattgcaaatgctattaagtctacttccgcaaatcttgttggtgggtgagtctctcttctagttctatcccgtgccaactgataaccttccagacctatcaatctgaatccttccagaacctctatttggtcttcattatcttccaactcagcatcagctttagtctgcgcattttcttctagttccacaatagcttccatctgtgaaccttcttctaaatgttccgttccatatttcatttccatgtgtgtagtgttttttatttcctatttttcctgtatcacatggagacacactacctttcttggatgttaagtgaggatattccaactcattaaaaacaatatttctagcaatcacaacctttggtctaccctttttggatacgtaaattctataccccttggtacctaaggcataacctaggaaagttcacttaatagatataggttccaggttgtcaataaattggtgtacatatgttgcacacccaaagtttcttaaatgtgttaggtttagggttcaattgtaccacatttaataaggggtttttaagcctataactcggtttgggattctattaataaggtaggttgtagttgctaaggcttcccccaaaaatgatttctataatcctgagcttaacagcaaagatctaactaagttcaattggattcggttcatcctttcagtaacactattttgctctggggtcttcactacggttctatgcctagtgatcccataccctcgacacaacatgtaacaccctactagtttcagcgtgttacagtgcttttcataattactatgcaacctttgctaatcaaagggtttatcaaaagtgataaaatttaaactttaataaacatgtactgtattacattttccaaatttgagatcccatatctacatttttcaactgtacataattaaaagatgtcacacgacgactataaaattgtgagccctagctgtcctggagatccaatactccaggtggaactgactcgatatgtacaatcttcattcagctccaaactcactgtcgttcaacaacagctctgcctatacctgcacataacatagcatctgtgagtcaacaaactcattaagaaaatcataaaacataaacatataaccgacctgcggttaagcacccatacacctatcaacaagtcataaaccatgtccaacatatatcattgagtctcaaacattcttgaccatagtacaatcaaccataataccacatgtactcactactctagtcgtactagtgttggtagcatcaatccatacaataagtacaactaggcataataccacatgcactcactactctggcgtactagtgttggtagcactagttcatgctttcgaaagtataaccaactataataccacattcacttagtactttggcgtactagttttggtataattggttcatactttctgaatttccagacaaatatattcacgatatcacatgcaccaatgtttcatagtttctgaannnnnnnnnnnaactagccataataccacatgcactcaatactctggcctactagtgttggtagcactagttcatgctttcgaaagtataa

SEQ ID NO: 58520 - DNA, 740 bp, Cannabis sativa
cttaactcaaccttataaattttccaaaaaagctcaactatataagaaatcgagtacataaaacaaaaagtactaaataataatagtgaaattggttacttaataacgtcattgataatatcttgcacgttttgtaaggtccccatcaaaaataatatatcatcaatttatattatatccaatttttatatttggcctctatctatacaaaattaggatttttatcatttaaattttgacatgtatcaaattatgccctctaaacttttaagttcgttaaaaatgtcccctgaactattgagattgttagatttaaggacttttttccaattttagtaaaaaagtctaacatagatgaaaatccaagggtcatgatttagtacatgtcaaagttcgaaggacatgatttggtagatatcaaagtcaagagagcatgatttagtatataacaatcattgaaatagtaaaattaaatgaaattagacaaaaatccttaaattcaacaatctcaatagttcagagagcatttttaaacgactttaaaagttcaggggcatgatttattacatgtcaaaatttagggacaaaaatcctaattaacctaaaatttaatactattaatattgatactcactgaaaatatataaaataattaattttgtttgagaaaattattttaatttataaatataaaaatatttttcattaataaataatattaatgagtaacaaaaaggtaa

SEQ ID NO: 58521 - DNA, 654 bp, Cannabis sativa
cactaacatagtcctatgatttgggttcatttactctaatttccctaaaattaataccaacaactaaaattaaaatcagcgttaaagaatttatcattgtcaatgttagccttccctatgtatttactattatataaaattattctaaaatttgataatgtaggtacgaaaaattacataaaaatttgcaatttttacttacctatatttatattgatgcaataggtaaataaaaaatattttagtaatttatgtgttatttttgaaccgacggtataagtatttcgtgacagtttggaaatacctcaaataattttacgtaattttcaaaccaacatagaagataaaaaaagagtgtatattttgtgtcagtttttaaatgacaataattgttttttgtgttatttcaaaaatgacgctaataaaaaattatttgcgattatggcatatacgttagttttttaaactaacataaattctttaaatgacacttagaaacggacgataattgtatttttttatagtaatgtaaaagtgattgttttttatagtgattcgtcaacttattcctttaaaaagtcatgcaaattctattaatatgagtggggtggatgaccaatatttacagctgggtcatggtcatgtgctaggcac

SEQ ID NO: 58522 - DNA, 1878 bp, Cannabis sativa
  modified_base (1511)..(1513): a, c, t, g, unknown or other
tagtccacgagtcaatattattgtcagatgttagaaaagcctgaagaattacaatgaattgaagtatgagcactctatttttgcatcagcaagtgagccaagaatttccaactctttgcatgtagggtttattaagtacttacagtgcatagatgtcatgctagttatcctttacccagctctaatgaggaatttactaatgatacattgactttaggcttatctggtgaagtctaggccatgaggcgccttatgtatgttgatgtggatgccacctcacaatactggttgtaaaaatcgtgtcctatcttcatttgtaattaattacgtattaattacctgattgccaattaatttgtttccttatttaggaagatatgatctttgttcaagattctgggaagataattcctgattgtgtgtgatttggtaggaaacaagtaactacacgggacttatggatgtatgttgcgggcttcttctgactatgcgggtatatgtctttcgaatgttgaccatgctgaatggggactcgcctggacgagttgactgttatttacccaaaagaactgatggcttatggatctagctcaatgatatttcttgggcccactattgggctttgattatttggactgtgtttgctatttagattccacgtgtcctctaccaaaaacatggataacatttacccccaatctttcgaaacgatgtgggttgcggaggcttgctttagactatatggatggacaagtggaggctaaaggtgaagcctttaagcattccatatattttctgtgaattgaagaaaactttctattttttgaatttaaggccatatgtggtgctgcatcattggttcgtggagtacatgttcgttgaggacgcgcttgaagcaaaataaatgaattgtcatctatttgtttctgtgcaagtctcgaggagaatatcttcatgcgatttatctcactcccatatattgcgtttaatgcttcaatgatggaattctggatcgttagatcgactttgtttttctggagagtaaatctagaccatcgattcgagcttcatgcagatttcaactcccaagtataaatacttcgtaacgcgactatttaccacttttacccaaatttcaaatttctttagagtttatagagaagatattgattatgaattgagcaattttggagtatgatattgaatattgaattcaatcttgtacttcaaattagggctcgagagtatccaaacgcaccatccctagtggttagctgcacgtctctgaggcagtcgttagcattagatcttaactctgaaatagattctttaatcgatcaagcttgtgctatttaggaaagacttgatcgtctcaagcgtccatttatagaagaactcagttggacatcatcattcgacatcaatattttctctttgaagctgaacttctttgcaagtctagaatcttcactcaattcttcaacaagtgatttctctctctctctctctcnnnctctctctctctctctcattcttaagtcttgatcaatatttgaaattagtatctgtttctacaacatcatgtgctttatttgtcatttaatgagtagaaattaggcctatgactagattctggtagaagtaggacattatgggtacaatattaaacatgttttgcatctagttaaaattagatttatcattttctttgtctgggaaaaattcgccttgcagtagaaatgctggcaaagtttttattcctctgtcttgaactcttatggttcaggatgatgtttttatcttctttttatttgactctcattgttcccaatctaattgtcaagagtgattactccatgatatattttttgttaattc

SEQ ID NO: 58523 - DNA, 975 bp, Cannabis sativa
ctttttctgccggttttgtaccaacacaaacttaaaaataataaaaaaacacacacacacacattcgatcgagatactgtctgaacaaacatcgattaataaaccaaaactaaatctaaaatattctcaaacccaaaatcgattagcaaaccaaaatacaatttttacaaaaaaataaataaacaaatttgaaaaaaatgaacatcgttggggctccccactatcaatgatgaacctgcaaaagaaatagaaaaattccaaattcaaaaaagagagatcccgagagagtgatagagagagatttagagagagagatagaacgatacctttggcgcagcgtgtgtttgacagtggcaaagcgaggcaagagagagattccgagagagctcatggtcgaagctcactgggcttaggacgctaacggtcggagcacacagggttgggtcattggggctaggcatccatcgcagttgggtggatgttggggactacagtggaaaagagatttgagaaagagaaggaaaaagagaaagattttttttttcaaaacataaaagaatgaagaagaagaagatgcgactgtaataaaagaaggagaaagagaataagatatatttaagtgtaggttttgttttagggtttgtagaatgggctttggcccatttacatttttgactagtaaatggatttgcgaggctttaaaactgacgcaaattctatataatttttttttaaaaaattctaccttttgtcgtcgattttgtaattagcgggggagagagaaccgacgctaatcattacttatttgtgtcgtttttaaaacgtcaaattatttaatctggcactattcacgtcggtcaacgcaataaacagtcgtgttgactgacgtgaatagtgaattttgtagtaatgagtaaactaccatcaaatgtattggctatacatcggactggaataatattcatagtagaaaaa

SEQ ID NO: 58524 - DNA, 1502 bp, Cannabis sativa
  modified_base (908)..(922): a, c, t, g, unknown or other
aaggtaaaagaatacgggagattaggggcccaagcttgggtaagagtgacattacaaaagtctcgaatctgagactaccgagcatggaccacaatgtcaggtcaatcatggaagaaaaggtttgggcgactagtggcgtcaccaccaccctgcaacacaaagtacacccgaccaacaatactctacaaccactattctaaccctacaacaactactttgagtcatactctactaatttttctcctttgttgttttgtaagtttttaagttttgttttcattttacctacattctaactttccgatatttacacatcgagtttctggtcactaacttcgttgacgagttctcatcgtcaatagaccccgtaagactctaataccctatacgaccttttcccccctctctgccccttaaggatatctagtagtttccaatgctactattctatttgaggcaagcaacggtgtttaaaatcaagctttatatgatgatgtgagaactattagtttattcaataagagacgaggaaggtgaagtgtaatttctcaattgttggagttactactacaaaaaatcttttaattgttggacagaataaagttttggggagttttctagtctagtattgttggactagaaatataacttcattatgtccaataatattagtctaaaaaattaataatggacatgatatatatatatatatatgaatatttcttatttgtttaaaactagtatattttcatgtctaattttgttggactagaaaaaataatccacgtccaacttgtaagttggattaggtaaattaatttaaaaaaaaataaaaaaaatgcataaagatagtacgatcttattagttttattttttaagatgtttttattataattttttttttatnnnnnnnnnnnnnnntattattattattattgaaattttcaagcctaaacttatagaggtatttaagaaacctcttgaaaccctaatcagcccaaataattttttcaatagcttctctttcttctctttgagaatccaggactgctccttcagcaaaaataaaaaaaaaaaaagaaagaaagaaaaaaaattcaaagagaaaccatgccgagctccggcgattgtttcacgaagcagtgaattcctccgtgttcgacgacctaaaaatcaaaatagaaagctagcttgatggtcgttcctctcttttctctctcttcctttctcggtgaagccacgagaaggcctcaacgactgttaacgaccaatgttagcctaggggatcacaaaatcataatcatccgtcctcacaaaccccaaacttgaaagactaagtgatctccaacccctttaccactgttcaccgctgtgagctacgtcgccggagctgaagcttttcagaattaatctggtcatgtgtgagttcttcgtagcctgattttccgtactctatctttgaccgaaaccgaccaccatacatgtgttgggttttatgccc

SEQ ID NO: 58525 - DNA, 942 bp, Cannabis sativa
aaatctcattaaaatctcccccaatcatccatggccccgtatacattctggcaactctattcagaagtgtccaagagtcacctcttttactcggatccggatctccataaaagcctgtaaatcgccacccttggttctcctctttccttatgaaagaatcaatatggaaagaggaaaacgaaagaatagagcaatttattttttcagaccataacaacacaagcccaccactcttgcctttagcttccacaacaaaacaaccaacaaaccccaacgaaacacgcaaactttcagcacgcatcttattcagccttgattccgataagaacaccaattctggacaccaacgctgaattagggacttcaaagtacggaccgtccaagggttccccatcccttgaacgttccacaataacgcattcatgattgtaggcgaccctgattcacagggttcgcctcttcaacattttgagcaattgtcaaatcttcgttttgagaaatgccaattgatgtatccactttcccattctttcttttctttgcatcttttttgactgccactttccttctttgttcttttggtattggcttattacccgaaccaaaggcaaagggaagactttcctttagtccaggtatatccattgatacaccaatcggaacatcaaccagattatggctgtcacttatcaccatgtgatgacttgctgttctttgaagtttcccagcccccactgtctctttgtcttccaccaatcttcttttcccccttccatcttgagccatatcagttctgtctccctctttctcatgttgctggttcaggcatcttgtgatttgcaacttgttcatctccctattgtcttgatttacttcgtttccttcaaaaacctcacaccttctttgttcacgccctgtctcttcagttaataggggttcaaa

SEQ ID NO: 58526 - DNA, 1841 bp, Cannabis sativa
  modified_base (894)..(896): a, c, t, g, unknown or other
ttcgaccttgtaaaagatttgtgaaagaaaaattagttgggacaataaataaaatcatttgcaggtttttttttttttttttcagatttaaaaggttgtttgaagaaggaggtagaaaatatcagatctgaaatgttgtttattatttcttttggtgaatctgacgacacagacaaagtgaagaagaggatcgtcggtgccagagctcgacttcatctagacaatgccggagctggagttgggattcatcagaataataaagggatacaaaatcaatttttttattattattttagttagatttttagtattaatatatttgtttctatttttttttctataaaaaacattttctttttattttttatctttaaatgattatttaaaataaaaaataaaaataaatccacttggaccaatcataacgtgccatgtaggtactgacctgtcacttaacgtccaggtacctacagaagtcccaagaccctaacagaaggtattttcaccgccaaaaaaataagttaggtatttatctgcaactaaaagataaacttaggtatttacgccgcaaattactctagaatcacccaataagatataatagactcaacaaaatagttataaatgtttttataatgtaccccttaaaagatgtgtactggtgcacacctatttgttttggtatcgggataattatttagtctattttttttatagtcacgtacattataattatctgagacatcctacaaaactttgagaatttagaatagtttacaatataaaaaatggtgttcaacaatttatttcacacacatatcaaataaaagagtcacacgtataacagattgtttgaactctatttttggtgtattaaatttttttgaatttttnnnaattttgtaagatatcttaaataactacaacattcacgatcatacaaaataaattcatcgagaaaaacctctcaaataatgaaacaaataacagtatatcaatgcactcattttttaagggatgcaatattatacaattttcaacagttataatagctttaaaaatattataaaatgtttaattaactaaattgaaggagaaaggaaaaaaaaaaaaaacaaaccaaaaagaattatatataccttggaatgtgaaaaaacgaaaaagaaaaaacaaatagtctcacatgcactaaaggacaattcattagtcattaccaaactaactatcacacactaaaaaaatgcaccgttttggttgacgttttgggtgaatagtgtttactaaagcggaatgagaatcaattgtatgagattgattcccattcatttgtttattaaatgttgaaatgagagaaattagtggggtccacgcaaattaaggagaaaacaaatgaaaaagttttcctccattttcataacgaatacctattcctttccttaacttactttatattaattatatttttattaattaaaaataaaaaaacaaatatgccaatatataaataaaaattaattacatgattttaataatgacaatttagtcaaattaagtcattccgattatctatcatgattatgtaaacaaaataaaatgattctgatttgttttctgatcagtttagtaaacaacaaaataaaatattatttctgattattttatattttaatccgattgatttattctattgattattctgattccagtttaataaatgaatgaaaactattttttaaagtatttggatattattaaaaaaaatgttttctaagtaaattaaaaattatataaattattttaatttttttttttgaaacaaagattgcaactttcattaaagc

SEQ ID NO: 58527 - DNA, 865 bp, Cannabis sativa
ttgaattgcggcacgatggctttggatatatcttgaccaagcagtgtgttcgtcttgttaaatgttgctttgggtgtagttgattataatggcttttagggcttttacgatgtaagttgctttaattcatcttttattatctttacatcaatgtttcttatcaaaacaagatactgaactcaaaccagtatgaactttgtgaagcagcttttgacaatcagattttgaccttaaagatagacttcagggcctggaggtggagaaggacggacaagaaatgtagtttgtttcttgtgtattaaaccactattccacgtgttacttggacaaactcacacaaaacagattccaatatcaagtcatggaagtaatttgacaaaattgtaatacctgggcagcattgttaaattcaggcaaagggtttccattattatacgttagtttgacaagttcatccaaggtgcaaccatacagcatgtcattcttctccagctgtttgttcaaaccatccacgtaattacgatgatgtgcaccccagtgcacctctagcgtcttttggctcatatagggttctaaagcatcctacaaataaaagtaaaatagccaagtttacaacttttaagtccagaactccaaatcagctacatgtatgataagtttctatcacaaaattatacatatcagtctacagttaaaagaagtcaaatcagtaaaggattttctttcatcaattctttttccattttatcatataattgtgtgcaaataatcaaagctctgcccataactttgattcctttgataatatttatttagattttacataacttcatttttcttctcaattattggagccatgggacat

SEQ ID NO: 58528 - DNA, 2327 bp, Cannabis sativa
cagctccaaactctcctcttcattcaggaaatgaggttcatggacgataccatgttgatcggcatgcaaagctacaaccttattccgagtagtgagtaagatcttgctacgtaatgtgcctccttgagatgtagtaggaaatgcatgttttaaaagatcccatgttgcagttgtccatatatcatcaaggaccaccaaacattttttttgtttctgaaagttgtaaagctccttggttaattcttcatcacttatgattttgatttcttctcttctttctttggtgggagaggtgaaagcaaataaaattccttccaagacatcacgcctgttacattgctgagatattgagacccaagcataacaatcaaagtgagtcctaacttgaggatgctgatagacctttcttgcaagagtggtcttccccaaacctcccatgccacataaagaaatcaccttatgcatatgagggttctctttttcagtcaaaagagttaccaactcttcaatatcttttccaaatccgacaacaacattgtcttcgacatgagaataaacttgcctcaactctttttgcttgtggacatagctgcttgaagaagcttcatctgctttgtctattgatctctgtactccaaatctttctaattgcgacgtccaagtatcgatgttggatgagatctcctttatctttgatacaactttatacacatcaataatgcgaacacaccattgcaatgcacgtctcatagttccatgattagaagaggaagccactttgaagacataagtctcaataacatcctccaagtcaagagaattttctctgatttggacaatcaaatggccaactctctcattggtaccattcctaacccaagcatcagcatcttttaagaaagcactcatacattgaagcttgatttttgcattccccacttggccttcaactccatacaagaacttggcttcatcaattagcaagtctccaattctttcaatcacaaatgaaacaacagcatctgccatttgatgatttttctcagtaagtgaactgaattaaattgaattgaattgtatgatatgatctaacagcaaaacagatcactcatttaagcatttctatcccaagtggtgttgttggtattcaataatggctgctgattttgttcttttctgtgatattttttcttatccttagagtgatttagaggtggtcctattcctattatgtgtggagtagcgaaaaagcattcagcattattggtattggtaggcccaccataataagcaacttccaagaaggaaccatcttcaattggttgacttgactctccttattactctcttaagtcaattttctaactgtggctgtggctcatgtggttctaattgtatctgcaagctcaaagatgagaaatcttaatcttgtaaatgccaaatcgggttgtgtttactgtttagttgattcaactgaggagttcattttgctattgtttgatattgttttcacattgaggacaaactaataattaaactatatttttaaacaagttgtcaactagtcatttgtcctttgatggaagaaaagtagcctacattaccatgtgcatattcaacaatgcctgctttgtattatatatattgttttatggcacatatcacacaaatcaattaaaaaatttccaaaaaaaaattgtggcattattacagaaatttcttctttcccaccagaaactaaatggttctcattgaggatttggatgaatatttacatacatataataaattcgttaaacaacaatgtaaaaatacaaacaaaaaacgaactcttgaaaaaggacatttttttctgaaaaacgaaaatttttattaaaaacgacaatatttttttttgctggaaaaaacgacaatattgttgcatgaataaaaacgacacgtttcttaataaacgacaatattgttgcatgaagaaaaacgacacttttcttaataaagaagaaaaacgacatttttttcttaaaacgacaattctttagataaacgacaatattgttacataaggaaaacgacacgttttttgataaacgacagtaattattcatacataaaaacgacacttttcttagtaaacgacaatattgttgcatgaaaaaaaaaacgacacttttcttaataaagaagaaaaacgacatctttccttgaaacgacaatattcttgataaacgacaagattgttgcatgaagttaaatttttctactgaactcgtaggagtagtttttttcctatctttctctatttcctcttcattcaagcaaaagattct

SEQ ID NO: 58529 - DNA, 7811 bp, Cannabis sativa
aattccccgccccgtgtgcatccctagttataatattaaattacattattaaatgtggcttaaataactcgtttcaattaattataattgataaaaatattcaaactcgatgccacacaagcatatgtgagataagaataataatacatgtaattgacgagacaatatgtccatctcgggatagacagtgtatataatagaagtttacatgacgagatatcaaggagcttgcagctcattaacccacatacttgtacatggagaaaataagtaccttcatccatctcgctctctatgcgatggaataaccatctcgctaatatcattataacacgaagaacactacgatgagaagcatatttatactttacattttttcctataaaaacggtgaagaaggataactcgcgtttagtaagaaacaacattcacagtcagcataatcgtttaaggataaagacgaaagagcggttcagtagttattaaatattattccatgtgcataaaaataaaatgtgaggaatgtccacattttatgaacagttgtaaatgattagatcctaataaaaataattgtcatcctatatacttataaataggagcagaatcatgggaagaatggacagtgaactcgagaaaaaaaatgatattttacatttatttgaaaattatactctgtatccatattatcatccctaataagaaggactcatggagtatgtaaattttaactacaaaatcacgtaaaaatatttggtgttcatttattattgtcatcaattctatatcatacataaaaggcttatatatttagttaacaaaaatctgcgttaacagtttggtgctttcattgagagtcttagtgataaaaacttagaaaaatccctccttataaacacaattacaaacttatatctatggcagataataccccccacaaaggaagtcatccagaggagactactcatcgccctggaaaagaacctcggggatcgcaaagaactaacacaaccgaaattccacgttcttagaggaatgatggaaatttcactccaactgaagagcagatcccaaagagatgaagtgaagacgcctatgatcccatgagatatgtcccacgggtggttatagaaaataggcaacttcgacagtgtctggctaaatctaattgaaaaaaatgttgagttggtacgagaggctgcgatagttaaggctacacagggaaccactcctcaaactcaatctaatccatctataaggaggctacgaggaagacctcgaggttccaggaccagaaagcaagaaaataatgaaagaaatcccataaatgatcaggaagaacaacttgggaatacaagggatattctaatgaatagagaaagtcaacctaatactggctatttaagatatcaggagcatcaacgtgatgttccaagaacttcccatggatttgcaaactatagaaatgaataactgatgtactagagtcatcttgcatgaatacagatgcatgacagtcacgactgagaaactaggaaatccctcgtaatgatggaagaaatcctagaaatcagcctaggtctggtcgacccccgaggcatccacaaaaacctttttgcacaaacagagagaatatacacacataacttagtaggggacgtgtgtcaaatctctttcggagaagaagcccaatgcgagatgagacacgtgaagcttagttcaagtataggagagtcatgatctcacaaacacagtaggtcagctagacaaacgtgagatggaaatagatcttgatattattttattgatcaagaaagtatgagtaactcgcttagctaccaatctaaaagttactcaaggactagatccgtgagtaattacgatcagagatgttgtgaacttgacctctgtgaatgattaaatcaaaggcaacagacctttgtgagcatttaaatcaaaatgcacctaatttgtgtaaccagcttaatcaaaatgcgggttagcaacctgtggatcccattcaattacgagtaatacaattggaggataagttcaaaaaataccaggatggagaatatggaaaattaccatggtatgactcggatgaagaaacagaactgttccaccctgatatcctaaactcataatttcctcaaggatttaaaaattcacacatctcgcaatatgatggtactattgatccaatcacccacttaaacaagttcaacaccgtaatgacagcaagtaacatttcaaacaacttgtgatgcatatggtttctgacgtcattaataggagcagcaagtagttggtttgataagttcaccaaccattccataacttcttgggagcaattgtcaaaagattttaaaaagaaatttcaagctacgagagatcgtcaactagaagcatctttattgactaatagcaaacaacaaccaggagactccctcaaggcatatttaagtcgctttagtatagctgcagctaaagtcaaaaatttgaatgacagcattcaattaacagcccttcaggcttgaattacaactgacttatcaatcgcatggggagagttatgggatgatttgcaagggcatcctgtaagaaatatcaatgaattcaatgaaagagtaaaaagttttgtgtgaaaagaggaggcacggaatgaaagcaagctgttaaagtcaggcttgggagataaaaccagtactagcacagcaacaacgagcaccatgactaccaaagtaaaaaatccaaatgttcgaataccaagaggacggacgagtcaagagactcatccaaggataagaagaaacaaaagaagcatgagaaatatatacctatttatttctgaattaaatgaaacttgcaagaatatttacctcgccaatgaaaacaaggtcacatttcacaaaccatacccaatgagacacgagaggaataagcgagatcccaataagtattgtcgtttccacagagatattgagcatacaaccgatgagtatcatcagttaaaagatgaaatcaaaagcctaatcttttgagaatatttaaggtagtatgtgaggacacaacagaatgagaccaacccaataacccaaataacccaaaggttacaacctccccctgtagagggcaaggatatcatggttatttttggaaggcctcacctcgcaggaaaaaacaataatgcacaaaagaggtacattaatgaggtaaaaagtgagacatcagcattctagctataacctttaaagaaagaaaaattagatgaaccacccattatcttttctgaaaaagactcaaaacatgtatgatacccacatgcggatcctcttgtaataacaatttaactttctaataaaagaataaagagggttctcgtggataatgggagctctatcaacatcttttataaggaaatattaaagaagatgggattagatgaggaaaagttaagaccctgcattgtaaacttgtgtgggttcacaagcgacagtgtcgcaagtttgggcataactaaactcccttaaccgtgggggaacaaccgttgtctactactaaaatgcaagaatttttagttttcgacatcccctctattatcccaaattttttccacctaacgtggcatgtccacataagccaaagaccgagtacaagtggagtacaaccatgtcagtagcataacagagtctctatacaagatatagcagaactgtcaaacagtaaccaaagggagtgaagtgagccctcaaggagatataccaacatccctggccagccaagagaagcctataggctagccagagtgagcctaaaggttgtccaggttctgtgcactagctggccagccaagaagtgacttttggaccaaggaggattctattcaatcaagggaacctggtctctacaaggaaatgttgtacaaagttgtcctcaacttgcaaaaggttggcctccacactcaatgactagcctcctcttggtggagctacagtgacctgccagatcctttaggccttgtcctgcataatcctacaggccttttcctgccagattctacaggccttgtccagccagatcctgaaggccttgggcggccaggattaacctgacaggactctatgtatagccaaaaatgtggacagcaagtcatgggctacgaattgggccctaaaagcccaacagaatggctgaataatatctagactcaagggcactttagtcttttgtaattatctaacaacctatgcaaatatctagggatttaaactgtaatcaaggatttaggcctcctatataaaggccttaaccctagcgtagaaacctaagtcattaagtcagataccctagaccatcttcctctctctctctgctacacgcccccaagggctctcttctctcttcatctctcacacgcctcgaaggcaatctcgctctcacattagagctctgcctattgattcatgtttagtatccttatagagagctatattagatcccacctatagcgatttaaatagtattatctctaggtattaatacaaccaaaatgagagtaggtcattacacgctatcacaagggggtcgaacctctataacaaatatttgtgtttattaattttcattcttgtttgcgtaacacgtggcaagcatcagatccatacaacccctctatcgatttatcattttttgaggtcaatagtttggtgctttcattgagagcatggatatcgtatctgatcaaactacattgttaacacaagaagaactcctatcgcaccaacttcatctttgggtctccctcaagacccacagattgtaggtccagatactcagattccagtcacaactagaatcccgatgaacactacagatgtggtaaatcctatcaccacaacaggcaccatgagtctggcctcctcttggtggagctatagtgacctgccaggttttgcacaccttggtctaccacatcctgcaagccttgtcctgccaggtcctgcaagccttgacctaccagatcctacacaccttaggcggccacatctttcacaccttgagccgccagatcctgcacagcttgggcagtcaaacctcccctataggtctatggacggccaagattacttggcaggactctatagtggccagactaaaacaagcatcccggaggatccaagtggcaggccttaacctccaagggaggaccctcctcaagtgcctctaactgaaggaagaatccttgggggcacccctcgagaataacaactggatctcaactccagttatatgctagagagacaggtcaaggagttggaggcatgggcctgccacttggatccaccgagatgctcacgtcaagctggccagctgtggtggccagacttgttacgcctattgttatgacgggattcaccacatctatagtattcatggggatcacagttgtgactggaacccgagtgtctggatttgcaatctatgggtcttgagggagacctaaagatgcagatggtgtgacaggagttcttcttgtgttcaccatggcattggatcagatcacgatatccacactctcaattaaagcaccaaactgttgaccataaaaagtgatcaaccgacagcagggtcaacagatctgatgctttccacgtgtgtgcacaaataagaataagaaacaatagacaataggatttattatagaggtttggcccccttgtgatagcaggtaatgacctactccccttttagttgtattgatactgagggaatcactatccagatcgctctaggtgggatctgctatagtgccctttggattacaatatattgatgcttggcagactcaagtgttgaacaacctagggtgttgtgcaaccaaggcttgggcatgtgagagagtgaggaagagtgagagagtttgatacttagaggatatgagacttctagcttagaggaggcttaggcaactaaggtttttagctagaggttaaggcctttatattggaggcctaaacccaaggtttacaacttaatcccttaaaaatagtatagttagctagaatttacataagaccaaaatgtccctagattctagatacttctcaacctgtttgtttgacttttagggcccaatttgtagcccattcttgatgtgcatgtgtaggtgtgtcatgtgggacccactcagcaatccttggccgaccatggccttgtgctagccaagttggccatgaagctgtttcttggcctggacgaccatagagccgactaggggtggctggctagctctcgagagcgaggtggattgtcacttgaaccttgtctgagtgtcaaggtcttcgttggttcggatgctgacttgtccttccttttagtgaactgcattgccacgtggcacatgttttgtccacgtaagcatgccacgtaataaggacaaaaattgggataaaagtatccaatgtcataaggagtgggttggggccaacctagctccttatatagaacaaacatcgttgaaaggtacctgataccttctggggtgatctgtgttcgacacatcctgaagtaagtggcaatatcacaaaagtacaatgaagaggtaatacgagtctttaatcgatatggtactttgaccacgccatccagttgagggctagtctatgcgctagttgatctggaggaggtatcttacaatgcatattctcttaaaattgtccttcgagagagacgaaaaaaggggaaatccatctatctccttgtgaacttgcatcgagaattttaggctcaagggattggaccaagacatggtccagactgagcaccgaaggctcaccgagccttttcagtagattaccattgctatcataatgacctaagggacaattggaaaggatgacacaaggcccgcgtctcttcctcctaaccagtacaactttctcacgattggactaagcctcgagtctctcattctcatgatcagtttcggagctaacgtcgacatgaggtagggtaaccccttctgcaatcttgataccaccccttacagtcgatctagccatatgaaggtcgtctggggtcactctacagttactttattttgtgccaaccatggctacaaggaaaacaagagacctacacagttgtcacctccccaattcaaacacctggcactacctgcatggaagagataaggggaggtgagcaacctaacaaagctatagatatattcaagacaacagtaccatagggtaccttccaagtaatgaaaagtgtgcaaggtcgaccaatgacccagtaccatcttagatacactcactaagacatacagcaagtcctaagttgcacaatttactataatggactcattaccagccttatatagagtttccaagggaaatcacgcataaggtcacagttttatatgtctccaaggtcgttacgagaccccagccaaggtcaaaagagggagaaaaattagctgcccacttagaaccttggccttggccttggccgaccaggttccaggtcctagtggccagctagaccccaagacccagtcttgttgctggccaggaaccctaattccaatcataggccggccagcctagggacacatcccatggccggttagaccccatgaaggccacccatggccggttagaccccatgaaggccacccatggtcggccagcatgtgcatggatcagaacacgtgtttttgcaagaactcaaacatgttatttgtgttcttcatgactcaaagagccaagaatcacaacaaatgtcagataaactctctctctctc

SEQ ID NO: 58530 - DNA, 876 bp, Cannabis sativa
taaattttgagagttaattagtagcaaggtagaacttttaaaaaccagttctctttcacctaattggttcttcttctctaccaccttggctttgtttttcctcgaagcttgttgcaaggtgacggaacacattgttataataaacccgatcactttgtggcatctatgttaaaaataaaattgtctcaaaaatttactaacaaatgaatcaaatactttacaaaaatctatgttttatataattttgttcttttaaacaatctttcctttaaaaaaataataaataaagaaaataataataacctgattcaccactgctttaaaactttctaatactgcttctgcattattgattgacagatccatctgaggagccttaaaaaaaacaaaatttattcatcaataatcttttaaattcagaattttttgcttcaagtagagtttataataacaaatgcaaaataataaaatttcgactttaataaaatcacgaaattaaaatcaaataataaaatttcaaacacaacttacttttctttcttttttttttcctttcagtgacattgagttacacatttttttcttttttttttcttttcttttcaatcttgcaggattttcttccatctatttttcttctcacactaggtatcttggctcccccaaactaattgtgtagcttatgatatcatagataaaatggtgaagacaaaattagcagtgtggacatatatttttcggttcaatagatgagaaaaaaacaggtttaggctcaagagggtcaactagggataaaaatttaatggtaggctagaaaggctcaaactatccaacaaatgcctaaatcatattcctattgaacattgtcaaagattt

SEQ ID NO: 58531 - DNA, 864 bp, Cannabis sativa
ttttcagtttttttctttaaaaatgaagataaaagttttaaaatgcttattttctcgcttttagcttgatactcaatgaaattaggcatgtcaaaaagatccatctagttggagcgggttagagctccgatccgacagatcatctctgatccaaaatattcggatacttattggatcttggatcaaatctgcttcgctccgcctaattcttttttggatcgaatctaattcgaaccgatttcaatttattttttaaaaaaaaacttaattcaagactcggatcccttgggacctgacccaggcccaggcccagacccgaaacccagacccgcgcccaggactgggaccctgacccgagacctgtacctggactatgacctgggaccaagacccgaacacggactcgaccctggacccggacccaaacccgaactaggggcaggatcaggacctgcacccagacccggacataggacctgggacccggactcggaccaagatcgggacccgggacccaaaacccagacctgaccctgaacccagaccgggacccaagaccaggatcgaacctgggactcgagattaggactggacccaaactcggacctaaacccagactcggacctcaacccgaacccaaacccagacacaagacccgaacccgaacctggacttggaccgggacccgatccggactaggcacccagacctagacctagaccctgactcgggacccttacccagaccgggaccgaacccgggacccgagaccaggattgggaccgtctcgggatttgggacagggactcggaccggacccggacccggacctaggacctagacccaaacccaggacccggaccc

SEQ ID NO: 58532 - DNA, 1527 bp, Cannabis sativa
  modified_base (1159)..(1160): a, c, t, g, unknown or other
catctagattaactcacggacaaggttcacattgggcgattgaaggggtgtgactgtgtgttcccattttctagactgaacaatctcacgaaccctagcaaaatgcctcaactcaaccctatactctggccacagaggacaggaacaaacattttcttgaaagcgaagaagtttgtcatgggagtagaagggcaaaccaggagaggggtcagactcagagacaacacccttacattttttggactcagactctttagctcctgaacaactttgcgtttactcgacgatggacctaagttcttaagaagaacaggtggggactcagaggacgatatgggtgaagtggacccaggaggttcagtcaacacaggtggagctggtgagatagacggagaagacagagacgaacgagtgaaacgtttaggggtcgaagacatacctgacatagtggaaggacagtgaggagacgaggtgaaacgactcgttgatggagactcagatacttcttcatgaacagtcagtctgcacacttccccagacagcaatctacgaagagtctaagttggagtttgctgtgatgaatggggaagaaaagagacatacttataacgaatagctgctgggcccagctaaacaaaaaacccctccttaatctgtttccgaatccgtacaaggcccactagcccaccaaaaaaaagcccacacaacattcaacccaacccacaacatacaaatagaaaaaaaattaaacccctaattgagacaaaacttgttgaaagaaaaaaacatgaattccacataagctcaactaaaaaaaaactatagatgcaacctcaaacacaaactttaaaaacacaacaacccctcaactgttagaaaaaaaatgtaaggactaatttaaaagacaattccttctgatgagctgaacacaaaagatgtcatatgtgtgtgcaagtgtcctcatgtgagccccccaaggattagttggacagctcactctctctatttggacaagcaagaattcttcaaaacatttcatatatgaatatatttttgagtgtatgatcttttatttgaatacattcatgttattttgccaaccagttatggctgtcactcctccctagagatgtagccgtctccttatgaatatttctcnnagaatatagtgagaaggagcaaactcctcaaagatattcaatggtacaaaggaagctcttcccattgcatctagggagggtagcctttctaactgggacatcttacagttcagatcaagagagaaactgtgcaattaaagaaaaactcacatcacataaaacaaagtactagagggactgatgcacagaaaatcaaatggtgcacacaccaatacattttctgagatgtgtaaatgagcgtgcatctaaagctttagtaaacaaatcagctagttgagcgttagtgggtacatgagaaatagttaaaagttttgactcaactagttgtctaatgaaatgatatcgtatgtcaatgtgtttggtccga

SEQ ID NO: 58533 - DNA, 955 bp, Cannabis sativa
  modified_base (407)..(412): a, c, t, g, unknown or other
tttaatatataaagatatcatatttggttaagattttgttgaattttttaaaaaaaaaaaatttgttaaaattgaattgtcaaactgaataaaaaataataaaaagagagaattaaggagagaatagatagtagtgtttgttgtgttatttttttaaaattaattaatatttaatattactaaaaatatgaaaaaaggaaaaaatattgaggcacatatttatgtatctattaaaaatttaataaaattagagaattaaggaggggagagaaaaaataactttatagtgattttagagcgtcatgtcatcgactcatacttctcatttatatatctatatctttatatattaaaagtgtctatctaacaggtttgatcttccgttaacaaataaacccaataattannnnnnaaaaattaaacaatcttttttaaaattaaaaaaaaatcatcttaccaacatatctctctaacaaaccgtataaaataatacattttttaatttattttcgggggtttcgcatgtgactgatgtggttcgagacacaccgatctaacccaaaaaattaaataatttttttttaaaattaaaaaaaaaatcatcttaatcacatatttctctaacaaaccgtataaaataataccttttttaatttattttcggggggtttcgtatgtgactgatgtggttcgaaacacaacgatcttatacaactaatcctaatcctatacagaccaatgtcggtgatgatgatgaagaagacgatgagtttgaagttgatgcaatcgagcaatattgattggtttgattcttcattcagaatagatgtgttatcgattggtcctattgagcatcagtgtggtcttgatgatcagagcttcaccgtaaacaaaattagtttgaagtcgatacgattgaccattcgattggtctgattcttaattcagaattggg

SEQ ID NO: 58534 - DNA, 1025 bp, Cannabis sativa
ttcatagaatttgaatacaacccaattgcagtatagggtttgagatttagaaaaagaaattataaatgattatcctaaataatcacgattggtagacgactaataattatcgaattgctcatcgtcttggggttagttattttattgagaattttcagagattgtgtttcctgttagggttatacgattaaaatttaaaagtaatattaatttatttaaaaattaatattaaaatacatcttaataaaaaaattgttatttttgaatagaaatttttttaaaaaaaaatcacccaattatttctcataaaccaagaattctgtttatataggcacattttatatagacacattttacatagaatagatatatatagagagggaacaaatggataaaggttaaggttatgtttggtaggaaaaaagaaaatgaatgatgaataagaagcttgaggatgatatatatagagagagagggaacaagtatgagtgatttttggtgtgaatcgtattcgtatcgtgttgagacttaagtattacaagcacaaatattaaatctaaatccaaactatttattaatttgtttataaatagtttgacccgacccaatccatttaagttgtttatatatataagatcatctccaataagagatatgtaaaagttaagttatattttgtacaaaaaataattttgtgatattttcatatcaacttttattgttgtactctaatgtatttaatatgttatataatgctcacttaataatttattaaaaaaatatatataataataataataatgcaaaattaaatgtaaaatttaatgataaaatattaaaaataacataatgataaatacaaaagtataacatttattgtaatgtaaattttgcatcatgctatattgtgatgcaaatttggatcacttttggttaagtgaaatttttgcatcataatttagcaaacgaagtagacttttaacaaaataaactataattatatatatatttatatattagaaaat

SEQ ID NO: 58535 - DNA, 1213 bp, Cannabis sativa
gaagcagcttattcaacttaagtgtgaggctaagttgaagggtggagctggagccaaacaatatgctcaagaatattttgagcaggagaaggaagctcaggaattttcagagtaggagaggccgctcaattataagaaaaccctcccgatcgggcagagacccattgaacatactatcaagatcagagagcttgatctacctgctcgtccatccacccgtgtagaaggaaaggggaaagtcatcctggaggagcaggaagattctttggatcatgacgatgccccatccgtgcttgttcgggctgatgctcctgctaccgtactgagtacttaatctagcatttatttttcctgatttttcatgcttcacatattttgtactttcttctgactgtattgtttctattccgtgcagaattgtctcaaaaaatgattgaggctttaaatgattgaggctttgaagaagagagtggggggaagctcggggttgttccctccgtccaagaagtcgaaaggcggtgagaccccatccagagagaaggcaccagctcaagtggtcattgacctttttgaagaacaattgttgtggaccctcctacctcagaagtgaccaactcctaagattcccgaggaggtagttcgaataggcttgaacaggcaaagggtgggtccgagttgatcagaagcgggtctgaacaggttaaggccactgcctcacctctagtactgcaccatgagactaaaagaggtagagatatgctctcccactatgtgagtcggttggtccctaaggtaaacgagcagctggctggggcggacaacgacctgtctctagagttggttatgggaggaatcctgaaagagctttcgagggtaagccttttctgacattttccttttgttcttctttaaccagtttggattttaatgtcttctttttgcacagactggtcttaagatgaattatgcctattcccgagctaagtcgactgatgctaagaaccttgccatttccaacaaaatgcgaacagaattagacttggccaagaaggacgccgaggaagaccaagttcaacttggggctgtggggatagagctgggagaggtcaataaaaagctccttgctgctgagactaaagttgccaaactgaccaaagatctataggacatgccatccaccaagcagcttgaggctgacattgcctctttgtct

SEQ ID NO: 58536 - DNA, 1878 bp, Cannabis sativa
  modified_base (258)..(276): a, c, t, g, unknown or other
  modified_base (540)..(540): a, c, t, g, unknown or other
aaggcacactcctgtgactttccccaattaacttcagacatctttcagtaagacttatagtcttgacgagttagaagctgacattcaaatgactgctgagatattcttggtagataacaattgtgattgtcaaaatgaagcgttaagtgacgaggcgtacattgtcgacctcgaaaagataggggaaaagctctagcttgctattaaattcattggaaccaaattcctatcgaggcatcccagaacgttatgatttannnnnnnnnnnnnnnnnnnatcattttgacccagtaaaagtggataaatcacagttgtgtaaagataatagcggatattcaaataataactgcatttatactacgtgatacgtaatcaaatcccacgattttaggtgataaacgttgaaaagattacagtcaactttgtaattaacttcctactatgtgattataaatagtggcaagttagatcaagaaagggacgaaaaatcatatgagaaaaaaggccctgaaaaaattatcagaaatctaataagattgnctcgtggactatgcagaattttaagtgcaaaaccacgtaaacaattctctgtcagtactttttcctttactattttttacattttgtatgagattatcattgttaggcttgaattttggttaatgaaaatatgcattaacagtttggtgctttcattgagagcctttgtgaaaaagctcagaaaaaaccctcctatctcttgaagaaaaaccatctccttcatggctgaaaacccagaaaatattaatacaccacacgaggaaactcatcaccgttctgggaaagagcccatgggctccagaaggtcttccaacccacaatccagatagaccacccgctccaggaggactcaacctaaaggtggcctcagcactcggaccacacattcccggaggacccaactcgacgttggtcctagcacgcgaataacacgctcgaggagaactcagcgtgggaatggccagaatcctagaatgagcgatgaggagtctaatcatgggggtacttagctcacaaagagggtacttatgaaatgaagaaccactgccgtagacgccgtctggaggaagcacagcggcggaacgctgaactagagcgtgatgtagccacagctagggcggtgcaggagactaacactcaaaatcaacctgaacctagagtgagaagaccatgaggtaggcctcctggctcacgaaccaggggacaggaaaatgtctaggaagaacaacctagggaaaatgagattcccctgaaaatcagaatgatcagccagaaccttctcatagaaatgagaatgggagacaaccagaaactgctgaataagaaatttctcatgaaaatgaggaagatcttgggactcaacctagagaacgtaggtcacctacgaaaaatcaccaacgttcttcccaaatccatagggagagggctcatacggaccctaataggggaaatacgacaaaccacactcaaggtgaaagaatagagcatgaagaagcaagtgtgaccttagggcattcaaggacccacagtcgatcaactcgaagaggagaaagtactcgatgagctaatgatcgagaaagcatgggaaacagtaaatccgctagtcactcgaggacgaagtctatgactaagacaaggttcgtgagtaggacacaatctgtgagtaaaatgatgtctaccagatttactcccaaccgaatcttttagagcacttgaatcggaagaaatgtgatcttggtcaacaactcggtccaaagcaagaggatcctatctaattgcgaatagacgagttggaggacaagtttaggagatattaagtaggggaattagggagacaat

SEQ ID NO: 58537 - DNA, 1402 bp, Cannabis sativa
ggttgtgtaaagagatttgcaatttggttttcggtctccacatatctggacaatccttttttagatgtgaagtcttatgatagatgtaacacattttcttgtattttgacttaaattttcctttgttcaagcttccatggttcctgttctctctttgatcaaatcttcctcgagataccagtaggccatctacagacttatgcccctttagttcttgtttcttcttcaactcttttgacatcaaagcactctgtacttccttcaatgtcaaagagtcccttccaaacatcatcgcatcaacgaagtattcatagctttctgaaggtaaagaattcaagacaattatggcatgatctgtattttcaatcttgatgcctatgttttcaagatcaagaattatcttgttgaaatcatccatatgatcttcaatacaacttttatttcaagaacagttgattagtaagggactttgtcatgtatagactttcaagcttcttccataggccagcaattgttgtttccttagacacttctctcaggaccttgtcaccaagatagagaataatggcactgagtgccttttcaagaattttagtcttctccttcactgtctttttcttgatgttgtcttcaccaagcaaggcttctgaatcccttgttgcactaacaaatctttcatcttccccctccataacctgaaatcgttcttgcctataaacttctccaaatcaaactttgcatttcccattgttactctggatgttcttcacgcataaccacactgagcttacctcttcgaagctcaagaatccatccagctctgataccagtttgtaaggaatgatcgattcctatggaatcaacaacattgatccaagaacagtacaaaccatgcttgaattgaaagtgaagttacaacttgagcagtatagctcgtttattgaatataacaggaaaagtatttacagtttgatgtctcaaccaaaaatatctagttacaatgaatgacctaaagctatttatagctttgtcctaagtgtctaactagttactaacagaaataactaactctcaaaaggagtttaacagaataacggaccataactaacacatacatactctcacaatttatcgttaaactatttatgtatttattttttgtctaaactcttgaattgtgctagattaatgttatgttaatgctatatgaataggttgtttaaataatgaccagaatgcaaccacagggggacatttatagttcgggagggttttgcaacaaagaaaagttcaaggacaaaaactctacaagggtcatagtttaggagggataaatctgattttttcaattatatattacctattatattatatacctcattttgaaattataaaattttat

SEQ ID NO: 58538 - DNA, 847 bp, Cannabis sativa
agccgtcagatcaaataactctctcatctgacggctgtcgtacatcacagattacaatccgtgaaagtacaataacgggacaaaatcatatcccatattaaagttgcattttattatgtgaatgtaatgatttttttttttatttattttgacaattataagaattctttgtttaatattttttctattattgtgaatgtaatgttttttatgtaatgtactttttatattgataaaagagaaaaaaatattatcattattataatagaatcttaacaactcgcagcactttaaaaattataatttaccaaacgctcagctcagtttttttccacagttatgctacagttgttttttctcacagcacaactacaactgctttttcccacaacacagctatgccaaactgacccttagcatggtaaattattttgaatttgttaaaaaatttacaagtaattatatataattacaatatatgtaattataaaaaaaataaataaattaaaattcttttgaataccaaaacagagtaccgaaacaactcaagacgaagtatgtccaaagttgtcgagtatttgtgctcatttgttttctttctttctaaagtgatcctaattttttattgtatttagaaactaaaaattataggggctttttataacacttttttaatcaatttttattttttaattagaaaagtgctatgacctcgtaccctgatcctaaccccgaactttagacctggaccacgaaatccaaacctagacttggactcttgccccggaccaagacccaaagtctagaccttgacctagactcggaccccggacttggccctggaccc

SEQ ID NO: 58539 - DNA, 965 bp, Cannabis sativa
taatatattattaatttatataaaaattagaattatatataaaaaaatatatattatcaatttattaatacaaaattaaaataaaataaaataaaataaaataatatatatgtatattggtttattaataattttataactaaaattaaatatattaatttatagttgataaatatataattaattaaattgtatcattaatataattatttttataaatttataatatataatctgaattttaaaaaaatcatattatattgtttttatatataaaaagcatattaacattaataaaaaataaaaaaaaatgatatagttacagttcatgtgtgtggctattacctttttagtctgacaaatcctaactctatacgcctatagtgacgcgcagaaaatgaatgtaaaaaggttcagtgacacgtgtgaagtgtcactaaaaactatctttccagtcaccctcattagtgacgcgcgttgaagtgtcactaaatatttttagagttattcaatgtgtgtcactaaaacccatttttctagtagtgtaacttatccagttctaattcattcctgcataatttattaaagaaaatacaaacatgtgtcaaacactctcgaacatttttcggcaagactgatctaatggcaatttgaagcagatgttgcattaacgcatggcaatcatgtgatttcagacccattagtttcaattcagcctcatttgcaaagtttttgatgttagacgagtaaccatcaggtactttcatatttgcaaatgatttgcaaactatttgtttttcttttttggacaaagtaaaacaagcgcaggaggtaaatataatcgttgacctttcttctcaggtgccagagattggcatatacccatttcaacgagatctaaacgactatttaaaccgtccttacttttgctgggaatatcaagtaaggtaccgataatactctca

SEQ ID NO: 58540 - DNA, 3083 bp, Cannabis sativa
  modified_base (1860)..(1865): a, c, t, g, unknown or other
gatgttaataccagatccctgattgtgcgcctgaacagattcactctgtctacccccaatatcggaacgttgatgactcgtctgggaggttgaactacaagaattagccaccggaccagtacgaagccaatcgacaccaatattatggtgtcttctacgcggaggagctttcagatcaaggttatacagcttctcaatcaaatgcataggggtatcaaaaagacgatcgcagaacctttccagaatggccaagaattccgcagataaaacaaaaagttggtaagtcttcatacttaaagttgacggtacatgaagcaccactcctcatctccaacttcatattcctgtgaagtggtaaatcgacccgcagtgaaacacgaattctgaaataattccgccaaacaccttggaaattattgggatccgacttaacgaatgaaccaatatagttccccacatccttaataactttttcagacatgaacttagatgtcatatcatggatttggacccaaagatcaagttcttccaatgctaataaccgtggattttcaccatgtttaaccctcacaaatattagtggcccatgatcgaacgtccatgggcttccttcaatcacacgttcgatgtctacctcatggtagaattggaaaatataatgattatggctaagttctttaacataaacgcctctacctggttgccagagagaagtcattttgttttgcattgcttgaaaatcaatgttacgtttcgtaagaaaacgtcccaccaaacaccatctatcatcaaacccggacagtttagggtcttcatcatcaaacaccaatctacccatgggagcctcctccatccgaacatcaccatagtcatcttccatttcaacgaaaagagcagaaaaacacaccggaacaagcaagttaaaacttcagaaactaacagcaaaacacatacacttcacaccatgtcaaaagataagaccttaattttttgtttttgaaattacaccattcttcccttaatatatgttaataagtgatataataaagaataagaaaatttttttcttgctgggattatactattttgtcgatcttccaaatgaaattattaaaaaacaaagaaaggaaattgttattagttactaatgatgtaaatttttgtaacatttaatgtttttatttaatactaaatagtgaagaatgatgttactacttactcgtgaatcaaaaagaattagtttaattaccaaaaaaatacattaaaatgtatacatattattcatactgtatattaataatatgctaaaattaatttttgtaaactaaaataacattacattacacctataaatattgcattacattaaacttctacattaacaataatcctacactaaaacaatacatgtatgtgtgtattacaatatagctgttaacatttttttgtgacaatatagctagtgagatataattaggttttctcaacaaataaaaatacatatagattatcatacataaaacaatatattttcatcaactataacccgtaaaatgatattttacaatgagttcaatattttactttttaatcaccaatacctatttttggggcaccatcatcgaccgaccaccaccaactggccaccacctcctaccgaccacaactctcagatcctaagaaaacacccttaccatatgaaaaaaaaaaactataatatacataaactataaataaaatataagaaatgtcatgtttaccttttatttttggaaattcaaaaaagttcattgagctcaataacaacacttacaagataatattacataaaaagcttttgttaaagcttccacccactcnnnnnntattttactcaagttcttagctttcaaagagttctctctagcacaaacactattaacaatacaataaaaagtcaccttatcaataggaagtttttgctcccaaatcaccttgtttctagcatgccaaataaaataaattgttgttgtaatgacactcaaaagaacctttcttttacctctagaaacttttgccttctgaatccacgttaggacatcatggagctcttttttccaaccagtaataccaatccagagccacacttgatgaatcaccaaactgttgtaaatacaattaaaaaagaggtgagaatgactctccactccacttccacacaacaaacacaaggaagttggtataattaaatcgactaagtctgtccaaggtagacaaatggctcttcaaggctagctaacttatgaacctgtgtttagagtgcaaaatctattccaaatgccatcataacgccttctaacaacacttccatgaggcatcttggcttacatattagctatggaaaactgataattgctaatgtcttttcgggagaagacttgttttatcctttccttggtttgaactattcttttccaataccaactagcctccaaaaggacttggtagtcccaccaatcttgatttttgagatacacctcgttaacctattttacccaaaagttttccttcttggtagtaataacccacacatgtttaccaatagcataaagattctataaagctatatctttgaaactatctttcttaggtttacaaagatcatcccaggcaacattccattaccattgctcatgtccactccctttcaaagataagtacgacaaatatgtgtaatcttttgaattacagcttttggtaaaataataatttggggccaataagtgttaatagacaactagacagagttgacgaggaccattcttcctgcataagaaaaaattcctcgaactctaagttttaattatggctgtcattttctctactaaaccttcacagactgctttagaaattctttttgagctaattgacattccaacatatttaaagggtaaagagcttttttttttaaaaccagacttatcaatataactatccaaagaaaaagagtccaaacctactccataaacaacgatttcccttcattagctttaagcccaaaagtgttcgaaaataattgaaagcctctaagtagtaggagagca

SEQ ID NO: 58541 - DNA, 988 bp, Cannabis sativa
  modified_base (906)..(940): a, c, t, g, unknown or other
agctcatattcaaatcaaaaactaaaatctaagctaaaaagttatctttcatgggtgttgcccattttttacagttcaacaaagtttttaatatctaagtacaagaaacaagaaaagaagaagagaaagaaaaattttaagagagggtaaaagaaaatcaaacacaaaagcttggtccccctctctttcctttctctgttgtactttccttctacaattacttcccttcaaaaaaatggcagctgctcacgttagagagaaggtggtgtgtacttagctatcttcctttttgttgttgggtagataaggtacaaattgacaccctaaaaatagaagtccaatccttttgcaccttggccaactaggtttagtcctcttccttcacaacatccaactggtctcatttttagtgacaaaaatgctcatgctgatgtggacaactaaatttcatgtttccacatctttccacgtcattgccagaatgctgaatttgttttagcattgtttcagcaatttggcccaatttcagcttttgttcccccttcatccttgcctccttttctttttcctaacaacttaattcttctttttcaacaataaacaagcacatttgattagaaaaacacaactaacaataataattttcacatgacttaaaagttagcttactaaatagaaaatgaaactaaaacaaacatattttcactactcttctcacaataattccagtttaaaagcataaaaaataactctatatcatagagttatcagtacttttgtaggttctctctgtttcaatggcaagacagtagtactaactttgtgttagcaccataaagtgctaacttgtatattccaggtgggatgaagtcaactactccgtacttgtaacaccctaactatctnnnnnnnnnnnnnnnnnnnnnnnnnnnnnnnnnnngctcgttgctaatcaacgaggttgatggaaaaacgtgattaattaaaa

SEQ ID NO: 58542 - DNA, 2524 bp, Cannabis sativa
ttcattaaaatgtttatatatctatgcagtatgtttatttgcatgtactcgaaattattaaagaaataaataaatgtaatattattatttatgtgaatataatataagcaatgtttctgtacatactagctaacaatgtctggataattgttttttttcttttaataactgtgagattgtatacaaactgtcatcagattccacggaacagcattaaacaataattactgtcactatattaagaaatttaaaattattcattcagactaaatataattagcaattagcaacatcaatgaatacatgaaaataatttgttatattaacatgtattaatagagacaaataaaaagcttggacacatctgaccaccacaataagtaataattaatgccaaactatagtcttcctgagatttaattcattaatttgagattaattaaataaaagtgtcagtgaataaatataaaagttggagacaagataataaaagtataacagctggtggaatatagaaattaattaatacaaaaatgcaaatgctatattcattttcactaaaacgttatctagttggttgtcattaaccactacctgaatctttgtctcctcaatatataaaaatatgttaaacttattaatttggctattgaggttgaggattgaaaactagtctatttttaatgaatgaccccatcatggtcttgatatatttatagggggacaacttctccattattatttttttgatgaaaggatgagatgatttttccaaatgagtgatctatatggttcaagctcttcatattatatcatatgtatatgctatatataattgtgtacaaaatgcggatgttatgtttatttattttttttatgtatttttacagactaatttaatttaaagtgtgttttaatatgtttattattttattgtatagatttatatttggttttaattttatttgattttaaaaaaaatattcggagattctcaattttagtaatttttgtgttcttcaagtcttattgagcaaaaataagaaattataaggtaaaaaagaaactacaatatacttagttggattttttgttgcctaaaattggtcacaatttttattgttagttcagaaattcgtggtctagagtcaagagtaatcactttcaaaaaataaattaaaaattttaaattttgaatgttcaacatgctccgtttctgattgacaataaagtctgaaacttcaagctaatttttttatattttttcacttttaggaaaaactttatgaatggatgttctaaatctctcttttatatttccaagacattttgaatcgtccaatttcgagttatatcgagagaggtatagccaaaatattatcagtcatcgtagtagaaaattaaaaatggaaaagtacaaaaatcagtaaagaaaagaggaaatcgcttgtaaggttgcaacctcttgatgatttttttcaggaaacttggatttttgaattataaaaggagggcttatggcaaagctttgacaccattcgaaaattgagaggaattctaagtgtagaaggaaagcaaggagtagaaagcaccattgaaggagtccaacaatgtctatctcttcaattctattttttgtctttagctattttttttttattttaggatgtattttagtaactaatttcttttaagaattattatgtaaactactgaagtatattttatggcttaatgtgattattcaatttcttttttttccttattcaattattgactgatcaactttaattgttatctattaatttgaatcaaattttaaaaggtgagatttggatatgctctgattgttatgaatgcaaattgatttaggaggaaagtacctaggttgtttgtataattttattagttattatgcttaatgttatctttgtgattaaacttaccattaaaatataagatgtcttcatatagattgagtttatatgtcttaaccagattataaacttcttaacttaacttattagttgaatacaaagaagagaaattgggtaattacattatgaagtaaaataaaagatagttggggatcataataattcttatttttatcattgttatttttttttatcaaatattaattaatatttgttttattttcttttttttttccaacaattattattcaccaaatagaactaaaaaattaattaattggtaatttataatcaattcttgtcgaaacgatactctatttatcattatattttattatttcgattgtgtatacttacgtatcaattttaccgacaaatttttgtgccattgttgggaattgaaatcattaatatcagtttaattatttattattgtaatttgatttttgttttttcgttgtttctaacctatttggttgagatttttgtctatctcaggtgaatctattatatctacagtaaaaaaggtgcagagagccttgttcctttaaatcctgagatttataaatctttcgagcaaaatagaa

SEQ ID NO: 58543 - DNA, 935 bp, Cannabis sativa
taacagaacaacacttaaaaaaatagaaacaataaaagtaaacaacacaaacatgtaaataaagaacttacagaattggtaaggaaacaattaggatagctaaggttgtgaaaccacatcttgttgctaacgccctcaaccccaaaacgaaatggcggaaatattgtgtccttacaattacaatacacattagttgttgtgctaaaaaaaaaagacatcaaaacacacacacaaaaaaagaaaacaataaaagatatataagtgaaaacacctaaaaatacttacttagatttttgctttctaagacctgtacaaagccaaatgttaaactcagattccaactgtggatcgacaggttcaccaatcttgtcgtccaacgggcacaaacaatgcacatatttaacgaccttataaacagaatcatcaggagaaaccgaagatgaacctgatttgaaggcaccagaagcaagctcaatgtgtggagacttcaaaacaactcctttcttccgatccctcatttgaggacgtaaaatgggagtctcttgaaaaacaaccatttcaagatcattcttctcagaagtctcagcagaaccagacacagtagttgaggaaccaatctgaaaaatacaagaaaaatgatttactacatttttttaaaaaaaaatacaataaaaacactagtaaaacaacaataaaatattatagaatcacacaaaaaaaagaaaaaaaataaataaaacaaaccaatttctccacagcattaacaacagatgcaattgttgcatcaacatcaatgttctcttcctcaacttgatgttgttctgactgacaacaaaaacaacattaagaaaatattaaaacaacataaaaaaacaacaagacaaaaacaacactgaaaggtgggacaaaaaaatatacctgtttaacctctgcaa

SEQ ID NO: 58544 - DNA, 1234 bp, Cannabis sativa
gttataaaatttcaccattattgatagtcgttatttttcatagccactaaataacgatctatttgcatctctaaccatggtatcaaatttttcaggatcataaatatactcttcttgagcatcatcaagcaattctttggatgatcatcacaatcattactttcaaaataatcatcaacccctcgcctacctaatggatatgggtcaccctttgattcaccgtgccagtaccatttagtataacttttatcgattccacgacaaaatacatgatgtaatattttcttttgatatattaccacaatcgatacaatggtaccaaaattttttaggatccctacaattcttaggaaaaactctatttttttataaattcttcttaaaattgtggggtttctctcttctctttcatccatggtttatctattttaaaaataaaaacaaaattcctaacaaacaagattaaaaaaaaaacttaaaaattgctagtacaatcctaggcatgcttagtaattaaagtgtcggccctaaagtgaggcgagccaggtgtgcgcctcgggcccctgcacgctcagtgccccaaaattgtgaaaaaaaaattatcaataaataaatattttataataataatttacaattaaagttaattttatcttaagtcccatataccttaaaataaagacacaaaagtataaaaaatgtgcgaagacaattttatgggtagaggtagaaatttgacacgcggggatgaatgggaacctgtgggtaggactggacatctgattcaatctaacttttttttttctattacaatccaatccaattaataattggatttgaaaaatcatcatctaatctaatctaattagagctcaaaatccaatctaatccaattactaattgtattggatcaattttttaattggatacccaattacacacttaatttttaatattaacttaaaatatgaaaaaaaaaatataaaaaactaaatgttaccatttatttaaatttaatactctataaagatatcatccttacaagtttaatacaattaaaaatttgtaataattaaaattacaacactgtcatgtaataaaatagtacaaaacataatgaaaataaatacaaaaacaaccaagagttacaaatttaacatataataaaatcaaccactgaaaatataattaaaatatgtattttttttttaattttttaatatttataaacata

SEQ ID NO: 58545 - DNA, 1111 bp, Cannabis sativa
gatgtgggaattgagggaaggagacagtggtttagtaatgcgtctgccaattgaagagtgcttgagactagaatgagtcgaactttggtgttgttgatcttgtcatggataaaatggcagtcaagctctatatgtttagtccgttcgtggaaggtaggattgttggcgatgtgtatagctgattggttatcataatatatgaatgttgacgagtgttggggaacttgtaaatctgaaaggagatattggagccaagtgatctcacttgtagtggctgcaagagctctatactcagcttcggctgagcttttagatatggtaggttgtttcttggttttccaggaaatgagacagtcccatatgaatatgtagaaacctgtagtggactttcttgtcacggggcaggaagcccagtcagaatcagaaaatcctcggaggttgagtgatgaatttgtcgagtagagaagagcttggcttggacttcctttgaggtaacggattagatggtgaagggcctgcatatgtggggtacggggagcggacataaattgacttaagttgttgacggcgtatgtaatgtccggtcttgacaaggtgagatagagaagtttttcaattaattgcctgtactctgatggatttgtgagaggttctccttgtgtgtcgtcgagttttgtctttggatccataggtgttttggttggtttgcagccaatgaagccggtatcctcgaggagttgcaaagtatattttctttgagacatgaagagaccttccttggatcttgctatctcaaagccaaggaaatatcttaagtcccctaaggccttaagtttgaattgttggtgtaaggaattctgaacttgatgtaaggcttgtaggtttggacccgttagtattatgtcgtcgacatagaccaagagggctatgaaagtgtcattggttcctcttgtgaatagggtgtaatcggcttgtgattgcttaaatccttcttggagaagtgcatccgtgagctttttgtaccattgtctcgaggattgcttaagtccatagatagacttttgcaatttgcagacaagaggaggacctttgtgatcagaattagacactt

SEQ ID NO: 58546 - DNA, 1117 bp, Cannabis sativa
  modified_base (346)..(360): a, c, t, g, unknown or other
tccaggtttcggttcgagtttgcgttcaagtctcagtccgagttcaggtctgcgtctagggttcagtttgggatgaacttggttcatgtcatggctgtgttttcagtttttagatttttatttttaaaagtgagaatagaaaacaatttttgtcattttaaaaatgtgatggtgtttgacacaagttttttaaaactatttttagattatttttcttgctgaaaaaaaattcaatattctacaccatatcatgacatgaacccatcctgtctcgtacccaaccctaacctagacccgaatcccaaatcttgaccccgaccttgaacccgaacccagacccagaccnnnnnnnnnnnnnnnacccagacccagacccagacccggaccccaaaccaagaccctaatcccggatccctacctgaaccccaattccagatccagaaacccgaacccgaatctgaaacccgggactaggtctaaggtccttggccgggtctaggttcatagttgagtccgagtttggggttcgggtcgaggtccgagttggggtatgagttcaggtcgagttcaagtccaggtcttaggctttataatctcaagactaacaccatttgaatttactgcagcattattcatagtacataatgtctctcatgttgcgaggctatagaagtacgtgtcagatctgactcaatcttgagattacaaagccttagaattggaatcaaacttttcctacgagaaacaaccggttcaaattttaatagaaaggataaggtcctttcactacaaaaaaaggtcacctttagtgataacattttagtcacaacataatttttttggactaaatgtgatttttagtcacaacaaaatattatttgtgactgataaaacattgtatttagacacaagttgtaactaatttagttgtagtcataacaagtgttgtgatcaaaaatacatttggtcacaacaaatggagatttttgtgactaatgcttttaactacgaaccttttagtcacaacttaagaataaactgtaacgcccgtattttatacttactaaactcaaaagttaactttaatatattatatctttataaccatatgggtcgg

SEQ ID NO: 58547 - DNA, 1224 bp, Cannabis sativa
agttattctgttttgtgttctacttgtgttttataaaaatacagtatttttgaaaagattttcgtgtgataatatttttgtaaaagttaacccaaattccagtatttttgatttctcctgaagcaagccatgagcattttactcaagacctccgtcaggtttgttccaatcttgataaccttgattgggtctactgtgttgaggggaagttctttgagttcctcggtcagactaactcatgagccaatttccccaaaataggggttaatgtcgtccttgtcttgggcaactttaagtggctttagatgttgtttctgtctttctatagtttggactataaaggtctttgttgtctcttcagctttcgtagaagaggtcttgctcgtccccctggtgccgtagcagcagaggaggtcttgttcgtcccctctgaagccatagaaccagaggaggtcttcttggtgagtgataacaaattgcaataataacactcgcgaagagttgttctttgattaccaaggagacaaccgataccagttaccgttgggaacttgacggacaaatggtatactgatgagatggctcgaaggtcgtagagggttgacatttcgagcatcacattgttcggagacttcacatccaccactatgatcataaccatgatggtggtcttcttgggacaatgtcgacagtgagtgaaagtttgatcttgccacatggagcgatgccggctccactgaaaccatacataagttgttcacatggttccaagtcttctaagttcaaacccattctaattagagcttgcttgaataggatgtttgatgatgctttgtcgtcaatcatcaatctagccaccattatagtagctcgacaactaaaggatcgttgtgagggtagctaacatgaaaggagtctgattctctgaaggggatatgttcacattcgtagcgttgagactttggaagatgctctgcaacctctaggactttagctcttggctcatgttaaagtgatctttcatacctttctaaggccttccttgaatttctagctaggtgagggccttcaatcacaatctctagcctgcctgtaactggcgcaagctaaagaggtgcattgcccccagttggagcttcaggtggtacatactgctgaagagcatcatatttttgtctgatgagaaatttaatctcgtcccgcaactgactacactcattagtg

SEQ ID NO: 58548 - DNA, 4185 bp, Cannabis sativa
ctgccttaaataaggtaaacgacctacattattgtacaaatatcgtgcctcaaataaggtaaataaaaatataatttatcattaaaaaggcaaacaacacgccttatttacgtaaatatggtaccttgaataagatacatcaaaacaagtttatcagtaaaaggtaaaccactaccttataataaggtaaacaacgtatctcattaaggtaaacaccctactttaaaataaggtaaacaacatatcttattaaagtaaataccttgccttaaaataagataaatgacacatcttattaaacaaattttataccttaaataaggtaaatgactcgtcttattctgctaagcactatgtctcaaataaggtaaaataaaatataatttatcattaaaaaggtaaaccgctaccttaaaataagataaataacatgtcttattttgctaagtactatgtctcaaataaggtaaaataaaatataatttatcattaaaaaggtaaaccgctaccttaaaataaatgacatatcttatttaggtaaactttctgccttaaataaggtaaacgacttacattattgtataaatatcgtgccttaaataaggtaaacatggggattctagtcctcaatgtccatcctaccattctaatttagtttctacaataaataaaaataaaaaacataactatttgtacttataattacggtctcttctcgaaggattccaaaatcaaacttttattgaagagaatagaagtcaataagacaaattttttttgtaaacatacatttttacacaaatgcaaagcaactagagaaatttttttttttctcatcgtacacttttttttgtaacttttcttaatgcaactaaatctcaccaaatgcaacttaacaactttatttcagtacaattccataaaattcatcaaaatttgtggtttacattttattactgtatcaacaataagaaaactactttgtcaaagagtgaaccaaaaaaatttctctctaaaaattattgtttcatcaaactttgtggtttacattttagtccaaatgaactgctgaatagattaataaggtacatttacaccatctagaccaagagcatggacaagtacaaaagaaatctagactaagagcatgtacaagtacagttaagcaaaaaaaaagtgccagtccaataaaattcttggcagaaagtttgtagtatatttctttgacattccaatagaaagggagcttattccaattatcagaacaagctcatactcaacatgggaagagtatgccctctcaatcatttttgtataacatatatgtatatatattatattgtgctatgctaattttcactatgaaaatgagatatcaatcaagatagaacaagatttttttttacaatttgaatgcacttagttataagaagaaataaaagaagactttctatgaaataagactttctatgagttatttcactagacacttggaagacattatattgtcatacaaacaatgactataaaagcacacataaacttgtacacatatacataggcaatacaaaccagaataaatagaggattggacgagggagaaacaaagatttagagagagaaactaaaacaaattcagaaagaaagaaaagagaaagttacgtacatttgaatattgaaggacggtggcagttgcggttgtaattgcaaaagtataacattgatgtcggtggtggagtaatcggagggacggtggcaatggaggacttgcagtggagcttgcctacattcggctgctatggaggaataggagtcccctgcaactcaattaatcaaagtcagaacttataatgtaagggtatattaggcagatcaattataaaatagggtatatttcaattaaatctattttgcagttacttttgatgaatgtgtaataaaaagaggtaattatcaacttatcccatgtttttatgctaacatttttttggcccagcgcagccccttccttccaattctttttttttttttttcctttttcaaatgaagcaaatctttctaaattattatatatctaacattcccaattgatttgtttgacaaggtgaaggattgtagcctcataacacatattttacaactaaaacgtgtgcaaacctgaaaagccaaactgcaaagcttacaccaaataactgctcaccttaatagctaacctcatatgcaggggcagagctatattgagctccaacaggggccatggccccccacatcttttcatatatctatatttatacaactaactaatgtattcttgcaaaataaattattgtatttttatatattgtttgtgttggcttttcaaagtttttctttccaaatcaataatatatatgtataattactgtataatataatagtatatgtgcatcaatttcttaatgaaaaacaaaagtacacctaataaaactaatataaagagtctagtgtacaatatatttttttttattgcatttctattaataaactttatttgataaaaacttttaattctacaccaaaaaatttatttgttgtactcaagaaatgttaaaattttaaaattttgtagcttattattaatattaggcgattttaaaatttaatttgaactcaatgattttctaatgcgatccattaatttgttaagtttataattttgatatacaatatataaaaaatcatatcgttattttaatttactattcaatatattttaatgatatcatattcaactgatgtaagattattttttctcaaaaatttaaaattttattattataacattatatattattgaatgttaaattttattgatgataataatttttacttattcgatagttgcgtgaaaaatgtaatattttatagggtaaatactattttgaatcttctgtttttcaaaagttaccgattaaaccatctgttttgttaaataataaattaaactctgtatttttcaaaatggtacaaaatagtaccctatactgatttttttgtcaaaataaaagtaaataataactcgagcgaaagttgttatgataaaattgtgtacattttctgcatcagttcgttctagaaattatctcccagttagttatattaaaaaagttattgcaaattgagctcagggtactagtattttgtactattttagaaaatacatggttcaatttgtcattttacaaaataaagaatttaatctgtaacttttataaaatacaaagtctaaaataatatcaatcctattttatatggggactaaataatttaagatctcgaagagtatattggctccctacacatctaatcctggctccgccgctgctcatatgatttttctttttactggtgttggatttgtagaacatctctaataaggggtaatttgtttgttggtttggtttatgttagtgatcgtattggtttttgtgggagagtgaaggtgcactgtttttctttttagctgtcaatatcaattagattgtatacttgtacgtttattcatagggaaggcaaatatatgtaaatatggcagtgataatatcacttaatcttctctaacttcaccgttcttctatgatttattgaatgagatctctattggtatacataggtatatataactaagaacactctcaatggttcctttaaaagagattcttcaacaaaattttaaaaagggtggaaaaataatctttcaacatatgatctaactaagagcactctcaatggttcctttaaaagagattcttcaacaaaatttaaaaaagggtggaaaaatcatctttcaacatatgatataaatggattttctaatttaaagggtttttgttttcttcgaactcagatcatttttaaaaaagatatatattttaatagtatttaaattatattttattttaattttattaatatgtattatatacattgaaaaatatattattttaaatgatatggagaaatagaaaaaagataaaaagctaataaaagtttattataaaatatacaaaatataattttagtaatttattttaaggaatagaataaataagttattataagggattttttcatatataactatatttaggtcagaatttacttttttattaccatatgaccaaataaataaaattaggaaaatta

SEQ ID NO: 58549 - DNA, 1583 bp, Cannabis sativa
tggttgtcctaaattgaagaaggatttgttgtgtcctggtattctacatctctcatcacttcgacatttgtggatttcaagatgcgagaggttaggggacatgctgataagtgaagattatgactctatgtggcgagccctaaatgtaacactccaatcattaggactatgtaagttgccaaatatagtgactgttcttcctatgggtatccaacatcttacaatcttacaacaacttgaagtttacaagtgtgatagtctaacaacaattccagagtggatcaacaacctcaaatcacttaagagtctttggttatatgactgccccaatctgacatcattccctgaaggaattcgaagcctcaccactttgaacctgttatatattgattcctgtcccatgttattgaagagatgcaaaaggaatacaggtgaagattgggataagatttctcatatagaagacttgaccttaattccagatccaaacaaagaacaagaaaatgaggtagaaaagtcaatgtctaatgtttgcttttatttgcagttaacattaaatgaaaacttatgatgtttatcttgatattgcagaatacaaagggatgcaacctcttgaacaagtttaggctacgcaatacaagaaatcaaggatagattagatatatcatttgtgtaggtaattattaaagagtgctttcatgatgatgagttcgtcttgtcttggttttgaattgttttatgacctttttgtgtgttaattatttatttgatttaagtgtagatgttgtaattaattcatttccatactaaatctagtttttttattgtctgatactgatatacttttgttttgcaattacaggtaaagtgattttgctggagaattaattatgatgaagcaagaaatgttgctctcttatgctgttctttaaaccaatttgctcttatggtatgtaaatgtttacttctgaatattatcacttttatgatatctgataataaattgtttgtgattatatttttgttcttattcttatttttttttaatgtacaattaacagcttacaaaatggatggacacactgaagcaaaagcaaccataggctgtagctgtggtgaagatgattgggtgagctgtgaaaagctcgcattatgcatcaagtctgcctgttgagactagcttacaatgctgtaatcacagtgaagaatcagagatgcatatgtttaaaagagtgcccttttgagaatgttttacggttaggctcacgatgggagttggtggcagttttgggagctagaaatcaattcttctttggaaacagggattttgacttggcctctgtttcgagaaaagtgtttgaagatgtggtggagttcactagaattcgggataaaccagggaccaaatctgtattcactcggactgcacaagtctcgttcattaatgtcccttgtatagtatgtttctttgttctccattctcttggataaagtttacaagttgtatttaattttgaactttttacatgcagtcagtgggtagagaagaatgtatatgaagagttccagtgggcttgtaaata

SEQ ID NO: 58550 - DNA, 1581 bp, Cannabis sativa
agggagataatgtagcattgggacctgatatatcaggaacaatattagcataatcagtaatatcattgctgagattaatagatgttggagacttgtcttgttggctgggaagagacgactagtcaggagaggcaagtgctacaacatgggatgctcgatgagtggaagtgacagcagaaggtgttgaactaacaggaaattgaaggttaggaaattgtgaccaagcttcattgtgaatgaataaggactgttcagcagcataagtgtttaggaagccatttttaaaagcaaattccttttcattgaaaataacatgtcttgaaatgtaaattcttcctgtagtgcttagacatttataacccttaaaagactcactgtagcctagattgatacatttgagtgagtgaaaattgaaatttgtgagtttggtatggtcacatgtagggaaaacatgaaacaccaaacgttctaagtaaatgatagtcaggttttttgtgataaactatttcaaatggtgacttgctgctcaaaaccggtgtgggcagtctgttaatgaggtaaaccgaggtttggaaggcatccacccaatatttgagtggcatgctagcttgagctaagagagtcaaccccatttcgactatatgtcgatgcttcctttcagctcaaccattttgagctgaagtgtgagtggagagccataccttttttgttgttaaaattctggcatataagacactttcaatttcaaacccacactaaaaaggctcgcccagatcaaatgcaaacacagtctcctcctcctctgtaagattaatcttgcctttcattttttctttcaacagatccataatgagggagagtttcacaaacagtcaggctatggggtgggatgaaattacagtagcaattacacccaagaagaagtttgaagttgatttagtgggagaaggaagatggaaaccagaaaaaaaactgtaaaaaactgaaaaccttgacggacttctaactgccacagagcactcaacaataggtagacattctcttttggtaaaagataaaaaaatacatcaaattacattataagatttgagcgcgtgaaactaaaattaactaaaattaattcactagttaataatgaaagtagctaatacattaactacactatttatatttgaaataattatataaaatactaatttttataaaaaatattcaaaattttatcttttatatttttacagtattatataaaatactaatttttataaaaaatattcaaaattttatcttttatatttttacagtattatataaaaatacgaaagaataataaaaaaattagataaaaataataataaaataatatcaaagtacaacataaaaaaaatcataaaaatattaaaaattctacgcatatcatattttataatgtttttgtcattgtttttatgttttttttttaaattatccctttatgtttcgtgagattttgttattttaattaaaaaaaatatattttgccatttttttttttcttagataaaagttgaaaagtacaaaagcgtgaggtaaaacaaaaaa

SEQ ID NO: 58551 - DNA, 1218 bp, Cannabis sativa
  modified_base (618)..(630): a, c, t, g, unknown or other
  modified_base (1175)..(1178): a, c, t, g, unknown or other
aaatttggactgaaaacgatttgtgtgtgatttggatggtttcatgttgatatgtgtgttatttgatgattgattgatgtttgtgaaatatttatgaaaaataattaaatattcgttctagaattatttttgttggatagtttggaaaaaattaagcaattcacttttttatagaatttgatttcgattttatttgaattagttatgaaattttgaaaattagaaaaaaatcaagggtggtgacacacccatacgcgcgcggatgcttgagaattctcgggtgcacgcgcatcagacacgcacatgtttgagaattctcggtctgaaggcgctgagcgtgtctgaagggtgggctacgtgcgcggaaatgctgctggtagcatttgtgggcatgaaacagcctcatccgcccgattgcatgcgcctggatggtatgcattgtaccaaatgcaatttttttcaattttttcatttttttttcatgttttttcatggaattaatttcgaattttttgtgtagttttgtattttaatttttgcttttcaaattttaaatctaattatcagaattaaattattatttttttaaaaaaattaatttaagatattagtgtaatnnnnnnnnnnnnntaggtaaaaatctattttttttttgcttagtttattatcttttttttttttaaatttgattattttattttattttaaatataaggtcagatatttaatattttaaattatttttttaataaattgagctcatttaaatttaaaataatagtttaatcatgatattttacatagtaataggatattatgctaacttttaaattttgtaattttttcatttaaattaaattataaaatcagaaaaatgatattaaattatcattttattttgttgaatatttaatttttaaaaaataacatgaaatttgaaaagtagttagcattttttttttgaaaaggatttttaggttagttgaaacctaattttttaaaattataggtttaattttaattttttttaaatttatttatttattatttattattccgaaataaaaaaatatatatatataaacatataaacatgcaaagataatcaagtgattacctagggtttcctaaacattttctacaacaaagtagagggtgcatttgacatataaacnnnnaaagataagcataaaggaaatcaaaaacttactcgagagt

SEQ ID NO: 58552 - DNA, 1051 bp, Cannabis sativa
gttattacttattttttattagaagatctaaaccgaaaatcattaatatgtgtaatttgtcacatattcatttagattagatatttagcattatttgcacttctttaatgttttaatgctaataacttattttcctgtatggtttatctatcttattaattttctcttttaagtgatatatcatgaattattattgattttcatgtcaatagaaatttctatttttccctaaaaaaattaatagaatctccttcacttttatataattttttgcttttgtctactaatgagacaacttggccacaaatcctatgaatgaacaagtggatatacataatgaatattgtattaattggtaatcaattagctttatatgtaagtagcttgtaagtataaaattattaatattaattagttattgtattgactaatttggaaacaacgttaaaatatgaagcacatacaattatagagatatatttaatattatatatatggaataaagtagtacatatagtattcgtttgtgagaaagaattttcaatcattttcttcactactagacacacactacacatagagtagcctcttgtacaaaaatgctacatttagctataaaaaatccaatatataaaaatttcattacttaaggttgttttatttattctatgctaaagaaccaaataattttataccatttattttttatttatggctaaataaataagtgggatgagtacattttatatatagtttagtggatgccctagggctagctagctagttctcctagttattattctacagtatcaattggctattatttggattcttaccttagaatttcgacatgtattaaattatatttttaaattttttaggcaattaaatattttttaaaaattatttacattgttagattcaagaacgtttgttcgattttactactaacagatgcctaacgtaaatgaaagtatgcttaacgtaaatgaaagttcagagagcacgatttagtatttatcaaacttcagtgggtacgatttaatattta

SEQ ID NO: 58553 - DNA, 884 bp, Cannabis sativa
ttaagtgtataaaaatcaaaacataaaggggtttcgccgcaaattgctcaaaaaaaaatatatattatagtatagccagagcatatattctatatagactatagcacatatatatggaatcagatttcattccgccaggtgatatgactctcttagtaaaaaaaataaatagataaacaggggcggagccaggattgaattgtaggggggccaatagcgcaatcaacgtgtacgatgacaagatttaatatataatgattttaatggccgacattcttattggatggtactaactatttatgagtgatctaatataattcacttagattaatttaaaattttataaatatttttaagcagtaaaataaaatacattaatcaaataatccagtaattaatatataagactcataagagattaattatcaacatgtattgactagaaaatattttatatcatttcaatgtctaaaataaatgattaaattgatggtagagcatatttaaagataattagtggttaacaatgtgaatagtgttaaacaaagaaataaaaaaaaaaaaaaactatatgaaatggttgaaagatgataatatataggtaaattaataataagaaacacctaatttatatatgcatttttttataactattttatttatttagtatgataaactcataattatatttattttcttttttatgaatatacaatatagaataagtctatgactatagtatgctttttttatggagtgtttcagtaaattttctatctgttttggtatacaaaagaacttttctatctaatttctttttttcataattatgtacgttatagttatctaatcattcgtaattttttcataaagttctgagtagc

SEQ ID NO: 58554 - DNA, 2304 bp, Cannabis sativa
tatatatatatataaatttatgtgtatgttttaggtgaataaataaaatacaccaactcaatatattactaaaaacaattaagaagttagaaatttgtgtcttttatttaatattactagaaaattaatatatattatatattatatattataactttttaaataattaatctaattcgctcaagtatggattttaaatttttcaatctaatctaatccgcgcaagtgtgaatatctacattttgcggattacattagattgtgtgaattaacttagatcagatactttgtgaacaatcaaagacgaacccactagtaccttaatatgggggctatagcccctactaacaaaaatattatcttttaaaaagttaaatgtaatatttttagtttcataattatagactaaaatagtagaaaaaccgaaaaaaaaattaaataaatctagtaaagagtaattataatgtatatgtaaatattctttaatgaaataagccccataaagtaaaaattctggatccatcactgtgaataacccttatttataattgtattcaatttaatatcaatttcatacattttaattttaaaaaaaattatagtacacttttaaaaaggcgtgttctattacatcatttatctatttcaatataatttttttatatatataattgtatacgttatagtactatttcaattttcaaaaaaaaaaaattgaaatagtttacaattttaaaaataaaagttttaaatattttacaatacatgtaactaatttttcttacaggtatactaaataactatttgacccttatctttagcagtataaatactcaaaaaaattataaaatttataacatatatgattaagaaaaattgaactaaaaaatttcatttgatgtcgaaagagaatgtattgtagacttagggcccacttgtttgcatcaaaattcaaaggtctagatttaaaaaaaaaataataaaaatacaactcttaccctttaatttaataagtaatatgaaagatgtgagtatttccaccactttttttgactctattctttaaaatactatataacaaaattttattttaccttttctttttacattacatcatacatcaacttttctatatttttctctacatgattaaaatattatatatttacatatatttcattaattaaaacaaaaaaaaaataacaaaaagatataaaaaaaataattaaaagaatgagagagagagagaaaaatgaaataatatataatatgtttacctcactaccagctagtgttctaattaagtttgtgcatgtcgtgctgactcgattcatattttttttttttttaaaaaaaaaacgggttgtgtcgtgttgtgccacagaaaaatatggatcgtgtcatgtattgcatatttttaaagggtaggcccggcacgacctgcaggcctgatatttttttgtcgtgctcagattcatgacgtacattgcttgtgtggacctatatttcttaaacaggctagtctgtttttatatcaaacttaaatttgtattttactttttcatatttttttaacaattactaaattatatatattttaaaattttagttatatacatataacttctagataatatttgatagataatcatacaaaaaaattattaacatcattgaatttgagtatttacttataaatactcaaatttttatattttaccctataaataaattaatataatcttagttttcatgttttaatagttttaattataaaattataatatttaacattagattttagttttattattattttaacttatttataattgatgaattcatatcttattagtattaataataataaattataagttttttaatacgtcgtgtcatgtttctcgggcttgtcatgtgtcgtctttttcaaactagtctattcctgcttacatgtcgtgactttcgtgcttctcgtgtcgtgttatgcttaaggacatatttttcgtgtcgtatcatgccactttgtagtctcgtgtcatgtcgtgcccaagcttgtactttttttcgtgcttaatgcatgctcgtgccttctggacttgtaccggttacatgttgtgtcaaagtgttcggcccgtatttacaacattactaccagcactcccaatagatgagctaaaataactcaatcttcaaattataaagaaaatgacaaagtaagcttccaacaagtgagctaaaccttatgtattttatatatttttttaccttaatgaatagtgtttaattagctaaatacaaaga

SEQ ID NO: 58555 - DNA, 506 bp, Cannabis sativa
gacgtataatttactgtattttaaatcataattaaaataatttattacctgcaaaaatatatattatatatatataatctctgattggtggcaacgtactttgtcggagataagacgaatagtttagataattaataataaggagaccggtaaggtacgtattttggtgtgactggaaagaaactctccctaagacaatatattaatatatatatatatatatatatatatataaataccagttgaaaaagctgttgattccatttcgtccttggttggtggtggggtcgaactggtcgacgccgaaaggaatactgcatggcctgatacctccggtgcctacggataagaagccgaggcctagcaacaagcaacctagttgtaattgagttgggccttggcactgccccaactctaattgttcctttgtgcatgccccaggatgtagctgccgtaaccacgctgtcatagtcaccgtcaccattccctgtttttttttttttttt

SEQ ID NO: 58556 - DNA, 1073 bp, Cannabis sativa
ttgggtctatgcctaatttttgtttctacaaggtattcgattgacggaaactgttgataattttggatgtttcggtttgagaaagataatatcatttcgagaatgtaaaagggaccttagctgatcccaattcgagatttactcttttaagggtgttttcttgttttcctcgatgatttcattttgatcgactgttgctgggtttaccaaacttgaagatcacattgatcactgaggaaatggattttgatgcgataagatcctttctttaattgggatcttaactaaatttgaaatccttctaacattgaatttgaatcaaattttacttgttaacttcactccgagttagaaaaaatattgttttgaaaaatcaatatatgaactggacaaagtgtgttcatttttcttgtacttagcttggaacttttgttattcatgatcccaattctgtttccttaatcaaagttaaaatctctctcaggtatgcttaagaaagtggtagctttgttgtttgtgggaattgtttcatgggcataccaagcaatccaacctcctccacctaagatatgtggttctccaggagggcccccagttacagccccaagaataaaactcagtgatggaagacatttggcctacaaagagctaggcgtgtcgaaagacagtgctaagtataaaattatctctgtccatggctttgattcttgcaggcatgacagtattgctagattcctatctccggtaactcatcttgttctctttgtttgatctatatgtatgacttttagtcttaccaaatgctcaatctacatttgatctgataggaacttgttcaagaactaggtgtctacattgtgtcatttgacagacctggttatggagagagtgatcctaatccaaagcgcacattgaagagcatggctttggatatagaggagcttgctaatcaattgggactaggttccaaattctatgtagttggtatttccatgggtggacagctcacttggagtgttttgagatacattcctcacaggtatgagttttttccatggttaatgtgtgggatc

SEQ ID NO: 58557 - DNA, 1485 bp, Cannabis sativa
gccttgattacataccataaggagattggaataattaactgcttaagttttatctgcgagattaataatttgattggaaactgaaaattacattctttaataggaataaaaaatgattgttgagggtggcggataacctttaactagtctctcatatcgtagtctcaattttaacttacttattgttttatttttacccctgctattttaatcttaatctcgaaacccccctcttctctaattctagttactaatttgtgaataattgaataaacatagtcctcgtgggctcgacccttacttacaattatactaaaataattagaggtagtattagaattaaaaaaatagtaatctcgatatagcataagacacgcatcataacacatttatataactggttttattttaattataactgatttcaattattttgtgttatttatttttattcattatgttacagaactggttatatttcaattataatcggtttgagttatttgtttttattcattatgtcatataaccggttctatatgtagttatatctgagacatctacttctggtgactttttcattaacttttccggtgatggtgacttttccggcgacactaactttttcggtaccggtgaattttttggcgaaacttattattacaagttttattaaatttatttattgtacttttttcccatattttaaactttaattattttttaattctatatttttttttttgcatcatttatttatgctatataaaagtaaatcctcgtacattttcccatatatatgaaaaaaatcccatctaaatacctaattggctaattaggaattttgtcccctaaactttgacatgtaccaaatcatgtcccctgaatttttttgactgttaaaatttttccctaaactattgatatttttgaatttaaggacttttgtccaatttcatttaatttactaatttagtgattgttataaattatgcttctcagattttaatatctaccaaatcacgcccctcgtactttaagatgtgccaaatcatgccccctgaactttcatccatgttagacttactaaaattggacgaaattccttaaatctaacaatctcaatagtttaagaaaaatttttaacgacaaaaaaagttcagatgacataattgatacatgtcaaagttcggaaacaaaaattctaattagcttacctaatttagtcggcacgttatgatgcatagacatgttcaacctttctctattaagccaagactagagggctcttctattaaatcattttttaaggttctattattattattttttgaaacatttattattattattattattattataataatattattattattattattattattattaaacttggagaggcaagaaaaatggatctttgacaaaaatcaccaaagggcctacttcattggtcatccaatcactgctctaaatgtt

SEQ ID NO: 58558 - DNA, 1998 bp, Cannabis sativa
tgagcgcttcttctccaagctcatcgagaaagaggttttaactcctgcttagtttgcaattttcttttcgttcttttctgaattagatccaaacagattgtttatggtttaatttgaaaattggtttacttactgagtgaacgagttagagttttgagttaagtggagattctatttttgttttgattgcgttgcgagtattgatttgatctggtcatgatattcagggtgatccggagtctcaggatccagttgcttacgataatggcgtatcctacatgtttatacagcataacaatgtctacttaatgacggcgtctaggcagaactgcaatgctgctagccttctcttttttctacaccgtgtagttgatgtaagaattattggtatttagaatctcaatggtttaggttttgcattgaaattgaatgttgctttgctctattgtcatttgcaggtctttaagcattattttgaagagttggaagaggaatcacttagggataactttgtggttgtggtaagtggatatttgaattgttgattttgctttattgttattggatagattcattcatggttgacagaggcagagaactgtagaatatcaaattaaaccaaaacaatgggaaacagttgtggctagacttttcgacctatccgtcatagaaattctttctattttcaattaaattatgttctaaccattagcctagcggatgccccatatgggtaattttatattagatttgcaacttattatactagactagacatttgacatactcattggtgaattcaatacttgatttgcaattgagctgatgatttgtcatctaagtagattttctgtttgaattaattaacccagtgatttttcctgtttgcagtatgagttgcttgatgaaattatggactttggttaccctcagtacacagaagcaaagattcttagcgaatttatcaagacggatgcttatagaatggaagttaatcaaagacctccaatggccgtcacaaatgctgtgtcttggcgcagtgaaggaataaatacaagaaaaatgaagtatgtcttcttctcttcccccttccttaaaagagtgatttgttttttagcctctggacccacgggataaaagtacttatttaacaggttttcttggatgtggtggagagcgtgaatatccttgtaaacagcaacggacaaatagtaaggtccgatgttgttggggcattgaagatgagaacgtatttgacgtgagttggcattgtgttttgggattaatttttcttttgctggtaaatgctgtctgctgattttcttaacctttaaggcatcggtttatatcgtctgtgtgggctctttagggagcttgcactaatgattgatgacttaatggatgctatttctacttgactttccactgattcaacaaattaacttaggaatctaaaatttcattatttctcagttttctgacaggacactaatatgtacttgagacaatgtttattattttatttttatcaagttttctgtttttacccttggtatatagctgaaataaactggttgcagtggtatgccagaatgtaagcttggccttaacgatcgagtgcttttagaggcacaaggtagagcaacaaagggaaaggccattgatttggaagacatcaaatttcatcagtatgctgctttaacttgtttctctaattgaagtctatttttgtcgatacaagtgtattagattctaaaattgatggttttatgcaagtcctcacacttaaattctgctttaggtgcgtgcgtttggctcggtttgaaaatgaccggacaatatcctttataccaccagatggtgcttttgatctcatgaactatagacttaatacccaggtttgactcatgcttttcttttaccttgttatgattttttggtttaaacaactttatgaattatactattttaaaattcaggtaaagcccttgatatggg

SEQ ID NO: 58559 - DNA, 3196 bp, Cannabis sativa
tagtgaccaattaatttgattaatcatgtaactttactctttagcagttacaattgataattttttagttacaatacacattatttgttaactaaatattattttctctcctttaattctaagtgattgaaaatataaatctaatgtaaaataactttttgatacttatatcaatgattgttctttgattttactgggcatttgttttgtgttaagaatcataaaatcttaaaaccaattggtaaattggtaataagtagaataactcatatttttatatataactcaaaacttagatgaatgaattaatttcttgttgtgtatctttctatttggatttcttgttagctataatatatagtaccttaatttttacaatatggaaatagaaattatttgtacttttatttgatttagtttacttttatttaagagtaaagtttttttaacataactaaaaaatgatcatgtggtgcatattcctttcgcacttttaataattccagcgagtatatgtcaactatagggatcttatacattattctatcttaattgggttatcagtatgcacttcaagagtttccattctattaaggatggcactgccacagagctaacccctcaaagagccaagcataatccctcctaatgagaggttgtggtgaaattcgaactcttaactcgagcaatgaagataccaataaagacactttaccattataccacacaacagatggtgtggtgtagtaaacattactctttactagtgacaactgacaattatttagtcacagactcacaatacgcatttttttgttaactaaatattatttccattcctttaattctaagtgattggaaatacaaatctaatgtaaaataactttctgatacttatggcagtgattgtttttttaattttactgggtatttgttttgtgttgagaatcataggatttcatctttaaaactaatcagtaataagtggagtagatcatattcttatatttggcttgattttgatactatgttgagaatcataagattttattttaaaattaattagtaataagtaaagtagctcatatttttatatatgtcttaatactctaccatttattacatgtttattacatgtagaacaatgtctacaatattttgagttttggatgtgagtggaatgtgaactaagtttaacattcctttcatatgaaattcaagtgtagaaagggataagtagagattacccattaaaatgcatgcatgtagatcccatgaaataacaaagctttcctaccttaaaaattgtcaatcctattcccacatagtcaaaccattaaacagtgttgcaatcttaggtacattcttcccatttgttttatggacacgatccacaagtcaagatttcaatcaatcacaaaagtatcatgaatggtagctttctcattgaaaaatttgttacgtctgaactaaattctccaaagatacacgataaatttttgaaaagcaaaactagtcttttccataataaatagaaggaattcaaaaaaatcatacctcatataaaaaggaacgtctataaatttagacaagatcttgatccttctaagattgagattcaatagagatgacaattatggaccactttacaaaaaaagcgcttcaccttaataagaaaccccaaattctaaagcccaaagttcccaacataactagtaaccatgtaaaaatcataggaatgaatggtattttagtggctactttgattagtgtaagactcaaatctctcatgatgccaaatcagatgattaataaagggaacattaatcattagagtaaagaaactagaaaaatcctcataaaaaagaggtagcaacaagcttagtattccatcgaccatccgaccaaagcaaggggttaatagtagctttcgcaaggagaagtaagacggagaagatcatccaacctaagaatctaacgaactaaataataatcaaccaaaataataatctacaatcgaatcaagatatctctccatccgttagagacacaattaagattaaaattataaaaacgaactaaataatcaacctcttagttctcagatcgtttattaaaaaaactaaaataaaataaaaaaaattacaatatcacaattaactttaaaaatatttatattctgttttatccaccaaaaaatacaacaatacttatattttctacccaaaaacaaaactattgcacttacatgaaaatattaaaaaaatatatttctaaattttcaatttttgttttcttttgttttgtctttcatccataacttataaattcaggtttaatttggtaataaaataatgagagccccaatttcttccgttcaagctttgtttggggcaaaaactcgtgttcctcaaattattaataaaaatcccaataattataataattcttttattcattttccataaataaaaagcaataaatcataatttcattttgggtaatgggttctcggaaaatcccatcggaccaccggccgacgcctgaccgatgatattatcgttcggttctcctctcgcccttacaatctcaggcaatctatgtatgtgattttctctttctctttgaattcgtacaatttaattaaaagtttcacctttgggcaacctaatttttatgaatccattctcgaagttggttcatttgtttaggttttttcatatataggctcaaaactgtgtaaatatttgatctttacgatagaaagatgagtttaatattgttttccaatcaatttttgataacagtggaaaatgttcatgattaggtatgcccctaattgatcgtcaatactcagatgcttagtgttcatgaggtgaataattcagaatgaattacaagctgtaaatagtgggaaattgattatatagatgattttgtatgtttctctgtgtttttaaattattatagtttctgatgttaaacttaatgttgttgaatcttctaattttattttgtataattattttaattttaccaatgaatgtatgtaaagagaaattaaaataaaaaataaaaaatcccagatgagtcttttgtttttatcatcacttgcttatgctagagttgctttcagatgattccttatgagaaaaaaaacagtgatctttatctatgcctttgaagaaaaccttaa

SEQ ID NO: 58560 - DNA, 1101 bp, Cannabis sativa
tttaaaaaatgtattctataactacttttttgatattttatttttatttgttgattttatttaagtcaggttcggggccaggagcgagtctagggccaggtcatggttcggtttccaaaaagttggggtcaaaattcaaaatatcaattaaaataaagttgtttaaaaaaaatttaaaagtgatttttttttaaatttatattcttaattaaaaaattgaaaagtaaaaatagtttgatagaatatgatttagaaaatatttttacttttctaattttaaaaacaaaaactgattaaaaaagtaggatttcttggatgcaaataaaacttcctgggaagattatggtaggacctagcaaaagttccctaccggtagagaatttttttttaccattaattttagatcatgtggttattatgatgtaaggtgtatactcttacgataggactgcttgtatacgattataactttatacatattataataatatttattttttaaaaaataaaataatttaaattattattattattattttctaaaattaatttaaatgacttttatatagatatttattgctagttactagcctagtattaccttatatatattccctatttataatatatatacattgtcctagcactatataatagcataattagaattataaaagcagcgtggtacaaactacaaattcaattggtgatttggtagtgtagtagaaacacctctgctatggctatggccgaaaattggagcgaatccgtcgaggacctcctcactgccggagacaccgacgccgccatctctctcttggaatctgtcatctcaaacctccaaatccaaacatcatccgaatcctattcccatccccaactcccttctgctctaaacgaccttgctcgactctactcctccaagggtttctctctcaaagccgatcaacttcactctcgagcttccactattcaacatcgtctccttcactctacatcttctgcgtactatttctttctctttatcttctttggttgacctgaaatttgattagattctcaactattttttttttcattcaatttcagtgtttctaatgg

SEQ ID NO: 58561 - DNA, 1191 bp, Cannabis sativa
tctaaagcttgttagtttgtgctttgctgatgatttaattatcctgagcaaagggactagacagtctcttcttgtgattaaaactgttttagatgagttcagtaacactacagagcttgccattaactctcaaaagtctcacatatactttggtggagtgaaagatagagaaaaagatgatatgacagctgatttgactcttattgaagggactttccctctcaaatatctcagagtccctctgcgaccaacgaagtgaaaaattgaagattgtggtatcgtcttatctaaaatcaagcaaagcttacacacctaggctagtagacatctttcacatgcaggtagagcccaacttattcattcagttctgcttgggctccgaaactactggatgagtatttttgtcctcccttagagtggtacgaaagaagtggaaagattatgcagagtgtttttttgtggggcactaaagatgagagacttaagattcacatgacttcttaggagaaagtgtgccttcccaaagcttatggaggccttggcttcaaagaaggaaccaaatggaactatggtatgctttccaagtatatttgggccattatggacaagaaggaccttctttgggttaaatgggtcaatctcatctatctcaaagctaatcctttctggtcacactttctaaaaccagacttgaactggtattggagaaagctttgcaagctgagacgtattttctcaagggaggacataatgaaggcaggcaaaacaggtaacttcaaggcggccttactttataacagcctcctaaagcaggattgtgatagctactataaggctatttggaactacttgaacttgcctaaacaccgatttgtgttatggcaaattgtgaactctcatcttcttactcgtgacaatctcagaaagtttcatgttgagattgttacctagagctgcccggtttgtggtgatcatttggaaacacatgaccaccttttctttaattgtagcctttcgcaaagagtgttgtccagaatttttgcttggcttggttacaatgcttgcccgaactctcttgagggctggaaaaaatggctctctctcaagccgtctaggttgcaaagaagcatcaatatagccatccttgcagccacttgttactgtctctgggtaaataggaacaagtgtgtt

SEQ ID NO: 58562 - DNA, 1492 bp, Cannabis sativa
cctttgtctgatgcaaccttcggccaaccacccaacaaccttcgtctgattgaaactttcgtatgatgcaaccttcggccaaccacctaacaaccacctagcaacctttgtgtgattgaaaccttcgtttgatgcaactttcggtcaaccaccaacaactaccgtctgattgtgtaaatgatagtgtaagagatattttggtaattaaaaacacgtaaaaggtataaatgttttccacatcttatggaagtatttttgtaaataaagtgtcaatttgtattttccatgtaataattccttagaaataagtacaattaatgttatattatttgttataatataatatagattaaaatttttaaatgtcacataatatatattaatctcaatattaatatataatatgtgttggaggttgtattatatcatatataatataataatacacataaaagttataacatatgaggagtaacaaatctaaaaatagattgtaacttaaggatcacaattgataatatgtaatttaagtgagttattacatatggaagttatggaatcaatggtataaatttctagttgttagaaactattacaatactcaattatatcatttaaataggtattgagacattgagaaaagatttgactcggagaggagttacaaaaactaaatattgagttttctggaaacagttgtttttatagttatttttcgaacttctggaaccaattttttgaaaacgtccataaatgtacatgaattgattgagcatgtttccaattctcttatccaacatttttagtccattaaacactaattaaagtattggtaacaaccatgtcgtgaaaagactttgatttttatatgtgatcctcaaaatactataagtagaggtcttgagtttattttgtaagacaacaagtttctatcaagagagcacgttgctggaaattctttaggcttgataaatccagaaagttatttctattttcttttctctaagtgcttgtggtagggaaaaataagtttttggataaatgtataagacattgttcaagtttagtgattctcctattatacacttgtgttgtatgtggtgttgggattgctctcacatctcttttatatttatgctatttatatattgtatttatgtgtagcttattgctttgagttgtagtccctcacttcatctttatattttctattttatgtgtatattttgtttagtgttgtaacattatttaatccatgattttatcctttgtattatttgttatagagttgtaatcttgttggtttggtatttctattggagcacaataattttcaacagtcgaaagcttatcctttcctaccttggttcaatggaaggtaaaaaatccacatgtgataatacaagggtaagaattgtgatattttgtgatttactattttttatatagtagaatatatattcacatatttttttatattgagatatggatt

SEQ ID NO: 58563 - DNA, 1631 bp, Cannabis sativa
gactcttgctcaattagatgtaattttattgataaatgtaacctgtacttttcaatctttatcaaaacttaatttttttatcattttaattttttaaattatacgttttttttattttagaaatatttaaaattcttaatgttttaaatatttctaaaaaaataaataaataaaattaaattaaaaaattatataaatatataaataataaattaaataaaaaaatatataatttaaccaattctaaatattataatttaacactaacaatagtcattactattatagtgtctcaaattaaactaaataaataaaatatacataatatttatagtgaattattaacaagcatacactatttattccataaaatcatcattaaggtctttgatgaaaaagtcttgattcacattattattattggaaggtcccgatggctgtggcggagaaggaacatatagttgatgtgatgataaaccaagtgtaagttcccctaactgagctttgttgagtataggggtcaaaaaaattattgctcctacaaagaactcctaaatatctcaaaatcagtaaaatttaaactgagtggaggagactacaaaggggtttcatatacgaactgacttccctactgcagaccagactggtgttgctactacggagaaggctagtgttgatgttttagaggagtggcataactcttggaagacgaaccaccaagagattgtgattgaccatatatctggacaaagttatcaaaatgtggcttatataaattggcacattattcaggtgtcagactactccctaatgtgtcacgtttagttacaaacatatctaccacggtgttgtaaattttattgggggtggaggatgcgcagttgactgactttgattgtatgatttttattcctttgccattgatcttataacccacgcctctttgataattaggtattttctgaagaacttttccaagtatctcgaattaataactactatcagattcagtactaaatgtatcgctctgagattatctttcgaatcgtttcttatcaagcttcttacgtagtttctcatatttaaataaacattattggaacatataattaatataatatttaaaatttaacaatacaatattttatttacttacaaaatcttctgcagcgacttcgttgacaaaactaccagacggttttctcgtatgagccaccttctatgcatcgactatatgctcttctagtagaccatcctatataaaaataaataaatgaaagagtttataatgtgttttaagataaattatattttaaaaataaatgataaatattattacttacaaatgtgtgactattagaagccaacgatcttgtgtcttgcgttgttggatatttcattagctgtctatttgtttttgtttttgtgcgattcaattttttttttttgctatgaacagtttgcaaataagctttcaactctccttattcaagtggtcagggggtaggtcaacaactttctcccaatcttccagtcttgagtaatattgcttaaatcatttacgtctaatggtcgttctctcagtatctctctgttatcttcgtataaaaagttcccattagtatatctca

SEQ ID NO: 58564 - DNA, 1002 bp, Cannabis sativa
ttaggcatgatctagtgattacaaacaatgacacaactagttgcgttgagatggtttaaaaggctctccaagccaaagatgtagtggaatttttacaggagcccaagggtctccgactgttggtggaaccaccacccttcatacttctgcttatggttaggatggaggtgataccaatgttgatcagaagagaaataatgttctgacatctggtaattggagacagagcaagaggttctgtgggaactagggcagaggtccacgttagagttattcatatcttaagtaacctcgttgaaagaaacatcatcccagggaaagtacatgaaatgcatgatctcatggtcaggaatttcaagaaacactgtcctcagataaaaaaggaaaagctaaaacaaaggcaaaacccgtacctgcttgggtgtttcccattacacaagcggatgctacaaccagtcttttggtggtaatacgtcaatttcttgtcaactactcctaatattttgtactgtttgactctggggctacacattcatatgtgagagcaagagtaattaataaattaggtaggccttgtgattttatcgagttaagatttagaaccctactacctatctgagaactggttatttctaaaaggttgattaggtctatgctagttaaaatttaaaatagggagtttagtgttaacctagtttagttggaattgatggagtttgatattatacttgtaatgggttttttgtccatgtattcggtcagtagtgattgaaaatgtaaaatggtaactttttagccggacggtgaagatccatttgcttatgtcaagactattcagggttctcggatcttaatcattttcaatataaaggctaaagatttattacatagtggatgtgtaggatttttagcatttgtgattgactccagcagacctgaaacacttgggcttgaggatgtcaggatggtaagagaattttttaatgttttcccaaggagtta

SEQ ID NO: 58565 - DNA, 1270 bp, Cannabis sativa
ctgattacagcttacccgatatttccccttgcgtatcacaggactactgactatcacgatcatccctcttacgaggttcgacgtcctcatcgaccacacttccagctgggtcaaggctctgataccattttgtaacggttgcgcttcaagcctccattaggcttttacacccacggaatgatggcttttatacacgagtatgtcattttggctacttcatagaatgacgactgaccctacaaaccaacacgagtatttccagcgtgttttgtcctcactcgcacagttcttgtaaaacttctcaggaggtcacttattctaaaactattccaagtcaagcacgcttaaccgtagagttcttttgtgatgggctactgaaaaataagatacaccttattgacataaatagttccatttaagcactcttcaactgtgtagtctcatatctacacagtttcataatcatcccacttgaccttccccaggcggtgtgggattgtacaacttacccagtatttctcttcaaggatcacgggactaccgactgtcacatgtggtctaatatataattataaatcttgatgtaaaatttaattaatatgtcatttaatgatcattttataatttattgaaaatataaaataacagtttgtttaataataataataatgcaagttatttaatgtaaagtagttaactaaaatttaataataaaatatcaaaaaaaaaaaatggtaaatataaaagtaaaatatgatataatgtaaattttgcataatatgctatgttatgatcaaaatttggatcattttttttgttagagtatttttgatagagtactataaatatggtttatatgcattttttagctcatatgaccgtctccaatggatggtatatattctagtttatatttgatcaaaaatataccataaagttatatttaacctaatttttatatttgtgctccaatacacaagatgtaaattaactataaaagttaatattaccattaatactcattgaaaatatacaaaacaattaattttatttatattattttaataacttataaatataaaaactttttttattaatgaataatattaatgagtggagaatatgtaattaaaaatgtggcatttattgtgggctaaattttttacatgctatcttttgtgctaaatttgacacaatttttagcttaggctaaatttggcacacattttacatcaccattagaataaacttttagcaaaatattctaaaa

SEQ ID NO: 58566 - DNA, 1132 bp, Cannabis sativa
atttaatcaaatagtaacaaaagacaataacataaataataaaaaataaaaataaaaagatgcgaagatcttttctagttattgcccattgaagttgcagcaatcagatctgatgttgtccattttattttagtttaaagctttagttgtctgatcttcttcaacattattggttgttcgatcatctacataagattgtttctaatattttcaaaatcctgatcatgtttttttttatgtataatctcaatcatgtttagcatgccttcaaatgtaattatgtaaggtcattgttgtaattaccattttacttgttttttgtatagataactaggcatatctcttaataggttttgtctttttttctatactccaaaggttcgttcaataacacttcgaagagaagaatgtgcctcgttgaatatttatttataaccaattgatctgctacctcgttgaaattgtggaagatgatacctttcacctttatatggtcctaatttttttttttaatttgtggatatcctgcattcactaaataatgttttcctacaaacacaacatagaaacaaaattaaaatttttccaagatcttaataattgatagatatgtttagattgtgaccttgagaaggtttgggaaaacttgaagttgaatcacgtaaagttgaattataaaattcttatatcatgagcagaaccattccacccaacatatgcaaatataaatttcatattacatatagccataatattctgagtcagtacttctttcctaccaataaatggtacttgtgctataggaggaattacgacattcacattgttggttgataacttttccaactaatttggagtctaataaacgctaattaatcaccaataacgagttagaattagtaagtatgtagaaagtacaccaaaaattatagaggttcgaccccttaaatattggtaatgacctacttctcttttagttgtattaattttaagataatactatgcaaatcactaaggaagacaaaggaaattctagctacgactctcaagatgcttactaggccggaacataaaaaccgctaaaccatgggaaccgcataacccattagaatccgcccgcatggaaaccgcc

SEQ ID NO: 58567 - DNA, 912 bp, Cannabis sativa
aaaaaaaaaaaaattataatagagtatctatttatggctaattacataaaatatcaatttttataaaattttatatttttatgtttgaagttttttttatatatatattttacggtattattttataaaaatataagaaaaccacatgaaagtaacaagaaaataacatcaaaacaacaacaaaataacaataaaacaacataaaaaataatatacaaataacaaaaaaaaaaaattaacaacaaaataataaaaatacaacataaaaatacatcaaaagactgtattttatgtaaataaaatctaaaaaattgtaaaatgttgaaattttcgtacagaccgtattttttgtaatttttttgtattgtgttttttttttttttttttttaaattatcccatatatccattcacactaatatatccaatatacccaaggtcggccttaggcattggcgtgctagactcgtgcttaagccctaaactttgcaggaggcccaaataaaaataaaaaacttcattaagtttttatttaagtaaaattatgtgtaatattgtaaacaataaatattcacagtttaaatggttgggatgtatgacacattacacaataatgtgagtttgagtcttataatacttttttcaagggaaactatagcaaatggtcccaaataatgggactatgttagtatatgtcctcatttcaaaaaattatagcaaatggtcctaaatcttaggacagattatgtcctcgtttcaaaacttgtagagaaatgaccattttaaactatttattatttgtattgtcttttttcatataaaaaaaaaaatcattaattttattttttacttttttcgaattagaagcaaattatttaaagattatggtatatctatattagttttattaaaa

SEQ ID NO: 58568 - DNA, 783 bp, Cannabis sativa
catacatacaaagaggccataatattttatataattatgcttgaaaacattttatttttcagagaatgcttgaaaacctattttgatcctaaatgacatctctttctctcccaattattccaccctctcatatattttacttttcctttaaacaaagctagctatatgcaaaatccttctcacccagctcactgctcacactcatttcatcatcagttttttcaatatattccaactaaaatcttgaaaatgtagcacatcaaaccacaaatatatcacattttgcgcttttaacttttaaattggaaaaatttaacgagttaggatttgtttagtaatattatattgtattgtattatatggttttatattaaattgtattcatacaatatttttatgtactacatgtggtattaacttttatgggcactaaatatatataatattttagtataaattaaaatttaataatattatataaaaatataatatataatccaatttaatattatacaatacgatctaatacaacatacaaataagccaacttatcatgtagtgtggtgtactgacagtgatgaagccataaatttggctcaatgagggcttaaataaatattaagtcaaagctcataaaagtaactgataaatgtatcattttaaattttcatcttcgtcaataatattattttattttttaataaagtgttattttttttattatttgtattaggctacttttaaaatgggcttgattagaatgagggtaggtttatgaattat

SEQ ID NO: 58569 - DNA, 1423 bp, Cannabis sativa
  modified_base (1389)..(1393): a, c, t, g, unknown or other
ttagccttctatcctcgtgtttgaagagattatgaacgtgtcatactcgcagagaaggcctttgaaaatcgcaaagatatgatcacgatcattgtgagtttctccaacactagctaacagatcaacagtttgcttcactttgagtaagtattcattcaaagacatgggtccttttcaaaagactatgaagtctgggtgcaaaattccaagatctttgaggaaactcgaagagtaaagtatttttcaagggagctgcaaatctgtcttgccgttttgcatcccaccattctagttagcaaactctctatcatggaggatagaagccaagacacaaggatttgatcttgaacatcccattcaacaaaggttgggttgtacacactgttagcttgatctgcatcattaagaaattgaggaggaggagcaacattctggataaacttcagcaatcgatttccacgaatagcagccagaacttgttatttctaaagaagaaaattgtgatcattaagcttaatggaaatcgaatgattaaagtaaacatgtgtgttctcatctgaatctctgtttcgacttcaactttgattgttgatctgatttccaccattgacggctgggtcgcaccatttgtagttgttccaagatcggaactggccatgtttgccacgagtggaggtcgttgctctgataccatgttaggagagttgaatctccttgacattgttgttcaaaaaatgaacattagcactaaacactaaaactgaaaatagagagagaaatgtagaagaaagaattgcaaagatgaaaagaaagagttgaattgtattgaatgagaatagttagaacagtacttatacaaggaaattgaaagcaactgatcaagataagttataaccgcaaagataacaaactaactataatgaacaagaacctagtcaactaatataactgtctaactaaattagctaactgttacaagacaacccttaacactctgtaatataattaaaaaagaaataaatatattttatttcacattaagtatagtaaatgaatatataacaattcaattatatagccttagtttttttttttaaaaaaaaaaaaaaaaatcatctcagtgagattatggacatcttatcttgtaattacactaaatttcaagcaagagagaaagacaagaaaagtagtactatttttgtgcataagtcaatatttccataatttttgtataattgaaacttatcagataatgtcattaaacaaataattaatgaagctatattatacatatttagttagctacatatatatagtggcttgatttagctaggttggtgaaattaaagactatacattttccgattatttttttttaagttttttttnnnnntttttttacatttttatggaattctacata

SEQ ID NO: 58570 - DNA, 806 bp, Cannabis sativa
aaaaaaaaaaaaaaaaattgttggtggttgttttcaaaaaaaaaaaaaacttccctttcctccaaaagtaaataaaaataaaaataaaatcatttaataaatttatgtactcaaacataatagttagtgtttttatttttatattttaaaatagtttttttatatatatatatataattttacggaaagccacataacaactaatagagaaatctaaatctcaactcaaatccacatagcaaactacataaaatctagcggagcaactaaaaccgtaaaaataaaaattgtatatgaagtgattacccaacataatattatgtttaatttaattaaaattatttaataaataaatttatgtagacaaaaatcatgttactattgcttttttaatacaataatattatgttttaaattaactaataataattatttaataaatttatgtaaaaaaaaaactaatagtatgtttaatttaattaaaataatttattttataaatttatgtagacaattttgataatcctgtcgtctttttaatgtaataatactatgtttaaattaattaaaaaactaataatatgtttaatttaaataaaaataataatttcataaacttttttttttgtttgatcaagaataatatttctattaatcaaacaagccattcacaactaaatagtgaaaactcccacaactttacaccaatacttacaattttcttgcatttctaagaacaacccactacaacaataatggtttataccaacgccactattaccaacgccaaaaagtcctcattaaaa

SEQ ID NO: 58571 - DNA, 806 bp, Cannabis sativa
atcactgtagtactactataaatagtaaaatttgtaacggtcttaaaaacgacttttttttggaccgtcgctaaaaaaattaagtaactatttaaaaccttcgggaaaaatagagtattcccgatggtttaaaatcatagtaaacaaaataggcgacgtttttaataaaatgtgaatttttaggagagccttatacccgacggtttaaaaatgatgtgtatacactacaacaaataccattattaggggcggaacagtctgctggtaataatcttgtaatctgccggtattggtctttagcggcggggccccgccggtaatcccccgtcgctattaataattaatagcggcggactgacacgtctgccgctattaattattaataccggcggaccattagcggtggggcccgtcggtgattacgcctcgtctttgttatgtctgacacattattaccggtgggtgtccgccggtattaatgtttttcataaaaaaataaaaaattaatattaataataataaatattttttatatttatttaattaatttttttaaaatttatattattaataaatattaaaattaaaattaacaaatccacaaattatcatccatacattatttaaaacttaaaaattaaataattactatccatacattaattaaaacttaaaaattaaataattattatccatatattaattaagacttaaagaaatctaaacataattaaaaacttaaataaatccacacataattaaaattaagataaactaattaatattgtcttgatcaaacaaatcat

SEQ ID NO: 58572 - DNA, 1130 bp, Cannabis sativa
cataagaggaagttttattaaaaaaaagcattcactagtttgcaattctataactaatcaagctgttagtgttcaattaagaaggaacgcatctgtacatgttcaaccggtagaaattagttattgaaatctttgatttgttgaaatgggttttgttttagaagatcaatcaatgttgcttttggaatgctattgtcaggtgcttgaagttatctaatgaaatttaccatgtatttgctttctagtgtccagggaggggcatgaagagaactttttaggtgttgtgaagcatctaaatcttgtgaagctagttggatattgtgccaaacatgatgaaagagggattcagagacttttggttatttttattcttcaatgtttcacctttgtctcacttccatggagacaatctgttcaagaacacaaatacatatccaaatgagacacgttagagtcaaggtgtctcaatcttctgcccaaatattacttgtttctatttttcgtagccacggtctattactattaccaccgccatttgttttcgtaactgtgcgcattcatgaatgagccaccatttgtggtatggaaccattgttgaagcaatgaagctctacaaattagagcaatttctggtagataaggttaaggggtgtattgtggattctggagttgcaaagccatttagtcccaaggtcgaatatttttcttaccgtgttcaagttcttattgttcctttagcttttaataaacttgcattcttgtagagattttagtaaatatttttctttttatgatttgctctagtgagacaattgattcttcacggagacttgcctactaataatatgttagtttctttgatttatatgaaacctacctaataatatagtgagagttttctatttattgcaaatttgtattaattaaattttctttagtgaaaaagttaggttgcaaaagtctatgatttttattagtgaaaatggaattaaatatcataaaaaaaattatgaaagtaattaacattgaacatcatgttgacatgttccttagattttgatatttaccaaatcatgtcatttgaactttgacatgtactaaattatgacccctgaactttcatccatgtt

SEQ ID NO: 58573 - DNA, 1899 bp, Cannabis sativa
  modified_base (40)..(47): a, c, t, g, unknown or other
  modified_base (1829)..(1869): a, c, t, g, unknown or other
tatttagggtgttaatgaacatacttgtgagtagatctannnnnnnngtaaaataatttccaacaaaatcgagaatataactttggcgaaatgcatggtggacgatagagcctcctccaatattcttttcaaatcaacatattaaaagatggggctccagctaactgatttggcaccctggacacaagtaatgcatggcttctttggcgaaggcattgcacccatggggtacatccgattgccgttgactgttggagaaaatccaacaacgagaactccgatggcgtagtttgtcgtattcgacgtatccttggattttaatgccatgataggtcaaccaaccctatatgactgaaaggcggtgacatccatctaccacctttgcttgaaattcccaacaaagcattggataggatgactaaggggagaccaacagtctgcccgtcattattacaactttgccttgtccaaagcaaagaaagagaagatgcccaccaagagctctgaagaagagcccagcaaaggccaatgaagtccatcccaaagtggggatgcaaacatagatcctcactttggggatcctgtaaatatcttagaacctgtagaagagctggaggaagtggaggacgatctcacttctctagctagaagattgaagatcgggaattatttagcgctagaaataaaatcagtactgataaaatttctaagggcaaacctgggcctctttgcatggtcacatggaggcatgatcagaatagacccctctgtgacgactcatgccctcaacaccggtccaaacttctaacgtgtacaacaaaaaaggaagttgttcgacaaagaacgtgcccaagcactcagggatgaggtcgaaaggctacgcgcccatgacttcatcactaaggcattatatctttaggtatccaaccttgagttggtgcccaaacaaaaaaaagtggagagtatgcataaacttcatcaacctaaacaaagcatgtccaaaggattgcttcccgcttccaaggatcgactaactggtggatgccatagttggccatggaatactaagtttcatagacttgcactctggttataactagatgaagatgggtacgccttattaagagcacacaagcttcatgataaacataggcctatattgctacaaagtcatgccctttgggatgaaaaatgtagtggccacttactggaggcttgtgaacaaaattttcatagatctcattggccgcaatattggggtgtatttggatggaatgctagttaagtccaaataggttaaggggcatgtggaagatctagacgaatgctttaagatcattcaaaagtacaacatgaagctcatccctatcaattattctttggagtaagctcaggcgaattccttaccttcatagtcaatgccaggaaaatagaagcatacccataaaagatataagcccttttggacatgaattcacccacaaccatcaaggaagtacaaagcttgaaaggacacatcgctgcaataagtagatttgtgtttaagtctatggaaagtgtgtaacttcttcaacctcttatcttgtcaaaacctctagacaatgaagagtgccacataattcctggaatgtttcgaacaccaccatcagtggaatatgcctccattaggccataatttctcagcaaatttggcctctgatctatttgccaaatagaactgttgagtacaagaggggacaaagatatggcttgggctttgttgctatttgatttcgatatcttcagaaggcccctcttctggagctggtgttggaatatgttttaccagnnnnnnnnnnnnnnnnnnnnnnnnnnnnnnnnnnnnnnnnntatgaatttctaaaacaatgaaagtaaaca

SEQ ID NO: 58574 - DNA, 3040 bp, Cannabis sativa
aaccaaaacatacacaaatgaaagaaaaatacttatgtttctttattgatgttgaataaaatggattacattgaattggagttttatttagggcataaaacccaacagaggaggcttcgactggaggcgggcaaataacagacgcgttctaggccttagtagctggtcccggttcctaatactagggctcccgacgccagcacattaggatccagtaagtctcccttaacagttcatcatgttccttctggccaagaatattcccggtgtaggcctataggattcgacgagcgtcttcatagatttaggatggcccccactcggtgggggcatcacgccaaggccttttatttttcccacttaggtcattttttaggccggtcccggatgggttctggacctcctgcacccattcccctggatcactcagcttatctgtcttctagctagtttctccgctagacagctttcttggggatgatgaagccagtattgtagtgcaagactttgatagggctgagttagatattcagggtaggactagttttatttcttcgttttcatgtgcatactttcttatggccattccgacactttgtttatttctctttgaagcagccaagccaatggaagacctcttggcgactctttcccaaacctacagcccggactctcctcttcctccggcacctacccagacagtgacccggggaggtcttcttccagcgtccctttaggcccaatcgtcttgattgatgaagaaggggaggtcgaggaggcggacgaaggtgagatcatagccccgctggaccggaagcgcaagggcaagatggtggaggctgagtcttccaaaaaacctaggagggtggacactccggctgttagctctgattccgggattctacctgaagccgaggaatacattgtacctcccagcatcatccttactcccgtccccacagatgaggaaaggtagcaacttcggattgccaagcataactatgcaatggccgagtacacaagtgggaatgccaaggtggaagccctgaaaaaggtcttgcgagaggctcagcaaaattctttacacgaggaggcctttaggaatgcttgggacctaaacatggaccctctgacggactagttcaatcgcttcgtcggtcctactcttgctcctttcgcctccaagttaacgagccattttatctccaacctgacccaacttctggccaaacagtacgcagcctgcgcttccacgaactcaatctatcaaattcaggctcagcaaaattctttacacgaggaggcctttaggaatgcttggcatctaatctctcatgcttaacccttatctctttttttcttatccttccagatcgctgtgaagaccgaccacctcttaaagactttaattgtccatgggtacgtcatgtccgagttcgggggcatggacgaggccatgaagagtctgagggacctggtggctgagaggaaagcattctgggaggaagcccaacagagggaggcacaggcggagaggaggcatcatgaggcgttaaaggccaaggtggaggagctgaagacccgggacgaggccgtggccaaagcgaggcgcgaactgagggaggccaaggaggcagtcaaagatctgactgccaggctaaagtcaacggaggagctgcatctgccttgcagacaacggaaaatttgaccgttgaggtgaaggagctcagggattttaaagatcaggccctcaaaaaggcgaaaagggatgagctcctggcccctgttgtctgtaagcactgtaccaagcactttgatgatggcgtctttatggcctggcagactaatggccaaaacctcaaactcgacttctatccaaagcctgaggaagttcttgtctgcttctgggagaaaaagaagcgacttgatgccttgctggaggagcggagggggcctcgtcttccacctcgcgttgattaagccaaccatcacccattactgcttttattactatctcttttttttttcttaaggggagacaatttaaggaattccctaggcccttaatgtatttttttgagcttattgctgggtttaaacatcttatttttatgcttaaatacatactttgctttttaacttcgctaaactttttggcctgttttacatttgtctgtgtggtatgccttactacccccctgagtgtcatgaaaattatttttagggcactctgctttacaaatattaatttagaggttgcacatacttgtctggtacaaatttactttacagagcataagtttatatttcttcactattggtaatactttcagaggtgatgagccttccaggcgctaggcaccatggtttcgtccattcttttgagcttgtaggtcctggaaccgatttcttcctcaattacatatggtccttcccaattaggcccaagtacccccactctaggttcttgggtggctgggaagacccatcttaggaccagatcaccaatagcaaattttctacttttatcttttgagttaaagtgtttagccaccttcttttgataaggtgccattcgtatttgagactcatcccggagttcgtcaatctgatccaacgcttcttgtaataaagccttgtttgttgttggatcataagtcgttctcctgtgggatgggaatagcgtttccaccggaccattgcttcccaaccctatgcaattgaaaatggcgagtggccggttgtggttcttggggttgtccgttaggcccataacactgttggcaattcttcaggccaattgcttttgcaggccagcaactttttctttaggcgacttttaagatcttattgacagcttctgcttgtccctttgtttgtggcctcgccaccgcggagaagcttttgacgactccgtgttggttacagatgtcggtaacttcttcgcagtcaaactgctttccgttgtttgagactattttgtgaggcaagtcatatcgacacactatatttttgataacaaagtctagtgttgttttag

SEQ ID NO: 58575 - DNA, 1275 bp, Cannabis sativa
  modified_base (48)..(50): a, c, t, g, unknown or other
aaattttaattaatcacgattttaataaacctcgttgattagcaacgnnntgcacagtacgtttaaaaatcatgttaacacgcctatgctagttagggtgtttcacaaagcaccactcgatgtgacatgccactgtatggagccttatcgcgtattacagtactacaacaaatggttgttaatttgaagcttttagagagcttcttctagctacatttggtaattctcatttttcttttttgagttcaatttcaaaaagtaattgtgtaaattaatactataattaacttgcaaaaatacactattttacatccataaagcacaccaagatatagcattgttaattacgaatgaaactaattaattatcatctctatgattaatcgatgagaaacaaacaataatacattacattagtgtagattttgcacaaatatattaatatgcatattatatatagctataacataatatatatatatatatagatatatgactataacatatatattttatatatgtcatttattattatgtttgtgggtagtgaaaatgatattagtttctttgtgattttcttggagagaaagatcactaagttgagaatagatggtagagatgaatgatgttgcgtcctttacaggttcttccatagcctctttaagcttcctcaacgccatacaatatgcttcctataattatacatatatattattcaaaacttaatatatattatgtatatttaaataatgcaaagtcataataaaagaaaaggggaaatcatatatacaatgataagtttttaatgatcataaaagtgatgatgaccatataattttagttacaacactttttttatgttgcaaaaattagttataagactttctattatttgtgagcatgtactggttttaacttaaatattgtatactattaggaatataaatatcaagtaaatatagtgttatatataatataaaatacaaatcaaatttttgttactaatcatattaggtacatagtctaattaatagtaaaattaattataaataaaaataattaagtagttaattgatttgaaatgctaactcaacattagttataaagaattataaacgtataaatctagcaagattaatttaattatataaattaactataaagaaatgaggaattccttttaaaaaaaatgcagaacttataattagctggattatttagtagtagatatatattatataggccaggagagagtagtattagaaagttgaactt

SEQ ID NO: 58576 - DNA, 1407 bp, Cannabis sativa
ttccaagttttttcaagttgatttatagttgcatcatcatttcattatggttttattcaatattgcaagaatttcttttgacaaagaaaaaaaaaagaaaacagttcaataaaatgattagtttgtttaatatatttaatgtgaagaaatgagcctcatttcccttattttccatgtgctggtttgtttggccttttgccttgacaggtggcttctttctattcagcagccaacattgaagatcccaaggaagattttctttgccgttgcaataatttgttaatcattaggtgtactaaagattctcgtttctgttatgaattgattacagctgtaatgagccatttaggctcctctttgtacacacaggtctttggcctgctttataaatagaatttgctcagtctccattttgcttgagctgagatttcacaattcaatcatctctatttttcaacttggtatcagagcaaggtttttcaccatgtctgccaaatcacaaaacccagaaatcaatgcccctgctcaatcttcaatccctgctgctggatcaacagttttgggtgcaagctcaagcagttctcagcctccaaacccagttacacatcacttcagcacactaaatcagcctttctctttgaaactcgatagacataactatagtctatggaaaactatggtctctaccatagtaagaggccatcgtttggatggttttcttaacggcactaatgtttgtccccctgagtttgtggatgcaggtactgtaatggaaagcatcgacacaggagactctcttgtcaccaacccagcttatgaaaactggattataaacgaccagctattgataggctggctatatagctctatgacagagactatagcaactgaagtgatgggagttgcatcagctgctggtttatggcaagctttggaacaactatatggtgcacactctaagtccaaaatggatgaaaccaggacattgattcaagtaacaagaaagggcaacactccaatggtcgaataccttaggcaaaagaaaagttgggctaaccttcttgctcttgcaggagagccatacccagaatcacaacttgtcactaatgttctttctgaccttgatgttaactacttaacaattgttttacagattgaagccagatccaggacttcatggcaagagctgcaagaatttcttctcagctttgaaagcaaaatagaaaggcttcaagctttgtcatctaacaacaacaagttcagcaactatctgactgaaccgcaggctaatttcgctcaaaaacctcagaccagtggacatggcagaggctccaacactcagtcacaacactatggtggcagaaactcaaacagaggaggaccaaatcgaggtcgtggcaggggaag

SEQ ID NO: 58577 - DNA, 1236 bp, Cannabis sativa
tatacaatcttcaaaacccaaaaaataaaataaaataaaaaatagtcaatacagtcgcacctgaccagggtgctagcttcgccatcgcatccttggcttacacccttcggcgttgtcttccatgacctaaacctgtccatcttcaacattaaatttgccactaaatgacctattccatgtaatcacacacatcactctagccgagtggtcaatatgctctgttaaacacagcaaaaacaaatttaattcagattccaaacaaaaaaaaaatgacacctttaatatcaaaatgcaaacttttttttacctcgattatcagcaaaactcgagtgatagtgaaatcgggttgcctcaagcatcttcgaaacctcatgggtactctcagaagctttcagaaaatgatcattaagatcattaaatagcttaactaaattaatacttttaccactcattctttttgcatcacctgaacttgaacccacttgcttaaccttcttcatactcttccaagcagcaacaacagcgtcaacaacatccggaggaggaggcagcggagtatccagaggaggttcatccaccgctacaaccttcggcatgggttcctccaaatcgccctattctattcgaaccaatccattagccttcatccccagccagagcttattttccgttggagaggcgagagagagatggaaaagattgcgaacagatagggatgattaggctcatccacgcctgtcgatgacaaacgctgaagccttgcttcagtatggagtcttcaagcggcaaagaagaaacgagaagagagaattaagtttgggagaaagagaaatttttagggtttttaataaatgttattcttttaatttatttttttattattatatttattttatgttattatttaaattttttggtattggctgatcaaagagctaataatttattttaatttattaagagagagaatgtggtgagatttattagggaacattaatattatatatattatttatttattaattgagctgtattttttttatataaaaaaatataattatgatatagtgacgcgccagatgagtagggatatatttatccattcacgcttggcgtgtcactgtatatcaatattttttaaattaataaaaatttgaaaattttaagttttaatctttagtgacactccacatttttagtgacacacattataagagactaacactgaatatttag

SEQ ID NO: 58578 - DNA, 1016 bp, Cannabis sativa
ggaattgttagaagataattagaacttctgggaaatgttgttttcggtttgggcttctaatccatccatggagaggagggaaagaaaatgaaagaaataaggacagttacacgattttcctatttctgacgatgtagatttctcgctgcttgtcaaatgttgaagttagtgggaaatgagtggtggagtggggttattgaatggtggctagtatagaaggaaagaagtgaaaaataggacacaaaaaaattggtttcccccattacttgtaagcatgcaatttggggatgtgaatgacaaaattgaaaggagttgggctgaatcaggtagctaggctaggctacacaattggatcaaattcttttgtctgggaatattttcctaatctctatttcgacatataataaaaaaaaagatactgtactattgttgattaaaatacaaagcttctctttcatacacaaacaggttcctttagcagccaaaatcgagagatgcttgtacaaattgcccttccaaaaccaataactgataaaggtctcgaccacattaagttgcaacttcgagcagtctatgagataaaagacacatcaagctgtctccagctagagcttcaattgcagcgttttcagccattagtaattatccatttaatttcatataaaaagtaaaaattataatcatcttcataattggttcaaatctaagaatgttgaggacaaattttcatattccagcaatggcgttgctattttttttttttttttgggagaatttgagtttctatgcttgaagtgataccttctaatgaaaatatcccatataatcttcttatctcataaatatgttaatgattcaccttttattgaagtgggaaatttgagtttctatcctaatgtgcacaacccatcaaactcccaattaaatactatcataaatgctaatatttcttttgttttccaatgggacattgatacactaaacttaagtacattaatattgttagaatagcccaa

SEQ ID NO: 58579 - DNA, 6305 bp, Cannabis sativa
aagaggaactatatgttagtcgatcagggtgtatttaatactcttagactacaccacatcagatttctagactttgtcttactcacaaatcgagtctgtcatatactttgtctttgagttgcttgcgaatttactggttcccatactttctcggtcattagctcactgagtactttctcctcttcgagttgttcgactatgggttcttgaccgcctcgaagtcacgcttgcttcttcatcctctgttctttcctcccaagagcggcttgtcgtatttcccccataagatttcgtacgagtcctcgctttattggttttggaagaacattggtgatttctagcaggtgaccttcgttcaccgggttgagtcccaagatcttcctcattctcatgagggatttctcgttcatcagtttccagttgtctcccatctggccgttcatcgtaattttcatgggatgtctcattttctacgggttgttcttctcgagcctttttcctgtctcctggttcatgagccacgaggtctgcctcctggtcttctcactccaggttgaggttgattttgagcattcatcccctgtgccgccctggccgaggctgcatcgcgttctaactctacatttcgccgctgcacctcttccggattgcgccttaggtggtgggtttccgtttcataggatctttctcccacagattgggcacccccatgattgtgatcttcatcccttatcctggggttctgaccattcccatgctgagttcttccagagcgtgttgtccatgtactaggaccaatgtcgggtcgagttctccaggaacgcgtggtccgcgcactggggcagcaaccacccttattgaggccctcctggaacgggtggtccttctggagtgggggttggtagatcttctgtagcgcatgggctctttcccagaatggtaattagtttcctcatgtggggtgttaacattttctagattctcagccatgaaggagatggtttttcttcaatagaagggggggtttttttgagctttctcacagaggctctcaatgaaagcaccaaactgttaacacagatttttgttaactaaatttgagcctcacaatattgattttacacagaaaaaataaaagctataaaataaagttatgaacacagggttttttacgtggttttgtagttaaaattctacatagtcgaccagtcaatcttattcagatctctgattattttttttaggaactctcttgtatgatttttttcatcccttttttttcctcttgtttgtcactatttataattacatagtggatagttaattacaaagttgaccggaatacgtttacaataatcattcctaaaatcgtgggatttgattacatatcacgtaacgtaaatgcggtttatgatttggaaatggtatagctgtgattttctcacttttactgggtcaaaataatcgtgtactaaacacatctttaactattgtatttggagatgtctcgatagaaacttggttacagtgatcccaatagcgagttgggggccattcttctttccaaggtcgacaatgtatgtctggtatcgatcgtggttcttatttacaaagaaacattctgactcaccaaggttgtaagcctcgttaccattagctagatgaagctattggaagtcttcacatagcgagatggtcacctcgcttacttgttcttgagcagatctaacttttacacctagtttgtttattgtacgctaagcatctccatgattgatacaggttgctttctatggtgcctcgctattcgcatttagagacatatggtttctcgctaatatactaagtgccagtttgtacattgattcctcgcctaagaccttacagtcagctggttaccaatatactctaatacttacgtaattaatgagttattccataaaagcaatggcatcaatttacattccctttatcttgacacgtgtccttcattgaggtggcagccgaactttgggtataacattgatatttagggtatttcctaacttttgttaccaatagggagactttgagttttgagtttagtacctagaatagattaggtcaagttgttgatcaatttacagttatgacatacggccaagatcgttgagcatttctccactcgtgtttgctggcatgcatgagtttagattaaagataagagaattacatgcctaccacatcgcatgtcaaaatatgataagattattatcgtctacaaatttattattattgagtataagatacggtaattaacgtttttaaagaaagagttattactctatactacaactattattatgtttcttacttgtcggttaactcattaggtaacgacaataacattggatgcctccgtaggcttattagggtttctttatgaggtaacaatgggaatggttactttataaagcaacagtaatagcttgtcttattagaaaaatacctgaacaatattatatgcttctatattgcaattatttatgttagttattttctagtatattgatttatttgagtaagtagtatttgattatggtttcatgcttatgttcaattattattcgtacataaatgttcgttattatgctttgtttttttttgctcagtctttgtgactcatgggtgatatgttgtgtaggtaggggttagtgaatgtttaggtagtcatgagtcaaggatcttcttcaacgaatatacatatcagtcgagtcggcaagtggagccgtgttgtcaggattcatatttttcaatgttcttaattttaaaatgtaatctcttgaagtaatgtaatgccatcttttgtaatattttaaaaggggtatctcagacatagaagagttaaatcacaagttttacttaaattgtttgtttattattataaactaattaataaatgcacagacgtggcgaccctagggttcagggtgttacaataagggaacaaatatttgatccttttggaaagcttagattctactattgtataacatgttcccaaccactcatgttattaagctaccaaaataaaagttgtaagaatcctcttctctgagaaactttaacgaataaatcaaagaacgcaatgaacacaaataggagttcatctatactcaagattcatgatgatctactaatgatcatcattgtgatatgaataactctttcatggaaaatgacacgttaataaaaaatagcacatttactacatttttgttcatttatgtgtttttaatctaaatcacacatactacaagtatagtgtatagtaaattatacttagttgttccatattaaagatcccaatacttttatacactaccgacttgttttatttatatcgtataatcttaattctcttgtacatcatgacaatattttactctctccatatgaataaggaattttcatatttaataattatactattatttttaatgtatcatttaacttataattatatcatatattctctaatatattatccattaattacattcttttaaggcataaatcccaacattatgttctgcttgatgatggtatcaagcacgaaatgatgaatgaatctcatactacaaaaaattatttacactagggaacgacaaagttgtatcaagaaataaaagcattatactagtggccgggcatgaaaggtgatatagttgagtacatgtcaaaatttttaacttgttagctaattaaagcataacattaaaggccagtggcattactttagcgtctaaagttttttgaatggaaatggtaggatataactatggattttaaggttgagttacaaaagacaatagggttctatgaatctatttgggtagttgtggaccgatacactaagccagtgcactttttgccatcatggactacatatacagtagatcaatatgcttattcatatatcaaagagatagtttgacttcatggttctccaaagtcaattatctttgatcgagatccaaagttgacatccaagttatgcaaaagtttacaacaagcgatggacactgtgctaaagtttagtacaactttttatcctcagaatgatgaacagtctgagagaactattcaaatacttgaagatatactacggtcatgtgctttagacattcaatgttgctagaataagtacctttctcctattgaatttccttacaataatagttattagagtactatttgtatggcaccatatgaaaggttgtatggaaggaagtgtcgtaaatctatccactaagatgaagtggatgagagaaggtatcttagatgtgaagcagttaagattactagtgacgccataaaaaagattcgagctcatatgctggcctcacaaaattgatagaaaagctacactgatctgaaacgtagagatgttgagttctaggtgagggattttgtctttctttgggtattgcctatgaaggggattcagagattttgaaagaaaagaaagttgaatccttgattcatgtgtcccttcaagatccttgagagggttggtcaactagcctatcggctagctatacctcttgctttgtctgaagttcacagtgtgttcaatatctcgatgattagaaaatatgtgtctgatccaatacatattctgagttatgatgatagtaagctttagaaagatttgtcatacaaagaacaacctcttaagatcctggaaagaaaggagaaggggttatggaataagacaattttgttggttaaagtgttatgtagaaaaactaaggttgaggaagcaacatgggaattagagccacaaatgcgggaaaaatatcgtgagttttttagggaaattttaaggatgaaatttctgtaaggagaggttagttgtaatatcttgaaaatatgagtatggtttattaatgaattttttattaaatacaggattatatatgaattaagagattatacgtaagattatgctcttcctagagtaattatgtaatagatagggattttataaaaataaataaataagcgtaattatcaattaaggatattttagtgaaatatatagatattatatgtaccatttataaaataaaatattttagggttcagcaatcgtagaaacctaatgaatttgtcaaagatgtcacgatggtttcattagatgtcacgatagtttcacagttgctatttccatgtgtagaaacctaatgaattttcggtttatgataaaaaattttattggatgtttgtgttgtcaggatgtttcaaggtgattggttacaaccaaattatccataaatcctagagtttacttagaggctatgtaagtgtaaaatgatcttttcaaataggatttattaatttttattttttacgggattctagggaaacgtagggtgattaaaaggatttatatttagttaatttaatttatatttttattagtgggataaattaatgtaattataatttctctctttccttttttctcgctaggttttgctagaacaaaccccaagaattctaagaaaaataactagaattcattgtaatcttcatcgttagcctttgatttttgccaagaaaactatgtgaagttatgagaaaagctcaaggaaattcttttgtcttttcttatttattttcttaagttaaaatatagattctaggttgaatattgcaagttagtttctatgtagttgagtaattgttttaagatatattatttgtatatggtgagtggttttgatgcatgttagctatttttggtgtgaaagctttatgtttgtgttcaaggaactcaagcttgaacaataatggtaatttttgaatttttatgctattgtggtttttgagttctgggttatgctttgatatgatatttgaattgttctatgaattttgggtaggtattggaggagtattggttgagttattagtgttaaaatgaggtttggtcatttctgcaaggaaaagcaactaactgtttttatagtcttttgtaaaaatggtgacgtaacaccctaactattttaggcatgttaacgtgattttaaatttaactgtgcagctcgttactaatcaacgagtttattgaaaatcttgattgattaaaattttgcttaattaattgaaaacataaaaatattatatttttaataaactgtgatcccgttttacaaaatacatacagaagtttccctgtacatatacaaaagtttatcgcctagcgactatacaaaataagcccttatgtcccaaagaccgtacactccaggcctaac

SEQ ID NO: 58580 - DNA, 4644 bp, Cannabis sativa
aatactgaacatgtgttattattttgcaatctcatagttggaatgaggtaataagactatgttttctcatattgtattacattttttctttttattgtaataatcattccgatgttcacaagatggtggcccagttctttaaaaaaaattggtagtgtgtatcttcaaatcgataaaagaatgattattatcaatcttagagtcatgttagatcaatacatatggaagttaatcaattttggaacgaagcagtccctttgctgccccaatcaataataatcaacgaaaaaagtgataaataccgtaagatttgaaattcagttgaataaaaatgcataaaaaattaaaaaaaaaaaatcaaagggcctttctttccataactcagtaggacatcctcattcctgcatattctaactcaatcaaaattaggggtcctaaaagaataccacctgtaaaatatcactaagctacaacaattaatcatgtactttaaccaaccctgagctctccaagcctattaaaaaccaaaaaacaaaatagttgggcatggcaggcaacatgactttaaagaacagttgcccagtagaggggggagaaacacgaaacgatggtacatatgcagttttgtgttttaaccctggtctccagtttccacgttctacatccaacttcacttgctaaattggtttccaatggttcgtcgaaagacgccaatgagtcaacggggtagttgccaaatgccaagagtctatcgcagtacacttctagcatttggtttggtcactgcctcgattaacctaaacatccaacgatctagcaatcctgcaaaataaaagtttaagctaaatgttcagaattttgataaataaattcacaggctgcaaacttcacaaaacattgaaggcaccttcaatccaaaattcatcaacagtaaggaaatgcaagtgcctgaaattgtacattattatgtaaaaaggtagagtagacagacctgttaaagcaaaagtaccgccaagaactgcacaaagacgagtaataaaatggagaaaactacgccgttcttctttaatggtgacagtaatgggtgatagatcatacaagaagtacacagctggaaataaaacaaacaaagctgatgttagtgccaagaaaccaacccatggacaaagtcggctgaactctcatatgcaaatataccaacctggccatgacctatcgaagtctttcattggtgaaaaatactccgtaacagagaactgattagttggtaaaacttctttccagatataacgatactcagttggaacgatctgcaaattgtaaaatacgtacttatatattactatttattcatggctatcaaaaaatatatagggaagtttagagaaaaaaatcatgcgaagaagaaaaagtttgcatcagacaatccaaaacaatcccacaagttttttttatttttttctttttagggaatctatcggttaaaaagaaaaataaaatttcaatgtaaaatccacatccttcaaaacaagaagaaatttgatttttgaacgaagagaaagtaaagacaaaactatatttaaggtatagaagaacatgaagagaaaaaaaaacatgaacaagttacacatagtattgcaaactcaggaagaaaaaaaaaataacatggaccaaaagatggaagcaaccagtgtaaagcattacacaagaaattttcatgtgtatcaactttgcaattaaatggattaacaccgtgattgcacaatacgtacacacaaactataaattcagcaacaaggaaattgtacataggaaagaacagaagagcaagacaagttccaaagaacttccaactcgttggagtagacagaacaaagaatatagcaagtaagcaattaagttgccggtgcaattttctaaagtgaacaattaattttcatgagtaattttcaaaatcacaaacactgttttatatagagaaagaaataaaaaaacagagaacaagttccacagatattcaacctccggaaaacaaaagaaacaaaaaaagaaagaaaatttggattaagaagttcaaggcaatcaatttccatgtctccaattcatgattaaaattacacattttaaatatttaaatcctctaaagaaattaaactgtgtcttcaaacctttatataatacttgaaaaccccacttgcttcacgtagaatccgtgatgtctcgtcaagtggattgtgaatccctggatatttcggcccaaatgacaaatcgtgaattatgtggctcacattcacattcttagatccttcaaatatctgcaggagaaaaagtgtattgtataaagtcaataaagaaaacacaacagaagatgttctgattgaaattgccctggaaaataaagttactacaaaagattaagaaaatgtatcaaagatgaactaaccatttgtgcaacaaaaatgtttaatccatgtactgaaatatgaaagtttccagcaacccgttggacatctaaaaccccgtaaacctgcaagttaaccaaaatgatatgcagttattagggaaaacaaagaaaacaaagcgataaaaggactctcaaatgtagagtgccacgatgtaatacccggcatccttctccatttgccaacgcttgcttcacctttttaatcatattctcagaagtttgatcaaaggctccatccatatgacttccgtggtcggagtgctcatgatcttattaccatcacccaaggttatctatcagatatttgactctctaatacaacagactaaagaataaggagttttaaagcaagaatgtaatacacttcagttgctggtcttcaagcagctaaccttcattagtttaatagacaaatatgaaatgagaactaacaatgtgattagtattcaacaggtgtaaacaatgagcatctttattagtttctttagaaatgtgatgcaatgatctgacaatatggtcaatccttaacaagaaagccagcaactgaagtgtatctgactcgaccaagtaagcagttagtaaagaccccatatcaaatgcaataaaaccaaaatttgtttttgaaaaacataaaagtttgtttgttagttattttgggaggaagcttaccatgtttttgttcatgttccttttccacaaggtcagataaatattcagtgccaataatgtggccatgactgttcaggcgcaactgcagttgtactttagatgttagcataagaaaagaggtgtttgggaagggggcagagagcccaagatactacttgtgacagtttaaaacaattaaaaatactctgcaaactttccatttctacacaaccacatattagtacaagaggtttttctttcctacaactaataataaaagtgatcaatccacatatcactagtcaaaaacagctgacacagattttaagatacatatcaataatgataattccaattattcagtaatctagagaagagctagtcattgattagcttatccaacaagcacacaagaaaagagccattaaagtatcaaatatatacaagagaaccactacaaatgcacagagaataaatgtccaggaacactggcaatatgataattttcaaactataaagaaagcaatgcattattgaagaaaaactaaaaccacttgaggctagctcaagtggccataggtgggcgtgtgagtattggaagtcctgggttcgagtctcaggttaaacatgttgtaatatataaacgcttaaatcaaaaaagaagaaaaactaaagccatcataaccaacttgtctgtatctagagcaaccttagaaagttaaaactaaaactatcacccttcaccaaaagtgtttgcagaaagtaattccagcaactcttttgcaccaataaaatgctgcttactaagcatgcaacaactgtttcacccaaaatgtgtgtattaacttcaataaaaacaactttattacatcatttagagggaatatactctatggtaccttatgttttatagaaaaaacaaaggtttagtatttgtgtttacgataatgcttattagatacactatattttgaaattgtacatatttggcattttaaactccaattttataaagaataaaattttatgaagttgaccgttctcagttatatgtaattaatattaaatttgaattcaaaacacatataagtaaagacaatttaatcataataataaaattgtattgatcaaatttgatttcagagtacagaataccagataaccattattgaaaacacaagtaccaaatgagtacacacacttaattataaccaagaagttatattaccttccaaatgttcgtatcaagatccacttcatgctttccagacatatcaattgcatcaacacttaggactgcgaacaagataacagaaaacaacaactgagaattttcttattacaaaagtgctgcaaaatacaaagattattgcaaagaaaagggagttactacgaaacaagcaaaatggaatgtgctaaccatcacatggtaatgcagggaatgtcatatttatatgaattggaagtgtttctccacgtttcaagtccacagacatctgtcaaattcaaaagctcgttgacattactcttat

SEQ ID NO: 58581 - DNA, 1376 bp, Cannabis sativa
acttatatccgattatatgatacactaatttaaaattcaaatagtaagaagatataaccctaaatcagccatgataaaatgtaacacatgctcaaacacaaaaattacaaataaaaaaatcaaagtgggaaaaccctaaccagggagggcgggcatggcgcaggaggcaacaggcttgggagacttctctacttcgacgaggcacatccgacagttaccggcaatggaaaggcggctatggtagcagaagcgtggaatgtcaacgccggcaacctcgcaggcttgcaagacagtgaagcccttgggaatcttgactgggtagccatcgacgaagacctcgatagcgtcttccgggttgggtaaatggactcgggcacctcccaccggggtccgcggagaaagatttggagtgggctcaggctgagcctgggcggccgccgattggtcggcgttgtggagctccggtgtggaggatacggccctggtgaggaagaaaccatttttgtgggagttgaggagcctagaagctgagggtcttatgactctcgaggctagcgatcccaaccccatttctctacttgttggtggtgttggtggtggtgcgtatgttgtctccttcttcccgactgaggagatctctcagaactcaccaagttgtagcgcagatgtttggttgcttaagattgtcaattctcctgtttctgccgcactaacacaattgcagtcacaattgggccataacttattgggctaggcttcctctatccaacaataagcaatacctactttttcaattctatacttacaatacattttatttataaatatacatcaaacaaatttatttataaaaattaacagtgttacatgagctaacatattgttatacccaaaatttagttgctatctcagtagaggacacgtgtcacgataaggggaatatagatcgatgcaatcgctctatatgaaataactcattaattacatgagtatcacattatatttgtaactcgtagactgtaaggtcttaggcgaggaactaatatacaaactggtacttagcatataagcgagaaaccatatgacactgaatgcgaattgcgaggcatcaaggacagtacatattggaaaacgaaagcgacatatatcaattgcgaaagtccttagtgtacaaactaagtgttacagacggatcgactcaagattaagtaagtgaggtgcctgtctcgttatgggaagacctcatataacttcatcccgttagcttcagcgaggctcacaatcctggcaagtcagaagctagcattcaggtgagttccgaagaattcattgtacataagaaccgtgatcgacatcagacatgcatcgtcgacctc

SEQ ID NO: 58582 - DNA, 2091 bp, Cannabis sativa
  modified_base (1702)..(1702): a, c, t, g, unknown or other
ttatctatttttattatatctttgctaattattattgataagtgtcatctgtcacatgttcatttaagatttaaatttaattttttcttatattattttgatatttcacagctgacagcttataaattatttaattgaagatgttgataaaatctttgtattacttattgtaattgacatagacataattagttttttttttttttttatttagcaatatatatttacatataataaactaaatctggtttatgtattaataaaaattccattttaccattaaaagaacaaaagcttaaagtgtaaagggatataaatacagtaaattatagagtgatgtgtactcatattatgcatgctaattgataatgccttttatcttttgtgtatgtgaaagatcaaagtctaaatgagaaagacaataaaggatatatagaaacaaatcccattttcaatacacttaaaaaaaaaagttcccattttcaatattaatgcttttcacatgtatttatataatatatattatgtatatgaattatgaaaatgatgagaacaattcatatataatacaaataatttgaacaaaagacaaattaatacattttatatgaaacctttttctcatatgttgccttttaattatacatacaaaatcatagctaagatatttatattaataatatgtctacattatatataataaaagttgtatataatatacacacgtcccataaacacggcagaaaaagtatagtatttaattaaaaatatacaacctggaatataatttataaacatacttacatctatactttattattatttttttaaaatggtaaaattatcaattaaactagtagggagagtgtgaaggacctacaccatgtttagttgacattctttagtttaaacacaaaaatatctaataacctacttttaagataaaagttagggtaaaattaagaaaggatgtttttatctttaattaattgtcttctcaattctcatttcttccaaagaagagatatcaacttgtattgatttttattggttgtttatatcattcatgcaccaatagagatcaagtcaaaagggaaaaccttttgttttttcccaacagataatcggattatgaggctaataataataatagagattttgggttttgtctctaatttttattttattaaaagcagagccaaaaaagtaataacaactttccgacatttcttaggtcatattgtagttttgtaatttggcattatatcctcttaatgctaatatctacttaagcaatttgaccttaataattactttagttaatttactggtaatcgtaattatttggtgttaaagagagtagtaccatatatataatttttttttgaacagagtaccatttatataattagtttgatgtgacatgtatttatttatttacattatatagatgtcaggtgcagtgaaaactgaccgattgagacgtgttgtgattatatatcatgggaaagcaaaaagaatttccctagtttatatgggattttggcccccatatttgcactgctccttttgtgggttattattatttgactggatttccattcaaactttggctataaaaatgcaaaatactacttttactcgtgtgactacgacttcaaatctctctgtgtgtgtatgaacaaataataataataataanaataataataataataacaactaactatatatcatgtgtggtggaatcccacgtaaagtaataaggtgtgatttgtatagtcactactaaataggatgtagtgtttttactatcctatctgtctcctttagtacttttctgtttgtatttattagatttcaagaaaaaaaagttaagttgaaaccaacttgataagatctacccatccaaagttaccaaaatagatatatacaataaccattgagtaactttttagggttttgttttttattaagaaaaagataattagatcccaaatctcaaatgagcaaaagcccacttggccacattatgagccgcaaaattacatgttctattgacataaaaaaaattacaactgaaaaacgaaa

SEQ ID NO: 58583 - DNA, 774 bp, Cannabis sativa
attttaataatataagtaaataaaagtaagagaacgattaccttaccattgattctcattacttattagtaatcatgccataagtcaatagaaccaatcctttatttttttaaatttacaaaattaaaattaaattgcttttatttcaataatttaattaaaatgatatatcttacttataaatttattctgatttatttataatgtgtttatttattaattttaatctactatttaagtattataaattatggtgcattgatgtgtctcttacaattttggcattttaaaaaattttctaatttttttttatagtcatgtacattatagttatttaagatatcatgtaaaattttataaaattcagaataatttcaatataaaaaaatgtataaacagtcattttacacgagtataaattactactttttttgagaaaattacagttattttttttataaaattttaaaatttttggttccatgttttatttttatatgttatcggtattctataaaaatacatgaaaataatataaaaaaataacaaaataacataaaaataatatacaaataacaataaaataacaagagtacaacataaaaatacatcaaaagtccgtattttatgtaaataaaatcttaaaaaccgtaaaaatatttaaaattttgtatgactgtatttttgtaatttttttttttttttgttattttgttgtatttatgaaattatctcttttttctttatagatattgttaacagcgaaagtctaat

SEQ ID NO: 58584 - DNA, 1104 bp, Cannabis sativa
ttccaaataattttttacaatattataccaaagtttctaatcttttttttaaaaaaaaataattgccgttataatttatattgggtgggaaagcacttagcttaagacaaacgttcagaattcagacacaatacaaaagcttacaaccttacatttgatgcataaaaaataaaaaatcttattgcacagatatttcattcgagttttcaagaatcttacctaactttgatcaataagaataccaaatatgattatttttagaaaaattaatttactttttttaaaaaaaatactttagttatataacagccacgtttaactattaaattattatttttacttaacattattgtttttagttttataacatggtgttattttatttttattttattagtattagtattttttattgttattttgtatttacatatatgttaatgttttaaatcaattattaattttgtgataagtttaaacttgaggactaaaatgtaagactatattttaaaataaaattaaataaaagttaggatacaaaaaataaaaaagttgtacactaaattagtgtagattaaaaattcaacattattaatgatgtaaaatttgatacgtacacactaatttggtacataatttgatatgtctttagagtaaaataatatgaagattttttatcaatctaataaaatgatgtaccattagaaatgctcttaaacctaacaagttaagaatccctaataaaatctcaatctcacagattttctatccacccttaaatcatgcagaattaatttatgtgcatttataattgtaaacactacaaaaaatgatatattattattgagaaatgttaaaagtattagtggtgtctagtatttttcaatgtattaatattgttattagttcaattaagtatcgagtctgatataatttaatatgttatcttttaaaaaatatcactaactaattgttaagtaatatgtctagatgtactgacactactcgtgttggtgtgttgaataagactcaagtgcattttaggatccaatcttacactttttaatctaataatataacaatgctcacatcgatgaaaaagta

SEQ ID NO: 58585 - DNA, 911 bp, Cannabis sativa
ccattggtgttggaaatttgaaaataatggtgttcatacggtcagaagcgtatatagacatctgcaagtgcttaaggttgcctggtctgatgatcaatcttctaatttctggtgtaccatatggagattgaaagtacccccaaaagtttgcaatttcttatggagggcagcttcgggatgtttgccaacttgcgttcagttgtagaagaggcatgttcctatcagtgttatttgcccagtttgtaatgtggaagaagaaacaattttccatgcgattgttgattgttctgtggcaaaatcttgctggaacaggtcactggttgatgttggcaatgctactgatgtagatttttctagttggcttctggtggtagtgaatcgtgggaggaaggaggagttggaagagctggctatggtggcgtgggcgatttggaggtcccgtaatgcagttgtttggcagcagaacagttctagtgcaacaagtattgttttttctgcaagatcttgccttgatcaatagaattgctcaagaacatagaggattttctctatctcatttggttgttgatgggaacaggtctgagcattggacgaaaccaagagggaatatgatcaaagtaaatgtggatggagctttgttttcccaagaagaacggttcggtttgggatgtcttgccagagataataatggtattctgcttgaagccttcactcttggaaagcttggtctggttcaatctgaggtggcaaaaataattggcattaaggaggccctgagttggatttatagacatggatggcaaaatgttattcttgagactgatagtttattgtgtgtcaaagctatcaagagtaatttacctatgctgtctcaatttggtttgcttgtgcttgatgtgcgtgatttatta

SEQ ID NO: 58586 - DNA, 2562 bp, Cannabis sativa
  modified_base (27)..(30): a, c, t, g, unknown or other
tctggattacattgaaatagagttttnnnnagggcataaaacccaacacatcgaacatgtcgacttcttctgggacaacaatgttgtattcttataggcactggtgggcactaagttttctttgtcactaatggtgctacttgccagacgggcaaatgcatctgctgtggaattcttttctcttggaatttgcttgatcgtgttgcctttgagctaacttagcaagtctttgattttgctcaagtaggccaccattgtatcacctcgagctgtgtattcccaggacttgatacacaactaattgagaatcgcttaatatgtccaagtggtcagtccaaacttcatgccgaaactttaacctcattattcgaggaattgaacccgaatttgattgctccatgtagttgttgcccctaagtgttgtaagggcaatgcctgcatcaaacatttggtcagtgcagctttcgtcaacatagaatttccatgttagttctttgggattttgttcctgctcttgctctcgctttttctctagctctttctgttctcccgagtgttgaggggtctcaagagttgagttggtgcactcagctacgaagtctgcaagggattgaccctttatgactattcttagttggtatgtgatcttgaactggccaagcacaatgacacatctaagtagtcagcttcatgctttaggtttctgcaaaaccttctgcaatgattgattggtgtacacctttatggatgccatgagcaagctgtaagttaccttctccattgtcgattagccttttgcttatgtagtatacagggtgttgtacactaccttgctcccttgtgaggatagcactcacaacatgctatgtgactgttaggtacatgcgtcgttcttcatagtgtaggggattatacaacaccagtagttgggccaattgcttcttcaactcttggaatgtgctttcacattcctctatccagtaaaattttttgtttcctctgagaatgtttaagaagggtacgcatttgtctgtcgacttggacacaaatctgcttagtgcagcaatgcgtccaattaagctttgtacttccttgacagttgtgggcgacttcatgtccaaaaaggcttggatcttacaaattgtaattttattcataattatcataaaatcattacagagataaatacaatatttatatattaaattcactggtaataaagtcgtacatgttcactattccaatggttctttattagcgagctgttaagccaagctaatttgtaaaccccagttctcatgatagcttcaataacatatggaccttcccagtttgggttaaaccactccagtagctagatctcacgtatttgtaaatacacatcttaacatcgaatctccaactttaaaagtcttttttgaactctgttgttaaaatatctcatgataagatgttgataagttgcattggttatttgcgactcattacgcctttcttcaagtagatccaaggacatattcaaaagttcttggtcctcttgattatagaaattactcctgtttgacgcaatgtcaacttctactggtaacattgcttccaagtcgaatgccaagcaaaatggagtgtgtcccatcgctgttttctcttagttctattggcccaaagcacctgtggtagcttgtctacccaccttcctttagcaacgtctaacttctttttaattgtatcttttaaggttttattaacaacttctacttgtccattttcttgaggtctcaatactgatgagaagcttttaataattttattcctttgatagaattcagtgaatgattcaccattaaactgagttccgttgttagatactgttttgattggaattccaaacctacaaataatgttcttaataataaggtgaagaactttttttgtatgtgatggaaactagaggtttagcctctgtacattttgtgaagaagtcaactgccactacttcatatttgctcctcctcatccagtgggtaatgccccaatcaaatcaattccccatattgcaaatgggtatggcaatcattctcaattattttggtggcgtgcgaagtatatgtgaaaacctttgacatttgtcacatctcttaacaaattcaagtatgtctttgttgattgttgcccagtaatacccttgtcgtatgatctttttaaatagactctgccaacccgcatggtccccacaaaagccttcatggatttctttgattatttcattggcttttgctggtaacacacatcgtaagaaaggcatggaataacccctcctgtatcatttgccctcaaccattgtatagcgaggtcttgagtacaagagtttgtgtgcctcagttttgtctgcatgaagtgctccattactaggtacttgacaataggtgtcatccatgttggtgaagtatctatcatctcgatttcttcctcttcacatatacttgggtcacttaagacttcaaccgataccaaattcaatgtgtcgagatcaaattgggatgctagctttgctaatgcatccgc

SEQ ID NO: 58587 - DNA, 755 bp, Cannabis sativa
ccaagggcctcaagtatttatctgtcatgttcgtcctctacgttacacaaggatagggtgagccgtcctcgcatgataccaacctgctcttttatctgaagtcaagtcccaagcagaataggtagggatacttctatttttcccagatcgaaaagaagtggttgacgggcaccatggccaccaaggtgaccaagataggggcctttgtggacgaatactactttgtcaaaggaatgggcactgttcacagcagtttctagcaggtgctatcctattgttgccctccattcacactggagctcaagaagagggcccaaaagattctacaactacctcctgatgcatggaacatcttccttttgacagctgaggccaatttcatcatatgcaaattttttcggccgattttgtaccaaaggctgtgaagaaagtgaaagagactcggcccaaataggagtctacacccaaacaggagactccgagcaaaaggaggaagaaggcccctccaagtagccaagtacctgttgagcggtctatcgatcagggaagagcctgaaagacctgctcagcaatccgcctaagtggcaggaaaagggaaagccatcctgatggagcaggagctagaacactcctcatatgatgagcctccatctttgcttgtttgggagaatgctcctgtctacgtgtagggtattttaacttatatttaagttttatgtattttggcatatatcatacttatttttaaccttctt

SEQ ID NO: 58588 - DNA, 890 bp, Cannabis sativa
tcctaataatatggttaaggtatgctgatatgtattcttttttttttcttttcttttcttttctttcgtttttcagataacttatggccggttatcgccttctactaaaggctatcgtgatttagacctttttattcagcaaattggtgggaaaaagattttagatcttgagaagcaggatgcattgtgttctcgcttgaaagcagaaatgcttcatccattgcgcgtgatcattgcgagcagagggccagatactgaactcttggttgctaatccagttgagctatccggaaatggaaggccgcaagttttctatgatgtcacacttgctctaaaatctcttgggatctgcattttctcggtaaggaagacaagggcaaatcaaacaaacatattttgggaactccccagtagcacatagtagagtttttataaaaagtgcaatgtgccccagatggtcaaattttataaaaagttggtgttattaaggattctgtccatttctttatgttatctgcgaagctaatagatttccattggttacatagtagatattatttgttgatttagaattatgtagtttgtaatgctttctctcacatcttcaggctgaaattcgaaggcattcggcatcagatcgtgaatgggaggtgtatagctttctattggacgagagttgtagtaaatttcaattgtcgaatatggtggctaggaatcagattgtagatagagtcagaagaacactgatgggatggtgagtgagcttgtgttaatttggatggtgaatatgtttccattaagatatctagctatttggctcacattataggaatctatattctccattattgtctttaagatgaggctgtatgcttgtctacttttaatgc

SEQ ID NO: 58589 - DNA, 756 bp, Cannabis sativa
ttaataaaagagatgaattttgaggaaaatagagttgattttctgctcattaccctcagcccaaccgacccctctctctctctccctaattctatttttccaaactttaattttgttggaaattagtgtgaattggtgctaactcttggagcttggatttgggcgttgttcttgctaagttttgaggtagtaattaaaatttttaatttgaatttgtttgctgaaattgatggagtatatggcttgtatttccttgaatgcatgtaagaagaatcatctttgatttagataagttttagcctttattacatgcctatatgttatttgttgagctttagatggaattttagggtatttctcatagttgaattcattttctatttggtgcattgttgttggaaagaaaataaggttgaataggtttgaagctcatgttattaagcttgagttttgatggtgtttgctcttgggagaagcttgttattgtgtgatatttaatctgaattttcagggtatatagtgggttttgatgcatgattatatgtattttaatgccttatctttgagcttgctaattcatggagaataactttgagttgtatgtggatttggtatgatttggatgtgttttgctgttgaaattcgtgattcagcttgctggtttctgggtttggaacccaggtgccgcggcatgacttttagcatgccgcgacccgcccctttgaatggaatctgggagttggtcccaggtgccgc

SEQ ID NO: 58590 - DNA, 1244 bp, Cannabis sativa
gctttggaagaaggaactcttgagaaaactcaaacttctccttcacattcagattgctctgaagacagtcctgtttcagaagttgagaaggaagtaaactccctaagtttaagtggtggacaaggtgatttagaagaaggtggcaatatctgctcaacttcaactgcttcaagcagagagctcgagtctgcaacgaaccttgctggttcaagttcaactgaacaaatggcaggtggcgactcatcttcccaatctttggagggaaagaatggaacagatcagtttacaaaagagacaaaagaagttattctaccagtgtttactaaagaaaagagaggtgtgactaaagaatggagaagatttgcatggaagacgtgtgtttacctcgtcactgctggtatgctgattgcgctactgatgggtttgaacatgtcttggactgtgattacagcatctcttctccttattgtcattgatttcaaagatgccgggccgtgccttgaaaaggtgaactttcttttgccactgtttttttccctcttcaagagttacaagttttaaatttgaaaagcatatctaagtatttttttaatatcttattgaattaatcaggtttcctactctctcttgctactcttttgtggaatgttcatcactgttgaaggatttaacaaaactggaataccaaccactctctggaacatgataaagccttattctgagattgatcatgtttcaggaatggtagtactttcccttgccatacttgtcctctcaaatcttgcttcaaatgtaccaactggtaagctgctgcctactcttttttttacacaaatacataatttatattatatatattaaattcagtttagatttgcaattgcacaaaagaagcaaaattggagaatctttcctttattatcagcttcctcagcttatatgtttgtttgtttgtatggaaagcctgtacttattcctggagaaaatgagttaaaaattgagtagataattgaagttgtaaaggccatatacaaataatcttttgaaataactagattcattttaaatactattaaagttcactacaaagactagttcttaggtccttaatgttttcatataaacttcctgatccattacattatggtctcatacgtacaatgcctttcattaagcatacatctccaatttaatatctcatatcttcacatgtttttacagttcttctacttggaggaagagta

SEQ ID NO: 58591 - DNA, 507 bp, Cannabis sativa
ggttatgtataatgtggctccattcatatcaatacttacactgaagagataaattataaaaaagacaaatacttacactaagtagtttacttatatattctagacatatagcacctaatctccaaataaatatttgctactaagtaattacgaaaaaagttatttattagtttaccaaagaaaaaactaattaagcgatttcgttacatatccggaaagataaaaagattatatataaaatttggcatgaaggatgttacataagcacgtaatttttgttaaaatttgtgggttataattatatatcttatttttattaattatgtttaaataattgttaaaaagaaatatgttttaaaaaaagagtatggaatccgatctaatccaattttttttttctcacctgatccaattcaattagtaatttgatttggaaaatcatcatccgatccaattcaattagacctcaaaatccaatccaatcaaattactaattggattggatcg

SEQ ID NO: 58592 - DNA, 835 bp, Cannabis sativa
  modified_base (145)..(150): a, c, t, g, unknown or other
attaggtcgatctcccatatagcaaatgggtagggcgaggtcatcattctaagttttgttggaggtacgcgaggtatatgtgaaaacctctgacacttatcaaatttctttacaaactcgtgtgtgtccttattgatcgttggcnnnnnntatccttgtctaatgatctttttaaataaacattgccagctcgcatgatccccacagaagccttcatgaatttctctgatgattttatttgcttctgcatgaagaacacaccgaagtaggggcattgaatatcctcttctatatagtttgccttcgatcatggtgtagcgaggcactgaataaaatagtttttgcacctcgcttttgtcatttggaagttgtcactcgagtaaataatttaataggtgtcatccatgtaggagagctatctatcatctcgacgtcttcagtttcacacatacttggctcgctcagcatctctaccagaactagattcaattcatccagatcattctgcgaggctagttttgctaaggcatcgacattggggttatgttctctcggaatttgttcgattttaaagtaatcgaatctttccaagttcttccaaaatttctctaaatactttgccatttttaagcctttggcctggtattccctgagcacctggttaacgatcaactgcgactcactatgaaaaatgagatttttaactttcaatgcctctgctatctttaagctagcaatcaaggctttatattcagcctcgttattggatgtgtcaaattggaatctcagagcatagtaaaacttaaagccttctggcgatattaatattacccct

SEQ ID NO: 58593 - DNA, 1853 bp, Cannabis sativa
  modified_base (1800)..(1805): a, c, t, g, unknown or other
tatactcggtactctagtcatactttagtcatactgatgtgatagcgtcgatctcgtacttgagccaaacatacatccattggtatccagtacaactttacgtatactgatattactaccaatgtaatctaacaggctcaacaaacatgtacactaaacatgtaaacacatattcatatcattatactaatcttaccgtatttttgaattcaggtgtgccggtcaacttgagtaaaactgctgctcggcgatttacaggtccctaaatcacaatattcgtaaaatagatgagtgacacactaaatcactttttggggacttaaaattgaaactaaaagtttctatatcgatggataacatggcaataccctaaatattgcaaaaaggggaaaaactagggttccctaaactgccccaaccaacagatctgctccccaaccggaagaccagttctatgggatttcctagggaccaatcagaattctagttcctacatccactgaactgatcaactagttcagtgcaggaaacaccaaaaacacttcaaatcaatcccaaatgccaccaaaccttccagacctcctaattaggccacaacaagtaaaaatcaagcaataacctcaagtaatatacccagaatccaagaacaccattggagagcaaagcttgagttcttaaactcaaaccttgctcaaacatcaaaacaatcaacaaacctaactcaaatcagcttaattataacctcaaattcacttcagaaaacaagaacaacaataataaaaacttgcagaaccctaattctaaaattcatgcaatattagaacctaacttgaacttaggaaaacataaagagaagggagcttgatggataccttggattgagctattaaaatctagctagaataccctgattgagctgaagaaaaccacaaaattgatgttggttcttggaggggtcgagcaagagagagagaaaggttgaattcttgattttttttttctatttttgaaataaaagggataatacctagtatttatcaaacataatcttaaattaaaaattagaattaaactaattctattgtatttcactaaaggacaaaataactaaatggcaaaagatcatttcgcccttgcacacaccaaaaagcatacttaccacttacgggtgttttgatcatttctataatcttgaatattactgacattttcaatatctatctaacttgccctgctattactaaaatactaaatcataaaaaaatatgattctgacagccaaacatcgcattccaatgtaatcgggcataaaatatgaaaaacataaatcataattaataatctaatttcataattaagctctaattatcagcttattttccatattaaaattaagatctttacactatttgtgtgagagtctactactaaaaagtagtgggacacttgcaccagattatatttttttaatgtttttaaaaaatgatatttacataaattgtcaatatcatatttaaataataaatttttttaatgtttacataaattgtatgaagtgggttagtgctaaaataaaataataataataacaacatttttagtgttaaaagcaaattagtggtaaaagtttagtattggttgttttacgttatttttaattttgatcatttaagttgtcctgccacaatcaaaaattcataaatgcatttctccatcagcagaaaatgggtttgttctatcaaatatcaataatctagtagtgttatgaaataatataaaataatataaaatagatgagannnnnnaagaagaagatgaagagagaaagagaaagtgaatgagaatttctgagt

SEQ ID NO: 58594 - DNA, 890 bp, Cannabis sativa
ttatgttttggttgaacattagatgaatgattgatttaactctcaggggaaaaaggcaaatcaatgggatttgttttgctgagtgtgacccatcctctttttctattataaagttattaaaaatcaatagaatgttttaaaaaaaattagtagaatgtttatcaaaaataaaataaaatagtagaatgtttatcaaaaataaaataaaatagtagaatgtttaatttaatttcccttatttatgttgcataatagtctcagtagtggaaatatatgtaacattttaggtgtatgtgtatgcttcttgtcgaaaaaagtaaaggagagatctgttttataatgttatatttactattgcttaatgaattgctcattactcaaattatacacgcatgagtaatttgagacaaaacacacacaatttttttttcttatacatttcaatcataaattttatatgacaaaagataatttaagtaataaagcgtgtaaaagaattatttctttacaagtcttaaaatgagaacatttacgtataattttagatcttttactaattactataatttctctctgttaaatggtcaaaaatgaatgaacaaaaaaatattacaagttttagagaattttttaaatacttatctataagatacattaatattaaattacaaaataaaacctgagcagtgaaagttacaaatttcagagaatttgttaactatttatcgaaaataacaacttatttactatatttttaattcaaaataatatacattaatattaaattaacaaaagaaaatctgagcaattgaaaagtttggaataggaatgtagaatacaattgatgatattaatggattaattccctagttatgaaataagttctctat

SEQ ID NO: 58595 - DNA, 1048 bp, Cannabis sativa
tatgcgagacttagaatagtgagtactcaaagtatatgctactaaatagacaagaacaaaagtagaaataaagagaagataagagaattatagtggtttagtcagagtttagtcttagtccgctttttataatgatttcagcttggtttatttgatctggatcacctctttatatagaaagtaagtgtcatttaagattacataactgcttagtttgaaccttttttacaataaatatcaatattaaaccaaaataatagtttaaagaataaatgaagaacaattttatccattcttggtttaattacaacaacatatgcaacttgataagtcataatttgtccattcatattccaacactcgagctcgcaggctctacggtgttgtactcgcaggatgagcctttgggtctattttgtttgaatgtctgcattcacctttgatcgcatagtcagacattctgtgttgacaacgtaagacatgcgagtttgtgacgagtcgtcgaacacattagtcattcagactaaacctatgtaaagagacgatctttactcatcacatgagagatatacttgatcatcgcatacaatcgttatatgcgcgactagtattaacttctcttgatcttgcttattctttgactatgcggggcatagtatgttattagaccctatctcaatcggatcttctcgcaagttcatgtcatgcgaggtgaagtgattattctctcttatcacactggttcttgtgtccacacttgttctttttgcggttaataacactttctgtagttaacaacacatgattagaaataagcgcacacttgtagcaaatcatctttttctgcaaagataggctccacgtggtaatttttcatgagattgggctcgtattttctaggtaaaaaattcgcactataacaatagatatttataattttatattaatttttttaaacatactattttaataatatatcaaaatataaatattgacttatgtatttttatatttagttatacgcatttttttaaaaaaattaatttaa

SEQ ID NO: 58596 - DNA, 924 bp, Cannabis sativa
tcctgagaagtaaggcttgacttgtctccattcttcccaaacacaaattgaattaagccatttctgtagaagcaaaagtggaggcagatgccgcagcaagttcatcagtagtaccaggggaagtaggcctagcctttttcttagcagattttccttgaggaggtttctctgggactttgaaagtagtaccaacagtagggatttctatggtttcattctcaagaaccaactcctcttggttagacaaaatcttataaatcaagtgaggaaaaataagattgagtctaggttagttgccctttctaagagaaataatttactcccaaatcatgtaagccaaatcaattttaacaccaatagaaattttttacaaaaagaaggcaagttcatttgaaacatttactggattggagcaagggaagcaattggatagggaaaacctcataagaacaacatggtgataagtgagttgagacatattcattgtgtcggagagttccacatcattatcactagtgagatacccaaacaccttttgacgatcgaatttcatatcagttgtctcaattcccataggcagattgagagcttcagccacatccttcatagtaaaggaataccagtgtcccctgacaaagactttaccaagcataaaagagtcctcaccgaggcactcatcagtgatgttagtataaaactccttcataattcgatcaacatagcctttaaaattgatcaaactatccacccattgtccttctttcaacatgttataaaccccaaatggcttatgagcaatgacattcaaatttttttcaacagttaaattctgattttcataaaatttcatgtctctagcattatcattgtaacaaaaataatgagaatggggttgttcagcttcagacacttcactttcagacc

SEQ ID NO: 58597 - DNA, 1215 bp, Cannabis sativa
  modified_base (740)..(741): a, c, t, g, unknown or other
gggtccaggtcggtgttttggtcttaggtgcaggtccaggtctgggtctgggtcagggtctcagtatggatctaggtcccgagtttcgatcccgacctgggtgtgggactaggtttgagtctaggtttgtatccggatccctatctaggttcgagtctgggtcttggattgggtcccaggtctaggtccaagtccagctctcgctcccagtttgggtacacgatcgtgtttgagctcgagttttggtctcgctttgtgtttggggctaggtcagagttcggttctaggtttgggtccgggtcctggtcacaatcctagtctttttcaagggtcttggttttgcagttcttattcaggttccagttctatctcccgggtctgggtcagggtctgcgtttgggtcctggtccgggttcgggttcgtgtcctggtttgagtccatgatctggtcccggtcacctgtcccgttctagttccagttcaagtcttggctcccaagtctgagtttgggtttgggaccgagactggggtgcggttctaggtcccagccccaattttgtgtcccgagtctggttccatgtttgggtctaggttcggcactgagtctaggtatgagtggggatctaggtttgggtcccgattcgggtctaggtcttggttggagtctggcccctgggacggttacatttctgggtctaggtttaagttccgttttggttctaggtctaagtccaagttcnngttacggttccagtcccgttcccgggtcccggtctacttccagtttcggttcaaatttttgatcacaaggtacggattcgggtccaagtttgggtttgggactggttttggtcgggtcttggttcgggtcctggtcttgttctagttcgggtgccgggtcttgggccgggattgggtccgagttcggggttgtgtcccgatagtcaagttcttgttttcgggtccagggttgggtcccgtctctcgagtttggggtcgagttttgggtctgtatcccagttttgatgcctagtttctagtccaagtcctcaatcaagatccggatcctttgtcaaaatttgtgtccatgttcgggtttggggcccaagtcccccatctaggtctagatcttaggtcctggtctaggttcgagttcaggttttggtttgaatctcaagtttgggtccgagtctaggtcccagtacgggttcaggt

SEQ ID NO: 58598 - DNA, 2638 bp, Cannabis sativa
ttaattattgatatttttagaattatgcatgtatttatttaattgagggtcccattattaaaagtgggcgctaaagttataatttctcaattctggagattttattaaaatctagaggtataatttgagttatatatgaattatgctatttttataatttttacttgtcgacaacaaaaaatatgatggatggccatttgagtcacatgggtaagtctagaaccttttcttagtgggataaatattagagaaatagaaaccgcggggttatggtttttgaaaattttacccctagactttaaattacttaagttataagctagaagaatattttggtaatttaaaaagggagattaggtggctgcatgggagagtggcagctggccacattgtttatttcagcattggattagttaattaagttttatttatcttaggaaaaataaagaaaattaagaaaatcaagattgtcccctttctttctcttccttgctcgaccaccacaaggaccagcaagacttgggatttttttggagtaaataggagaattgttagctgaattcaagtggttttaagcaaaggtaaccgtagaactctaacccttgtgttatttgaagctttgattttcgtttgagtatgcaaattggtgatttagtggctattagggtttgagtgaactgtaattcaatttttaagtttaattttggttgggatagaggtctttctactggtttggtagtttggtgtgatggatgcacaagtttaagtttgaaaactcaagcttggttcatccatgacactttttgttttgtgtgaatttatgggtgctattgcttgtattatgttagttgatgttattataggagttctggaaagtttggtgagatttggacacgttttgagcaggttttggattgtttggagaaacctggtgtaaacgggttaaccagtttgcgaggtcctgtaaaaccagttaaccggttctagggtaggtttcccaaacaatccatttccacgacttgtgtccatttcaaatccttggttgggtgattccttgttgcttagggtattgtagctttagtaatcaatagcagaacattaagttggaggtttcggtttctcagattagggtattggcgtaatatttacccgattatgttatgtgattagggcatccatccggcacaaggttttgcattcaggtcggtcaacacacttgaattcggaaatgaggtaagcatagcatagaacatataatatatatatgggaatgtatgtatgtgtgaaatatatatatatatgcatgcttgttatgcttagtacactaccaacatttgtacggaagtagtacaaagtacatttgtataatgtacaatgtttaagagtacattatggtgttttcagcacaagtacgagaaagtacagggtatgtgtggtatagaacttagtggtactcagggtacgatatataacctaccaacactcgtacaatgtcggtacttagtgtatgtggtacagtggctgtaccctagtaaagaaagtcttactcatttgttaagcctagtaataggtgtatgggcgtctagatacaagtcggtattatattatttgttttatgattttcttactgagtctgtcaactcacagttctactttcatgtgtgggtaaagaaaaagcgaaggctgaacaggagtgagctttaagctaggatgatgttgtacatgtcatggcgacgcgacctagagtattcggtctcgggtcatctgggattttattttgtactcgttgtgtgaccagtgtaatatcttgataagtctaatgcaaaataataagggtttatatttatattatgacttaatcaggtaataagtgggattatgattctactaatttacttcagcataaaatttaaattttgctataagtgagtaaataatcgtaatttgttaattacggagatttatatagcatgtgttaatctaatatgagatacatgttgaataaaaatattttcagcttcggcgaccttggagactcaataagtggatataagcgtaatttgttaattactaagatttatttgaaatacgttgatataatatgagttatttgtgaaattaaaatatttttcaggtttggcaaccctgaagacccgattggaggccaaaaatatcacaacggttttagttagaattattgatggaattattatgacaaattaattttagtaatgccgcagtattttgagatactcagaattaaccaaatactttaaaaatataaatttcttgacggctaagaaataataagataactattaataataatatttttattaatattatatatattattataatattattgatatatattaattaacgttaagttaacttaagtttatatatatatattaagttattagtgaaacagaacgaatgaaaccctcgttctctcccttcgacaaaaccttctcctcctatatccattttcttttattttcaacctgaaacctagggatctaagctcctgtagtaggaggataacaaatctttaaaaagggaaagcttaagggtcgagatcatcggggattgttctccacttgggttggccaaaatgtatgaacctggattaaag

SEQ ID NO: 58599 - DNA, 704 bp, Cannabis sativa
  modified_base (26)..(41): a, c, t, g, unknown or other
aagttcttatttaggatgttaataannnnnnnnnnnnnnnnatctaagatcctggtaaaaaaatttccaacagtcagaccatcaaggttcttgagtaacatctcatccaggcgaaagaagagtccaacgaagagagcatctgaataccttcaagcgatgcttccgggaaagtaattaatatgctttcaaatgtcaaggctgattacgagcttatttaatattgaatcctatcgtattaggacattgttaccaaagtcaggtcacgaaatcatgcattccataaaaggaaatatggtgatcgctaaacacctattaaattttctttattacacgcggagatggcgcatattttccacctatcatcataaagcaaattccatgttgttatacccaaaattcggctaccatcttagtggaggacacgtgtcaagataacgggaatatggatcgatgaaatcacttttaatgaaataagtcattaattgcataagtaacagagtatacttacaactcgctgactataaggtcttatgcgagaaatagatatacaaactgttgtttagtgtattaacgagaaactatacgtcattggatgtataaagcgagacatcgactctgttacatctgggaagacgaaagcgacgcatatcgagggtgataacacttagtgtatgttgacttcgcttttagccaaagacaatgag

SEQ ID NO: 58600 - DNA, 1420 bp, Cannabis sativa
atatacaaaattaagctttacaaattaacaaattttcccaagaatagaaaattataatgactgagaaaaagtgagctattttagacaaagagataggaaatagttaaggaataaaaatgagcacttcccaccaatgtgatttcgcaattataagcataaaattagagtattattgccatggaaagtatataagaagtagatatgtattatgtcatctcacagaatagtattattctagaagtcgatgcttataattatttattattttttaagcctcaactgtattgatgaatatggaaaaacaaatatttaagaaaattattagtacttaaatttgtaataccttctagtgaccattgaccaactccgtcagccagacctagccaattttgggaagcaacaaaataggcatcttctgcacctatgaatgcctgacaattattagtgttttaaattatcgccattagtattgaattcaagcacactatttacttctataatttattaccattagtactgaattaaagcacataatcagacatgataacttttgtgtatcatgaatgtctgtacttgttatagctgcacacactattaaaatatcaaaaaggtaccaatgataaaagacatcagaattgctagatagacaccatattaaaacaattctggagttcacataaaaattgctgcataagtgcatagcaatactattgagaaggactagaactcaaattattgtgttgcacttacaattaaaatgagattaaactcctttaattcactttttaaactaatttagtttagtcttcctccaacatggagcgtatataactgtttttatgttctcctaatacatatttgacttataggaaaaactagaaacaaagatttatgcatatacctttgagggatgagtcaataaagcagcaccagtcgatagcacgagactggatgttgagatttcctccctgcaatcaaagtgaacacataaggaactaacacacgacttctctggattttgataatagcttttcttatcaaaattcaatattgctattcggggttttctttctgcattgtatactatataatcaaactattaaataactggataacttagttctcatgaaagatgaatccattacaacgttacgcgcaccaattaatatggggtcgcaagcaaatcataatgtggcatgtgatacttcagaaatttggtaagcatcaaacaaatattactaatgctgattattgctgcaaggaaacaaataacatctgcctatttttaatgtacggtaaagatgttttagtgaccacctaggcattgaacagatgagtacataaacaaagaatacttatagaacacagctacatgtacactgtaaaatgatagctccatctgtactctggacacttatgt

SEQ ID NO: 58601 - DNA, 1206 bp, Cannabis sativa
gaccctaacattatctaccatcattgaaatgtcgatccaaattacccaggtaagaggcagaaaaggagaaccttggattcttagagaaaaggagcactaaaataggaagtggacaagttattagtcaatgactttgtacgcgaggtgttttatcccttgtggatagccaatcatgttcttgtcccaaatcctaacgtaacatggaaaacttttattgttttttcttatctgaataaggtgtgccctaaagactgtttcccactacccaggatcgaccagttagtggatgcaattgctgggcacgagcttatgtcatttatggatgcatattctagatataactagataaaaatgcatgtcccagatcaggaacatacgagcttcgtaaccaaaatgggactctactgctataaagtaatgtcgtttgagctgaagtacagtgaggtaacatatcagtgattggtgaacgagatgttcgcaaaccagatcaggcggaacatggaggtttacgtcgatgacatgttagtaaaattaataaaaagtgggtgtcataccacagacgtcggggaatgcttaaaaatattaaagaagtataacatgaagttaaacccaaaaaaatgttcctttggagtttcctcaggaagatttctgggattcatagtcaacgcgaggggtatcgaagaaaaccatgaaaaaatcaaggcattgatagacatgccatcaccaacaaagcctaaggaagtacaagtcctgacaggaaggatggttgcactcaaccgattcatttcaaagttaactgataagtgcttaccattcttcaatgtattgcggggcaataagaaatttgagtggatagaagagtgcaaagaggcctttcagaacataaaaaggcacctagcgacgcatccagttttaatgaaaccaataactagagaaacgttactcctcgatctggctatctcaaaatatgtgattagtacgactatagtgcgagaagagggtaagcaccagcaacctatttactatataactagaatgttactaggggtagaatctagatatccccctcttgaaaaactcgctttgtgcctagttcacgtgtctcgcaagctacgaccgtacttctaggcacaccccataaaagtgttaaccaatcagcccttaagataggttttatcaaaacaagatgctttcggaagattgata

SEQ ID NO: 58602 - DNA, 1239 bp, Cannabis sativa
ccccaagcataaaacaatcacaactattggtttacccttcttggaaatgtagcttatatccccctttgttcctaaggcataacctaggaaaattcccttcccggatctaggttctagcttgtcaatagattgatgttcatatgctatacacccaaaagttcttaaatgcattaggttgggggttctattgtaccatatttcgttaggtgtttttaagtttgtcactctatttgggcttctgtttataaggtaggtggcggttgctatagcttccacctaaaatggtttttctaatccagaactgaacagtaaacatgtaacttgttcacagggttcagttcatctttttagcaataccattttgctttggggtcttcactacggttctatgcctagtgattccgaattcttgacacaatttgtcaaattcaaagttaataaaatccaacccattatatgttgtaaagttcttaattttaagttctgtttggttttccacttgagttttccaaattctaaactattcccggcactcatccttagttgctagcaagtaggtccaaacacacctactatagttatcaactattgaatgaaagtattgcttaacggagtgagtatgcaccttgtatggttcccaaagattagcgtgcacataatcaagtatcttcttagttgtgtgccttactggagtgaattttagcttatattgtttccgtaaaatacaagcttcacaaaatggtaagacacaagaatctaaattttaaatgataccttatttgcggttctttcagaccttgttcactgatatgtccaagtttgtgaagccacggttgcatacctgattctagccctttcaccatccatgcttctttggctacgaaagtttctccttggacaacgtataaaccattgatcttttcacatttcatcactattaaggaacctttggtgatcctcaagctttcgtgcatgtacttatattcgtatccttcatcttcaagtgcacccagggatatgaggttttttctaagctccagatgtgccttacattcatcagcaccttgattccaccatcatattgtttgatggcaaccttctctattccaatgatcttgcatgaatgatcattacctattagaacattacctccattaattgatttataatcaaaaactgactctcgactcgggcacatgtgataattgcatccagagtcaagaatccactcccttttca

SEQ ID NO: 58603 - DNA, 1258 bp, Cannabis sativa
  modified_base (48)..(73): a, c, t, g, unknown or other
ttattcaaaaaatagaaaattagacgcaaaacacacacacacacacannnnnnnnnnnnnnnnnnnnnnnnnnctctctctctctctctctcgacccttcttgaaacccagcagaaaatcaaagcttgattactcaattcttggtgttctagaagaatttgtaggattcaatccaaggaaaactctcaagctcacttctctttgttttcttaatttccaagttaggttctatgcttgatttttggagtttgagttttatagtttttaaagatatttgattttactttcagaggttgttttgatgttatttgagttggtttagaactgatttgagtgttgttgttatgtttgagtaaagtttgaactttagagctcaaactttgctctctcatggtgatttttgtttatgaggtttttattcagttcttttgcatttgcatggtttatgttcattatggcttgaataggtgatctaaaaagttaggtttgatttaaggtcaaattgaggtgtttttgtggtttttagggattcctatactaaaccgttcgatcagttcattatggacctgtaggaatcggaaatctagttcatccctagacagacccctcaaaactggtttcccagttgggaatcggtctaccgattcgggtattttagggcaccctaaattttctcatttttatgatatatagggtatttctatgttatctatcgatagagaaacttttagttttaattttaagtccccaaaaaatgatttggtgtgtcactcaccagttttacgaatattgtgacttaggggcctttaaatcgtcgagcagcagttccacttaggttgactagcacacctgaatttggaaaagaggtaagattagtataatgatatgtatatgtgattacatgtttagtgtgcatgtttatgaatgcctgttggattacattgaaatagcagtgtcaatatacgtagagttttattggatactgattaatgtatgtttggcattagtactgaatggtgctatcatatcattacgacaagagtaccgagtataggctgatattatggtcaatagtattatcgtacgaatgttctagactcagtaccgcataggacgcggggatagagttatggttgggtgtatgggcacctaatcgtaatccgggttatttttatgattatgattatacttttcctactgagtttgtcgactcagatttattgtttgcatgtgtaggtaaggtgtaacaccctaacta

SEQ ID NO: 58604 - DNA, 706 bp, Cannabis sativa
atggtgttggatgaggtatagacattgacggtgatggtggtggtggtggtgacactgtcaccgatggtgctggaggaggtatagacactgacggtggtggtgacactggcattgatggtgctggatgaggtatagacactgacggtgatggtggtggtgacactggcatcgatggtgttggatgaggtatagacactgacggtgatggtggtggtgacactggcatcgatggtgctggatgaggtatagacactgacggtgatggtggtggtgacactgtcaccgatggtgctggatgaggtttagacactgacgatgatggtggtggtgatggcatcggtgctggagtatccaatgatggaggaggcatagataccgatggtgatggtggcactgacaccggtggtgatggattacgaggagtggttgggggagtagtaccaaggttttgacattgttttctaaagttaggtagccattgtgcagacttgatgctattagaacaattaaccatattaagaatggtaatgcaacattgtggtgtaacaacatagtgtgttgtaacatcattagctctttgtggaaggcatggttgtaaatctcgaaaggttacatgacattgactgaaggctaaagaagaaattgataatagtaaagtaactaccatcaaaattgaattgaacttcctcattattatttttctttt

SEQ ID NO: 58605 - DNA, 1352 bp, Cannabis sativa
tgtttttttttgtgttttagttatttttaagtgattttcataatatttttttgttgcacaatttcttttattcgtgtgtattttttatggtgtgtatttttagtttattcctgttatttattttttttttttgcggtgcagtgtggtgcgagcagtttgatgaacacgctaacaaaaattacaaggctgatgaagaaagcgagatcatcgtcttgttaagatcacttccaatcacatatcaagaagttaaggcagccatcaagtatggtaggaatgttattgcattggaagatgtttttactgcacttaaattaaaggattttgaattacagttggaaaaaaatttaagaaaagaagtgtacttggcaagaggaagatcacccaagaaagtgagttcgaagagtaaataccatcactcttaatcaagatcgaagtaatttataatttttttttttatatgttcattattgtatatgtaatgtgtttgaaaagttgtattattattatttattttaaattattaatgtttaatttttttaggagttatatgattttctcattggtccaataaagtcctcttctttttttggtggttctccgagtgatctcctcgttgtcagtatattattgttagggtcgtctcaaggtattgagaggcctagggcagaatttaaagcgaggccttttctttttacaaaaatttaaaatatatattatttaaattttgacacaatatcaattttaactcttttatatctccgtataataaatcatcacataattgctagcttaaagcaatatttaattataatatcatctttattgtgggaaagttggagtaaaattttgattagagaaaaatgaagactattatgaaataataggggtaaaattggtagaatgattaaaaaaagaggtaaacataataattttaaaagagggagtaaaaattaaaggcatcaatttaaaagatgtaagtagtttaatttcctctaataattaataaatatactttttatttaagttataatgttgtcattaaatttttaagttataatattctcaataattatttttttgaaataaatgatttatttattattagtgtaattattgattttatccattagtacttaaaaatactactatatactatacattagagtaatttttaaaaatattgtactaaatataatatgtgctccttatcaaaaatatatgtaacataatatttatcttattttttttggtaatgcatttttatttttataagaaaactttattacctccttatagagcaaaaaataaaaaaaattaaaaatattatattatatttgttttgagtaatgcac

SEQ ID NO: 58606 - DNA, 586 bp, Cannabis sativa
tatgcttagatggtttagaatatatattttaagataatcaattcctaaaagaaagtagatatttataatttgtttaaataaaggtatataattatatatttataatagaaaaaatgattacctacgtgatgcatacatattttaattttatttttttaaataagaaataaataagtttaatattaaatttgtgatatttttaagtaataatttatttattttttttttataaaaaataacttatttatttttttgcttgatattttttttataaaaaataacttatttaagtaataatttgttaatcgtttttaagtaataacttatttatttttttataaagaaaaaataaattctcaatcaatttaaaaatcttatcgagccaataaatctcatttgaaagactaaataatcagtttaactagtaggccaataaaataaaattaaatatataattaatattaaatagcttaccatttgtaagctaatatataaacatacataataataaatatatatttaattccttcttgaaccatcaattattattgattgtcgaatgcaccaagtctctctctctctctct

SEQ ID NO: 58607 - DNA, 697 bp, Cannabis sativa
ctattttctttaaaatttggagggggcatcatacacggggatccgatagggcccgataggggtccgatggtaccccataaattttgtatttttggtttttttaggtcgagtctgatgggtgtccgacgggtctgatggggttccgattgtagtgtctgcaatatagttttggggatttttttaggcccgattggattgaagtccgatatgtgtccgatgggtccgattggggtgtccgattatagtctgaaatatattttggggattttttttaggcccgattggatgggtgtctgattgtggtccgattggggtccaatggggcccaaaaaattggtttttttttttttttttaattttgggattgggcccgattttatttttatatgtattgcattgaaagattattttcggtgagatttttgttctaaattgtaattgtatttttttaaatgtatgtgacaagcgtgtgttatgtataatggtgtttgggagcttgatggtagagattgggtttataaaccgggcaaaaatttgacatttaacattgatctgaacgtaagctactcaagtttggttgatcttttgtctgaagaactggatgttgacaaagtggagtatgacttaaaattggaagtaaattacaagtacatgaaaggctatgagtatcgccctaaagttattagaaatgataagc

SEQ ID NO: 58608 - DNA, 996 bp, Cannabis sativa
actttttaatttattaatttttttgatttttattatttaagtaaataaatcaaatctgttttttttttaaaaaaataaataaataaataaattaagtgaggtataaaatggacattatgaaaccctaaagcccaaaactcaaccatttccctcatatctctctgcgtcctttcaaaaaaaaaaacaatatctctacgctcctccagactgacggcaacccttcactgtccaacctttcaccagaccgacgacaaccctttactgtccaacctttcaccagatcgacgacgaacaccatgaacctcgctgctccctctccaccctattgcccaagttatgggctctctcgtctctcaccctcacaataatcgcatcaccgggatcttcaacagccagcgacagtcattctctcagccacacagcggccgcatcaaaccatctctcgacctctctctctctctttcacagtctcaacaactccttctagtcatctttctcttggtaacactgacctgcaacttttaatctcactattacatatatcaataaatgatgaaattaaccaactctttctcatgttctctctccgcaatgcacgacagtgctatccggtcaccgtaggcaaaaattgaagttgtgggtggtctcgtcgagttctgaaggccaatacccttgagccacgaattcaccaccgttgttccacctccgtgaagaagtgcatgcccgattgcttctgtgaagaagctccttgagcagatctaaaaattctgtgaaatttgttttctgttattttctttttgtatttgtgtactttgttttttctgtatttgtatttgtatttttatagtttataaaaattctgtggaaatttatgtatttctttttctattttgattatgtatctatattaattttttgattgttgttttaattataaatttacaaaatggtttgaggtacctaataaattattaatttttgtgtatgtattttttc

SEQ ID NO: 58609 - DNA, 891 bp, Cannabis sativa
ccgatccaatccaatccacacatacttatatatatatatatatattttaaaaattatatatacaattaatattttaatgaaaaatataataatttaaagattcaatatatgatataaatatattttaaaacttaaattaatccattcttatttacaagaaaaatataatttgaaacaaaattaaacatctttatacatataatttttttcttcttgctttgaattttttttttttgtttgttttatttagttaatatttgttgttggagacataaaacaacaataatttattttattttattgttagttatgtaaaaattttttttttaataattaataaataatttaatattaaaaaataaccaatctataatctgcatttttgcagattggattggattggatttgagttactatgtggattcgattggatccaaaatatgaaatttgcactgggtgtgaatcagatgcactatgagcaaaataatacgaattagatcggataaacactcttaagagaccaatctaatacaatcactaaagccacataatttcagcttactaatttgtgaacctccttaccaaactaaagaaaaaaaaattagtaagaacatattatgccaatagaaaaaataatgtaacagtatattgtgattaaaaaatcatcactaaacataatttttttagtagcccctgcaatttctctttacgcataatacataattcaagtatatatatcctatttagactaagagctatagtagtcttctcttgataattggtatacaatatctgtcatataatttataaaagaaatatttgcaccaataactattattattaaattatttaagaatttacccttacctattttaatactcacaatttagg

SEQ ID NO: 58610 - DNA, 766 bp, Cannabis sativa
ctttaggtgcagtcgtttttagagcctgcacacctgagcatcttccaatattaatagtgctctatgtatcatgctatattatcctatccttgtttctcccttcgtttcacactactacccacatccgtgtatttttaattttatatataaataatgaacataacacatgggaatatatatttatattttatgtatgttgccttttattttaatacacaccacatcatgaacttgttacataattattgggtataaaagtaatatatttttcaaaaaaaacattgagggaaataatagatcttgtttcctagcaattcttttataaatggtctacaaaacagtatacatccttgtggaacacccaactttcctaacaaaatttaattagtactgtctttatcagcttgggcattgaatattgtttgttacagtctctgccaactattacagaagcatatcctggtcagagaacaattagttttcctcagttttgaatgagagaaaaaagaaggaaaagaaaaagtacaagatgctaccaatgaatagtttttagcattagattttcattccctagttaaataaagtactattttatttgcccaattactttattccttgtaaatcttttggatgcaattgaaagtaaagttaatacaacttaataagactaatccaaaaagaagacaaaaaggatgtatcggtgacttgggaccaactgatttaccattaccataaattcgaagacaaacacaattttctatggata

SEQ ID NO: 58611 - DNA, 1789 bp, Cannabis sativa
gcaattaaataaattacaattatagattacacaaatattgtaaaattagtccaagtattaacaagttaataaatctaattcaagttaacttaaaaaaaataaggcagggaagaaaaattctaggcttttcagcatcattcctccaagccttcgtaaatcaccgccatcaaccgttctctccactgtcgctgtaatggtaataattcaatttttagattgtatgtctgcttctctccaaactgtaaaaagaagtaaaaatttatattagtttatatatatacattattatttgttaatataataaatattataattaataattaaagcttatagcttacaactttatgatcttatatataacggttgagtttgcacgtgcgacgatgtcagtcatatatttcaaaacataaaaaccacattcttagtttttaggttgtctttgacaatttgctagtgcaattcctgtccacggcccaagatacgcatttcatgcccttataaactggtatgctctgttttaaaaattatattaacatttcaattcattagttaattaaattttttttacataaagagtaattaaattattacctttccaacattttagtaatttgttcgagaactttgtggccacgtatagggtctaaatggacaattttccctagcgcagcgacctctaacatccaatgcgcgctataaattataatataatgtatgtaagatagtataaaaataattttaagttataatatagagtgtttacccgatattccagggaataagaaatatttggtggttgttattcatcgatgataaccaaagggccaatggttgtgatgcattttcaaaagacgcactcttctcttcattgttgacaccattcactacgagaagctctggatcgtaaaacttgaaaattcttctcaaattgttcatgctctcccagatgtgcctgcattaaattgttaaatattagtgttttataataatttcactagaatttgatatataaagttaattagatcaaagaaagtatacatcattccaaacaacattccctggttgccgatgaagtcacacaacaccacctattgcaaatcctctcctgataacgtgatctgggtacgcggtgctatgaatcctcgggggtacctgaattgtgattatatcacgtttatctttgactcttaaaaatttatcaaccatccattttagtgagttagggattaaagccatgatctctgctgtgaataattcatcttcttggtcagcaccgccttttcaagaagtcatgggacctttctccttcgacacaccatgtcttgatggtggttgagctagtgaccctatacaaaacactatataatatatcaaatttgatccttattctactgaatttttggcagcataacggatgaaattgaatgcccccaaaaattttaaacatgcttatataataacaaataacacagatttaacagttgtttattcatccatcccaccacagtatattcgtagaacctacttccctatgattgaatatttaagatattcaaactccactaatcattaataattaatttataacaaaagttaccttgggtgttccaattaggtatttaggccaaggaaggaacatgtttgctacttccttaacgtatctgcacccgtcaattgagattgagatttcaccatcttgttgcagcatttctgaaattagaacctgagcatgtaaatcatcgtagtctttgcagtgaactttgattggaccctcatgttcgtacaaata

SEQ ID NO: 58612 - DNA, 780 bp, Cannabis sativa
aagttcctcgaaagcgtctcttctagactcccaagattgattagatcccactcaggggaaggagagccttgagtttgcgccagcagacaatcccaaatgcctgggaaaattcagatccagcctcccccgctgcagccgataaagtctcaatggcttggctcgaggaggcaaaggcattagctatctaaggaggaggtacgttggtgttgggatcgtctggaggaggaacctgttcttgggtcctggtatcagagaccttgaggtcaatgggctcatacaatgtcttctttttatgggcaatggttttcctttgccttttagagggcaccacctcggcatttgtaggaactcctgggttggttcccctcttcttccctttctggtccataatatcttcaaaacccatgcctgcaagacaaatcaggtgttacaattattaaaaaggtagatgaaaaaggaaagggggactacaattttccacctaagggatttatcaaagccactagaaggtgagctatcactataagagggcgtagaaggactgtaatatccactaaagtccctacaacctgtaatcttaaatatatcaaagggctcaattggttttaaatcccaactcccgtctatatgacttaccctatctgtcatggtgccatactacttggctatatcataatatgactcgtgactgttaatctggacgtggaatctagggtaccagttgtcaaacctatgagcaactcggtctacgagaaaggaattccaaatataaaaattaag

SEQ ID NO: 58613 - DNA, 1532 bp, Cannabis sativa
tcacataatcttgattacatttcactgtgctgacatcacaataaataggaatatcaatgtgataaggatttgaatgaatttataaatcaaacaaataaccatataataaacatgtgaatcaaataacacattaaacaagtaatgaaataaatctatttccttattgataaatgaatattcaagattacattgaaatagagttttatttaggacacaaaacccaacagtttcgagaaaaacgggcttagttcacgtcattaagtcaatctcacacaagtgtaaagttgacttgggggaaaaatgttcactaaaagtagccttaatgacgtggacatcaatgtttgacacgtggcaagaaagatgacatctcgaagttgagtactctcgagtcatctcgagtcatgagtcatagcaaatagcaagtcgacctgggaggggtccctagccctgtgcccaagttgactttaggaattccgaaatagaagttcgaactttgataactcgttttcaactcactatctttcattattatgtaccatgaagacattgagcaaccaaatccaggccccaggagctaaaaatacatgaacctgcaccctggaaatcaacctaggcacctagggttttaccaatgcctaggttgacatcctcaactaggatttcagcttctaagatcgtcttagtgcaaatgggtcaaactttgtattgggacatgaattagacataccacgaaaatatttgaggcatcaaaatcagattcaaagaaagttctttttgagcacccaatgcgcaggttgagaatttgtcaatctgggtgacttctaagtatcaaatcgataatcacttttgcatcatcttcgtcttcatcaaatagggggaaacaagtacttccagggaagaaacaacacttcctggatgctaaaagcaaggcacagcgcccaggttgatatgttgtcaacttgggccaattccgatgatgttttttgagaactcttcagggcatattttccattttcagcaaagattaaggttcaactatttccgaggaccaaatggaacttccaaggggccaaaactaggccctatcttttaaattagattctagaaaaaagtgtcctggacattttttttgtcatcaaaaataataaagattcaagcaaactcggggagaaaaccacaaacctaaggccccaaagctgagcccaacgcccatgttgacccggtgctaggcccagcgctcaggttgacaatcaacttggtgcgctagtttcgatcattcaaatgccaaatttgatctgagcattctctccgtaatggttaaaattagggtaggagacctcgtcctcaagttttagaacgatggaagtatcaaaacaacaacccgaaagctctaaaatgagcaaccagtgcctaagttgataaatggcttggtgcgctaggttctgcttattcgattctgattctgtttcgatcgttcctctaatttttcataacaactaagatccatgaagttagagaagtcaaattcataa

SEQ ID NO: 58614 - DNA, 2010 bp, Cannabis sativa
cccttccaaagctgaaatctccttttcagtagccaatatcctattcgatcctattctcaataggtgaagaggcgaatcccatgaattcttcatcggattccaaggcacacataaattctggcttaaggcacatctctaaatcaatacttccacctccatcacgtccagggtaacacgaaactttcccatcaaacttgttggcgtacccactacggactgcaattgctttccccatcccaaattcacatccatacttgttgaatctaggtgaactccccatcatcactgtgaaaggatcaaaaaacagaccatattgatacacctggggataacaaagccattcctgaagcaactcacgcgtgtcctcattgctatggttaaccacagcctcatgcaatttcctcgctgcccatcccaaatcatgatcaagcaaatcaccagccttgctacaactctttatcgcataaagtacattcccaaagtaattctctgacaatggtggatctaatcttgatctatcattcgttgctaacttgcaagtagttacctggtcaggtggtagattgcgtgctcgtgttatggacctccacacaagtgcagacaaggactgtaaggaagagattccgttactacagtctacattggctctggctttgagtctcgctattgattcaactgagaagtgaaagaatctctctcttaatagaggtgattcgaatcggccaataaactcatcagggttagtgtaagggaggttgatgattggaccatgaccgtctggaaaccatcgtttcaaaatgggtgggcgagagatagagttaatattattattaccactaaactcttgtgctcgaaagatttcagaccacatgttgaagaagttccaataggaagttccatcaccaacggagtggttcatggaacagcctatgaaaacaccatcaattagctcagtcacttgaattgaaagcaggctcattgtgtggccgtcatgactaacagctttgtgatgatcaaacaacgtttgcacaatcttacaaggcacatcagtaggggaaaggatatcagatattgttaggtctagagttgaatatatgaatttggctccgggggtgttattgcaatccacataaacaaggtaggaagatgggttttctgttttgattgttttaagtcggcctgcaagtgggtagaagtgaaccaaagcaagggaaagagagttcttgagcttgtctagcaaggattccatgaaatcatttccttcttcttccttcgcttcatcattataaggtttagcaaagagaagacccttctggatatggtgaatagagagcatagctagatcccatggcgtcaaatagaaaggttgtttggaatcttcagggacatactgaggttttatgaaacactcactcatgtgttgaactctaggattcctcttcatggtatgagttttattttcaatatgtttcatcacatttagacgaatttaccttatgttttttcttgagtatcaaaagaaaataatgcattaatacattataatatgtatttttttaaaaaaaggaagaaataaaataatagaatatttcttattcccaacactattttattattttctatttttaatttactctaagttgcaaacttgcaaattgcaatcacttacatttgactttatccttgaagattgttggggtaacgaaaatgataaaatttatatatatagaaaatttgtatggtaggaacttttatttatttattattattttatttattttttttttttaaagaaaacaagttcattaatcaagagaaaagtaattgtgaattacagggggaattctcttcccttgaaaaacacctgactcatggctagacaatctagctcttttggccaagccatccgcaacagcgttaatgtctctaggaacataaaagaaactacagcctgaaattacattcaacaaatctaaggctaaaagagaaacattaagaaacctccagtca

SEQ ID NO: 58615 - DNA, 2275 bp, Cannabis sativa
ctgaacctcacttctgttatgctatttacctaaacctcacattagttgtccactatgatacttaactaagattttttgacagaggggtaaataacataatagaagtgagatttatctagttttgccccaaaaaattagtttttgtggttaagtattaaaaaatgtaaagttcgaaaaagttttactgccaatattacttattaatatcattgtataaggattttcgttgttgaattttcgtttttacttggccttttgcactaaaaacaaatattacgagcaacaagcaaaattacttgaagtatgtacattctctaatattttaacctcataaattgaaattttggggataaaaccctccgaacatcattgttgttgtaccaattacctttccatttttataagtgctaaagtagattttaattggaacacgtaattttaataattatagaaattaattaaaaattttgaaataataaaaaattaaaactattctttgggtaaaacagaatatcacacccaatgccacagttaacttcataaataaaaaatacaagaataatttataaataatcaatatgatgtgagataatgaagttgaagataaagtagtagaacaggtgtgaatgcttctttgtgttgttgctttgattcttattattgaaatgatttcatctgagttttttattattgctttgtagtctcatttctataacttgaaatgattcgatttgaataccctctaaaattactatttcattcattagtacgtacttgagagttttggagaatgatgactttataattgagatgtttcaagacttgcttactttattttatatcttaacttgtttgaaccatgaaactttgttggagccatcactatctaatatattggttgtattattcagaagaaaagaaaagtcattgcttgttaggttcattcattattagccataaaactcttatctttaagcgttggacattttaatattacatcaactctaaaccaatactacttttgtctaaattctaaaatacatccatacacttgttatctctttctctcttccaagatctgaaaccatggctgacttaatggtgggaggagctcttctttctggtttgatgaatgttctctttgataggcttgcttctaaagatgtccttgaattctttcgaggaaataaggaagcgaatcttaaaaagttgaagactatgttgcggtctgctgatgttctactcaacgatgccgagcagaaacaacttggagacaacaatgtgaagaagtggcttgaagatcttaaagaagtcatttatgaagctgatcatgtgatggacaagataaacactgaagctttgcgagtcaagatggagaaaggtgaactcgaaagcacaacaagtaagtccttgagctttttgaaaaagttttataatccatttgaaaaggaagtgtcatctgaagtagagaagatccttgttacattagatgatctcttagctcagacaaaataccttgatttgaaaagggtagacatgaaaacaatattactagataaaccacacgctcctttgctagatgattctgagttttatggaagggagagagatagaaaggctgttttaaagctagtcttgtcttgtgatgttgttgaccctaagatctctgttattcctatagtagggattggtggtattggcaaaactacacttgtccaaagggtatatgctgatgccactgttccacaacactttgacttgaaagcatgggtaactatctccgtcgattttgatgttttaaaaatagctaaacttatttggaaggaaatctccaaaaatggatcatgtgacgcagaggagctgcatcaagttcaaaatgaattgaaaagtgcattgacagggaagaagtttctttttgttcttgatgatgtctggaatgagaattatctgttgtgggactctttgaaaagttgcttccaatatggcgaacaaggaagtaagatcattgtgaccacgcgtagcaaagatattgcattgatgatgaagataaatgttcaaccttacgagcttaaggagatgtctgaagataattgttggaagttgtttgcagaacacgtcaatgagggacgcccagaattcgaagaaatcggaaagcaaattgttaaaaagtgcaagggtcttcctttggctgtaaagtctatggctggacttttacgatctatgcctactcatgaagaatggaggcatgtactgcaaagtgatatctgggagttgc

SEQ ID NO: 58616 - DNA, 866 bp, Cannabis sativa
atatatccaagcgggagatcttataagttatctcgattaatcctctcagttaatacatcttttcccctaatcatgcgacgtgtctttttcctaaaagggtagataatatttaccccctaagctttcaggattctctaagttatgggagcttgccatatttccctggaactgaccattcacacgtgctgacgatcaaggtcacagatgcatgttttgtataatctgtaatctgctaaatgtcgataaggtgttagtatctgcttgcgtggcaatcatacgacgcgttaaagatcttggttaattggttcctttggcacgtgatgaggcgcattcgtcaaaaaggggaggtgcaaccgatgactgaatgatgtgaagagagtcatctttatggtttggtgggccctagggaaatcatgctggcccttttagctccacaaccatttgatcttttacaaatctaaaccattgatcctaaaggccgattttatttttgatgtataaatcatcaccaacgacattctttttacttttcccacactaaacttcgagtttttcccctgtaacttttctcttctttagcccacttcattgcattcaagaacagtgtaaaagtttaatccaacgactacttaatatccgcacaaagcttttcgcaaataatcaacccctccaactcaatcaattagattttccgtcagacgaaactttcaatttttaggttatctgagactactacatcaactaggtttgaagctttcaggcaagtcttctcggcacccatctctgctctccctattggacagtaagtacgttaaccctttgattaaacttttggcatttcatgtctagggtagaaattttttgtt

SEQ ID NO: 58617 - DNA, 1074 bp, Cannabis sativa
  modified_base (1037)..(1046): a, c, t, g, unknown or other
ttcctcgatatttgtgttattgtttttatcgacgacatccttgtgtactctcaatcaaaagaggagcatgagcaacatctccggatgcttctacagtggcttcgagaacataagttgtatgccaaattcaagaagtgcaagttttggctatctcaggtgtcctttcttggacacattttcagcaaagatggaatttaagtggatccaggcaagatagaatccgtcagggattggccgagaccaaaaaaagttacagaggtttgagcttacccaaaagaatcagcagtttgtgtggacggacaagtgtgaagcaagttttcaagagctgaaacagaggttaatcatagcttcagtgttagccctatcttctgataaagaaaagtttgtggtttattgtgatgcatccagacaaggtctggggtgtgtactgatgcaggctgatcggattattgcttacgcctctcgtcagttaaaagaatatgaacaacgatgcctgacttatgatttagaactttccgcgctagtgtttgctttgaagatttggcagcattatcactacggagagagatgtgaaatttatactgaccataaaatcctcaagtacttctttactcagaaagactttaatatgagacagaagcgttggttagagttggttaaggactacgactgtgaaatcctttaccatcctgagaaggccaatgtagtggctgatgccctgagcaagaagggtcccgggcaagcaactagtacgattcagatttcaccccagttagaagaggacatggtcagatcaagcatcgagtttattgtaggcaaacttcataacttgacgctgcaatctgatctattagaacgaattaaagctgcttagttaactgatctagaattagtgaagatcagggaagaggttttagctggtcaagccagagattttacagtatcagatggtgagatgttgttgttcatgaccagagtttgtgttccaagtagtgcagaacttagaaacgagattcttgaagaggctcataccactnnnnnnnnnntgcatcctggcaccaccaagatgtacca

SEQ ID NO: 58618 - DNA, 597 bp, Cannabis sativa
tgccaccacctacggtggagctccgctaatgaacgtctcgaacagtaggagcccttggtattacaaaccttgtttcgagctctaaaagctaactcgagactcataaatattttattcttttattttcgttgattgagctcttttgggggtaattagcatctcagcaaaattcttactcaactggtttggttgagtggagaagatgaagtttaggggtaattagagttttgattttttttttctttttaagtgttttattttttttcttcagttcagaagaataagaagaataagtgttttattttttgtttattgattgtagtttttttgtaacttgataattatttttagggttgtgtacgaaatgatcttatctgttgttgttgtttttgttgttttgttaatggaactgattctattatatcaaaatggaaattgttgaataatatgtgaacaaaataaattaaatatatgtatctacatatacaaagcaacacacatacaacaaaaaatttttttgaataaactaaaaatatacaccataaaaaatacatatgaataaaaaaataacaactaaaaaatattattcaacaaaaa

SEQ ID NO: 58619 - DNA, 1453 bp, Cannabis sativa
caaatcgaatcgtacattcccgtgattctaggtaacccaaccactaactccatagtggcatcctcacacttcgactcaggaagtgccagtggttgcaataatcctaccgttctctgatgctcagccttaatctgctgacaagttaaacttcgggatacaaattctaccacatctttcttcatcccgcaccaccagtagtagggtcttaaatcttggtacatcttggtaatgccaggatgcagtgaataaggagtggtatgagctctcaagaatctcatttctaagttccacattacttagaacacaaacgttggtcttatacaacaacatctcattatctgacaccgtaaaatctttagcttgaccagctaaaacgtcttctcaaatcttcactaattccggatcagataactgagcattttaaatttgttccaatagatcagattgtaatgtcaagttatcaagtttgcccacaactaactcaatgcctgatttgaccatgtcatctgctaactgaggtgaaatcttaatcatactagttacctgcccgggtcccttcttactcagggtatcagccaccacattggccatcccaggatggtaaaggatttcacagtcataatccttaaccaactccaatcaacacatctgtctcatattcaaatctttctgggtaaagaagtatttgaggctcttctggttggtataaatctcatatttttctctatagagataatgccaccaaatcttcaaagaaaatactaccgcggcaagttctaaattgtgagttaggtatcgctgttcatattcctttaactgacgagaggcataagctatgactcggtcaacctacatcagtacacacctcagaccctgtttggatgcatcgcagtaaactataaacttttctctatctgatggtagggctaatactagagctgtaatcaatctcttttttagctcctgaaagcttgcttcacacttgtctgtccataaaaactgctgattctttttagtgagttcagttaggggtgtagagatcttagaaaatccttctacaaatcgacaataataaccagccagatccaagaaacttctaacttctgtaactgtcttcgatctcggcgaatccccgacagattcaatctttcatggatccaccttaattccatctttactgacaatgtgttgaagaaaagacacatgagatagccaaaactcacatttcttaaatttggcatacagtttaagttcttgcagccactgtagaaccatctaaagatgtagctcgtgctcctcttctaattgagagaacacatggatatcgttgataaatacaataaaacagatattaaagaaatccttgaataccctattcatcagatccataaaagctgcgggagcgttggttagtccaaaagacataactaaaaattcattgtgtccataccta

SEQ ID NO: 58620 - DNA, 674 bp, Cannabis sativa
aactaaaacagaactgcccattaaatgatgaagagtcaaataactcaaaagtgtagatccatacaaactttatatatacatatatatatatatttatatattaggcaacatcaccaaatatcaatgactacaaaatagtagaaatttacaaaggaatataaaaataattagtttaaaaaccaaacaatacaattgaagaacctctaacatttataccaaaatagaacacagaatagaataaaaataatcagtggcatttaaaataaggatgtaaagtttatcaatagacacaaaaatatagatggaagtacgttctaaataacattgaaactctagctttccaaatagagagaggaaagcaataaaaaaatttagtctaaaaggtcaaaaccaaatggaattaggtaaattaatcttttttgttaaatctagtatggaatatcactgatgctaccagcttcatgttttcaactttcagcagggagtatttagcgtagttattttgggttagaatattttcaataattagatagtctagatactcataatgatgtcaagttgaactattttgaatttgtttttagtaaatacttggcttagtttttgtttgcaattttgagttgatacaagtatggaattaattctctacgtgcaataggtgcacttttaaattt

SEQ ID NO: 58621 - DNA, 1615 bp, Cannabis sativa
cattaaggcccaaatgaactttacccagtcccacatacgaatattagaatcaataataggaaagatgccccaagaccgccataagtgataagccaagttgcactggaggaataagtgctccatagtttcagtctcattttcacaaataaggcaaagtggagtttcgatacgacatctcttgttaagaattgacctgataggcagcgcgttagaaatgatacaaaatattcttcattaaaataaatatttcttaatctaaaaagattgtttcaagcaaaaaaagaaaaaaaagaaaatacaactcgcaaataaagaagaagtgcttaaacaatgcttatactcttacttttagtagtaatcccacattgtttagaaagtatagtgggacattacatatccactataaataaattaatttttaatataacttaatcactaaaaaaatacaaaaagtatggtcataatcactaagtcaaacgcataaaagaaatatcaaatatcaaacacataaaagtatctctataaatttcgatatacttcttcgttttctttttcttgattttgtttcaaaattggttttgaagtctttattgttctgtacttatcgattcttgtgctttgtagcttcattagagctatttatacttgatataaatctgctcttatcatgattatggtatctgtttttggcatttgataattgtataggtatacattattgtatgatagtataataaaatcttattgattgcttttaactgctaaacaatgtcaagaaaaatctgaggaataggcttgaggcagtcaagacttggatgggaaaggctgcaagaatttcaatgatcatgcaattggtgggcgtatctttgattcagagcattgttgacaacaccttgcagatttcgtggaaatttaggttgcttttagtagcctatcaagcagtactgaccataggctatcctctctggttcgcttacacaatttatcatgttgaggccgctcgaagagttttcgtggagtttgttgagcatccaagagtgagtccttacattatttttcatgatgttgatcaacacgcacttgaaagtcacatcccaaagtacacgtgtattttcgtgtcttacttcttggtcaactttgtgggactcctgcggctgatttggtagtttttctccaacaatttaaatgaacactatttcatcaactcttttagtgttgggtatttgataagggaatttttgatatggaatagaaaatttagccagtgactttgaaaaatatttgcactatatattaacttttgttcaaagtttacatttatattttgggctaaaatgcaaaataaatttaaatttaaaaactaagttagtaaatgtctttttaaagaaaaaaaatagaaaagtgactaaatataataaattaagtaataaaaattataaaaatatatttactacacattattttttttaaaaaaaatatataataattaaattaagttacataattatttagtattgcatattattatattgtaacaaaaataaaatatacatatattagatcgttaaatatatacaacagtatttaatatatcatatcactgaaaattaatata

SEQ ID NO: 58622 - DNA, 941 bp, Cannabis sativa
attttcatgctcaaccaacaattacagccaaccactgatgcttcaacatcaaaaagccccaacattaataactttttttataactctaaattcgaatccccaatttcttggattatagacagtggtgctactcaccacatttgctgcaatattagatgtttttcctttataataaaatcaaacaaacacaaatatgttacccttcctaatggaacaacagttcaaattgaacttatatgcactaaaatatttgttcgaacttattttactaggatttaaatttactaacatgcatgttgattataaaactataatctaacatcctaaatataaaatttcttaaaataatgaaataaacacataagagattgaaaaatccttacataaataccagctgaatataatgactccattccattcagatctctagcccttgattcctgtctgtagcagaacattatcaagatctgaacttggatcttctctctttcaatttggttcgacacagtcttcctcactatgctaggtattactttgacaagtgtgggcatactctcaataccatggaccacaaatttttagtgaagaattacttagagaataatagatagaaatattagattccttttgattcagtttgttagacaagagagagtctagagtcatcatttgaatcaaaacccttaatgttctatttatgggaatttattaggtttagggttagagataactgggctaagatgaaagatccaatggcttagaatagacaactcatggtcgaattaatccctataaggcccatgagttagatttttgctattattttacttccttaatgagacaaacttatctttcttcagtaatatcatttttttgctctagttatttaaatactaattctatctatttaataattataaaataaaattactatttaaata

SEQ ID NO: 58623 - DNA, 948 bp, Cannabis sativa
attttttaaaacaaaaaacagaaaacaataccaaacatgctctaatgttttgtgcactagactcaaacaaggacattatctcgaattagtcttattccattttaggctcaatcgttcataataaatttgtgcatgtatatagatagtgattagtaaaacatttttaatattgttagaaacaatccttcagtgatcctacctatatatacctaatacaattcattaaagcacaacactgagaaaccaaaagaattatgaatattgattattagatcaaagtaaacactgcttacattacataattataattaagaaaagaaaagcttgcaacacaagctcaaatcccaaaatcaccaactcaaagaaaagtaactgcacacaaaaacaaccattcgcagagcctttttaccacactgtatatactagctagggctagaagcaaaaagcttctgtcaagcatattgaatagattagcaaaactaacttctgtagtttcagccgagatcacaatttggtatgtgatccaatcccaacctctatgcagcaagaactataattaaaatgagtagaacgattccaaaaatcaccaagagcaagcaagcctgcataaaaacataaaagggatctgaacattccatcgctgaggcattactaaatacaaatccaagtagaagagcatgggtcacagatttaccagagatgaatttgatctttgggtctttgaagcctttacaagttgtgacttcgcctgtgcggtagccgcatgagaaccgtcaatattggatccgatatcatctacaaaatggatatgctttacataaggaaacacaagcctgataaaagaaatacgtatggatacgaccttatatcaacggcaaccataatatctcgcacaacagtcaaacaaggaaaacacagagagcaataaacatgtattcaatagaataa

SEQ ID NO: 58624 - DNA, 646 bp, Cannabis sativa
tcgtatacattaaaatctgaggttgtagtattttcagaaagttagtataatacgaacacctaaccctaacaaattaaccaactacagtgaactaaattattgtttagagttttaaatacacttgaaatatattgtgaaagatttgaaaagatgttattaaacaatcatgacattttgaattctaagatcaaccttactattaatgaaattatatacttctaatttatttattttaataataattttacaaaagtgtaagtctagtccgttgttttggtagaaaagaaactatatttggtagagaaagaaaatctaaagaagatgaaaaaaatataaatgaattagttattttttccatctattttttttaaagcaaaaatttctctgtcatcaaacacatagcattctcattcaagaactttgttgatgttgatatttcttttgttgtccatattgtaaaaaaattggctaatttttgtgctcattcattgtcttaaagcaaaagtatgacggtctcacttatttagctggttttttttttttttttgcttttatttctaaaatctttgtgtttttcttttttaccttttcaatgaaataatctttgtagtacacattaatggtgaagtatattcacttaaactaa

SEQ ID NO: 58625 - DNA, 1654 bp, Cannabis sativa
  modified_base (1588)..(1589): a, c, t, g, unknown or other
aaataataaatcttatttatgacaaaattgaaaaattaattttggaccttaaaatatggctcacatgtgtaggcccaatctacacgtgtagagtgacatataaagacccatgattaatttgttttgattgttttattggttaaaattatgtaaaataaattaagttaattatcttttaattattaattaaatgaattatttgataattgtttaattaaaagaataattattaaaataaaaaatctactgatatttgatattcagttattaaatatttatatttgaattttaattttaattcaaatcaaattagatatttactttattttaaataaaggataaaaaataatttatttataacactatatataggatatatagtaacataataaaaaagactaaaacagaaaaatcagaaccctaaacaatagaaagtaagcacctaaaagcaaagaaaaataggattgatttttcactccctattctctctctcatgcgcccactctctctctctctctctctctctctctcccctctctcacacgtgtatacaactatttaggtgtgtgtgagatcaaaaccctaactctattatagtgtctcatgagttgagtacacactataatacctaaatttgttcatccaataagatctaattgcccactctattcttgagtattgaggttggcttggaagatcaaggtgtggattcttcaacaaagttcttggattggatgttcgaaattatacgaaaagaaataaggatatcctgataggcttcaagaggtataatctttctttcagtagtttagatttaatctatatatattatgttgagatccttgggcttatggttcatattatataaaaactatttttatcaaatttcgcttccacttttataactctgatatggaccataaaaactaacagtgacttgtattgtacggagaattaagatcactgaccgtgaataaaatagttagcgaaattttaaagttatggaatctttaatcaacgtttgttattacggcttattgatgctcgttattttatgcaattaatctcgattcgaatagctaatgtaatatgatatttaagtgaaggtattgtatataataaagattatataggacatggactgatatgtaattaagttttctttatcaaacatgctgtttactttaaagaactaatacatatcacaacaatgatcaatagtagatcaacctgaatcttgagtaatcataaactcctgttcatgttattagttatcgtgattcactcattaaaatttctcaaagaatatgattcttacaacttatgttttgggaagctaataatgtggatggctggaaacttaatttacaatcatggaatctgtaaacccgtaaactttccctggtgatgtggacatcaatgacatgaaagataacatcttggagttgagtagtcccgacgtatagcagtcgacctaggaggggtccctagccctacgcccatgttgactccgggaactttggaatggaagttcagattctgttaaatcatttccaactcactttctagttgggttttgtgccctaannaaaacccatttcaatataatagatttactaattaataaagattagaaatcgcttttatgttgcat

SEQ ID NO: 58626 - DNA, 1162 bp, Cannabis sativa
tttttttttagttctattggtataaagattcatttgatttctatattttaatcatgttataaatgctataagagtagatcactaaaattgcatatacacatccaatcattctcttttttgagaaaacgtttctttgtatttatttatatgatgaagtcacctattttataggattagtttcaagtttcaaaattaaaattgtaatttattctatgattagtttgattgtattgatcgaggtaatgactccttaatagcccaatatgggccttttgtagggttgaacaaaggatatgttgtgaccaacaaagaattagctccaacgccttctcaccgtaaaggagtaaatctattttatgttctttcatccttgagacatgtacatgtacattaattttgacttttatattttgtatgggaccaatgttataatgttaaaatagtggtttttaattggttatatgcattttgtcaaaaaacttgattagggaagttatcggactcgccccatgtgaaaagaggattactgcgcctctaaaaggtatcaaggacaagcttgtgctgaaaatagcaatgtacatgaactattgtaagaaaagttaataaaaaagttatgaaccatgtcaactacatgcccatatttttggagtttataatgattcattggacaccaattacatacaattgattcatttttcttctaaataagaataattgtagattagatctttttgtttttagtttatatggttatttcaatgcatcttattatactagattattaatatattttttaggtttaaggttcactttcgattatattattcttagtaagtagttattttatttattattttttttaatgtttatagtctattcataccataatgattataaatatcacttgctattgactcggggtgtaaaatcttttaactaattttattttgcctcttgatatcagaataaaaaattatgtcggtggcaaattattcttatgaaaagtgtaaattttttcaaaattataatatattaaataaaattatgtatataacaaagcatactataattataatctagtatatatatatatttaaaatgcatattaaaattttaaatgagtagattcggagattgagaagccatcttctaaacatacata

SEQ ID NO: 58627 - DNA, 584 bp, Cannabis sativa
gcgtagtcctggttcaaagcagggcctgtgtctcctttttcggtgaagttgtacagcctccggaacattaatggacaatgtgttactccaagagtgtgtgcacctgtaatttgttattattggggtcagattcaagaaaagtgcccacatatatagttaccaccatccttagcaacttttatagtcaaaaatctagattgcaaatcatgtattttgaacccccacagatcaatagaattgaggctgagagttctaggattgtcaccgacctttaaatgagctatagtttgatttcgatcataagtccctgcccgtaataacctgttgaatgtctacttcgtgataaaattgaaataagaatttattttgatcgagttgtttgacataaatacttctgtcgggcttccacaggtcagccagcaaattttgaaagactcaaaaatcaaaaaccttacccgtgagaaaatgacctacgaggcaccatctggtatcgatggcctactcttcatcttcttcttttgcattttcctcatagaacgtctctagctttcttcttcttcaattgaatggctctccagcgatct

SEQ ID NO: 58628 - DNA, 1239 bp, Cannabis sativa
tctctctctccctaatctctgcgattttcttgctgatcgtcactctcagaatcacatgattagcaagtgcgattgaccactgcaattcgatctgcaaaccgaactcaaatgcaaggataagacaccgcaaaacaatctccgaaaccagaaacttcatctactgaagacagagcttcagcaacgatcgccgcctccgatcatcttctctagctccagtaagttcttcaattccttcttatcatcttcctcatctgtagaacttgaaaatcaatgctcctaaaaatcgaaaaaccagaaaatgaaacatcaaacagaaataaacacagcaacaaaactccaacaagaaatctcagtataaaacttaataggtatataaacattacaggtatacaagaatatatatatcatttggaaagaaaatgaaacacggcattttgatgaacatatataaaaaaaaataaccggttaaaacaatagaaaacattaagaacaaccgtatgaatcacatacataataggcaaaaaaaaaatataccagaaccaaaataaccagttaaaaacctaaattagacaaaaaacataaaaattaaatgaaaccggttccaaatacaaaaataaaatcagattctaacaaaacatttcatttaacaatgcaaaaagaaaacaaaattaaaacaaatacaaaaatatatataacataaaaaaaaaatcagttaaaacttaaaaaccagataaaaaacttacctataacattgattctctaaatataatttaaaaataaccggttccaaataaaaaaaatataataatattataatattacttttccataaaacagttagaaaaataatgaaagtcacaaataacaaaacataacagaaaaaaaccgcttaaaaaacattcaaaaacttaaaaaacagttaaaaacatataacaaaacatacaatcataaaattaaaaaaaaccagttaaaaaaaaattacacttatattttaataataatttttctttacaaatgcaaaaaaataatcaaaaacataaatgacaaacaaaaatcaaaaaaaccagtaaacaaaaaaaaaaaccagttaaaaacctaaaaccaaaacaataacaatttaaaaaaaaaatccggttccaatgaaaacattataataatattctgatattacttttttttttttctttctaaaattgcaggtgtggaacaaatcatgtgtgtcatcaaatatgggggtca

SEQ ID NO: 58629 - DNA, 988 bp, Cannabis sativa
atttattttgtttactttattaggaaacgtaatcggaatgcttaaattgactaaattgtccttttgagttaaactatattatatggtagttattttgtaagacatattttaacagataatattgtcattatatatttaatattaaaaaataaaataaaaataattaaaatttattaccctaatagcatgtttactaataagtaatgagaatcaatgataaggtaatcatttatttacatttgtttacttacattattaaaattaagaaaaggaaaactcaattaaataagggagagaagaaagggagaacttctcctaccaattttaattatttttatttaattttttaatattaaatatataatgacaattttatcctttaaaatatattttataaaataactaccatataatatagtttaactcaaaaggacaatttattaaatttaaacattccaattacgtttcctaataatgtaaataagataaatcattactatttcatttctaaaaaaatttagtaaacaacatattacaaatattgatttcgattatttttcatttatttcgttacatttctctattaatttattccgattctgaatactgtatagtaaacgttccttaatggcattccttacaaaattagtgaaggcaagttctcttttttctttttctcctctatttaattaagttctctaatttctaattttaataatataagtaaataaatataagagaatgattactttattattgattctcattacttattatatatgttattaatcttaaaatataaattttatttttattttaaaaatattaaattgaaaaaagtttagaagcgaaaggaattccaacatatttatgtgttgacgtgttgtaaaggattaattgaaaaatgtaaataatattttaatcctataatttattaattggtgatgtgtctgtgttttgtgtaagtataaaacacaagagaaaataa

SEQ ID NO: 58630 - DNA, 2250 bp, Cannabis sativa
agaagaggcctataggtacaatgctcctggattttaacttttcatctttttattcatttaatcctttgcaattttaagaatcctgttgttcttatctagtgttggtaactatatatagacaaaaatttggttttagttaagagcaagtttatggttgggctattttggttttttttcctttagtgaaaattcaatgaagtatcattcatgaaatattgcagtatctcccagttgcatcggcattgttagtcgggggtttgacgttgacatctttcacatttcaacaaggtattgttattacaagacttcagatccagctaaaaacctcatcatttggatttgatttgattttcttttctcctctttacaattttaagactttcatttgtgttatgtagcgggacgacatgcacagcagttcatgagttctgtgctgtgggctggagtggctgctggagtgatggctgtagtgaaggctaatggaaggcagttctgttcgaggcctcgcttgtgtggccttctgtaaggagtgatgtgtaatcttatgtagctcgaaaaaaagctaaaacttcggttaaaaaacaccaattcgagtaatggaatcatttgatgggttccgattccatgttacttgtgatagaagtaagagccaactgaagatgtaatgatttagctatctccaatgttgctctttttacttcaaaccaaacctatcatggaaattgtacataatgcaagttttttcttcttatttaacttaaaaaaaattgaattaataccaatttcatcttttgtttacgatgaacactttttgcctttcaatctttatgcattttcatatagaatgtagaaaatttatcttattaacctctgcttgttgtttctaatcatattgtggtggaaataatttgataagaaaataattttataaaattttaaattactatttatttaaaattatagatatagctgatgttcttaatgacacattagcaatgttaacattttattagtcacataggataaaactttaacaagttctacattttggaatagttcaagagagcttttaagccacgatttagtaatgataatccggtgcaataaaaatcaagatcttgtattgttttctcttaaatacttataaatactcaaaattttataacacattttgtaaataaattaatatataattttaataaattaagataagtggaattggtcagctgaaaattcggacatttactcagttaaaagtgtttatagacttgctcaatagatgaaagaaaggctgatcatggaatttgaaaattccaatttgtattgtaactaccttcttactcatgttcagttggtttttgttaggaatgttgtgctgttggacacccaattacaactgaagtcgagatataaaaatgataaactcaaataaaattgaatcaaaataatcatataactgaacaagattttaattaaagcaaagagattacaataatttttctctaaaataaggagacaataacctctcttattataggaaaaaatactaacaactacaaatgtttaggacaaacttctctctctcaatggtgagacgcacatatttatagctctcaagcttgacaaaaattatgaaattctatattaaaaattttattagtaataagtaaataattcatgtttttatatataatttaatatttttacattaaatttatgtaaaataattattcattgtttattattattttttttcagatttcaagtttctttgtactatataaataatcttgtgcagttaattttactattttaaataagtgtagatcgaaaatctattaagaatactctaaaattataataaaaatatctcaaaatcaatttattgaataaagtaagctatgttgttatatatgtgtcaactaaaagaagaaaaaaaatgttaacgagtattatactattgctattgttttaataaaatatctagtctaatataatttaatattataatttttaaattataatatagaatataatagcaatattcaaataaaaagtgatgtgtattatacatgaactaagttaaggagtgaattgagatagttgtgatgattaagttttgtaaatagttatccgtacactaaacacgcaaacccatgctaactaagtaaaagacaaaatccaccgaacgacaactaccctttccgtttgcagtttgattactctattgactggtaactggtggagact

SEQ ID NO: 58631 - DNA, 916 bp, Cannabis sativa
  modified_base (878)..(882): a, c, t, g, unknown or other
tataatgttgtatatatataaaaatacctaccacatgaacatgtacaaagtttatctataattattatatggattacaaactccaatagaaagagaataaaatcttgtagatccgctctgatagaatttcctgttaatatgtctcttaatctgtttgtaatcaaatgatttaatgttttattaatattaactacaactacattacgtctaaattgaacaaagagtaatattaaagtcaaaaacttgtatacttacaactcactcaaccatcttattattttatttatttcacaaaaataatatgattatatctatagtataaatttagatctaaattttagtgctttacaacaactaatagttatctttataactctttttctaagtggaataaaatatgacaatcttttaaccagtatgtttataattggaatattttcataaataataacctttataaaaatacacatctacacttttttagtatttttacatatttttattttttatattttatgaatacacgagtaaaaaaatatacatattgttaatgttttctgaaaaaaatacaagtaaaaatcctgaaaaagaaatagtaaaaatgtaaaaattataggctaattaggatttttgcccctgaactttgacatgtatttaatcatgtcttctgaactttaaggtcgttaaaaatgcctcatgaactattgagattgttggatttaaagacttttttctaattttagtaaaaaagtccaacatggatgttcagaaagtataatttagtacatgtcaaagttcgaggggcataatttggtagatatcaaagtctggcaagtatactttagtacataaacaatcattgaaatagtaaaattgannnnnattagacaaaagtctttaaatccaacaatcttaa

SEQ ID NO: 58632 - DNA, 1167 bp, Cannabis sativa
gaccaagtggaaaaggttcgaatttctctgggatttgatggaatgtttgctgttgatgtgaagggcagaagtggaggtatagctctcttatggagacatgaagaagaagcttctcttattcggtttggtgacaattatattgatatggaagttaatgtaatgggacaaagtaaatggaggttcactgacctctatggtgagccaaatcccagcaaaagaaaggctacttgggacttacttcgttcactttctactagttccaatcttccttggtgtgtaatgggggacctcaacaatgtgagttctcatgaagataaataaggcggcaattgctaccctgattttctgattcaggggtttcaacaggcccttacagatagtggactgcaagacatggacttatgtggctatcccttcacttgggagaggggtagaggaacagataactggatcgaagtgcgacttgacaggggcttggttaaccaagcttggcttgatatgttctctgttgccaaactttataatcttgaagtctcaacatcggaccattgtccgatttttatggatttgactactgagctatcaaattctacaatgggaaggttcaaattcaagaatgcttggttgcgggaacccatgtgtattcagctggttaaggatagttgggagggctgtattgagcgtgatattcaaagtaaggtggctgcttgtagtgctcagttacagggctggggaaaggaatacactggaaattttaaagaaagaatcttgcgttggaagaaggagatgaaacgctagaagtttgggcgagatgatatttccattacgaatttcaaacaagcgaaactgaacttggttgaaacttatgcccagcgggaagtattttggcgccaaagatcaaagcagttgtggctccaagatggggataataacagcaagttctttcacgcttcggcttcagctcgtcgtcgaaataattccattcagagactccaaaatgagtcaggtttgtgggtggattggaaaatgggattacctgatgtgatgatgaactacttctcaaatcttttcacctcggctcaaacgaattggcgagaagttactgctgctgttcaatcacgagttactcatgaccaaaatgcatctttgatgcaacctgtttcttgt

SEQ ID NO: 58633 - DNA, 1020 bp, Cannabis sativa
tcttcaaattagttatattaaaaattaagctcatattaaaaattaagctcaaagtaaaaattaagctcaaagtattatttaagctcaaagtattattttgtatcaaagtattattttgtactattttaaaaaatacagaatttaatttattatattctacaagacagatgatctaacgggttgtaaaacatagttttatatgatataatgtgaaaacatttttatttttagttgaaataataatctagaagttttatgtcatatctggtggggactgactgactaagatcaatgtatcccaaatggtagcaatttttttttttttggttttgtaattaatttttcttggttcggaaggtgagaggttaattgtgtggtttgatttgttataatatttatattatataccaaccactcttaactagagtactacgtacatctcaattattattaatttgacagtactatatatatcttcttctatatattatataatctctatcttaattactgatgttccatctatttcagttataataatttttcattaatcagtttacttgttcgagctaaattgaacaagtttatgcaatgattaaaaattgacacgaaaaacaccacattcaaataatttggagacatcttgcatttagagacatttttcttcacaatgcttaaacttcacaaaagtgatgatcttcaagaatttattcttatttttttcgataaatacaattaacttaattaaacgtttggaaaatgacaatgaacttacacttaaaatttatgaatgacaaaaacttttaaatgagttattataatcctttagaaatggtatatcttgaattaaattcaagaatcatgttttgaatataaaaagaaagaaaaggggattattatttattattatataaaagaaaatattatcgttttataagatatcaagtgactttttggttgaaaaatagggtttagaagaagtgaaaattacatgaaatatgggatttcataacaaagtta

SEQ ID NO: 58634 - DNA, 1079 bp, Cannabis sativa
gtgggatcgacctcactcctagtgagtctactacttgaaacgatacgtacatttgcgtgtgttaaatattgcaacaccttcacaaaacagtgtttggcaaaaaattcaacaaacacattattttcagatgttaacggagatatacttagcaagttcttaataatgttgggaacatgtaaaatattgtttagaactaagcatttgttatcaacagagtcaagagaactagtaccaacatgagcaatttttaggtgattaccattgccaacagtaagagtttcctcaccattgtagtcattctcttgggtcatgttgctagtatctgcagtgatgtggctgctagcacccgaatcaacataccaagctccatcctccaccatttcaggtgttgcaacaaaggtcgaagcaccattggtatttccactttgagaccctttaccattcgaaccagaattcccagcagatgggtctgaacccatgtaactttcatcgtatcgattgtagcagtaagctgcagagtgtccatagcgaccgcacacttggcatgttggtttcgagttgttactcctaccaccacctcttcctctgaacctgcctgggcctcttcctcccctttgatgactagaatcgccacgatttcctgtacccgtgtgcccagaatgactacctctgtttccaggatagttgggaggtttagtagcagccaggtttgcagaaggagaggatagattcaggttcttggtagctcctgaaagtgtggttagtctgtcaagtttgctatcaaaacttagcaaaatatcttgtaactcctgccaagttgtggagttccttgcttccacttgaagcacgataggtaggtactcaatgtcgaaacctgagagaatattggacactaattgcttttctgggtaaggatcaccagccaaagcaagcacatcagcccattgatgcttttgtcgaagataatcagccatggacatggctccttttattgctgtttggatcttagttcggtagtcatccatcttcacgcgagaatgggcactaaacaacgtctccaaggcctgccataggctccc

SEQ ID NO: 58635 - DNA, 1356 bp, Cannabis sativa
  modified_base (585)..(587): a, c, t, g, unknown or other
  modified_base (703)..(719): a, c, t, g, unknown or other
ttctaaaattagactatgtctagtctatgaattttctctaagatatggcttgattgtaaaaaaaatgtgattttaggatttatctgttaattaagatactttgttgagtctaattaataaataatataaaagacaattttatttgataataaattttaattattaaataaatagttttggcatttataagattagaactgtaaaatatggtatttatgaaataataataaatggttaagaaaaatagcaaaaaatgtaactagtgttgggcccaatatgtggccgaccactatgctcctatttttgtattattttatcattttttatttcaaataattcaattctaaccctaagtgaattagtataaaaagaaaaaaatggtctccttatccaactaatgcttctaaacctagttttcattatgtcaaaaactagtgttttgacacttcttcattttcttttctctcaattatttcgaaatcctatagtgttcttcaccattaaaattcgagccttagtgattgagtgcatgcccacccaaacaattataggagtgttggacttagatcttgattatactctgcnnnagaaaggaacaagggttaaagatctgagtggaaagagtcatttaattccgttgcaaccaatgtaagatttcttatactttatatgtatttaatttttatcgttttagaaattcatnnnnnnnnnnnnnnnnncatacttgttagtaaatttaggtcatggtaaaatatattccaacagttagaaattttaaattcacaacttcatattttcatattttcgacaaggtgatttactcggaaaccaggtagtttcgagtctctcatttctgcataacagcattatttttgagaattaatgaccaactttgctagaacacaaaaacacgtactgagtgatgtcaaaatatcacttaagtataaaaaaatacatcccaacatgttttcccactcacccagtgtccaagttaacatcacatgtcaacttcggtgctcggatatcaacttgggcgctaggccctgaaaaaccttcagtaaaatgaccataaatcactaaatattgattcgattgcataattaaacttgtgctttgaagctaatttagtgctctatcaagtcatgtctcatacttcaatcgcaattctgaatctattgactctgaatttcatccaaggaagttatgaatttaagctacaacttacccagagcgggtaccgccattgcaactcgaactccaaaaaattgacgatcaatcttagaagttaggtggcgtttggttgggaggaatgaaaatataggaatgggaatgtgaatgagaataggaatatgaatg

SEQ ID NO: 58636 - DNA, 639 bp, Cannabis sativa
taggtttttaaccaccaccaaaaaatattttagtagattagggggttagttgcaaaaacctgtccactttaggaggttttgccgcaaattacccatttaaatataatttttcacaaaataaagtataatattacactgggtctaattgtaatcaagtatttttaatctaacattaaaattttctcttcctaactctcaataacaattgtgatctaatttatgacctaattacactgaaccaatccaattataacgaacaaatccaatccaatccaattacaaaaaattaaacatccacttacagttaaggatgttcgcggtgcgggcagtatagtttttgtctagtttttcaaaccaaactgcacatgcagtgtttataattttttaaaccgcaaccactatgcaagatttcaaaatcataaaaatcacacaatattggattgtataataaaattattatatgtgaaaaaaaattaaatttgtgacaattaaaaataaaaattaatagacttatttatactatataggacaacataaaaaatagttcttaaataatgtgggattgtttctaaaacatttatatccaaatttttttcctaaaatgataaagtctaacaaattagtaaatatagaaaaaaa

SEQ ID NO: 58637 - DNA, 673 bp, Cannabis sativa
aagaagaattatgaggcagccctcactgcgaaggcagccgctcttactaaagtcagtgccctagaagttgataacaagctcttgaagagtaaagcagacggtctcgagtcggagaagaggggttgggatctcacccgctccattctggagtccaagaagcaagccttgagcgacaaggttgcttccttagaggctagcttgttcgggatgggtctggaaatggacaccttgtcccaagagtgtgataccctcctttctgacgccgaggtggcgaaggacaaactctcttctctaaatgacaagttgtcggaagctgagagggcagtagagcaggcccaaaaaactctgactcaagagaaaggatctttaacaaaagagataaaggtcctgacaagccaggttaagaaggcgtttctcagtggaagctatcagtctgccttcaagctgtattctgagttcagagaaggcaagtctgctacctgggatttggacgagttttcaagaaatatgctgagtttaaaaaggataaggatcttgtggagtcttcctcggatttggatgaggccagcgaggatgaggatgccgacggggcctgaggaacttgttctacgaggagaatgtctgtccattgtttaccatccccccccccttattttttatttattttatatat

SEQ ID NO: 58638 - DNA, 1387 bp, Cannabis sativa
  modified_base (1351)..(1358): a, c, t, g, unknown or other
tttatttagggcataatacccaacataacccacctgccatatcaagtgcatcgagagagaatgcatttatatatttcatttactacaatatttttttaataaactacacacctcccagtgtctctcccccctcccccgagaattcggtgtgatggttaggcatccttggacgaaagagtggtatttcaagattggtcattgtgtgtcaccacctctcgcctatcctacgcattcgatcaaggttgtcactgcgaagttatagttaaggtgaacgggttcttaccgtctagccgttggtactctgcatcttcgcagagaattcaatttcactaggtccatgttagagacagagaggcagtcattacaccattcgtgcatgtcactacttatgcgacaagaaattttgctaccttaggacagttagagttacttccaccatttactggggcttccattcaaagcttataacacttctccttctgaccttccagtaccaggcaggtgtcagactctatacatcgtgttaccacttagcagagtcatgtatttttaataaccagtcgctaccccctggtatgtactgctttcctaatcaaaagaaaggagagcactccttctcccaaagttacgaggtcattttaccgagttccttcgacatggttctttcaagcaccctagtatactctacgtatctttttggatcatatgcatcctaactacgtctttcagggatttcatcaccagttttctcaaaaagctcttcagtattcctccttcccgagtgtgggatctcattcgtttttgctccctgggcaccttgggggttctttcctaggatgtttagttatttccctcggttgattgtcatcattttgatgggtatccttagacatggttggagaaaaaagaaaagtttgaatattatcaaagggatgtgtgtttttttgagtgttttttacaaggctctcaatgccagcaaattattaacgccgatctctattaaccaataaataagcctcaatttaataaataaaatttagaataataagtaataatattaataatatacatattaacaagaagatttttatgtagttttgaagttaaatcttcatagtccacgagtccatcttattatcgagattttataaatttcttacagagtacaaaatgcaatgtttggttttttctatgattcttaatttggccgttcttaattttgggaaatctcccctatttatagatgtttgggatagaaatttattctcctgagatcttatcctcgtaactgttatattatttaataatataatatagattaaaatgtggtaatatatattattatgtgaannnnnnnnattaagtgtatggtaaataaatatataac

SEQ ID NO: 58639 - DNA, 1660 bp, Cannabis sativa
tcgctaaccaatcgtgtggcatcatctataaaaggtgctggtcatcactagtgcccaatagcaatgccttaataataataataataacgtggactgttgtttaagaaaaaatattaagaggtatcttaaggtgccaaacactacaagacgttgcataatgctattgatgcattttaatattgggtcttacaaattttaatttaataaataatgggaaaccgacaactaattataagacactacaatagtatggtgttggattctttacaataccaaataataataactatttacttttagtatatattatataatatatagcctataattatactactaaacaatattttaactttctttgaaaatattttataaaaataaaactatatagtaaaattaatgagaacaagatgtattttgggctggggggccggggccaccttaggctatcacttacctccgcccctgcttacaatgatgaatggagggttgtatatagccatttacccaagaggtaagagacaaatgatgaagctacctagaaacttgctagaaatagataaaaaaaaagaaaaaaaaattcctagaagttttcttggataaaaacaaacgtacaaacaaacaaataagggaattttcgagaatattagaaaatttcatagtgtggtattattttttaaatcctcaatccagattcggttagttagtaattagttgttcattagctaactcatagcgaaaaataatatagcaatcatatacggtcctttggcctatatatagaaaaacacaacatagtagagagagaagttagagagagatatctgagagtgagagctgggattggaaaattgtattgaacaacattgattattatgttggctcgtgttagtgagttaatgagtgttgaggaattagaccatggatgacttactgtgaatatttctttgtagctcttgaaattgatatctctaattctcatcaataaagaaaggtgggagtgatttcaaactggagcaggaccaagttcatattgaacttcaaatctgaaccagtaaaattctcatgtcttgttgtgtctgtaagctatttagattcatctctatgtttatgtttctggtttgatatgggttcactactttaaaaagaagtttttgcatctgtcaacgcatctcatgaaacttgttaatcgatgcaaaagtcaacccacactttttttgcttcaattatccatcgatacaaataattgttaattagcgtcgattatctatccaacgctaaaacgaaaaccaaagcaaaagataaaatataaaatatatatatacactattagcgtcggtccataaccgacgcaaaaagccattacatacactattttgcttcagttatccatcgatgtaaataattattaattagcgtcaattgtctatccaacgctaaaacaaaaaccaaagcaaaagatgaaatataaaaaatatatatacactattagcatcggtccataactgacgcaaaaagccattatatgtgccccatatctgctctttttgcactctgtcgtggcatcacatggtggtgacacgtgaaagtggttccccatttttttttttttttgatgaataagaaagttttattgctctataccaaactttacattaca

SEQ ID NO: 58640 - DNA, 902 bp, Cannabis sativa
attttaccaaaacagttttgcaagaacactactacaaaaatcattatttgcgtcggtcaacacgacggtcaacatcgaggactgacgcaaaaaataggggctgagttattgcgtcagtttctaacagacgcaaacaaattgtagtttgcgtcgattgtatatccgacgctaaaatataagctgacggcaaatgtgatttttttaaaaaaaatatttgttttattcgtctgttaccaatcgacgcaataaagttgagcatcttttattaattgaggcaaacttgttaaatatttacaaaatccctaattctattcaaagtttcattttgcaaaaacacatctcgatgctcctctttctctctcacttcgccctaaccccaaaccccatgaatggcgatcaaagctcgccccaaacctcgctgctcgtcccgatccctcttctctaagttctggtcatcgatgcaacactccaccgcaatcccagctctcctcccgctcccgttctctttttcgttcgggacaagctcaacccctaacattgtcgttttcgctcaggccaagctcgcacaaaataaccctatatattcaggtatagatatttatttttaaaaattaaaaattctggttgcaactattaatttgaattgagaaagtgtactacgatctggttctctaaaaaccaaagcttagagcattattcggctcccaaaattcataagtgattggggaccatcactttcaattaattcaattttctctgcatttttctagggtttgtcaattcggaccccaatcgaatgcgagcagagggctgaagaggggaattgctgaagaggggaatctcacagaggtaaattgggacttgatgatatattgaagcctgatttgataatgccattgata

SEQ ID NO: 58641 - DNA, 1225 bp, Cannabis sativa
ggcgcttataatctttgagctttgctagaattcctctcactaggttgttgggcgggtggcttgtttacttttttagtgaaattattcttagttaaatactattttgaaccttgtgttttacaaaaattatcaattagatactttattttgttaaatgacaaaatatactctatattttttaaaatggtaaaaattgtaaattgtaaaattgtgactgttttgtacaattggggattctataacgactgtttaaaacagtttgaataatggagtattcttgacgattttaaacaatcacttaattttattagcgacgttcaaagaaaatgatttgaaaactgacgggaataaacctttttgtagtagtgccatctacagtgttgtatagatgtgatttagaaaccatggacctatatttcaatctccaataaatatatgattcttattgaactctctaataaaataatcagatttatttattccattattactctactataaatatgaaatgcactatttgacaatatagaattttatttatagaattctttttagtagcctattgatataatcaatataagtacttcacaatccagttattagttcataattagagttggttaaaattactattttacccttttaattatctcttaaattccttatgtaccattaattcaattgtgaacaattaatctataatccaattacagatttggatccaactattaacactcctagaattaatactataaaagaactaatattcgatccttttggaatgcttggattctattattgtataacatgttcccaaccacttatgatattaggttctaaaagttgtaagaatcgtcttttctgagaaactttaacgagtgaatcaaaaaacctaatgaacacaaataggagttcataaatactcaggatttaaattgaagtactaatgatcatcattgtgatatgaataattattttatgataaaccacgtggtgataaaagatgttagttcaccggtctagtcatatataatcaaattatacaaagtatttttactaaatgtctatccacttatgtgttttgaatcaaaatcacacgcattggactatactgctttaaaaaccgtacttagtaataccatattaaagattttatactttaacacacaaccaacttattttattcacattatatgatcttaatgttgggaatattttatcagga

SEQ ID NO: 58642 - DNA, 1041 bp, Cannabis sativa
tttaatatataatataatttaatagtaactaatcagtatataattagtatcatgggtacctcaatagtttattttatttttgaaataataaaaaaatctatattcacacattttaaaatgatcacattaaaaagtagattacgataatatttttttttaacttaagtgagcaacgatatagtcagaaaataattttataaatttagatatttttttgttaactaaatgaaaaaagaaaaatatacattttctcatcgtcaccataattaaaagtaactatttagttgtttatgataccgaaaataaaatttagaagtaactatgaagttactttttacacaacataaaaataattcattcttttgttaatatgcatttttattgatataaaaaaaacttttagttgctaatgatgccaataaaaaatattgtgatgtcggggtttttagtggtgactgatgatatttaaattaatataatactaattagttacttgtttatgaattttttaagtttataattatacaatgataaatgtaactaatgagtatataattgatatggtaagcaactaaataattactttgatttttttttttaaaaaaaaaagtgagaaaatatatactttccatattttaaaataatcacattaagaaataggtcacaaatgatattatttttgaggtcaataaattaataatgtaaccaaaaattatttttgaagttatagaaaaagaagtaaaattgataaagatagagagagaaagaaacatgaaaaagagaaaaaaaaaataaaaaataataagaatgcaacacgtaggctacaataaagtttttttttttttttttgagaaagtttcactgttattataatccacaatcttttacaacaacatagaaaataggataagaaatttctcccatccaacaagtatttacatccaacccaatagcatgtttggctaacccatgagcagcttggttagcatttctcttaacatgagagataacaatagcagggaaagaggatagaagacaacg

SEQ ID NO: 58643 - DNA, 1089 bp, Cannabis sativa
ctaggtaggtcgtttatagacaaaagctatatctgatctaataaatattcgtatattccagatatttatatttagtcagttgtcatattaattaattaattgattaagtgattaaattataattaataaaaatattttatataatttaatttatagaggctaaatatgttacatagtcaaattaatatgcatcgatgcatgatgaaactttcaatcagatatatacaataatacattgatttgtatatatataataataatttatatatgtaatgtgtttattataaatatatctttttcccacgagggatatcagaatataatataattttttttatatacatatatatttaaatggacggctggatataacactatatatataagaggcaaaatcttttcttggaaaataaaaataaatcgtacgtactcattcaatattataaaaatcaattaattatgtaaatagtaggatgctttgctaattatttatttattttaattattcttttaatatgtttatataatttaatttcaaaaggatcgagtaaaagacgacgtgtaacatctagatccaattgccttgcatatggtataataattaataatatgtataaatttttaattttgtataaattaaccaccaagcatagctattagctatgtctccttccttatatataatggaccacgttaattattgtagattttccaataattatttatagtaaaagaatatatatatatatataataagtacgacctctcccatataaaaaaaaattattaacttaaaaacattatgtaggatacataaatatttatttttactataataatacttaaattatatatttttagaatttttataaatacttagatattaagttcaacttaatggccacaagagagtctttgattgattattaaattttattttttatttaaaaattaatttaaatgtgaataataactttatacttaaccgtcaagtatttacagcaattccagaaatataacttatgtattattattatcaaaaaataaactaattaagagagttaaacttaagtatttatgtcgtaaatt

SEQ ID NO: 58644 - DNA, 1114 bp, Cannabis sativa
  modified_base (430)..(436): a, c, t, g, unknown or other
ggcttttacatttagaggtccacatacatctgaatgcactaaccctagaggttctttggcatgctctccctttgcagagaaagaacgcttagttattttccttctatgcaagattaacaaactagtaattcacccaagatgacatttttcaatggaccatctttggttaacctacaaagtatatcatagcctatatgacctagtcgtaaatgccatagatatgtttcatcattattatcaatctctttccttttgtgctttctaggtttagctatattgaaaagtttgttattaagcgcaattggtatattcggtcttaaaacataaagctcttgttccatgtgaggaacacataattgaaatccattacgagaaattgtcaaaaaagaactcaaaaatttcaattgataaaattgtgtttgtaaacatnnnnnnntaatcaagtttctactaaaattcgcattaaaaaaacattgtctaaaactaaaaatttcttctgaaacttgaggcgagcttttcccttagcttagaccgatactaattctccatttccaactttgagcttcaactcccctggatttagataatcccaagtttcaagcaactacaatgaagaacaaacatggttagtatatctagaatcaacaatccaaatagattttaattctctaaaacaaaagcgttacctttgttccaatggtcaagaagtctgagatatctttcttccgaatgtcccttctctccacagtatgaacatagaagaatacgtttgctcatttgttctctaattgtttcatttactggttcaattttgattatagctctcaaaattgaacttgaagaagcaacattgttagaagcatcattctcaattactacaactttccttttgtacatgtcttcaaaactagagggaggcctccttggaggcaaagttcgttcataaacacgcaattctacgtctagcttgtctacgtcggataagttaaaattattgatcatatctgatacaacaaatctattatactcaggtggaaggctgttgagaatgaattgaacccattgctcttttgataaatcaattcccagaaaatttactttctggaacttcaga

SEQ ID NO: 58645 - DNA, 1367 bp, Cannabis sativa
atgttgtattcttgttattttgttcttaattttatttttatatattttttatattgttttgatgttgttttcttattactttcatgtaatttttttgtcgttttcttgtatttttatagaataccaaaaaagtatgtccagacatatcataatgaataaaagtatacttagatcaaaatagttgaacaacaccaacaaactcaagtagtacttgatgtaaaatttttcatttcagaggaattactagagctactatttaatcattgttgtctttcttcttgaataacagtaatataagctttattcacacttgcaagtggatcatgtattaagatttgagatctcaccgtgttgtaagaatcatttaatccaactaagaattcaagaagtcgatcttcttcttgatattcttgaatcaccttcatagcaccataagaacacactggttgtagtctatattccctgatttgatcccattaaaccttcaatcgagtaaaataagtggtaacactattcgatccttgagtaagactttgcataatcttcttagcttcaaagattcgatgtgcatttctctaattgaatctttcatgaaattctatccaaattttagtagcattatcaacatacataatgttgttagctatttcatcagaattaggatgaagaattgaagatataatagtattattacatcgacaccaactgtcataattttcatgatcatcatcgggttgaggtaatcttccattaacaaaattcactttatttagagcaacaagagcatttagcatggatcttctccaggtgttgtagttctcacacccaataagtatctttggaacaagaacaactcctcgattatcaccattataaaggtaataaggattcgaaagatcattgacattcatcgatcgataattgtaatgctctgatacttaggcgcgctatagtaattttctaattaacgtgccacctttaccacaaaaaacaccataaccagctgcaagaactcaatttcaacttaaaatgaacctaagaattgaaccataatcaattctaaccctaacagccataattcacaaaattgcatgctagaactaaactttaagcttgaataactaaaagaataaagtgctagggcttacctccacttgatacttccttaatttcttgctaaatttcccaaaaatagtgagtgttagggctggttcttgtggtggtcgagcaaaagggagagagaaggagaaatttctaagattattttgaattttttatttttcttcttaatagttaattccactaattcactcaaaatgttgaaaaactaaaatagccagttgtaccaaaaatgcatttcttacttg

SEQ ID NO: 58646 - DNA, 790 bp, Cannabis sativa
tttttttaaatttacagtttaagtttttaaagtggttgcagcgctagttggaatagaaatttctattcgattttttgttgcaatttaggttgcggcgttagttgcaatagtagtttctatataaaatttcataaaatgcaaaaaaaattattttaaagtgtaaaaataaaaaaactccaaaatataattaacctaataataaaagtataattataatctaaaattatatgagacaccctttttaattacactacggacacaagaaaaaattgtaagaaccaataatattttttaacaattttataataataataataataaaaaagttatttgtgtgaaaaagaagggcaaaagtgtaaaacgaggtttggccaatctggtaataacagtacccacagaagaagtagtgttgtgaagcggtgttagcaaagaagtcatacgcgtgaccaacccaactgataatgcttcatggatttatgcatgcttacgtggcgcttctgtcttgacacttggcacgtgagttgctcccaatacctaaaccctatataaacgtcctacgtttctttgccgttagagttggcgatgcgttcgagagggttgttggatccaaaaaccaaacaaaagcttttcttttttaataatttcgaatttgttgtttagatgacggagccgtcgtacacggcgttagtgagctctttgtatacgctctcttatccaaaatggaaggttgattgatggtgttttaattggattaggtgccaacggtggcgccaatttatggttatacttt

SEQ ID NO: 58647 - DNA, 572 bp, Cannabis sativa
agtcacagatgtacctcttgataacccatcagtaacagatatggacatcgatgttgctgctgttaaaggaaaaggaaaagcaattgctactgcttctgaagataaagaaaccagcaacaaggaagcttctgcatctcttgctaaggttgtatttgttttgaagcttctgacagagattttattgatgtatgcttcctcagctcatgttttgcttcgaagagatgttgaagttagcacatctaggggttcccatcataagggtttaacttccatatgcactggtggaatatttcatcacatccttcttaagtttctcccatatgctcgttgtgcaaaaaaggaaaaaagagctgatggtgattggaggcacaaactggcaagcagagctagtcaatttttagtggcagcatgtgttcgttcttctgaggcaaggaaaagagtttttacagagattggtcacatttttattgactttgtaggctcaggtaatggttataggtcacccaacaatagcatacaggctttcattgatctgctcaatgatgttttggctgcccgtacacctactggtt

SEQ ID NO: 58648 - DNA, 1234 bp, Cannabis sativa
agtgatattaagtgtaatactttattttttttttttaattaggtaatgtattttttaaaaaataaaattgaaatagggttcgagattttgatttttgaagattttttttaactattatgactacattagtgtatcatttggatatgattatatatatgtattttatatatacaaaaaaaactcaagtaagatatcatgaataattattgtgtgtctaattgagcataatattattttagaaaacaataatttataaattacattttacatatattaatatagtcttgacatatctcttttatgaaagtaatttataagttttattaattatcataaagctagatgtatatacatagtagtgaattaattaaacttttttattaatatatatactaattcttaatgatttgataatttgtattggtagctagcttggattaatggaatgtgtatatattacaatatatataatgcacaagtatactacatatattatagataaataaatcgtggatatttttgagacgggaactgtaatattttttgaggatattgaatttggggggagaaataaggttagagatattgcttttgaggaggaattgaatttaacctcagttcctactatcattttagacaatgttcaggcttccacacctgtcattgatcaagaaataaatctggaacctcaacaagtcaatgttgaacaactcccaaattaggatgaggttatttttcctaaagaacaaattcaacaccttcaagaacaagagtcattaaggaggttcacaaaagagagaaaaaatgctatttcagatgactattttgtatttcttcaagaacatgaggatgaaattggaatgatggaagatgatccaacatcaggccatgaaaagttctaactctgaaaagtggattgatgccatgcatgaaaataataagtctatgcaagacaataaggtttgggaagttatcccattaccataaggttgtaagtggatacttaaaaccaagaaggataaatatggtaatgtggtgagatttaaggcacgtcttgtagcaaaaggctatactcagaaataaggcattaattatacatgggctttttctctggtttcttcgaaagactcttttaggataatattggcacgtgttgctcattttgaccttgagttacaatagatgaatgttaaaacagcgtttctcaatggcgacattgacgagacaatttata

SEQ ID NO: 58649 - DNA, 780 bp, Cannabis sativa
aataaaatcctggctccgcccctggttgcagtggtagtggtgttttgcatggtggtggttggcggcggtggtggtggttggcggtggtattgcagtggtagtgttacgagtggtgactgtaaaacagtcgcctatactataggcgacggttttaaacaaccgcctgtagtatatataggtgactgttttaaacaatcgcctatactacttcgtatccctggtggctttgtacagttgggaaaaaaaaatttcgatagttttttaccgttgcttattctgcttagttttcccgacggtcgaataggcgtcgatcttagagactaatgagattactttacccgactgtttaaatcaatcaaaaaatttaattttatagagaaatgttaattacaacctcttagtcaatctcgacgtccgaaattatatgtcgaaatatttttttcaattttttttcatatcggtattcgttatagttacaatatcatccctgtaaatttttgaaaaatttagaatattttacagtaccgaaaacagagttcctgatattttagtttaccacgcgcgttcaaaaaacttcaaacatatttccggcattgtaagctatttgaaacttttgaaaaatttacagggacgatgttgtaagcataacgaacactcccgtcaagaaaaaatttgaaaaaaatattccgacatgtgttttcggacgtggagattgactaagagattgtaataagaggttgacggtagaactcttcttttatattttataataattattaa

SEQ ID NO: 58650 - DNA, 1668 bp, Cannabis sativa
cttgtcttctgacatggttgtgtatacttttgtttggtgtcttggcttattgttttctgcctggaaagttcaaatttgttcgtattgtgcgtgtgttgtttccattatggcctcaagtagtaattagggaatgatggatgaaaatgatggatcgatatatggctagagaaaaagtcgaatgctgtactagcgtataatactagtaaatttaatgaaacagattatgatgattggtggtgccttgtaggaaggtttttgacagagagatctattgattttgatgttatgcaacatatattggcttcgttatggcaacctgggaaggggatgtttgtaaaagaatcggatactaatcgattttaattccagttctaccatgaaattgacattcagagtgtgatcgatcgaagcctgtggacgttcaacaagttcctactggttttttcatgattgaagctaggggaaaaccctaggctaattgagttgaaggaggttaatttttgggttcagctacatgatctacggtctaggtttagaactgctatggtggctagagatggggctaattacataggcaggtttgttgaatctgatgaaaaaaaattatggaactttggacggattttctccgggtgagagttactgttaatgtcactaaaccactaaagagacgcatgagacttcgtaactccgatggggtggagttttggacaaatttcaaatatgaacatcttccaatattttttttcatatgtggaattatgggatactctgacaaattctatccatgtagatttgaagctccagttgggacgttggtgaaaccatatggtgattggatgagagttcaaccaaggcgtactagtcacatgattggaaaaaaatggctgaaacagttcagattggcaacagaagattgtgagatgcatgagaaccaaccaaactctgatcatgttaccagggcaaatccgaggaggaaatcaatgccatcagctactctcaatcaaccagctgtgatcaaggagaaattagggggtcaaggtttatgtaataaagagggtgatattgggaggattgacaaagctaagagtgtggaaatagaatggttgaatgatgctgaaaatgctaatgttcaagtcattaatgaagaaggtgattgtttgttggttgctgatttgaagaggcgtagaacagagttgggccttagtgtggggtccaaagtaaaggtgggagagaggagtccagcccaagttcaattggatctaaaaaatgtggatatggtgggtgctggtttccaggcccaccaatcattatgagtcttttgtcttagaattgccatgggcttgggaacccatggactttacaattccttaaggacttggtgatccaaaagaagcccaattttgtgtttctttgtgagacactttgtaagcgtgatcaagtggagaaggctagaatttttctgggtttcgacagtatgtttgtcatggatgtgaagggtagaaatggaggcataactcttttatggagacatgaagaagaagcttcgaaactggggtttactgataattatataaatatggaagtgactgtggaggggcagccgaagtggagattcactggcctttatggggaaccaaatcatagtagaagaagagctacttggga

SEQ ID NO: 58651 - DNA, 1123 bp, Cannabis sativa
gagtgggtaatcttcctaaaggatatgttctttttagttggaagagtagatgtggaaggctttatacgtaaagtgtttcagcttagaggggagattgagatgccaaagagttttccaccaaggggatggagaagacggggatgggatttcaggaggggatttacttgaaaagcttaagtcgtgggcatgacagtacccgagatctgaccattgacattaaattgaaaagtgactgttgtgagacagttgagaacgagattgatgaaaactcgggaaaagttgaattttttaattacggctctaataaaattccattcaactttgtcgaaagtttttgccatgtccaatttcaatgccatccatccctttttaccacgagttttaagctttatggaatgggtgatatcttgagccacaatattattgtcagagatgagtcgatcttggaggaaagcactttgattgggggatattaatttatcgaggaccaaatttaacctattagcgattgctttggacatgattctgtatgtgatgttacaaaggctaataagtttgaaatcttcaaccgagatgggatgcttaaccttgggaataagagtgatgagggtttgattgagaggggtaatatcaccaccttcgttaagggcatggaggacagcagccaccacatcatgcttaacaaaagaccaactctttcggtaaaagttcgtattaaaactatcaattccgggtgctttgtctaagggaagttggaaaaaagctttttccacttcttcttccgtgtagacttcttgtagcatcattgtaacaccctacaagtttaggcgtgccacagtacttttcaaaattattgtgcaacctttgctaatcaaagggtttatcaaaagtgataaaatttaaactttaataaataaacatatactgtattacatttataagatctaggatcccgtatctacatttttggactttacataatcaaaagatgttgcacaacgactacaaaattgtgaaacctagttgtcccgaagatccaacactccaggtcgaactgtcttgatatatacaatcttcatctagctcaaaactcactgttgttcaacaacagctttgcctttac

SEQ ID NO: 58652 - DNA, 1670 bp, Cannabis sativa
gtacttaggtccggaattagttcagaggaccaatgaagctataaacaagatcaaggctcgaatgcttgcttcacaaagtagacagaaaagttatgctgatctgaaatgcaaagatgctacatttccggtaggggaacatgtttgcttgtgggtttctccagtgaagggtttcaaacacttctggaagaggggttacctaagccctaggttcattgggccatttcagatactcgagaaggttaggcaggtagcatatcggttgtccataatgtattccatatttcaatgttaaggaaatatatttcggacctgactcatgtcttgagttacgaagcccttgtaccacatttagacttatcctacgaagaacaaccagttcatatcctagataggaaaaagaaagttcttcgaaacaagaccatctctttggtcaaagtgctttggaggaacaggaaggtggaggaagctacctgggagttagagtctgacttaaggactcaatatccaaagctattcagattagatttcgaggacgaaaacccttttaacggggggatgattgtaatgttcgcatttcataatatggattagtaaaagcaattagcactaattattggtatttttataattattagtggatttttttatttgtggatcccattgtcagaaatgggcattagaattataatttctcaattccagagatttaattaaactctatgagtattatttgtattatatgtgaattatgtaatttttacaatttttgctcgacgacaacgcaaaatgcgatggatggctagtttgatcacgtgggtaagtctagaaccttctttcttagtgggatgtatattggagaaaatagagtaccgaggttgagcggggttatagattttgaccatttacccctagtcttgaaaatgcttaagttataaaagaaagggcattttagtaatttgcaacatgggtgatttggtggctgccttaggtgttgacacctagcttcaatttttagccaaaagattaatgtagttaatcttattttcatttgaggaaaaataaagaaaattaagaaagaaaaagccaaaatcaaagaacctctctctttaccttctaggaaccaagagatttgctgctggttttcggtgtttccagcaagaatttgaggagattataactaaggtaaaccctagaaacttttatctattgatttctttaagttctacttggtttggttatgcaattttgaaagttaggggttgttagggtttaaaggttgtgtgatttgatttctaagctaattttgagttgattctaggttttagatactggttatgttgtgttgtgatggaattgcacaagtttgagcttcgaaactcatacttaggtctttaatggcatattgtgattcagtgtgtttttttgagttttgttggttgtaatatgttgtgtatgccctgtttaggtactctggaaggttttgtggcatttggataagttttgagcaagttgaaggttgtttggggaaacctagtgcaaaccggttactcagtttgctaggtcttgtaaaatcggttagccggttttgacagattccccgaacaactcattttctcaattcttgtccatttcagttccttagatgggtgtttccctgtttcctagcttaa

SEQ ID NO: 58653 - DNA, 840 bp, Cannabis sativa
tgctggcaaacaaagcgtgcagggggtaccaactgaattcaccctctcgtactgacctaacttggaacaattgcccaattgcaattccacaggtcttcagcatcttgctcgtagagccagagatagatcgcaccctcgattctattaactcagcctcgaaggtgatgctgggatcctgaggagttttagacgtacgtggcttgggaggcataattttaaaattcaagtcacctggttcaaaagcaatagtgacattgggtaaaaacaaaggatatgccacagggataaaggacacggtgggtggtttaggccaggctacctctcgcaagaatcgacgtctgtcttcggatttttcttgcaagaagtgcctgtagcgactagaaatatcttcgtgttgggttctcattgtgtgttccctatccctagcatcattgaactctaatttggaggttggttttgagggattgggtacatatgggatggccaattctgaaggaaaatcaaactctaaagcagtcccaatccctggagagaattttatcaaactaaaaggtaatgagttggagatctgaaaacaacttacatattgcctgaaccctagtatgaacagttttaaccctaaaaaaattaccaaaaccagatgagatgataacaatacaaacaaatcaagtaactgatccacaatgtgtaataaacatgagaaaaaagaaagtaacttaccgtttggagttagggcttggggcaatgcctgagaattctgtctacaaaccttcgaacaaagaaaggatcgcttttagaaaatgaagtcggaggaaactcgcaggaaaaaggtcaaggaca

SEQ ID NO: 58654 - DNA, 713 bp, Cannabis sativa
gctgccggagcaggggcggcggatttcggagattgagccggagcaggagaaatcttcctcggtgtttgtagggaaggtgaaggtgctggggactgagcaaaggtggagaccactagcattgcggccattactgctaccaaagcaaagcttacacgagccatttttagagagagaagactgagagtttagagagagaaactgagagtcttttggggacagtttgctttgctctgatagtagaaaagagaagaattgagctgttttgagttatgagttagagaatgggtttgaggctatttatagaaaagagtgagggacttatgtgtaaaaatagctaaaagttgagatccgaccgtttgatttttgatacgtttccttttcgaatgatctggcgaaaataaacggtctagatttatttagctttacagttaaattaacctatacaaagacgagtaaccgactcggtctggaaagacaagtcacgcggttaaggctattggccattgagccgtttccagtttttttgacaatataacctacacgtggccgaatatgaaccgtaggatgaaacgaagggcgctttgtttgcaattaacgccctcacttttctaattatcatcataaaacgccttatttttttgggaaattatatatacaccgcaacaaattatataataaatttagggtaaatactattttagaccctgtgtttt

SEQ ID NO: 58655 - DNA, 1747 bp, Cannabis sativa
tgcttttttatcacacattatgtggccgactaggcggtctttaatcctggcaatcttcttatggccttgacatgtaattatctggatttacttttctttatgtcaagccaaaatatgcttgcacttgacttaaaggtaggtttagtagcttattgtaagtgttaaaatttctctgtataagttctctgtgctagttcgatgcattgtacggtgtgggtgccccccagctgaacatggagacttacggtctcttggtcacttacaatccaccaagtttcatagaccttacatgggatttttcttggggtgcttctcgttatatgcatgtggagctaaaaaataataactttgagaagttaatcttgttagcaaatggtttagatacaataaattgaacataaatattattttttattcattaattgatcattttttactgtgcaacttacaaaattgaatctacaagcttacataacacagtttttcttctagatattaagttgctacccctgcttgacttgcatagtagatgccagcattgaagaacgttgggataccacgccaaaaaggtcgtcattaccagctcttttgtactccaatgttgagtaggtagaactgctactttggagtagtgttttgtaagctagctactgatagtatttgcgaaagtgctctccattctagtatcttggaaggaaaacgactccatgttctcgttgtaccttcccagcttgtaggctcccttactagttatttatgtaacttgataaaggccttcccagttgggtctaaacactcctgatgatggatctttagtgttcaaaaacacttttcagagcaccaagtctcctatgaagaatttcttattcttgacttgcttgtttaagtgccttgctaccttttgcttgtaggtctgcagcttcaggtttgattgatctcttctttcttgtatttcatcaagggattctgccagcagtatgttatttgtttgttggtcagaggttgttctcttgtgagacggtggcaccagccctacgagcaacatcaccctatagccataagctagagcgaatggagttttccttatggtcatcttctcagtagtcttgtgcggccataggacctctaggagtagttcaggccaatttccttttacttcctcaaggtgcttcttcagagtgtccttgagggttttattgacagttttacctacccatttccttgaggatgggccacgatagagaagcttttgataatgtcatgtctgttgtcgaaatcaatgaacatgtcactattaaattacttcccattatctgacacaatcttctggggaagtttgaatcgacatatgatgttcttgacaacaaagtccatgacttttttggaggtgattgttgccaggggttcaacttctacctacttggtgaagtagtctattgtgactacaacaaactatacccctattcttaccctttgggagttgaccaattaggtatatcccccatattgcgaaaggccaaggagattgcatcatcgtgagctcattgggtggagctcttagaatttttgagaatctctgacacttgtcacatcttttaacgtagtccatcgagtcttcgatcattgttgatcagaagtacccctatcaaaatatcttcttggataggctttgtccttcgacatggttgccgcagaagccttcatccacttctatcattagcccctcgacttcattcttggtgacaca

SEQ ID NO: 58656 - DNA, 7777 bp, Cannabis sativa
ctagaaaaatactaaagaacataatttgatttattattatcttaggtttgtacgtatttattaaaaaaaatatacataaatatttaaatgatttgattttaatttaaataaatctgaaatctatcttaataaaaacttaaattgaagatatatgattgatatagagttatacactaaacaatttctcaccgagcaaaatactcaagtaatttattaagtaataacttaggtaggtagtatatataacgtacgatgtggacgactaccttaagagttgtgggtatatcgcctaagtgctcggaactgggatgagtcgaatggtggattggtttattttgtcacggacaaaatgacaatccaattcgatatgtttggtacgttcgtggaatttagggttgtttgcaatgtgaattgcagactcattgtcgcaatagatgaaggctgggttaggttgcggtatgtgtaagtctttgaggaggtattgcagccatgttatttcacttgtagtagctgcaagtgctctgtattcagcttctgctgaacttcttgaaatggttatttgctttttggttttccatgatacaaggcaatcgcctaagaaaatgcagaaaccggtcgtcgatcgtcttgtgattgggcaagaagcccaatctgaatcggagaagcctctaagatgaagagaggaagtggctgaatatagtatgccctgaccagggctgcctttgagatatcggataagatgttgtaatgcttgcacatgtggtgttctaggagaggccatgaattggttgagaacatttactgcatatgtaatatctggtctggacaaagttaagtacaatagcttgcctatgagttgtctgtagttggacgggttggtcaaaggttcacctagttgatcgtcaagtttgtgtctaggatccataggagcttttgcaggtttgctgcctatatattcggtttcttcaaggagttgaatggtgtacttcctttgggagaggaataaactgtcttttgttcttgctatctcaaaactcaggaagtattttagcttcccaagagctttgagcttgaacttatcatgtaaagagtcttgtaattgttgtaaaatggtgagatttggacccgtaatgacgatgtcatcgacgtagacgagaagggtaatgaaattgtcatctcgacctctagtgaagagggtgtaatctgcttgagattggtggaagccttcttgaaggagagcttcagtaagtttcttgtaccactgtctcgaggattgccgtagaccatagatggatttttggagtttgcaaactaagtttgtacctgcaggggcagaagcagatagattcagacctggtggcaaagtcatgtaaacctcatcatttaggtctccatttaagaaggcattgttaatgtctatttgaagcatatgccagtttttgattgtagaaatagcaagtaataatttgaatgtgaccattttggccactggagagaaagtatcaaagaaatcaaggccttcttgttgggtatatccttgagcaaccaatcgagctttaaatctttctacaaatccgtcactgttgagtttaattttataaatccaacgacatccaatggcacgtttatttggtggaagtggtacaacaatccaagttttgttgttgcgaagggctgttaattcagagtccatagcatcaagccattgttgaaattgaattgcttgctgatatgtttgtggttctttaagagaggttactgcaagaatgaacactttacaagactcagtgagtttatgataagatagatatttattaagtgggcgaggagtagaatgtttgtcctgtaaaactgagtagcattctgtgtctggtgtaccaaaattgttgtcctgcaaagaaatatcaatactaggaatagtagtgttagtagtagggtaatcacctacaggtgtattaattacatctgtagtaggtaaaacaatggtagtaaagggatcaacattaccagtatcctcattcaattttaagaatggaaaaatgtgttcatgaaagaccacatttcttgataagaaaatttgtttggtgttgatatcatttaacctatatccttttactccttgaggttgtgatctgttgccttgattaatagtcttgatgttgcctttatctccttggaaggcaaattccatattcgaattgggatcaacaactgtattagtgttacttttttggttttcttcttgagtcaccaaatgaaacaccctgttcacttctggaagagggtccatgatcaaaatattacttctgacttgtgagaaagagtctgaaagccccatcaaaaacgacattatgtattccatgtggtggtgttcttgaagctttttaacacccccacatgtgcatccattgcacacacaattgggtctgtaattagacagttgttcccatagagttttgagtcttgtgaaatagatgctgacagtttggttttcttgcttgagattcattaagttctttctcaaattgtatatgtgtggcccattcttttgttgaaatctaaccttaaggtcagtccaaatagcagctgcagactcatcatataaaagactagaggaaatttctttagaaaccgaattcaagatccaagaaataacaatgttgttgtttctataccaagcattatacataacaaaattggaagagtgaggtttaggaatggtaccatccaagaatccaatcttgttcttgacagatatggctaattgcatggctctacttcaggacatgtaattgtcctgcccagtgagaggttgagacacaaggatgtttcttggattgtctccatgatgtaagtaataaggattcaaaggatcttcaaggggattcctttgctgcgctcgattactttgagtacttgtttcagtcgcttcttcaacagtagcagaaacgccatcatcaccaattccatgtaattcaacttggttatcggtttccatggcgaaaaacagagacagaacagatcaggaaggaaacattgatcgaaagaaaataaagaaccaggaagtgaagttcaggaaagaacttcagaagagagaaaagagaagacacgctggagaagacgacacagcgaaagagaacagggtcaagatcgaggggaagctcctctgcttccccgctctgataccataacacgaaaacacatttgaacagaaaagaaatcttgtattgaattaattgaaatgatacaaagaactacagtatatatacacaatgctcaacagagcacaaataacggaaacaaactaactaggccagaaagacaaaaatacccttaacagaaataactgtcaagatataccaaagctaacagatacagttaataagaaaggatgaggcgaattaggcacaattcgtgttaattacagtgtaatatttttacatgttctgctaatttaaatttatatttaataatatttttacactcttaatcctccaatgcttatgtaagattgttacaattgttattttaatcagtatcgattctcttaccaaaatatatgtataatacaatctttataagacctcctaaattaaggagccccaaatgtgcaatatattgtttaatgaatatttacatataaatgaagagagctgaaaacgctccaaattattctatggaatgattttaaacgacgtgtcatttatgaagagggaacaaacaaacgacagttggaaagtaagtaaattatgttcaaaatcttcaatttctaaacgacagcaaaagttgagctgagtttatgattacactgaagattaatcctagctatgactgaaaattgttattgatgatctgattgtgatcaaggattactcctgagactgacattttccttggataacattctgctataattggcattaatgattcaatgttatgaggcattggagtttcatcagaatgcccagaaatgcagagttcaccaaaatcatcttgttcccagaaaacttcaaccataatcccattaggattttcttcactttcagttcctggaatcccaacaaatctagctcccactggtatctttgtattacataaaaaggggcatcattagcattgacttcaaattctatatatatatatataaagaatgtacaaagcagtaatcaaaagttggtttctacctcaactgaagtttcagatgttgttaaattaagagtaacgaatcttccttctttcattgcgctttcgagctctgcctgccttgtgatgttcatgaatacttcttcaagaggtgtgagaccaatttgaatgtctgttatgccaaattcgctttctctatcttggagctcagtcagaaagttctgttcaatgttacagcataataacttaataagtacttatagttagactttttgattgaatactaaaagagaatctagtaaatgaggtcaataagcttactggcagaagcttctctttctcataaggaatagaatatgtcaaaagggatttcttctcttttttcgggccaacatccaaatgctgtaaaataagtagactccccaagttaggaaccaagtacatctttaattctacaaagaaaaaacttggaactaatcattttcaactacatgtttaaagaactgcttcacagcctcatgatcacgagtagaatgagcaacatcttcggtaggagtttgtctgttgaagttgatattaataacaaaaccagttccaaatcgtgacttcaatctgactgaggtaccaatgcaacgaagcctgccattcgccattattccaatccggtcacttaagatctcagcttcttccattgaatgtgtagttaagactattgcacgccctttctttgccttctttataatatcccacacatgtcttcttgcaattggatccataccagttgtctggttgagttgatcatagtgtgaattacatgacagattaagtaaatgagcataaaaagacaaaaaattaagggtctaacttgcttacaggctcatctaagatgaccaattttggatcaccaataagggctactgcaacactcagacgacgtttcattcctccactataactgccaactctcacttttgctgcctttgtaagtctcacctcagctaatgacttttcaatgacctgaattcagaagaagaatttaccttaaatccaaaatctatgcactcattttgctcaaaacatgtgttgacaaaaacatgttcaacttgaacaagaacatgaactttacatttacatactgaatcgattgaagatagaggtagacccttaattctcgcgaagaggtgaaggtgctctagaccagataacgcatcccattgaatatcaaactattataacaaatgcaaataaggttataccatctcatcatctgaaattaatgttacaaactgcactacttttcatgattttgaaatgtaaccacaatgaaaatgtaattattcaaaactcttccacaagtagtataaagaagagagagaagatatcacctgagggcaaactcccatcagtttttggacttttgacatgccaatagagcttcgtatggaatggccatataccaatgctttagtaaggaaatttcacagttaaaatcagaattaaaggtggaacaaggtaacaagattggagacaagttttgagtagcattcatctagtaaaatatgatagttgacaacatgatgagaaattgtaccatctccacttgtcacaggtgtgattccagtcaaacaattgaatgttgtggtttttcctgctctgttcattccaagtagacagaataactgatccttggcaaagtttagccatagaccctgaaatttatatcaacaaattaagcagaacttactacattattgtactaaagaatcctctaaacactactgtctgatttttctgcattatatatcttctttttgataactaatagttcctatgactagttgagagagactgctatagacaaacaatcaacccagctgagattatcataaaattctttccaaatgtgaccttagatgacaatcataacaaaaagtaggattctttctatgtttttcttttttaaaattttcagaagtttcttttatcaaaccatgatacaaaatgtcttgtcaccaaagtgttaaaactactaaaagcaatgtatgcaactgattactgatgtgtgtctccatacattgagagcatggtacggtggagttttcttgcatttgaagcaaccagtttttgtagtcccaggatatgtctttacgagaccgcgtatctgaaccacaatatttgcattgtcaatacccttaataatttgttcttttataatcttttcttcttcaaggacatcttcatcatctgaaggaatatgattttcctctgggattgaagttaggcaactacaaatggcactctctatgaagagaaggagaaaaggaaattagatcttaggtatgaatctataagaaaaataattatgataataataaaagttagggaactgattcccaatcttcttttaccttggactttgcttccatctattcctttccagtatccaggttttagaaagtagaatactgattttctcataccagattcctttgggaaaatgttatcaaaatagattgccaatgcaaaccaaagaaagaaagtagccagcagccagttatatatattattctgaataagagttcaagtaatttctattagtaaattatgaagagcttatgaagtaattcattgccttaacatgttcacatacaattgttatcacacagtactcatcattgggagtgcacattgctcgaccactccagctgataccaacatcttcaggcgaggaagttgcatcgctgagcagccataaggctttagccagaagattaggtggaaagaatgaccaaatgatctgacacaatttagagaatttggacatgtatggaaatccaaatactccaacaaactgcaatgaaaagaaaaaaaggaacacattgtgaatattgcactaataagttcctttgtcttgtaaagtaaaattgggaaaatttgcctgaatggaagagccagtgatgtaaactgagaaaccggtagctgtacatgatgctgacttgttcaggaaggttgataacatgaaggcaaagccaagcttcaagtagagaatagagaaaatgatttaggtgttgaaatttaaatgagaatgatgcaaagagaagtctttttaccatattgagttgaaacaagaagaagacaaaaaataaaacaatgaagctgttgttcaagaagaagtcaagctgaaaaagtgtgccaaagagcactatgagaagtgaagagagaaatgtgagaattccctcccaaactagccatgaaaaccagtatgcagagtcatagaggcccatcaaagtcattgcctgcaaaatttgaagtaaaagaaaaagaaaaggaatgtttcgtgttgagctcctttcaaatgatctcatcattataagcttgaaaccttttatggaaaatttgataaaatacctgccgaagttttagttctttctcggtcaccaaagaagtcatttgaaatacaaaaccgaacataacgattgcaaggaaaaatggaggtcctactgagctcattgaaaatggagatcctgctgtattcattcctaagagaatattttgaggaggatgtgcaaattccttgaagccaaaagcccaactaaagttttgaactgaacattttagagaaatacttaaaatt

SEQ ID NO: 58657 - DNA, 710 bp, Cannabis sativa
ttgtattatgggaagaaacaagaacgctatattgggcttcttgaaggaaaagatgaagaagaggatttttagttgggagacgaggtttctctctaaggcgggaaaggaggtgttgataaagtcggtggcacaagctttgcctagttatgccatgagtgtttttcttttgactaaagaaatatgctcaagtcttgaaggaatgatggcaaaattttggtggaagtctcaagcgaatagcacaagtaagggtgttcattgggtaagttggaagcgtctttgtcaacataagaataatgggggattaggatttcgcgatcttcgtgattataatctctcttttttgggtaaacaaggatggagacttcttactagagaaaactcgcttgttggaagaatttttaaagcccggtactatcctaatgggtctttccttaatgctaagctgggccaaaatcccagttttatttggagaagcatttgggctgctcagggtctggttaaggagggtgcaagagtttctattgctgctggtacttcagtgaacattcttaaggatccgtggcttcctcatgctacaaatccttatgttacaactgaaaaccaggggcttgtggataaaactgttgatagtctcatggttgttggggaaaggacttgggatcttgaagtccttgctgatatgtttttggaaagggattgtagcttaattt

SEQ ID NO: 58658 - DNA, 638 bp, Cannabis sativa
accataaacatgtaaacataaatgacttctaatctttcattgataacaaatcagattagattgaaatggattttatttaaggcataaaatcccaacagctatttcattagtattatagatcattattcaagaaaagtgtgggtgtttattttgaaaagcaaatattcccagatgcaagattttgaaattgaaaacatacaatagttggaaatattgctcaaactagtttgatgacttttccaaagagcatgaaatagctagacatttaactgtatgagacacacctcagcaaaatggacttcctgggaggatgaatagtactctcataaaaagagtgaggtgaatgctcagaggagcaagtattgaaagatcattttggggagaagctatcaaaacagtttattatttggtgaatagatatcattttgccctattgaatttcaagtttccaccagagttatggataggttaagtacctaagttggaacattgaatagtgtttggatgcactgcctatgctcatattaggtaggacaagatttagctttaagcactaagatgcttgtttctaggctatccagatggtgtgagtgttgggttttatgccctaaatgaaactcatttcaatataatcagat

SEQ ID NO: 58659 - DNA, 857 bp, Cannabis sativa
atagcgatattgacatataggagggtgctaggcactactggtgtcctttagcatttctcttcaaataaatatttttattaatattattgtgatatattttatgttgaaaatattttgctttgatttaattttatttatctttgattaagaaaataatgaaaagaaagaaaacaaataaaaagatgtcacaaaaatggcccaaaacacaaaagattggtatttttgaagtccaagaaggcaagcccattcagcccaaattccttctccaccacacagccacgccacgtggctgcttcccattggctcagcagtaacaaatcaggccatgcaagccttgtctcccttcagctgccccactctcccgaacccacgcgtgagtctcacggctccttgtggtccgcccgtgtgtgccacacgccagccatgcggctggccctccttcttcacatggtccaatgcagccaacaaatgctttctgtcccattttctaaacacgcaaaatgtctaagagcatctccaatggtagtattctttaaaaatgctttatatctccacatcattcaaaatataatattttattttatttttcttccacatcatttttggtacctttacttttaaaaacattccaataatataataccttttaaaaatgctataattatgatatcacatattattatatatataagattttttctttattaaactattatatatattgcacttttaattttttattgtataaaaatacatagtatcaatgccattgtgtggcatcaatgcaaatttcaataataacattcttttatctccaactagttaacgaagctgcacttcgtgcgacatgtataata

SEQ ID NO: 58660 - DNA, 789 bp, Cannabis sativa
attttaatctatgataaagttttagtaattgagtagatgtaatatttggtgaatgattaaatttatattaagaaaataataataaaaaaacaaccaaacaaattggtatagtttgaaatacaaagaaattatcaaaaattatatacgtaaagagcctattactctattgtagaataatgagataagatgaaaattaatttttattacacattaactaaatataatttcaaaataattttaattaataaatattcttttctataatgaaagtgtcaaatataatctcacataacttatcaaaattagagttcctaatgcacataataaggatatgacctataaaactaggtataaattaaataataataaaataaaagtaaaaataaaataaaaaataaaaattagatgtagagtgcaatttttcctagaataatattgtgatatagcactaggttgagtatatgtaggggtttacaaaattttagaagaaatttaggaagattttcaagtgttcttgtaacactaaaaaaaatatttttagtgaaaattttttagtcaaaacatatattttgaataatgaattatttagagtagcattgcctcaataaaataagaggcaaaggttttaaatgatgatgaaacagatctatggcatctatgtttaggtcaaattggcctagacagaattaactcgttaacaaaagatggtccttttagagaactaaaagttggaactcttctggtatgtgaatcttgtctcgaaggcaagatggctaaaaaaaccttttt

SEQ ID NO: 58661 - DNA, 928 bp, Cannabis sativa
aaccttgggcactccttggaggttgcaatcggaaagggtaaaatgtgggtctggccctgagggaagtgcaccctcgtgttattctgtctcttgctcctgggggttccgatttggtattgtgttattgtctcgatcattttgttcggttgcttgaggctttctctaggtgcaggtagtcgggtgttttttatttcgtgttataatggtgttttgcactatatcctttgttggctttgtgcctttttttgttaggatttcctatttttgtcggtatgctattgttttggtcatctccttgtaagatctatgcagttttattttttcctaacttgttaaaacttgttcttctcgttgaatatatttcatctttcaaaaaaagatctcttactcaagaagtcattaagttaatttcttttgaaagaattttttaaaattaaaatttattgaaaatccaaacaacaaacaaagtaattttggagtttcaaaaattgaaaaattaatttctaagaatcaagccaaccaattaacctttatattttatgacaaaaaatcaagctaatctctccaagtgagaattctccttgatcgaactctaagaatcacaatatataagatacacttagggtgcgttcactactacaaaaagtattattatcattgattagattttttttttaggaccgacgctaataaaattaagtgactgtgtaaaatcaacacctataactgataatagtcgtcgattttaaacagtcattgagaatagttgccaattaaaacaactataaaattaaattggtgtgtattttaattggaatccccaacagttcaaaactgtcagatatattatacccgacgattttaaaacattgggtatagtatacccttcgatttaaaactgttagagattctcgtgatgtatataaaa

SEQ ID NO: 58662 - DNA, 1314 bp, Cannabis sativa
aatatagtagtagtagttccttctaggctcatttgtcacgatgattgggcaccatcagcataatttttttattaagttttctctttcttttttgtaacttttccaacattgtcacatgttgcttaaacacattgatataacacagagaactcttcagcaaaagtgttggggaagttgcatgggtgttgagcaccataagcataagcatatctgttgttattgttattgctagtcttaagtattgtgttttgtcttattgttgtagatatgacaaaagtatcacctatgaagaaagcgcaaagagcttcatcaagtcgtcataataataaaaaaagtaagatctcttcatcaagtcatcgtggtggaaaaaagaatgttgtttttcaggtattttttttaaataaaatttattatacttgttaacgcatattttttgttaactaaaatttgagcctaatagtgatactctcacatagaaaaataaaaacagtaaagtaaaaagtataaacacaaaggatttttttacttggttttgcagttaaaattctgcatagtccacgagtcaatcttattagatttctgatagttttttaggaacctttttctcttatgattttttgcgtcccttttttgatctaacttgccactatttataatcacatagtaggtagttaattacagagttgactgtaatctttacaacgtttatcccctgaaataatgaggcttgattacatatcacgtagtataaatgggattattatttgaatatcacacagctgtgatttatccgcttttactgggtcaaaatgatcgtgtatttaaacacgttttaaatcacatcattctgaaatgtctcgacaggaacttggttccaatgaccttgatagcgagctggagctttctcccctatttttctgaggtcaacgttgtacaccttgttgcctctttgtttgaaggcttaatgcttcattttgacaatcgcaattcttattaacagagagtacttcagcagtcatcataattcgaatgccatcttctgactcgtcaagactataagtctcactgaaagatgtctaaagttgattagtgaaagtaacaggtgcaggccttcctatagcgagagaggcgcctcgcttattagggcttgagtccacccaactgttatacttagtttatacattgtatactaactgttttcacattcaatacgcattactttcatcttcccaggtgcaacgaagttgatgtctcgctttatgcatccaatgacatatgatttctcattaatacactaggcaacagtttgtatat

SEQ ID NO: 58663 - DNA, 1410 bp, Cannabis sativa
  modified_base (336)..(336): a, c, t, g, unknown or other
gggtggttagaccggagaggcggtttagggaaatcaaattccccagaatcctcgtggccgcagctgtgcccgtggcaaagcccagggtagtggtcttgtaaatccaccagaggctcctccggattgggagtagaggtttgtggaaatgcaagatcgaacccgccaacaatatgaacaaattcagagattaaggcagcagggccttcctgctgtgcgtcctcagcaagctcaggccgttgcagctccagcggtgccagcagaacagcttgttgctggcaaccacatggagccgttatatgaaagattccgtaagcaggcacctccagtgtttctggnaggtcctgatgtgatgaaggctaagcagtggctcatagtgattgagtgaattctgaattttgtgggggtggttggtaatgatcgggtgacctgcgccacttttcagttctaggaagatgccctagtatggtcggaatgggtgaccctcaccgggatgtcactgttatgacctaggaagaattttgggagttgttcaactccaaatattataatgaagccgtccgcagtgctaagcggaaagagctcattgagctagtacaaactgaggggatgtcagttactgaatatactataaagtttgaccgtctggccaagctcgtggtgggtattgtgccaatagacttcagtaataaagaaaagtacttggcgggtttgaatgtgaagattaggcatgatctagtgatcactactaatgaagcaaccacttatgctgaaatggttgaaaaagctctgcgagctgagggtgcagttaaatttcttcgggagccctaagtgactctgaatgttggtgagacccctacccttcctactcctgtttatggtagggagggtggtgattccaccattgatcagaagaggaaagttacctcagcatcttgtggttcgaggtagagtaagcggttccgtgggaaccaaagaagaggtggacgccagggttattcttaccctgaggcccacgttgtaagaaacaccattcgggagagtgtaactagaagacatgcaatctgtgtggcatggtggggcatttcaaaaaggattgccctcaggaaagaaagaagagcataagtcagtggcaaaacctgttcctgctcgggtgtttgctatcacccaagctgatgctgcagccagtccttctgtcgtgacaggtcagcttcccgtcaacaactccttgtatactgtattatttgattcgggagctacacgctcatatgtatctatgcgggtaattgatctcttgggtaggccttatggtatacttgaaagagggttttgaaccctaatgcctagcgaggagttggttatctctaataggcgcattaggtctatgccagttaggatcgaggatagggagtt

SEQ ID NO: 58664 - DNA, 1457 bp, Cannabis sativa
ataataatctctacatcaatagtaataaataatattattatattactatcaatattattattatactacatgagtcatatattaatataacatatgtgttaccaattaacatcttattggttcaaggcaaagtatatgtaaccttggtccttccaacatggtaagaatcattctggcagaccgatgtagtattctgtaactgcttgtggccaagtaaaggtgctcctatcacccgtgtgtgcctctcaaattccttcaaaaaattgtggtaatgtggtgtctagaactacacctggctgagtgtacgactctaggtaaatgtgccgtctcctcctcagcatgtgaatagcggcatctatatgctgcatcaaaagtgaaaaaaattataaccagaataaaaaatcagtaaatgtcgacatatatcgatattgttcgcgacatttgtcgatatctaacacagcagaacaataagagcaagagataccattttcacgatgtatgtcgacactagtagcgatatatatcgacatctaatgcaatttaatgcaaaaaatgccaattatgtcgacaagtgtcgcaaaacatatcgataaaatacaaattttttgtaatttttcttttcatcgataaaataaattaacatattaaaatatactataaaaaaattacttacatcatcttccaaccattgtccactcaccaacaacttcgtaaagaatgtcacattatcgacgccagtgtggagatttcacggacgattgtttgggatgtcaccaaacaaccacctcttcaatgtgcgcagcaatctatgctctgtggtcttttcgggtctacattctccgaaagaagttgtttcttctttttctcctctgtgtagtccagtaaataacagggcttcttcctctttctcacaaatggtaccccttctgggggtcccgtcaggagcaaaacatcattctgggattgtgtgtcagttatggccaagataatggcatccgttggagttatcggtacctcattatcatcttcttcccaatcttttgggaactcatcttcatattcattgtcattaggtcgttcatctattggttgggatggtgccggtgccccctctttctccttcaacatcgttatcatgttctccaactgagctgtgcaaaactctttcatctctttctgacaatccagaaaagactgcctcatctctttctgactatcttgaaaggagcgcctcatattggtttggctagtcactaactcagtatgggagagaataatggcagcctgtttagcctcaattctattcaacctctccacaagtgctctaatgtctgatgtattagcagcagtggttggagcggtcaaagtagatggctactctacttttggaggtggtggtggcagaactatatttgccttgcggacggcttcaacaatggtgttggcttgcgtttcaa

SEQ ID NO: 58665 - DNA, 690 bp, Cannabis sativa
gtacaatgttcaaaaaaagaggtaaaaataatagactttaaaaaagagggtaaaaataaaagaggacaatataaaaatggtatgaagtgtaatttcctcaattaaatacaagtagttgggttttatccagagacagacccatttacaagcttatggggctgcagctcttactgaagaaaaaaaaataattacataaaatattattttttttttggtaaaatatttacatttttattttgaacgatattttttttttatattcttacaatgttttaataacacaaaaataataagaaaatatacataaaagtaaaagaaaaataacatctaaataatacaataacaacaacaaaataatatacaaataacaacaaacaaataacaacaaatcaataacagaaaatcaataacagattatcaataacagattaacaagaacagattaacaagagtacaacataaaaatacattaaaagatcgtattttctataaataaatgatacaaatatttaaaattctgtataaccgtatttttgtaatttttgttgttgtttttgtgtatttgtaaaataatccccccaaaaaaggaattttcacttttatgatttttaaggtataagtttttaaaaatataacttttttttttctttcaaaaaaattatcttattgaaaaattcaaaaaaaaaaaaa

SEQ ID NO: 58666 - DNA, 2050 bp, Cannabis sativa
taaaactttgacctccttgccagcgcaatttgcaaaatgttctggtaaaagtaagcgcagtagcgaactgtgctagtaaaagtgatatttcttatagtgatacttgatcaatataggatcctaacaatcccatacttaatcaatgtgagatcctaacataatacaaataaatatttaatctcacatctcaattgaaaatgtgtgagatcaactactaaatggtagtacgataagagtaattcaagaatctcaaaagagtatttagactgtaaatcttaccgctttcattacacgcaaaacttgtccctcccagtaaggaagaaagccatcatgaaaatatacaatacgataaatctcaccaggagcatttgggccagaaatcttgtcaacagagagaatggtggccgtgtgaagtgacttttccgagtatagatttgtgggaggccttgtggaattttcgagctctaatggagccacaggaaccttgttatcttgccatatggtgcatactacatgacgagagcgattatgaggagtagtacctagcctttttgatgagacattctctattgcttgtccaaaatttgtcttaaaagccaaactcaaaggtgccccagagaaaccctaataataacaaattaatataaaaaatactcaattaatgaaaaaccctaaaagaaagtatatatgcaaaaataaataaattaataaaccaaccaaaccttgatgaacaaagatcttttgagccccaaagacctatcattgatgtgagaatgagtggttgcaaaagaaacttgagagagggtgatagccatggctagctagagctcttatgatatataatatatgttattattattcttttgtgaatgagtttgggaatttgtgatcatgcagaggacctttatatagtgtttaaaatcatttaaaataatttaatattacacatgtgattttttttttctttcttataacaagtattgtctttatataaattaaaatcacatgaagggaaaggaatattataaaatattaagaaacctaaactaaatttaaactaataagtgaaaactgaactatacttctatgttactatataaatataaactttcatttttatgttaattaattttgactaaaaaatttgtagttaaaagtattagtcgggactaaatgtatttttagttataatttttattgtgattatataaaactaaattaatgataatttatatttaaataatatattttaatcacaaataattttttatagtgaaaagttatatataattgaaaaaaaaaattatgttatgattaattatcatttctagttagacctgggtcattcttatcatgaaaggtatcatttcatttggtacatataacttaaggatatatgtggttggaaaaatcatctctattctttccccaaaaaaaaatcgtgtctatattttagtgccctcacaaaagtactatcaataattataaataagatatactattaatatttcaatcacacactaaaccaaaattaaattgtagggggtcaatattaggtagttcatacaactttgtagggggtcaatattaggtagttcataccatgttaggtagttcatacaatattaggtagttaacaatgtaaattttggtgacttaattttttcttttttttgagtgatgaaaaacaaaaatatcatagtaatttgtttttgaacattattattggacatcagtggtactctacgattagttagcgaaattttttaaaaattattatattaaattatatgggatttaatacttaattgtataccactagtgccttttcgcatttttctttgtttttaaaaatattttacgcgttactttaaaataattaaaatcaagtaactataataaaataaaatataagtggtcatttaaggtgttaaagactcaatttaatacaactaatatttacttgtaatttcttaaaagaaaaaaaaatatcgggtgcttctataatgcaccacttaataagggtacaccgatacacccctatcttttt

SEQ ID NO: 58667 - DNA, 1155 bp, Cannabis sativa
gtaattcattatgtccctgtcccgagagtatacccaacttagacctatagggttcgatgagcgcctctgcaggtttagaatgcctgccacccggtgggggagtcacgccaaggagtattatttttcccacttgggccatttcttgggtcggtcccggatgggctctggacctccggtgcctattcccctagaccattcaacccatttatcctccaactggtttctcccttcggacagctttcttggggatgatgaaggtagccttgtagtccaagactttgctatagctgaattagagagtcagggtaggactagttttattgctttcttattgggcgcacgccttttctaatgattattctaacacttcgtttatttctttgttgtagcaggccaggcctatggaagatcttctggctacacttctcgaggcatatagccctgacgcctctctgcctccggctccatcccagttggtgacccacgggaggtcttcgtccagtgccccttcgggaacgattgttttgatagacgaggagggggaagcccaggaagatgaggtcgaggttgcagccacccttgagcgtaagcggaagggcaagatggttgaaattaagccttctaagcggacccggaggggggacactccagatgtgagcaatgactccggaattcctcccgaagtggaggagtatactgtgtcgcactacattgtgttgaccccggtccctacggatgaggagaggcaaatgcttcgcgttgccaaacacaactatgccctggacgagttcagtcggggcatgctgaggtggaagccccaaagaagattctgcgggaggagcagcaaaacactttgcgcgaggacgcctttcgaaatccttgggacctgaacatggacccctagacggactggttcaactgctttgtcgggcctaccagagctcccttcgcctcaaagatgactagccaatttgtgtcccacctaactcaattcccagccaagatattccatgaactccgtataccaggtgcaagacatcagctctgccttggtcgcggtgagtacttgtaatttattcccttctcttatattttgtctaaggcatctgatttcattcatgtttcttttcccagattactgccgagaccggccgc

SEQ ID NO: 58668 - DNA, 1013 bp, Cannabis sativa
atggaaaaagggaaaggtcatggttcgaacctaggaccttgaagctattaaaatattaacggattgtaaaataccattacgctatactcaaaaaaaaaaaagaaaaaaaagagttattgaattttattatctctgaatatgttcttaggatttttcttaggtggtgagagcatcacttttgctctcacctatgagagcatttttttttagttttgattggttcaatagttaaaatgtatgggattaaaatgagttgtcaaacatgctaataaattttttaatatttcttttaacaaattaaagttgactttattaaaaaaaaaaaaaaaactctcttattaaaataaaaaatgaagttaataatttttcatggattttctttaacatcaagagtaataatttaagatcattttaaagtatgaatacttttaacgaagatcccaaaatacattattctagaatcaattcagtatagataagaaaaaagaatgaaagagatcattctagagaagtaattagtacttaaccgcaaaaattaagaatttttgtttataaataaataataaacttcctcatcgatctttaaaagattgagtgtattaccttctatttattattattattttaaaaatggttggaaatgtgagatgattgttacaattgctggatgtgggtggttttttttttaaaaaaaaaataataaataaaaaaagttattaatcttgtaatataattaaattaattactaccattagattaaaaattaaaagctacaaaaatacttttacttttgagagcaaaagtaatgctctcacctaaggagtaccttatgttcttaataacatgaaaaaatatgtgtaggtctcaacttttggcaatgttatatgtttgtatatattatatcatgattaatatatgtttttctttggttatgcaccagaaattttatgaatgtataatacttatattaaataattgagattttggtggagttttttacgatgtttttatta

SEQ ID NO: 58669 - DNA, 608 bp, Cannabis sativa
aaattgaaatttccctaataaaatatgtatagagcaataaattatattctataaatgtagagcatgaatagtgtattttaaagaaactttaaaatgaaaaaagagtttaatgcatctactttaacgtgtatttacggttctttaaatttttttaatacttctccattttagagaagttgttgtgagtgctctaataaagaagagttgaagacttttcttggagactttcttctaattggattcctacaaagatcaatctccataacatggactccagtcctgaatgataatttgtgcccgctttgtcccagtgggttggaaactatacatcatgcgctttgggtttgtagtaagcttgcctcgacgccaaagctttgtgcctttaaacttggtaatccacatatgattgtagatgatatatataattttatttgcaattatcttcttcaacttccttgtagagaaatttgaattggtccttgttacttggcgacatatttggtttcgtcgtaataaacaagtgcatgaaaattcttctattccaccagaattcattggtccttcggctacttatttcttgagttcttaccacgccgaaaacaagataa

SEQ ID NO: 58670 - DNA, 760 bp, Cannabis sativa
ctcagattcactaatctggtgctctcttgtatctccacgactacctttcaattcaacttaaatggtaaagttactggccgtgtttccccactactagaaaaacaggttttagtgatacacatcgagtgactctaaaattatttagtgacactccactgcgtgtcgctaatgagggtgactggaaagacaatttttagtgacacttcacgcgtgtcacttaaccattttacagtcactcaatgcgcgtcactataggcgtttagagtcagatttcgttagactaaaaaagtaacagccacacacaaaaagtgtcactatttctttttcttttttttttttattctttattatttattttaatgatatagtgacacacaaaaggtgccactatattagatatttttttagaaaaaaaataatattaaatatactatttttttccttttaatatttatatatagtgtcccgaggctatacatataatcttttgatttaaaaaataaattaaaaaaaaaaaactaaattttggtattacttctttttagattttattaatacaatattattattattattattattattatttttgaaatagaaatttctttatatatctgtctaagagaataaaagagagaagtctaacaaattaatttatttcactgtacaccattaaatccataacaataaaccaataagagaaccaatgtgtataaacattaaattaaataacaaaataggtgtcccagaacattaacat

SEQ ID NO: 58671 - DNA, 1137 bp, Cannabis sativa
tgtcttgcttatcttactgagtctgttgactcatcagtttgctacctgatgtaggtaaaggaaaagcgaaactggaagaacagtgagatggagctcggcagagattgtacatatcgcggtagtgcaacctggagggtttcggtcttttactattttgtgtccgtgttttgagttgcctgttcacgaatttgtaaaaaaaaaaaaatactaaataaacatatatctgatatgctagtaaggtactttaaatcatatttttatactcgggatcctgacccatatatttataaagttataatatattaaaattatcttttgaatttagtaaattataaatacgggtgtttcagtgatactctcattacattcctctacacacactcactatgatctcggatatactctctaaatttgaatctgaatctaaagtatgagccttggatattggagatcagaactctcttgaaagagtacagatactcttatttatagttgttggtgggactccctttaagttggtattaaaattaactgttataactaacaacagtttttttcagattcatctgatgaattaacaagtggacctactaatttactttcagagattaaatgaaattaatcccaacaaataaaataattaattcagttatacaactacatacaaatttttctttttatatattgacttttcaactatttttttcaaaaaattatatatatatataatattatggaattttttctataataaactaaaaatgaaacaaatttacatttatgacctaaaatgggaaaataaacataaatagaaaccaaaagtttctatttacaaaaataccggcaaaaaaaaacggtggagagcctcctccttcgtgacccagccgacgaaccccaacaacccaatctcaaccaatttcctgccaaaaccaggaaaatctaatctaaaaaagatgtagatctcaaggaaaaatcactcagatcctgaaaaatccaaacacaaaaagggaaaaagaaagcattcaacctgtattgatgtacaaattaaaaaaaatcaaaaacaacattcagtcaaaagcccaacgcgttcagagtagaagaatcgaagagaatgagatctggaaatcattgaaactc

SEQ ID NO: 58672 - DNA, 1305 bp, Cannabis sativa
  modified_base (525)..(528): a, c, t, g, unknown or other
atgatatgtgtatatgtatatataggaacaggctatgtcatatgagagtggtggcaatataaacttgatcatgaatgaagatgtcaatagcagcagtggttcgaatctaaaagttgaacaagacaataatgcatacttaacaagtaacagaagttacaacaacagtactacatattatgatacactcgaagaagatcaagtaacattagcttctcttccttacaattataataacagtaatgactcaatcttcttttctctgttggagtcacagtcacagccacagtgaaggtcaattttgtagacttgttagatcactagtttttggtcgtgcattgcacgtgtaatgtaacgaatataattaacgatcacatattattattattattattagggtaaatattattttaaaacatgtgttttctaataattattaattaaattatttattttgttaaataataaagtagaccctatattttctaaaatgttacaaataagacattgaactaattttttgtcaannnnaaatttaataataatatgatctaatgttatgacaaaactggttatatttttatgtatttgttcgtgttaggaaatatcttcaagtttgttatattaaaaaaaatgtcaaaaattgaacacagggtcctatttttactattttagaaaacacatggttcattttatcatttaacaaaacataaaatacatggttcaaaatgttatttaaccttattattaatattaattattcatctttagtttatttttagaaaatcacctcatatacgattttttaacttttttaaaattatttttacggtttaggttgctccaatagttactatttgggttgctatgtgaatttggattgagaaaaaaaaaactataaaatattttaaataaatacaacgtatatgattattaaaaaaattgaatgaaagaaatctctcaaatactgaaataaataaaagtgtatcaatatatatatttttttaaggaaatgtattgtataattttccaacagttataatagctttaaaaaaaactataaaatgttaattgaagaagaaaaaaaaaagacaaaaaaaattatatatatcttagaatgtgagaaaaaaaaaacgaaaaagaaaaaaaaaagtacaattaaaaaaaaagctaaaatgttgatttcttcaacaatataaatttaaaaataaattaaaagaaaaaaaattgataaaaggtggaatggatgaaatgagatagtcaagaaaaagtttgacagtatcttttttattatttaaattttttatt

SEQ ID NO: 58673 - DNA, 643 bp, Cannabis sativa
atacataccgaaaaatttatatataataaaataaaaactaaatattatcttaaataaatgatatactatagacaataaaaatcatataccatactgttgccccgagtttttccaaaaatatgtagccacagctatgtatgacacgtggaccaaaagaacacctcacccgagaattagctaagagtcgtatacagaagaataagtgtagttcgaagatggagcccatggagttgtacaaaaagtatgccctctctcaaggagctaaaaatatagtaaggcacctccgagagcagaagggcttattcgaacagtcacctcatatttaatgcaacatggggaaggcgtctgggaatgcccataagaggacatgtcagacaacgtaagccttgtttaaggcgattacacaataatcgaagggctagtgacgactccattatgaagaatcacatcaatcaaagaaggataaagattaatctcacctaattcctacggcattgcatgccctattccgtatctcttgggaacttgtgctcatatgttgttggcactcaaagacaagttatccctttttaactatacccaccaaactctataaatgggaaagaggatcggaaaaagaagagaaaaacacaccaagaacatt

SEQ ID NO: 58674 - DNA, 866 bp, Cannabis sativa
aaaaaaaaaaaaaaaaagcaggacgatggagaaggcgtacggaggacaggtggttataataactgggtgcaccacgggtggaatcggtaacgcgctggcacgtgccttcgcggcggagggttgtactgtggtggcgacgagcaggtcggtgaggtccatgtcggatctggaacaggattcaaggttctttctacaggagcttgacgtgcgatccgaggagagtgtgcagcacgctctttcaactgtactggagaggttcggtcagatcgatgtgttggtcaacaatgccggggttcagtgcgttggccccgtagctgaagttcctctttctgctttccaatccacttttgataccaatttattcggtaatctgctttctctcttaactaattttttcaatttatacatctattactcaatacccaacctttgttgatgttgatgttgatattgtatgagatcatcattgtctcaagaactttgaggtataagaacacacttcatgtcaaagttttgctctttcatactttttcaatttcttttagctttaaaggattcctatggtgtgattttcatttcaggtcccataaggttgattcaagctgtagttcctcacatggcatctaggagaaaagggacaattgtcaacgttggaagtgttactgctttgtcccctggaccgtggactggtgcttatactgcatcaaaagctgctgttcattcattaaccgactctttaaggtgttaaaacattgcttaattgataattccctaatatgtgttactctcattcacatattgattacatcatcatcatcccttttagagtaaataatcatatttatgtccgtttatttttgtgataa

SEQ ID NO: 58675 - DNA, 1975 bp, Cannabis sativa
tctgtttctctcagatttctgtaccagcagttgtgattcttttcttctttgttgcatgaacaacacccttggctattggatatccgaaccaccaccttggttccaaagcttccaccattgtaagcctcttccaagaagcccccaaaaccagtcggtttcccctctgtaaaactagatctgattttgttgtatattgttatgcctctgattttctgtttctgtagtactgttctgagtttgtgtttttctgcctctgtgttttattattgctgaaatatatatatgttgttgtattagagcagaaagagaggagagttagttacaaaaaatattactaaacttttgtaactaactttaactgctttgtcttggtaaatagaggctgaaggccacataagtcttttttattgcttgtaatttatgtgtatttgtaatatgaacagtgtgcaagaatatggggatttatttcaacaacataaaaataaatgggaaaaagaggtttggtaaaaatgtctgctatgttgtttttggtggtaacatgtattagcttcaatgtgcctttgtggaccttctctcggataacatggcagtcaatctcgatgtgctttgttctttcatggaatacggggttctcagagatgtgaatggtggtttgtcacaataaagaatggcgggatctttgtgatgaatgccaaagtctcgaagaagagctaatagccaggtgatctcacaagtggcatttgccattacccagtattctgcttcaacgaaagaatgagagacggtagactactacttttttgatctctaagagattagggagttaccaaggaagacacagtagccagaagtgggccttcaagtgtcactgcaggaggcccaatcagcatctgaaaaaaatcttaagatgaaagtctaaattggacatgttagtttcagcataagcagacaattttatagaagaggcagattgaaagaaaagcccttggccataagtgcctttgagatatcgtaaaattctatgagccgcattaagatggggagctcttgggttagataaaaatttaattagtttgttaatagcaaaggaaatatcagggcgagtaatagttaggtaaatgagtttacctatgatgttgcaatgtatttttaggttttctaatggtttcccaatatcgaatgagagccgaatattaggttccattggtgtagaatcaggagaagctcataagtaacttgtgtcagttaaaagttgtagggtgaatgatctttgggatacagaaatcctagagggggatcggccaatttccaaacctaagaaaaaacgtaaaaggccaagatccttaagttgaaacacacaattaagttgttgtttaaaggaaagaacatcatcatcattattgtaggtaaccactatgtcatccacatatattaaaagagcaagaaaaatgcctttgtaatttttaatgaacaatgtgggatctaaaagggattgagtaaatccagtggataaaagataattgctaagttttgtaaaccattgtctagaggcttgtttcaagccatagagacttttgtttagtttacagacaacatttggaggaatatctcctttaggtttataacccttagggagtgtcatgtagacagtttcatgtaaatcgccatgaagaaaggcgttattgatatcaagttggtacaaattgttaatggctgcaataacaagcagtaattttaatgtattaaactttacaacgggggcaaaggtgtgaaagtaatcaataccttctttttggttgtagcctttagctactaagcgagctttgagtctttcaacagtgccatcaacattgtatttgattctgtatacccatttgcaaccaatggcatgatgtctgtcaggaagagtgacaacaatccaagtgtagttggctttgagagcatcagttttgttgtccatggcttttttccattt

SEQ ID NO: 58676 - DNA, 815 bp, Cannabis sativa
tatatatatatatatatctaactcaccaaattatttgtccaatctacttctaaccaaatcggaaaatagtaatgcatgcagtgccaactgacactatatacatggtcttattttatagtttgaaatcctcacttgtgcgctcttgatcataagttgtatatatgtatctaacttaattaccaaattcacttattaactgttatttagccaatcaacttctatatgtgtaaatattataatatattttagctctaacttatgattgagttctaaaaatcccaacggtttataattagggttggggtcttattatgaaattagcaagccaatgttgagtaccccaaaaattatacaccaagtaaaaaattttgttagaatttttgtgcactcataaaatatttaaatttgtacatatatttacacaagtgtttaaacatgagatcttaattaatttttaaagaaactctcaatgcttcaaagagaataataacacaaaatagtggatgcatacattaatttattgttaaagataatcttttgggtattgtcttctaaaattatacgtgactcttttttatttagtcttaaaaattagagaatattatcccacgtgaattaaatgtaaaaatattgagtcaaatataataagaacatgaattactccactcattatcaattaattttgagatagaatcccatatttttcaacaaatcagaaatatcacttaataatcaatatttacatatttaattcacccaatgacccaattattaaaataataaggccaacccttttttttaaccttagaattagt

SEQ ID NO: 58677 - DNA, 3902 bp, Cannabis sativa
  modified_base (3853)..(3876): a, c, t, g, unknown or other
ttccgtgagagataattctgtgcatgtacgtatctgtatgtgtgcgtatacaaatatatgtatatatgtacagaaaaatagtgagaaataaaggatttgtagctgtgtgtgtatgtatgcagttgtgtcttttagctgtttcttcagtttttcggtaaaatgaaagttagtttcttggttgggtcaaagatgtggaaaaagcgtgccaagctaagaaaaataatagttgaaacttgaaaatgaattgaatagattgatcaaaaggattttttttacttgtttaaaaaaatattttatttatttatttacaattaactattttatataacgaaaaataacttttattatttacaaaaatttcaccccctaaatatatcaccaagactaagataattacacaaatgctaaaatttttaaagatgttacaaatatacaatctttaaaatatcacaatgattcacgaatcatgagtaataagataaagaaaattatccattgagatttatagggagtatattttccaggttctatgacattaatctttacatatctttcagctcattatttttgttctagttttctttctttcttttttttttcattcgggctcagcccaataagacccgaacccgatcacgcccaacccgactacacccgacccgatacccgacgtacctgaacacccaaaaaccgggtttggttgtgcattttcaagaatcgaagccgaaaaccagaacccgactacccgaaaacccaaaaatccgacccgtgtgcagccctagccctagcaattctgtcaaccaagacggtgggatcaaggaacattatcccgatcataggtggtcctgggtggaccgcaaaaagtatctcgaattcaagtgcgagaaggctagagagatgagactactagaaaatagcccccatgaccatttaatggattaagatccaaggaagagattgcatgggccataacaatgaaaggttggaagaacggaatggagttttcaccaactctagtggtgaagacccagagccttgcatcaaaaagtcgcagaagttgcactcctggagaatgtcggaagttggacgagggcaaaaaccttgtccaagcttgcgtcgaaggcccaaactcttagtggccattcttgttcctagaacccaatgtattgtgactatttgtggacattctgtgtcggtatctgcacctacgcgaacccacatcttttgggtaaggtgcgtcacgatccagacaagaagtgcttcctggatggttcaaagcagaggtccaggaacagaagttgagtagctactgtgccaaggtcaagaagcttcaagaaaacccaagaaagactgtggactaacaatgcccaagtggcaaaatcctcaaagaaactcaaagaagtggtgtagacatcacgaaattggaacatctagccaagatacgactatttaaaaggtgaggttgggacgttgatcaaggtgggacatttagggaaatgggtgtagattcctattttgtataccaaacatggtgttgctcttggaacgatgcttattcctggaaagaagggtatcgtaaaaccttcgttaggagtacgtcaccctcgagctcctggaatgcatttctcagtattctctgctttgctggctgaagaaggaacagtgactcacgctcttgaaccaggagccctgggtcccccatgattaactccaccacatcagctggaagaaccagaaaggcccaaaaatgacgatgaagaagctctcaattggtgtagctagtgtgctagggggattcccacgaagccctttttgggctcacagaaccacgaagagaacttcaacagggcacatgacacattccacgaatgataattatcacaatcaaagaatgttatttcctcatattggcgagatattcgtgacttagcaaggaatcacttgttgccccgctgtagatgcagaattcgagaaatagtcataagcccaactcaaggtgcacctagacaagatttccaagcacgttggttttgatgttaaaggccatatgtttggaggtggaagttttgcctagaggtaggtcgtcctagcgtctcaagaaccaggaatgagggtccaaggaccaagttgggaaagatcttatgatacacaatacaaagcaaaaaatggaggaaatttacgcaaagagtttacaccccgggtcaccggcacgagtaatgttttaaataagtgactgagagttgaagatgttcaaatttctaagctcacttggggggtattatgcttagttgcgtatgcccctgtaaaagttcgagtgtctgcccgaccgaattatattgcttgtggagatttttcaagctttttgttgaaaagatcgataggggtttgatacatcttcaaccttccttcctagagggaaagataacttggaatctattgaacgcccattgtggtttttacctttagtcttgaaagtaaaatcgttgcttaaatttagcgcgactccaaccttccttcatggaagccaaagtttgttgcataattcaacatggttctcatgattgcgtgtatccctactgtgcgtggaagatcgctttgggtttgatacatcttcaaccttccttcttggagggacggattgcttgacgtctattgaacgcccagggtggttttcaccttcaatcttgaaagtgaaaccgttgcttgaatttagcacgacttcaaccttcattcacggaagccaaagtttgtcacttaattcaacacagttctcatgagtgcgtgtatttctgtcgtgcgtagaagatccctgggagttcgatacgtcttgaaccttccttctcggagggaagaatcgcttgaggtctgttaaatgcccactgtggttttcacctttagtcttgaaattaaaattgttgcttgaatttagcgcgactctagccttccttcacagaagccaaagtttgctgcataatttaacacggttctcataagcgcgtgtatctctaccatatgtggaagatcactgagggtttgatatgtcttcaaccttccttcccatagggaaggcttgaagtctattggacacccactgtagttttcaccttcgctcttgaaagtgaaaccgttgcttgaatttagtgcgacttcagccttcattcacggaagccaaattttgctggataattcaacgcgattctcacaagcatgtgtattcttgccgtgtagttttactggtagacatatcataagcttttggttgaaaatattgcttagggttcgatatgccttcaacccacttttttgcaaggaggaactgcttgaagtctatcgaatgctcaacttggttttcacctttagttttgagagtgaggcccttgcttgaattttagtatgacttcaacctgccttcatggaatccaaaaatccgctgtgaaattcaacccagcccttacgaaaagtgcagccagcatattttcaacttcatccttgagaagggaacattgttggggcaattgttgtagtcgcttgcgtccatcgaccatgatcaaaaaatttcccgtaaggggtaggaaaacaaagcatccctaaaagctttctatgcttctcagtacactcttgttcccgattagggaaagcctgtaacagacaacccaagatgaaaaggtatgattaaggtgtcagcgcgaatatggcctggcctcctagaaaagagcctggctaagactttcacggacgaccgaatctccccctatttgacctaagtaatgccgatttaccacaagctatgttttaaacaagtgactaagaagttggagacatctaaacctacaaggatctagatttactaacnnnnnnnnnnnnnnnnnnnnnnnnatatgaatatctctaaaataataaaa

SEQ ID NO: 58678 - DNA, 880 bp, Cannabis sativa
gcatgcttcgtggatctattacttagtaaaaatatctaattattgagcgatttgccttaattaattgtaatagggagattgaaaaaattgactacttcaacattttttacggggttaacattttaattgagaatctagaataattttgttattattgatcttgaatgattgttgagggtagagattgactcttaactatttcttaatagcgtaatatctatctttatttactttgtagtttattgtctaatctttataattaaaccctcccctttttatttcgtgttactaatttttgaataattaattgataatagtcctcgtgggatcaacctatatatactgttgtactgaaataattggtaatatagaacaaaagtaaatttgttgtggtaaacaacacgcatcaaacttttaacgccgttaccggtgactattttattcaatttgttattcatttttttcgtattactaacttgttctcctagttgtggtcttaatttttagatcattctttggaaatgtggcgatgtataatcaacattactatgatccacattatgtttcgccacaagtgcatcaatatgattcatactatgacccaatgtgaagaccacatgagtgtaacatggagttgagctaatgacgttaaacaaagtaaacttacgagagtttttccttacctttttctttttatttttctttgatgttatttagttgagccttgaggacaatacttatattaagtgtgggggaggaaacgtgtcgtgtctatccagttttttttccttattataataatatgcatatatgattacatgtatagagtgcatgtttatgaatgcctattaggtaacatatcagtaatggcagtattagt

SEQ ID NO: 58679 - DNA, 2301 bp, Cannabis sativa
gcatattaacaattcaaaactacaaaccgcaccacaccatgcggtttaggaaaaattcaaaccgcgaccgcaccgcaaagaatttcaaattgcattttcttttttgcagtgtgggtgattggagcgatttgagcagttttatggacacccttaaacaaggacacaaggagaccacttccctcacccattcattgatcagatgttggatagattggcaagtcaagattattactattttttagatggctattctgggtatcataaaataactattgcacctaaggatcaagagaagacaacgtttactttcccatatggcactttttctttctgaagaatgccctttgggttgtgtaacactcctgcaacattccaatggtgtatgatggatgtattctctaatttgattgtgaatttcatcgaggtctttatggatgatttctcagtgtttgggtcttcatttgatagttgtttgagtaacatagagctggttttgattagatattaaggaggggatagtattggggcataaaatctcaaaagaaggcaatgaggttgataaagacaaggtgtctacaattgagaacttaccccctccggtttcgataaaaggagtccgaagttttctgggtcatggtggcttctaccgaaggtttatcaaggacttctccaagattacaaaacctttgtccaattttcttgttaatggagtgccttttgagtttgggaaggattgcttggagtcttttcatactctcaaggagaaactaagttcagcacctattgtcactaaaccaaattgggagttgtcattcgatattatgtgtgatgcaagtgattataccattggagttgtgttgcgagaatgtgttgacaaggttaaaccttgaatgatgcgcagttgaattatgccaatactgagaaggcgatgttggctattgtgtttgcatgttgtaagttccggccttacttgattgggaacaaggtgatagtttataaagaccattctacaatcaagtacttgatgaccaagaaagatgcaaagccgaggctaatttgatgggttcttcttcttcaataatttgacttaaaaataaaacacaagaagggcacaaagaatctagtggttgatcatttttcaatattagaattagaggagagctagaacacgaaggaggtgcaaataaatgaagagtttcttgatgaagtctttagtttgaaagaaagcttaacagtctcatggtttacagaatgtgaattttttggctactaacattacactttcagacatgaatagacaatagacaaagaagttcttttccgaagagaagcactacaattgggaagagccaatcttctacaagcactgtgttgatcaaataattagaagatgtgtgcctgcagaggaaatgttctctatcccgactcattgccacagtctacaatgtggaggcaattttagtgagaatcgaactgatgcaaaggtcttacaaagtgggtttttttggcctattctattcaaagattctcatgaatttgtcaatgtgtgtgatcattgtcaaagaactggtagcatttcaagaagaaacgagatgtcgttaactggtattttggaggtagaactattttatgtgtggggtatcgacttcatgggtccttttccaccatcttacaacagttcgtacattttgttagtcgtggactacgtgtcaaagtgtgtgggagcaataacaacatgttctaatgatggcaaaatagtttaaacttttctacaaaagcacattcttactcggtttggtactcctagagttatcatcagtgacgaagggagtcacttttgtaacaagcaatttgaggaattacttgcgaggtatggattctatcataggatagcactactgtatcatccacaaagtaatggccaagatgagatttctaaccatgaaatcaagttgattttggagaaaacagtgcaacgttccagaaaagattgggcaaagaaattagatgatgctttataggcttataggactgctttgaaaacccctattgctatgtcaccatataggttagttttggggaaatcatgtcatcttctagtggagttcgagcacaaagcattctgggccatgaagaccttgaatatggatctagcagcagccggtgaaaagagattgttccaactgaatgagttggaagaattttggaatgaggtttatgaaaatttcaagatttgcatagaaagaacaaagaaatggcatgatagaaatctggttcagaaggagtttctgttggaaatta

SEQ ID NO: 58680 - DNA, 1269 bp, Cannabis sativa
tatttatttacaactaggagttaaacttaaatatttatgtcacaaattactcattaaaatataaataacatgaaacaaggagagcgaagcacgtgcattgtgtctttactaaatataagaaaagcaattaaaagagacctacatttgaaaaccccaccgactttgtgttcttatcttgtttagagtatatcacacgattcaaacatttatcgtctgcttggaagcaaattagacgaagcagatacctgtcacaacatgtactctcttattttatattcatgttgttagatttttttttctgctattttttctggtatatatacctaaatcttgctttgatgactagattgaaacttcaattaccttctttttcttaaatcttgctttgatcaacagactactagattgaaacaccgcctccctcacactcacctaatagtgtttggactacaccatttagattaaaagccccatctgcatggaagcaaatccgccattacgacaggtacgttctcttttagctattttaaagattattttagctctcattttttatcttatgcactttattttctttaatctaagaattttgggatttttgtctttgaatgtggaatgatattcaatttgttttttttttcttcttttcttttattttctcaaacttgttttctttcttttatttttagtttttcataattaattttaatttgtatatacccatcatctttcttttttccctctcatttttctcttatgcatttttcttattactttatttgggggattttgtgattttcttattacaggaatctttgtagaaatctttgtgttttggaataagatgagttgaagtttttaggactttagcatcttattttttatttactatatgtaatttttctattttgacccattagtttatgaaacttttcatttatcctctaacttgacttggagtttcatctttttaatttgggtatgtgaaagaattttacacacttttatttgggtaagctcaatctatctctctatgtaagttatagcatttcacaggtatatttttattttatttttcttatattatcaatctgattttacataaattagtgggtttgaattacgatttgctaattttgtttttctaggttttattttctttatttaatttcttattatttattatgtcatgttttttgttgtttctttgttgagtattattttgggagctttcaccttgttcccttttgatgccctttatgtataact

SEQ ID NO: 58681 - DNA, 667 bp, Cannabis sativa
atgcattgaatggacgtatatcacaaaattcgggtttccatgatttggtttctgatgtctcatttcatttatcctctttctctaatgtttgcttatctcatataaaaagagatgctgaccaagctgcacatagtttggctaagcaagcattacagttggataatgattgtacatagttagaagagattccttctaccatcttctctattgttgtaagtgactctatttaatttataataacagacattttctcaaataaattaaaattacaactatagatgtttattgacttagtttctcattattctagttgtagtttcgtataaggaattattacatagaaaatataaattgacactttatttacaaaaatacctccataagttaaggacaatatttataccttttatgtgattttaattatcataataccacctacactatcacttacacaatcaaacgatagttgcagggtggttgctgcgtggttgcgcggtggttgctgcgtggttgcgcagtggttgcatcagacgaacgtttcaatcagatgatggttgtagggtggttgcttactacaaaaaatcttactttttgtcacaagaaaacttgttgactaaaagtgaaaaaaattataggactaattataaatcatgattcctatgttgtg

SEQ ID NO: 58682 - DNA, 545 bp, Cannabis sativa
tattggggcatctataaattcttggtatatatgtatatataatactccttttagtgtgtagatataatgctccttcaaatatctcaaggaataatttcataaatacttaaaaattaaaaaaaaaaaattataagaatatggcagtataaaattttaacatttttatgattttatttacagaaaatatggtcttttaatatttttatgttgtactcttgttattttgttattaatttttttgttatttctatattatttttatgttattatgatgttatttgaatgttattttttatttagttttcttattatttttgtgtgatttgtatagaacattgtaaaaatgtgaaaagtatatatatataatatttgaacataaaagtaaaaaaatttaccaatattttgtgtaaatttctcatatctcaatatctcattttatttatttctaaaaaaacaaaagaaatatattgtcattttattataaattgatatatacattgtacatcaaaataatatatcaccttaatttaccaaatattaaatat

SEQ ID NO: 58683 - DNA, 3077 bp, Cannabis sativa
  modified_base (1613)..(1613): a, c, t, g, unknown or other
tcttttcttttcaggtggttgatacgtggtatcacgggaggactttcgttttggttgaactctttcactggttggggaaggaatagaaaccttagatggaggacgagggggtcctacaggttttgatggaggttgtagacacgacgaagaacgagtgactcgttttgacacagatgaaggaggtgacgacagagaaggactaacctttttagtcaggggaggagccttacctagaaacgtacgaggtttctgactgactgggggtgagggcggagacggagtcgactcaggattcgaataatggttcttacagtcattgtgttgaatcaatcgttgtagatggtcattcacggtcgatgcaattgaccactcgtaatatcagccttcagaagttcatagaagtgcaggagaagattcggtatgatccccatccagataatccagatagttggacgctgtgtcgacaagagactagcattcagataaagcctttgtcggcattggcatcaatggcagagaaggtggaacagcgatgtgctgagagatttgtgcaaaatagtgccaagggtagagaggttatggagaggatctgtaagtatctcgaggccgagtcgggcggtatttctctttgactctaggcaaaacaaatttttgtatctttcatgatttgagaaatagcaaaataatagagtttacttgtttcttttgtgttaataataagagtcgtcttctaattttctgaatggacatttcaaaccccatgagcagcctaagaaatggtcttggaaaaatttaagaatggcattattttcattttttgttaattgttattctatgatgagttactttaacttaatttaattcgatgcttaacttaatagtgattccaaaattggatgtggaccaagaaatcataatcccacgtgtttgtcttaaattgcttttgtctttgattaaattaatctgtttcatttgagttcatattttaggatcgagagcataggaaacaagtgtgttgtgtttttgtacaatattaaaaaaagtaatttgcggcgtaaatatttaagtttaactttcgattgtagataatccttaagttatatttttaaaatgtctgtaggtacttggttattaaatgtcaagacattattcccatgtcattttttttattggtatatttatattaatttttaaataaaaaataaacatttaataatttataccaatcaggaattatcacatgacaatttaagagtcaagtacttatagaagtttcagaattataacttaggtattattacaactaacaattaaatttagtatttatttacaaccgaaaattaaatttaagtatttataccgcaaattactctattaagaatttgaaaagggagttggaatagaaaggaaaatgagatatttattaagatacaatacaataatacatggcccttaaagcaaaagagtaattaccttaattttttacggtaataatatttaagttatatatttgaaatttcgttggtacttaattgcaaattgttaaattaatggtcacatggcaatccattattagtctaggtcattaaatttttatttaaaaattaatttanatataccaataagaaaatgatatggttgggattgtgttgctattgcgattcaatttttgctattacgattagtcttatctatgtgacatgattttgagtgttttagtgttgtttgtgtgacatgcttttgttttgtttgtttcgttgttggtttcttctttgttctttgatgactcaccatcaaatcgctattagtggttgaaaataacaagttctctacgactgaaggggttgttagtagtccaattacgtactttgcacaatagttgagtgctcaacctcaataaacttgctggaagaatttctattgttgtatcctttgagttatagatgaaactgaatatagatgttgttaaggttatctgtgatgctgcaatctctttaatcagatttgttttttagtttttttttttgttaaattgtttaagaattagacggttaattgtttgattcattttttaaattttaatcttgatcgtatctctaaattatggggtattattttaactgattgctatttttttttttagaaaaatagattgctatttataaacttgtatgatttattcaaaaattaataaataaataaaagagagcacagaagtcacgtggaaatgactattattttaaattatggtaaatagcggcatacgtacttaaagttttaagtttataagtggcataaactcaatgtttatttttagcggtataagtatccaatattcgtaaaactgtaattttcttctagttttatcagtacagactccgttttgaatttattaaaagaacatttaaaagtaactgatactacatgtttctgtctagacccaatactctagaatttggaccttatatgcggtctgtttaaaaaataataaagtttgtactaacaaaattagagaaaaattacaattttacaaatattaggtacttatgccgctaaaaataaatattgagattatgacacttacaaacttaaatttttgagtaattatgtagctatttacctttaaattaatttcacacgagtgcattgaccctttatgccttaagaattaagattaaaaaaaaaaaaaaaagacccatttctgtttagccaagccctaaaattctcaatccttttcagtttgaagtttgaagctttaagccttcattcttgtcaaaaattatgcagctccatcatcattctcattcatgtaaggattaactaatcacacttttgcttctttctttttgtatatgctcaaatttacttccgtaactccttgacagatttctctttacgctaattttcgttatccaatttgggctgatttctgcttattatggatagtgagggcgtgaagaaaagggctaaaaccacatcatcatcatcagcatcatcatcatcatcatcaatggtggctggtgatgatgatgacagaatttcgaaattacctgattcagtgatcattcacattctat

SEQ ID NO: 58684 - DNA, 768 bp, Cannabis sativa
agacttgagcagattgtgcaggtggctggaaagaaagaaaatgagcaggtttcggaaggcagtaatcactgctgcagtagctactctggtgtaccatgtttggaaaaatcgcaatgatttactatggaactcaaggagaatagcacaagatgttgttgtctgtgctataaaggaagatgtaaagaatagagtgttgtgtaattggccaaagaaatacaaatcagctgatgccgactggtttgctcttctatagcagctattttttttctatttctgctggtgccgactggtttagcagcagctactgctgtctattgccctatagcagctgctggcaattgatttctctattgatgaggtgtagccgtgacttgtaacatataatactcaaggtatttgtaattacattgtactgtatagactaaagtcgggtcttcctttgaagatgccaataggttgtaaatgtgtttttggagtaatgaagtacatgattgattgatcaaaaaaaaataataacttttttcactctaaagagttggaattatatttgaaaaaatatgtttgatggtgacgaattttctgcaacatggttaaaaaaattatatatactcaaaaagtcaaaaaaataaattagaaaaaaatatggtgtatcgaattttaaacatgtttaattgaaagctgattggttgaaatgaattagtgaggcacttattgatggaattattttaccaggatctagatttattaacaagtatgttattaacatcc

SEQ ID NO: 58685 - DNA, 1327 bp, Cannabis sativa
  modified_base (1283)..(1284): a, c, t, g, unknown or other
tgaatctaataatagtttacactaagtttatgaccgctccatcattctaaggttttctaggaattagacttagatgggacgacatatagaatgtcgtttgttgtgtctaagccatatccctagaaggactttggcagctgctagtaactaatcgtagacctttctttttcatcaatatgtaactctaaagttctagggaggtaagtttggatataatttgaaaagttcaacttaatcatctttgaaagacataaccaaatatttctccacccttatcagtttgcaagatctttaaccacttaccttatctgtttacaccaatgctaaaaattcaaatttctcaaacatttcaaattttcttgcataaggtaaatatctagagtgatcttctacgaatttaacgataactcatagccacccatgaatgtgaattcatatgtccaaagacagatggacacactttcaagtggatattggcatgtttcctctttacagaaaataatcttgtcaaaacaactattaacaagatgtaaaggccatagatgtattaattgtcattgtggtcttttgatgattcctaggtttagttacaacatagttcatagaatagttcaagtggattctgatcgcagattataaaactcactttccatacatttaacatacagtttggattcatttatagaagatggatattaacaacttgtaaaagttatatcgtagtgttcaatgtactctgaaaactgaaattaaattttatttaaaatctaaaatttaaagttgattagacaattttttaccgcaagcgtacaacattattatagcaaaactttaatactaaaaagattgtcgaacccacagggattgattattaaatttcactacttattatacttttctattttatactttaattagaggatacaaagtaaataatgattaagaatcaaataataaaataattgaaaaattaaacagacaaataataatttttaatcagaaagtaaaaacctagaacattaatttccctatttcaaactatgaatctcaatttattgattttcctactttattcaataatttgtaatttcaagaatcataatgtaatctattaacctttttcgattgatgatagaattaactttaattaactaacaagatatctctattcaatgttaaacaattaagcaatattaaagcaatatgattctctttaaatgaaactcatcgagttagtgaaatctctcaatctcacactttttctgttaacgcagattttcgtnnaccaaatttgagcctcacaatattaatttcacacagaaaaaat

SEQ ID NO: 58686 - DNA, 994 bp, Cannabis sativa
attttgagtagaaattaaaaacaatagcatttaattgtataaattaattaggagtctaaattttattagaaggtattttttttaagcattaaaaataaaatatctcaaagccaaacaatggagtcttacatttacttctcttaataatatataattattatggtagtaattatataatatagtaattaattatattttaaaatataagatatgtttagagataaattaattcataatattttatttgataaaattattagtaattatattagaaaataataatttttagcatttaatatgtaaattttttaataattacacaatttatatagggtattagaattagaaagtgtaataaaaacctttcaattatctctaatatatataatgacagtgtaattatgtgatcacacaagctcgtaaaaatgtgtaattactttcaattatactcaatttcaatactcaattggcatctcaaacgtgcctttaaatttacaattaacgtgttgtatattaccaattaaatttatttatttttttttattttggatagtgaagtttaatgatatttgagagtaaagtataatttaatatttattttgcataaaagtttaacatttttttaacaaaataattagtaattacactataaaataatatttttttagtagttaatatttaaaatagaaatttttttagtgattacatactataattacactcaattctcgtagaggctatgagaattagagtgcaacatggaacttctcaattaccttcaattacacatttatagtgtaattacatttacattgttaaataaatatgtcaaattatgtaattacttcttattacatcatgacttttcaatcaaactctaatgtgtgtgaggactggtatgttagaaatattagtactttcatatatctttatatattaaaagtgcctatctaacggtatttcttggtttaacattcttggtttaacagaatat

SEQ ID NO: 58687 - DNA, 852 bp, Cannabis sativa
tcagcatctttatgagcaggaatttgagtacgggttctgggctgcacgatcgtcgtgacattctagtcgtctactcccctccttctcttccgatcattccttagctcatgggtcctggctaccttagcaattgatttgcttggttgacaggtggaatggcaccattgatcttgttggaaccatcacgtatgacttctcctgatgaattactagacaaggtctgcccgcctaccgctaggcccacgagtggaactcgtgattggggattgggcggctgaccatttgtagtgtgggaagtattcatcgctggatcttcatccgtctaacccaggggaatgacattcggaggttgctgacctacagtttggtaggcttttcgtatcagcacggtagcttgctgactacaatttttaatctctccatgatgaggccttaacgcctccatctctctatctctccacttggtaaacatacgcctttattcttcgaacgagagatttatcgcagtatggagttcgtcttgagtgtttgttcctggcggaacagttgtgttatgaatgccctagttgggtacagaactgttattcccaggccctttcacaccaagtgcgatttcatctaaaggagttgttacaccattacccacgtttgcctgctgtccaggattaatagttgggggaacccttgtgtttcctgggttctgcaatgcaggatccaccgtctgtgaatttgctcgatcagtcaggcctctacgagtctacactatcgtatttgttgttagattttgaataaagagcaattcttgattctgctctcaatgaaagcacagaaatgttgacctcgcttttagcc

SEQ ID NO: 58688 - DNA, 810 bp, Cannabis sativa
gtaatgggttttatttagggcacaaaatccatggataccacacagcctgaatcaatttggccagtagacatcaaagtggttcaggaatttttaaatgtatttcttgatgaatttttgggtttaccactgcatcgagaaatagatttcgttattgatttagcacttggagcggagccagtttcttaagcaccttacaaaatggctttagcagagcttaaagaattgaagattcaacttcaagggatgcttgacctagggttttcacgaactagtatgtcaccctggggatctcatgtgttgtttgttaagaagaaagatggatccctacatatgtgcactgactactcaaaactaaataaattaacaatcaagaataagttttttttacctgggattgatgacttgttcgatcagctacatgggaagatggtcttctctaagattgatctccaatcgggctatcatcagttgagaatccaagaataggacattccaaagactactttccgcaccaggtatggacattatgaatttttggttatgtcttttggactaaccaatgcttcggtaacttttatggacctgctgaatagggtattcaaggatttccttgatatatgtgttatagtatttatcgatgacatccttgtgtactctcaatcagatacggagcgcgagcaacaccttcagattgttctgcagctattacgagacaataaactgtatgccatgtttaaagagtgtgaatttttactatcccagatgtctttcctcatacacattgtcagtaaggatgggatcaaggttgat

SEQ ID NO: 58689 - DNA, 636 bp, Cannabis sativa
tactaattaattaaataacattaaaaataaatttatatacttttataaaagtgagtataaaagatgggagggaagattttattcttctagcattcaattctatataaattttgatgatttttttcataaaaaatataaaaaaaataaataaattctgatatatatatatatatatttatattgttcttacatttaatagaatatataactctaaatttaataatttaaaaatatgatacatattttctcatatatattattctaatttttaaaatatatagctctcaattatgtctattaatattaataattaattaaattttaaccgaacctacataatattaattataaaaatataaaaatattatatttaaattaattctacatttttttttacaatttaatatttttattttactcatattataacagttacattatataaaattcaccttaaaaatatgggaaaaaataaaaccttaaattaatcacagattaaattattatttttttcaaaggaccacgcaaaagcgcggttatatttcctagtatatatataaaggaaagcacaagaagagtttatgtgtcattttataattttttcttcctatttttcctaatttctaacacattttc

SEQ ID NO: 58690 - DNA, 992 bp, Cannabis sativa
ttcatgtcacttacaaacttgaaattttgggtacttatgtcactatttacccatatatacatatatacaatttttttattcttaatgtatatatagtatatatatcattgataattaaaattattttaattatcatctataattaaagttatatatcatatgcttaaattatgaagatttaatgacgatagtgaactgatgatgattgtacaagtataaatatattttcttctcgattcttaattttatctttatttattttctaatttgttgggagacttgagagcatctctaatggagatgttatgaaagatgcttaatgacacgaatatatttttaagatcttttgattgatgcttaccattggaatgaaaaaaaaaagccacaaaagaatgttatgccataacattctttatatcttctctttcttattttatttttattattttatcataaagtaggaaaatttatttatttaatatatatattaaataataatataatattatgtttatcaatggattattttagaacaaaaaataccaaaaatgaagtggaagaaagaaaataaaataatatatttttaagtgatacgaaggtttttgacactcttaaaaaatactattattggagatggtctgagagttatgagactatgataatatacttgagttattaatttgtgttgttttttttaaaattttgagacaaatttatttttttgtcttctattgggttatgttgttttttttaactttgagcaaaatttatttttaatttctctctgaattatgaatatataataaatatttgtgagaatattagtttaagttaaatttttaaaaaaattcaattgtttttttttttcattttgctttattaatatagggatgacaattatacctgtgggtacccctccactacaacatttaacactaatagcggcggacctctccgccgctattagtctcctttctggccgctaaagggca

SEQ ID NO: 58691 - DNA, 1054 bp, Cannabis sativa
tggcataaaggagggagaatggtagttgcgtggaatcctaataccttcagcatcaatataatcaaatgtacaagtcaattaatacatctccaagtctccacactagatggtatgagttttcttgttacttttgtttatgcttttaatgatgaagaaggtagattgattttatggcaggatttacaagctatttctactcaagacccttgggtagtgatgggtgatttcaatgatgttttggagcaagaagaaaggattggaagtagggtgaggactcttacttctcattcttttaaagattgtgtgtctcaatgtcaactggaagatatcaaaagcagtggtaaattctttacttggtgtaataatcaacaaggggatgaccgagtttactccaagcttgatagggtaatggccaatggtaaatggatggaaacttatccgggagctgaagccattttcctaaacgaaggtgcctttgatcactccccagctctagtgattttccaccagcttgctcataatgggaggaaaccctttcgatattttaaaatgtggatatctcaccctgaatacactagccgtgtacagcatatatggcagcagcaggtcttgggcacggcaatgtatcaggtggtgactaaactcaaagctttgaagccggtctttaagaagatgaatcaagaggggtataatgatctgcaatcttcagttatcaaagctgtagctattttggataattgtcaaaaccagttatctttggaccctctaaaccaggaactgcaacaaaaagaagcatcagcccgaagtagtttttttcaagctcacaagaactatcaacaattccttcagcagaaagcaaagactacttgggttagagatggggatgataatacggccattttccatgcaagcctcaaagctagaatcaatcaaaatagaattctttccattgtggacatgcaaggaaagcgagtagatgagccatcaaagatcaatgaggtatttcttgattactacaaacaactgttaggcaccaggatggccaatagaaggg

SEQ ID NO: 58692 - DNA, 1569 bp, Cannabis sativa
atctcggtgcaactctatgtacaactttatcataaaagccataaatatcacatgtagtatatataataaacttaaagtttaataaaatctctaaattaagaaataataaccctaatacctattttttgaaatagaaccaacgataatgtagttcatatcttgttgtcatcattgtcttttaagtttgcttgtttagtaacaatgatattttgttggcttaattttttaagcatgtttagttatttattaagtaatgtatggttaatttcattgacttatttattaaaaaacacgatatcaatgaaattgatgactgataagaaaattatgttattttattgatcacatactgaacataattccttaccacactactagacttattgaccatgtcattttaataccttggtatttgtgattataaatgacttttgttgatttaaaaaataatatgattgtcatatttcaatatcaaagattaaattggaacaatatgtagagatgctatcaaagaactattatttttgatgtggccacaaatattttcctattgttcaacccttgagtcattttcaaagaaaattattttgatataatgtatatatatgtattaaaattaacgtagctcaagtggaaaaatgtttgacttttatttgggcttacattaacttttattagttttattaaacattttgttgattacatagttcgttgttgtgttagccatattgttagtgatcaatagttaatgggcttagcatctgagtgtaaagtctaattgaagcaaaagtatgtgcttttctagttaactgaagcttttgatgagcagatcaatccagctagggttatgtagttaagtcccttctctaactctataaatacatattcttttatcacaattgaatacttttgatagtcagataaataaatttgattttggtttagagacctaggaagaaaattttagttgatagtattaaattatcaaattgtgataattgttatggatcaatcagacatgtatacctaataattatctaattatcattatattatatacaaatttgtatcttagttttagttaattttctaacaattgacacacgagctgtgccactctcctagtggtaaaactctcccaaatacatcatgggcaatgccactacctatggtccttcgctcgcccaaatccttatcctccaaaagaagaagctcatagatacatattagacttatcttgaagatatgcttttataagaaatttattacttactaagaataaatgaatatttttagaaaatcacattgaatgaaatttattacctttattcaatgagagaatcaaggtacgaagtaaatgctcaagttgtaaatggaaattctagtcctaggtcgaaaaaggactctaaaatctcttctctcacacatttctttgagccgcacaaagaaacctaagtctccatgttggaaaattattatgctctcatagaagtatcaaaccaacaaaattacaactcaatgacaaataatacaaaggacaaaattatgtattaaataatgttacaacac

SEQ ID NO: 58693 - DNA, 643 bp, Cannabis sativa
atctctatcaaccaatctgatgagctgcttgatgggagtttcaaaggaagaaacaatttattggaacgacctttggttggcacttttttgattggcggctctgcctctctcgggtcggctcactctcatacccgtgtggaggagattgtcatctctcctccacaggagccatgagaggccttgcttggaactgtagagggttagggcaaacctctataatttgtgagttgaagtccctgattcgaccgtgctccccggactttatttttctaaccgagctcaaagttaatgctacttctttggtacgtacacttaactcccttcacttttactttaatatccttgtgctggctgttgggagtgcagggggtattattctggcttggaagatcggttttgtgtttgaatgtgttgcttgttctaaaaatcatatttcggtgctcgtctactcggatcccccgacccacccttggttattgtcttgtgtgtatggtccaccctattctaatgctaagaaggctttctgggaggagttcatgaatttaggggataggtttggtgggtcgtggcttatattgggtgatactaattttgtgctaagtgaatcggaaagagctgactctaagggcagggatcccttcat

SEQ ID NO: 58694 - DNA, 1581 bp, Cannabis sativa
gaaattattgatgactataactcaattattaatcactacttcagccacttcaaaagaagagcaatgttactcaaggtacatcactagactgtttaaaatttggtggtattctgaatattcagcaacaagttgccttgataagacctttcactaaagctgatgtcaaagaagcattctttgatattcattcgaacaaaagccatggtcctgatggctatggagctggcttttataaagggctttggaatgaaattggtgagaaaatttttatggttgttcttaattttttccaagatggtataatatgcctagagatctaaatgaaacagttatctctcttattcccaagattgataacccttgtacacccgcggattatagccctatagcttgttgtaacacacattacaaatgcatttctaaaatgtcgtgtgctcgacttgctgaggtgctgccatttctggtccaaaacaaccaaggtgcatttattaataattaattactggctcacaacatattgatctttcaggatttgttaaagggttatacaaggaaaaatatttcagcgagaactattatgaagattgactcagtaaggtttgtgacgcggtggattggcaatttgtttatgagctccttaggggtcttcgcttcccgtctcacttcatcgattggattttaatttggtctgtttgaatgggatctcctactctcttatgctcaatggtcatcttcatgagtttttcaaagaggacaaaggtctccgttaaggggatcctatatctctcctctcttatttgttttgatcatggaatacttgacccgtttgttgatccaagcttctcattccaaaggctttggcttccattcgttatgcaagaatatgaagcttatcaacttatgcttcgtggatcacctagtgattttttgcaaaggtaatactaaatctattcaaattctccaataatcattagttttgtaactctacaggccttgcaattaataaatctaaatcccatatctattttggtggggtgtgggatgaggttaaaaactagattctgaacatagtgaatatggaagagggttcttttcctcttaagtatttgggtgtgcatttgaggcctactaaatagagagcggctgattgtggggtgattttggagaaaattcaacgaaggcttcataattgggctagtaagaacctgtcttttgcagggagggtgcaacttatccactcgatgttgctggacattagaaatttttggatgagtatctttatactccctcaaaaaattattgctacgattgacaaatgttgtagagatttcctttggggtgctaatgcgaatagaagtaaacttcatcttgcttcttgggaaaaagtatgtttacccaagaagtatggtcgagttggtttttatgaatgtcgaaaaaaaaatattgcactgatggtgaaatatatttgggcagcctccgagaaacaagataatctttgggtttgatggattgactccatttatcttaaaggtcagaatttatggctagcctcggtgaaaagtgatcgagttggtattttaa

SEQ ID NO: 58695 - DNA, 702 bp, Cannabis sativa
  modified_base (193)..(206): a, c, t, g, unknown or other
tattttatttaagttttaacatttttttggaatttttttttattttgtaactttttttaaaaatattttatatttctatagaaagttaaaataatagtaaaatatcaatttgtagatttatactttttttatagaaaaatcattaaaaaaatagttaaatatcaatttgtagatttatgctttaataaaatannnnnnnnnnnnnnattaaggagagaaaagaaaaatagttttggagtgattttagaatgtcattcactgtctcatacttctcatttatatatagatatatattgactagaaaacaaaccgcgtttcacgtgtggttgtatttttgtttagtttattgataattatattataaatacattcaatattaaattttgatattttaatattttagatataatatttttattagtaaaattaattattttacaatattttttacttagaaaaataaattaatatcctcatacaaaattaagtcatgagaaaaagaccattgataaatctatagaaaacttatgatatgatttcaaaattgttatcatcaccgtacctcatttgtatatattcgccacaatatttaaatttgttgttaccgtatctcaattatagtcgccaattccacttttagttgcaactaaccttattaataagttttgtctgtacatgaaataaataagtcaattagttcac

SEQ ID NO: 58696 - DNA, 1533 bp, Cannabis sativa
  modified_base (414)..(414): a, c, t, g, unknown or other
tattattattattattattgctgtgtttttattaatattattttgtgctgaatttaacacatataattagggttaatatattttgtatatgtttgaaaagttgatattgtattgataatttcatagtgttatgatgagctgaatcgttgaaatatgaattaattgattgtgtacgttgttgataatttttgttattttatagtgtcaatgacataatttcactattgttggattggttcttacttcttatttttgggataagttgaaaatacctcttttttgtatccattaataaaaaatattttcatattttattttaatttttgagtgggttgtctaatataccctcactctatataatttacattaatctaaagggtttaatggtcgaatatcatctataaaagtgagtanatcttaaagaatataaaaatagaataaaaattaaaataaataaaacaaagtagatatataatgtaattttgtccgggccaacccaagaatggggcccacacccgaagcctcccagtccaataaatcttttaataaaaaattctccaatttgaattctaaaaatattatttttaaaatttttattttatttattaaaacatattattattttctaaaaatggtctttttttttaaaaaaaaaaactactttatttaatattttattaataataaagcctaattatttttttaaatattatattttaaatttttaccattaaatataaaaacatatagcttttttcatataaaaaagttcaattaaagtttttggcctagactttagattagcttgagatgggtttaccttagagtgacttgatttttcaacaagtagattccaaataggatttttgtgcaaaaagtgatgttgatttttgaaatcatttttgttataggttttgaaaaatgcaagcaagctacagcactgttgttttcaacactaaattcagtgatgtgagtgtgggatcataccaaacattcatgcaatctcttcgaagagaattgtctagcggaactacgagctatgacatacccttattgcgtaaaaaatcagaagcagtcagagacaaacaattcgtctatgtgagacttgaaaaccaaagtttcaaaatcacatttgcaatatcagctctcaactcctatgtaattggatatcaagtagatgtggaaaagcgttgctacttcttcaaagaagcttcttccgaagcaaaagctttacttttcaaagaaagtactcgaagagttaatgttaatctcaatacaaattatgataatttgggaaatagagagaatgtcaatttgggatttaagtcgttagacaattccctcgaagcatttaaaagatttgatagcgagaatcctacgaacgagcttcgtcaaattcttattgttgttatccaaatggttgccgaggctgggagatctaaatatattcaacaaaaaatggaatggaaaggctttgaatctggattttttcctaaaggtgatattttaagctatgagaataaatgggaagat

SEQ ID NO: 58697 - DNA, 1171 bp, Cannabis sativa
  modified_base (620)..(621): a, c, t, g, unknown or other
tgcgtgccttccctcttctcgcactaatgttgctctaatcgcattctctgagacaacaaagtagaggagtaaagtctctctaggtactagtttagccaaaactggagtcgttgataaatgtttctttatttttttgaaggcttccttgcactcgtctgtccattcaaatttgttgcctcgcaacacattgaaaaatggtaagcacttgtcgattaattttcgagatgaatctgtttagagctgccattcttcctgtaaaggcttggacttccttcagcattgtgggcgatggaatttccatcaaagccttaattttttcaggatttgcttcaatgccccttgcattaactatgacttgcaaaaactttcccgaggaggctccaaaggaacatttcttttggtcgagtttcatgttgtacttgttgagtatttcaaagcactctgcgaggtcttttatatgatcttcactccttaccgactttaccaacatatcattgacatagacttccatgttttttccttttttattttcaaacatttcacttactagtcactgatatgtggccccaacatttttcaaaccaaaatatatgactttataacaataaagtcccatgttnnttacgaaacttgtatgctcttgattagggacatgcatcttgatttggttatatccagaatatgcatccatgaatgtcattagctcttgtccaacagttgcatccacccacttgtcgatcattggtagtggaaagcaatcctttagacatgctttgtttaaatctgaaaagtcgatacaagttctccaagttctccacgaggggtagaacacctcgcgtataatgtcgttagtcagtaacttgtctactttttctttaagtgccccttgcctttcagaatccaagggtcgcctttttttcacttagctgggtaattagggtcgatattcaagttgtgccaaataaatttagggtcgatccctattatatatgaatggatccaggttaattgattctggtttgccttcagaaaatttattagctgctattttagtttttcatccaaattttttctcgagaaacacaaatttagtaagattttctagatctaaaaaaacatcctccaattcctcgattggtttcaactcgttctttgcgtcttgaatttgagg

SEQ ID NO: 58698 - DNA, 666 bp, Cannabis sativa
acagataagggatttttattgctaacgctgatattacaagtttgaagaacagatttcacaatcttttctgatggatgaccaagtctattgtgccctagatcatactcagagagttgagatctgttactgtgagtacaatttgaggaagttgactcactgttgtgtgacagagaagtagtgaatgcacatgggacaacagctggtgtgttgggttgcacatgaaactgagacggcttaaaaatatagaggccattctggtgtatatggcttatgtttcttgatccttagtaaaatatttgtcagcatgaaactcaaaaaatacatgattatcatgagaaaatttagaaacactgagtaagtttttggtaattttaggaacatgtaaaaggttatttagcacaagaggatgagagttatttgtacgaataaaagattggccaatgtgtttgatggacagacctgagccatctccaacataaagctgacctgctccttcatactcagtgctgatgttgaggttttgaacattgggagtacaatgattagatgcactagaatcgggataccagttgctgtcatcaacaggagttgtttgagaaacattcacttgagcattgggagggttggaagtgggaaagacacctgtaaagctcttatcaaatctgt

SEQ ID NO: 58699 - DNA, 874 bp, Cannabis sativa
  modified_base (66)..(73): a, c, t, g, unknown or other
aaaatacagggtctattttgttatttaacaaaatacaaggtctaattggtaacttttgtaaaacannnnnnnnaaaatggtatttaccctaattttggagaccatgtaccacctataaactatatgagactgatacttcacctttccttgattaagttatcactaacatatgtcgagaattctcatctcatcaaaaatgttaccgctacacgataaactagtttttcaaagagtatgatatataatccctcccacgaagaggtgtgactagattcgaacagttaactcgagtagaaaaaaacattgttattggacacctagtagtaccgagtatgttttataacataattgatggcctcaaacaaaatagtatttcttctcaaatgaaaacaaattggtatccaaccataatggggaacatgagcagaagaaaacaaatgacgtgggaagtttctatgttacctcttaagtcactcaaatggcataatgggtatttgacacgtgtaaaggtgttaccttgttaagtggacaacagtatctttgatgtgaaaagttgaatagcaaaatttggatagtatattaatgtcccatataatttgcctattctactgtttttttctttgaaatgaaaaaaaaaaaaagagaaagaggtgtgaatgataataatgaataatgataagatcatattttggcgtttttatgtcaattattctagacaaattcacataataacaaatagaaaaacttactgctataaaaatttatataataatttacataaaaattattagaataactcaaattataaattcatctcaaaaaaaaaaaaaaaaaactcaaattataaatctttttttaaaaaattaataaataa

SEQ ID NO: 58700 - DNA, 1072 bp, Cannabis sativa
  modified_base (160)..(165): a, c, t, g, unknown or other
tttgttttattttaaaaaaaatatttaaagttttaaaattttgaggaaaataaatataaagtttaaaaatattaaaattaaacctactattaatttaaaattaatttaagttcaattaatctaaaacaaataatatcaatatttatatatatttaaattnnnnnnaaataaataatattaatatttataaaactaaacttactaatatacctttaaatttaacggaatattcttatatttttaaaatatttcgttaaaaactgttatataaatacattttatatataaaaatataaattaaataatattatgtatatacatttataaaattaagcctactaatacctctaaattaaacggaatatttttatattcttaaaatattttgttaaatcaataaaaattattaaatagccacattttatatataaaaatattattatatatactcattattttgtgaaggaaattgattatatatatatatagagagagagagagagtagagaattgtgatgttataaaactgggaccactatacatacattacaattataattaagactatatataatatatattacaatatttacatttgtgcttttgctgtcaatatacacaaaacctcacaagtgtaatatggaccacaatatatacatgtatgtatatatatatggaccacatacatgtatatatatatatatgtttatatttacatttgtgtgcctttttcatccacttgatcatgatgatcgttatgtatatatatatataaacattttttatgcacgtgcatgaaaacgtgtatatatataatatagttcattttattggaaataaaatcttgtttcttaaatttttactcattatctatatatattccaatgcaaagtaagttgcaactactacattatatgagacttactttaaaaaaaatattaataattttagatgtgaaaattaaaattcaaatagtttgttgaaatagagtaaaaataataaacatgcactctcgtccaatatatatatttgaaatctaatttcactacatgttaaactagtttagattaac

SEQ ID NO: 58701 - DNA, 903 bp, Cannabis sativa
taaaaatatataaaataattaatagtaaaaacaatttttattaatgaataatattaataaatggcaaaaaagtaataaaaaatatgatatttattaaaagaattatatgtattttttttttcacttttatttattctttatatctttttccaattttataaaagttgtttccattttgatattatgttatattcatttcaaggttatactatttacattttataaaagttatttttcaaggttatgttgaaaagtcaattataacagtattaaataaaaaagtccctatttattttaggctaaaattttgtcatgttatattttgtgtaaaatttaacacacattttacaccaccattgaaattaagggtgtccataaattgatctaatttactgacaacctaccgtcaaatattagatatccaattgtgattcgatcgaatttgatgttatttttgaatattcaattggatcggatcaaatgttagatgtggtatccaaaaattcaatacatccaacatccaattaaactaattaatatttttatttagtttgaatgggtaattagattttatgttattatcgtaaaaaaaaatatatgtatatatgaaaattaacattaaaattttattttttggagattggatggatccaattcaattcaatagatattgaatctaaaatattggatggttcttatccgatccaaaaatatatggtctaaaatattggataaacacaaattaaaccaatagatatacataaaatatatccattagatagaactgatctaatctaacatctattaaatgttgtcgattggatgactgaaattaattggatcgaatctgatagttaatataatatctaatatatatatatgttaaccaattaataatttctt

SEQ ID NO: 58702 - DNA, 892 bp, Cannabis sativa
gcgacatgcgtctttcggcatgaccctgaggtgacgaggagacacccaccatttcaaggagtccaactaaaatcgcaacctgcgaatgagtcatgcatcttgagctaagcgatatacctctaaaaatggttgggagaaactcagtgactcaaggggcatgcgttctcaagcatgaccctgaagttactgaggtactcccaccgtttcgagaatatctaccagccaaagaaaacgctcattagaacattaatgtatgtcgcaaatggctgggtgtatcacattatctcaagggacatataaccgcatatatgaccattagaatactgtgacacatccaccatttgggagactcagttaatgttctcgcgactaaattcacagtatacaaaatcctaaagatctaggtaaatctcgcaattatgcgagtattcaaagtgttcatccgaatacccgcgagtattcaaagcatgaaacagtgcctattcaagtatttcttatacagcatgcagttatgccaatttacaggtcattttttatgaaattatccagtttttcacctaaaaacatagcctcatacatatcccctacgaacattcattcttaaaccctctcatgcatattaaaaacccagaaaacagtgttcccactcgagcagaaaacgaaatgcagtgaattttcgaaaactaacctttacttctgaaaaatctattcccacgattcgtccttgacaacactgtagaatcaaggaaaaacccacggagaaaggcaaaaaaactgggtaattatgaaggtatttttgtaaagttttctctgagagagaagaaacaaggaagtttgaggaagttaaagaaaatgagggaaaatgggctttttggttcgaatcagggggttt

SEQ ID NO: 58703 - DNA, 1152 bp, Cannabis sativa
gttgacttcgggaactctgggatggaagtttggacatcgatcactcatttccaactcactattttttagtattctataccatggagacatggagtaataaaatctaggtctcgggagctgaaagtacacgaaccaacacctcggaagtcaacttgggcacctagggtttcacccaacgtctaagttggcattgtgaactagggtttcagttttggggaccatcttagtccaaatgggtcaaattttatattgggacatcaactagacatatctcatacatatttgaggcatcaaaatcaaattcggagaaaattcatttttgagcacctaaagcaatcgatgcccgggcagcaagtgcccatgttgacaatttattaatctaggtgagtttcaaatattagattgacgatcctacttttgcatcatatttgtcttcataaataacgagaaaataagtactttcaggaaagaaacaacacttcttgggtgccagaagcaaggcccaatgcccaggttaacaactagggttggcccaacgcccaggttgacattaggccgattcaaatgatgttttctaagaattcttccgagtatgttctctgttttcaacaaaaattaagatttaaccatttttgaggaccaaataaaacttctaaggggccaaaactgggacccaatgcctaggttgacacctggcactaggcccaacacctgcgttgtttccaatcagtttcttgaaaaaagtgttacgagaattttttttgttataaaaaataacaaagatacaagaaaactcagggagtaaaacacaagcccgagggccgaaaatctaagcctagctcatatgttgacctggtgcactagtttcgatcattcaaatgtcaaatctgatccaagaattctctccataatgctcaaaaatgggctaggagacctcttcctcaagttcttgaaccttggaagtatcaaaacaacatactagaagctctaaaacgagcacccaacgcccatgttgataaatggtctggtgcactgggttctgcttattcggttctaattctatctagaccgtctatctagtttttcataataaataagatccatgaagtcagagaagtaaataaattcacaactttgcatttctcatttcca

SEQ ID NO: 58704 - DNA, 2417 bp, Cannabis sativa
  modified_base (442)..(445): a, c, t, g, unknown or other
  modified_base (471)..(473): a, c, t, g, unknown or other
  modified_base (552)..(553): a, c, t, g, unknown or other
  modified_base (616)..(621): a, c, t, g, unknown or other
  modified_base (1299)..(1314): a, c, t, g, unknown or other
aaaattcaaagagtaaaaatgaaaaaaaaaatcgtgttgacatatttttgtaattttttttttaatttttggtctattatataaatttttctactttttataacagaatctgacaaaaaaaaaatcatatttgcataatatttatattgtatacagtttaaaaatcatatcctcatatatatatatatatatactcatatatataagggatattggcggctaaaccacctgaattttacggtttgtaacagttaaccacaaaaattgaaattttggcgacataactacctaaacccttgttccgttttgctctgcacacctctgtccaaaaatcacagttaagtgccacggtggaatgtccacgtggcaagtttttagtggtccacgtaatattaattttaaaaaaaaattataaatattaaaaaaaattaaaaaattagannnnaaaattaaaaatattttttttacttnnntttttcttttttccttttgttttttttttaaaaataatttaaaaattataaaaattaaaaaattataaaaaataatttnnaaattataaaaataaaaaaattattttcttttatttttttatttccttcttcttcttcttctnnnnnntcttcttcttcttcttttctatttctctctcgaattgtaaaccctagctgcaatcttttctttctatctccccgtcactcccttcctctctttgctctcttgcttgacggcgttgtaagaccacaaactgttgttgccggtgtcgatggtcctagggatcttgaaaccttgttctttgattccaaaaacccaagaacctgacggccccctctctcctccttgcaatctttccctctctccttctctttcattttcccggtgcaatgataactatatagccgtccatgatcatgggtggtccaacaggaccatgggatcatgttccctaggtcccaaaactaaaaatcctaattttttgagagcgagagagaagagctttaatgggggcctaggtcgcgtgagaacgagagagaggagagggtctgagagcgagagagaagagaggaagggaggcggctgcactgtccactggccttcagcctccaccgagagggaaaaacaaagaaagaggggggaggcggctgatggaagagatgagcagctagggtttgtttttttggttcagttaagaagaagaaggaaagacaaaggagaaagaaaaaaaaaaaaagaaaaaggaaaaagaaaataaaaaaaagaattttttataatttttaaattataattttttttttaaannnnnnnnnnnnnnnnaaaaaaagttaaaaaaaatattttttaattttttttttctgattttttaatttttttaatatttataattattttttaaaaattaatatacgtggaccactaaaaacttgccacgtgtacacgtgtgtacacgtgaacagtccaccgtgacacttaactgtgatttttggacggaggtgtgcagagaaaaacggaaccgtttaggtagttatgccgccaaaatttcagtttttgtggttaactgttacaaaccgtaaagtccaaatggtttagccgccaatatccctatatatatatatatagaactaattatattttaatgtaagtggttataactaaatataagtacatcagaaaaataaataaattaaaatactaaaaagtatcaaatgtaacaacaatcactaccaaaaatgttatctttagtgataacttttttatcataatataaattttttgtgactaaatataacttttatagtcacaacaaaaattacttgtcatttaatatttaaatacatgttgctattattttattttagtcagtgttgttgctaaaaacacatttagttacaataaattgtgatttttgtgattaataatatttttagccacaaactttttagtgataacataggaatgataatttatatgtttagttgcaattttttttttacttttagtcacaaattttgttgggactaaaaatacgatttcttgtagtacacaatcttgtattatatcataataaaattatttttgtgtaaatataatatctatttttggaataaaattattaattctacataaataaatttataaattatatatatttttagtaagatataattattttttatataaaagtatacttttgttaatgcgagtcttagaacatgtataccaattataatttagaggttatttttatttataactggtctaagttgggactaaattttttttataatagattagaggttattcttgagtagagtattattaaataaatgtttcactgtcatgggcggctaataacctgtgcaacctgggcagttgcacagggccccaaaataataggggattattattattattattat

SEQ ID NO: 58705 - DNA, 2219 bp, Cannabis sativa
  modified_base (634)..(650): a, c, t, g, unknown or other
  modified_base (1239)..(1240): a, c, t, g, unknown or other
aattattcttatatagaggtatactttgttaatacgagacttagaaaatgtataactaattacaatttagaggttatttttatttatagcaggcccaaatcgggacttaattattttataacaaattagaggttattcttaaatatagtattcttaaatagaagttctactatatatatatatatatatatatatatgaatctctcttactttataatgatagaaattgtactacaaatctttttcactcaattatatcattcatattgctacaaataattatatcattcatatttatttatcaatttgtgtcttaacaatgtgtttatttgtagttttccttatataatttctcctttcgttttctatacatttttcaggaattttgaaaagatttcttgtttgctatataaatttgttcgaatgatttttgtacaaccaacttcacatctatattttctttgttttattatattttatgtttattgtttatatgttaatcttgtcaaaccattcgtcgtcggttgcttttgtggttgcgcttatgaatagtggctgaagtggtagtctgcatttcatggcgtggggagatcgtcttgcttattttgtaactactttttattattattattannnnnnnnnnnnnnnnnattattattattattattacttaactaaatgttttcatgattttattttaaataatggtaatatataatttatatcattaaatgttttcatatcaagtagttaaattaaattattacaatataatttaagatttacttttaaattatcgattatttgagttataaagttattgatgttttttaagttataatagttattttaataattgaattagtgttcgtggatctacttcagacaccaattgtatttgacaagataagttattttccatttctttataatttttctgtttgaaatattttctttatagtgactattgttagtattttttataaattttttttgttaatgcttattttgtttatttgtagtaaaaataaaatataaatttgcaataatatctaattactcattattttaattttcatcccactaatatattgttttatgtgcagttaaacattattgtcccttcaagcttcagagaaatggtagcgagtttggattgcagtttgttacaaagattttacaactatgattacttttactatcagagttcccgctcaaatgattttaagatcattattnnaagtttttacaagtttgttattcagatttctaagagtgtccttaatctgtgttgcttatagattaattgtgcatgctcttcagatgaataattaacttgtttgattagatatgaatatccttattttttgttgggtgtatagtattattttaattttcctcacaagaatagtatttatttgatgaacatgtatagttttcataactaagttgtatgaagttgttatatttttaatgaatttattcattactctcaaaaaaaaaatgtttgatatagaactgaagcatatcaaaacacaacttccacaaagataaaaccaaaatccaacataacttttgttctacaacaaccttatgcatctttctgaaaaaagagctaacaaattttcgacaattgaaattaaagcaaatgtaaaagataaattttctctcacattttacaaaggaatgatactgttattcacaaacttacacagccattttgagtgaattgggttgagtaataaacataaattaagagtccaaccaaacaaaagtttaaaagcttcaacaaactgattcttcctcatttaaatttacaatacaagagctaagcatgtgctaatttaatacccaaagtgaaagaaaccatatgagtttcaacataaacagaaactaattaccattacacaaaaaacaaaacctcaaatgacatttaacaaaataaatgttaactaaagcaccaaccgtagccattcatatctatagaatggtacaaagctatataaatccctaaggattcgtttggtacgtcgtattataccgtattgtattgtattatattgaattgcatttcatgtaatatttttatgtaaaactctatgtattattaacttgtatggatacataaatatataatattttaatataaattaaagtttaacttagtattatatgaaaatatgatatataatccaatttaatacaataaaatataatac

SEQ ID NO: 58706 - DNA, 872 bp, Cannabis sativa
caatctaatctaattcgtacaagtgcggatttccacactttgcggattgaattggattgaattggatcaggtattttatgaacacccctatcaagttattgcatcttccttgacaattctctagtatcttggaaatcaaaaaagcaacacactatctcttggtcctcagctgaagtcgaatacagagcaatggctaatgccacctgcgaactaacttggcttcactcaatcatgcatgacttcaacatcaacatcaaactcccttcaacacttttctgtgacaacagtgcagctcttcacatctctgaaaatccagtttatcacgagcgtaacaaaacatgttgaaatcgattatcatctcattcgtgaaaagatcaacaatggcaagatcaagaccaatcatatctcctccaaatccaacattggtgacatccttacaaaacctctctttcaaacacatttccatactttaatctccaagatgagtatcaaaaatttttacagtccatcttgagggggcctattaaaatagttagtgttgttagttatttcagttagtcagttaggtagagttagttggtcctcgtgtactttgtacactgtatatagagtgtcccatgccattgtaatcgaacacaatttttcaatcaataatatcttttactctgtttcattacaaatgttctaataaagactaatcttaatgaaaaaaaataaaataaaataatacattcatatcatttcattcattccttgcctcatattgtgtagttgagcaataactcttagagtgttattagagttataaaattgtgacgaacatgtcttttttaatcatgtgtgcatagtttgaccaacataatatatattat

SEQ ID NO: 58707 - DNA, 905 bp, Cannabis sativa
ctctaatgtcaaaagagatgaagagaaatgcagataagcaagaagacaatactggtgaagggctctttgtcagaggaaaaggttcaaagaaggagaacagggattaaagcattggaaacaaaggcaagactaatgccaagttcaagagaagatgttttctgtgtaacaagacaagtcacttgaagaaagattgtccaattctgaaagattacaactccaagaagaatggaagtgcagatgtggtttctgatggagatgacagtgatggttatgatagtacaagtgtgttggtaatctctaaagacaagacagatactggttggatcatagattctggatgctctttccatatctgtcctgagaagaagcaattcataaattacaagactatcaatagtggttctgtgaaattaggtgataaccactcatctccaattgttggaattggatctgtgaagcttcaaatgactggtggtggagttgcaattcttgaacatgtgagacatgtcccagaaataaaaagaaatctgatctcgatggctatgcttgatcatgatggttacttagtaaaggttgaaagtggctcattgaaggtgacaaagggatctatggtagtcatgaaggctactgtgatgaatggtatctatgtcttacagggaaatacatccaaaaatcaggcaaatacagtgactcaaaggagtgaggaaccaactctaatatggcacaggagactgggtcatataagctatggtggcttgaaaattctgagtaaacttggagtatttggcaagaaccagatacaacctatggagctgtgtgagcaatgcattcttgggaaatctacaaaagtcaagtttggcactgggagacacacaacgaaaggaattgttgactatctacactca

SEQ ID NO: 58708 - DNA, 828 bp, Cannabis sativa
cacttgatggcatccttatggcagccagggaaaggagtgtacatcaaagagttggaagctaatctatttctcttaattatcatgagattgatatacaaatggttatagatggaagcccatggacttttaatagagttcctctgatctttcaccgattgaaaagtggtgaaaatcctagaatgattcatctccacaagcttgatatgtgggtgcaaatacacaatcttaaaacaggatttatgatggataaagtggtacgtagtgtgggtggttatattggtacttatgttaaatcggatccgaagaactttattggtgtttggagggactatttgcgtgttcgtgtgacggtggacattgagaaacctcttaaacgacgtatgaagctgtgcaaagagaatggagaatggatttgggctatgtttcaatatgaacatctcccaacattttgctttatttgtggcattataggacattccgaacgtttttgtgctaaaagatttgatcaggatatagatcaaattgtcaaaccttatggcattggaatgaaggcgcaattgagacgacgacaccaccaaattggagctcagtggttacggtccggcatggaacaaaaccaggcggcggatggtggagccgatcgatctttggatgggaaggatggggctggaatggtggcaaaaatcgtggagttagatcccacttgtcaaggcaatcagcttcaatgtgatggtgctaaaaaaggtaagattttgaatcccaatagtgtctctgtacctggtgcacgaaatgggaaagagagttctttgaagattgttgaccaattaa

SEQ ID NO: 58709 - DNA, 950 bp, Cannabis sativa
  modified_base (183)..(183): a, c, t, g, unknown or other
  modified_base (794)..(797): a, c, t, g, unknown or other
tatttcgtgccttgctgttgcatctacgagctgattgattcttggaagtggaaaatagtctttggggcatgccttgttgaggtctgtgaaatcaatatagagttgccatttcttgttcgacttaggcactagtacgggattcacgacccaagtcgggtaaaaagcttcaattatgaagttttngttgcacaacttttcaacttcatccttcagggctactgctcgttctttgtccaataaccttcatttttgttgaattggccggaaattgggatcgatatttagaacatgtgagataatagagggatcaattccgaccatatctgcatgtgatcaagcaaaaacatctaggtttgctctcagaaattttatcaattcttattttacttcgagcaacaaaccctttctgatctttagctttctattcggaatagctggatcgatctcgatctcttctaattctacaacaggtccaacattgctgcttgggtcccaaagtcgaggatccacatcttcatcctcgccttgggaagttccctacttgggaaagtttttgtcccttgtctgtgctctagctggaggatacttccttcttagccttggccattgcaaggttataacatttacgtatagactgctggtttcctcttagacaccttaccccattctttgttgggaacttcaggcaagagttaaatattgatgtgacaaccattaagtcatatagggcttgtcggccaagcattacgttaaaagttgaaggaacatccaatattaggaactgtgccatgatnnnnatgctcgtcggagcttgtccaatagtgaggggtagcctgaattgtcctacaggtgcaactccttgaccggagaaaccatagagaagctggaggcatgaagttagatccttgagttggagtcccatctttttgtaagcagtcttgaacaagatg

SEQ ID NO: 58710 - DNA, 2178 bp, Cannabis sativa
ccagttggaaaagatcgtgaccgtggctggcatcaagccctccgcttttggggtttttcaccgcttgcctcgagacgaagagacgcccaatcacaactatggaggttttggagcttggagccagacccatctcatgtccagagccatgcttccccttcaagattacttcataaattttctagtttttgttgctcataaagtttggagagtttccgattcagaaaattagctaataaacttcacatgtatcgggttcataagaaaatagtcaaggtctcattcttatgcaaagaaagaaggaaaatatcaacaagttcatcttcattagtacaaagctactaataaaacaaactccatctcataaagaactattgtgccatattctgaaactaataaaagacagtcattcttaaacttataatcaacagttacaaaattctaaagcaactaaaatatgtgctttttgttaatagacaatgtttgtaaagatggtgaaagccacaacaaggactccttcaaatcagatattctttcaggattgctagaattagtataaactttgagatgcttcgaattaagcaatggagatccacgacatatcctcttcaacttttctggccaaatgagagacttcatccaatccaaacacataaacataccacttaacatactataaataaatcataatcaaaattattaaaataaaaacataatacaagtacctcatatttttcaacatgtaggctaagagtattccaagagcaattgagattcaaaagaaaatttaacatatcagtaaaccagtttgcatcatagtcttcatatccatcattgtccccctcaaaaataacaatttttccactcaaggaattagatggctttattgatatgcttagatcaatataaccttcatagcaaaagtactcaaattcaggagctgttccaattgtaatattgcaaggtccaaagtaacacttcataaaattgaaacttttcagttgacccgagattttgacatggtccttatatttctccttggtgaccaaagtcaaattctcaagaagaggaatttgagaaataagagcacttaatgatggcttgcaatgataactagtatcataaaatgagagatttctaattttcttgcaagcagagagatttatattgtgcacagaagcaccacatagtactagagattcaagatttatggcttctacttgtaattcatcatatactgtatctttcagttccaagaacttgaggcttaaactttgtagccggagcgccatttcatcactgcgcaagaagaaataattttgtacttgcaatttctcaagagaaggacaacccaacaaaaacttaaatgcctctccatgctcaacaatatctgaattcttaacagtttccattgacaaagtttttagtgatggaaagttaaaatgagaagcatccaattgtacccaattcaactccaaaatagtcaaatatcttgcatttattttaggtatgcaatagaaaggccccatggcctatgcacagatacatttcagtaaccttattctcagctgcaaaagctaaccatttatctaggaactcatccttacttgtttgataggaacccttcatttcaagcttaaagctggttacagctgaattccccataaagtacatacctttcttgcggtgttccaaatatttatcgacataattgtaaaatttttctagaccatgttcccattccattaatttttgcagtgtccattgtactactaaggttaacattattagagaaaaagattgtggagactgaataccatatgagcttccaacgctttgaaagaatacatgttcgaaccacttcttcagttgggagaaacgataagatgtgaaggatcaatgtatcaggtagtttcgaaattctgtcatcatcaccatcattacccaccattgaagatactgatggtgatgatgatatccttttagctcttttattcatgccctcattatccttacaatatagaaatattttcttgaacattgatgtacatggcaattaaaatattgataaaaaagaaaaccaataaagctaaggcaccatctcctctacaattttcgaaaagcaatgaatttaattaattttcttctcttgttttaactatagaaaaattaataggttcc

SEQ ID NO: 58711 - DNA, 798 bp, Cannabis sativa
atatatttatttataaataattgaaaggaaccttccactaaattccttgcttggggacaacatgtcccaaagatgaaaggaaataggtcccaaacaagggtacaatagatatatatgtccaaaaactataatatcatatcatatcatatatcatcatgatacacattaattcatggaaaatagaataaataaataagcactacttctactctgcacctttttatgaagagcattcattttcttttatactttatagtatcatttttagggtaagtttatatcacacattcttaaaagggtgttttgataaattttctatctgtttcgatatataaaggagttttatagtcaattcttttttcataatcgtgtacattatagtaatttaatacttgtaaatttttaataaatttcaagtagtttacaatatcataataggcacaactattttttttttaatacacgtagtaagtaacataacatgtccatcctcccgacactaaatggatgcggtagagcatctaatacactttgtgcctatgttttcttggcgacctttcaatattatcttgaacaaaaatctatatgcacatttacattggatttttggagggataagaactctgctcaactcaatttacaatctaattaatttgagaggaaaattaatatttattagagagctttatgtgagtacttcaagatcatcaatgtgattatagacacaacacacaatctagtataagttgatgaagttatattaaagagattcataataaatcatatataagttgatga

SEQ ID NO: 58712 - DNA, 1616 bp, Cannabis sativa
agtggaacaatgttctttatttattgagttttgagtacaagcaagtacattatttttgacattacaagaatggaaggcagtatttctataagaacattggatagactcgaatccagtagtgagaagacattgtagattggacatggacttgtctcaaccatcactcagcatgtaaagtccatctttacgcttgcctttgaggagaagggcacctgtttgtgtttgtctttttaaaacaaaacaacagagtttttgtgaaattcaagaaagatatcattgtcatcaacaagtttagaaacactaactaagtttttagtgatagatggaacttgtaagacggaattcaattttaaagaacaagaagagtgataggaaggaagaacagaagtgccaatatgagtgatgagaagtttcttaccatctcccacagccaatgtctcagatccattgtaggcctgttgagtattaaggttcgagttgtcaaaggtaacatgggttgtagaacctgtgtcagcataccaggaggtatcatatccaaaatcttgatcaagagttgtggaataagcttgaggatcatactcaaattcaagttatgtgagatgagcccttggaggaggttgatgagattttggaacaacccaattcttgtcaaacctgtaatggcaaacaggggctatgtgaccagttcttaagcacatttgacaaacaacacgttgttgactgtatcttggataaccactgccacgaccagaggtgggttaggagacttcattagaagaattcttggatgaggcaaatggtcgagcaccaccagatctgccattcccaaatgcaagatttgcttgcattttgactgcaagatcagtcatattctgatggtgttcgagcctgcattcatgagcaagaagaagagcctgaacttcttcaatagtaagggcatcacttcgtgatgtaattccagagacaattgagtcgaactcaggaccaaggccatttaagagttgaagaacaaggtcttggtcatcaacaagggaaccgacaatactaagtgcatcaaatattgattgaactttatcaatgtactcaacaatggattgacttcccttttggacatttgagaattggcccttgagttgaagctttcgagctctggtttgactggcaaatttttgctccagggcgcgccaaacagcagcagaggagttctagtttgcaacagaggcaagaatgccctctgacatagaggatcgaagcaaggataacaagagttgatcctttttcctccattgtaagtattcaaggttggagttgccattgacaagattctatggaggaggacctctggttaagagaatctcatcaagatcatgacctatgacagtcgggataactttagatttccatgataagaagtttagacgatctaatttgagggtaagggaagaagtaagagaattggaaaagggattccagagaggatttgcaggagcagcagaagaataggcattggccattattgtagaggcaagatcggaggttgaagatgttgggttttgtgccctaaataaattccatttcaatataatcaaataaagatcagaaatcacattttatgt

SEQ ID NO: 58713 - DNA, 603 bp, Cannabis sativa
cacaacccattattaggacccaagacccaaacctggacttgagactcgaaccaggacccaagaatgagctagatctggaccaagatctggatttggacgcgacacccaggacccaagacttgaggcttggaattggacctggacccgcaccaagaccaacactagaacccgaacccgtaccagaactcaaactagactcgacatgtggatggtgtttggatttgggaccaagactcagacttgaacccaaacacggacgtagacccagacccacactcaaaccttaaatcgtgcgctgtaacccgaaattaaaacagaaacttgaagcaaacccttaaaccctaaaccctgaaccttaaaccctaaatgctaaactcgttacacttacccctaaaccctaagccctaaaccctaaacccctaatctctaaacattcaacccgaaaccctaaaccctaacctggacataggcctagaacaatccacataccgagattggaacccaggacccaggctcagatccaaatccagaccccaacctagacccaaacttgggacctgaaccgagacccaaacccatacaagaacctggtccaagacctag

SEQ ID NO: 58714 - DNA, 999 bp, Cannabis sativa
tgaaaatgaaaatttgggaaaatgggtgattgaaaaatgggatttttttagcaaacgaatagaaaactaatctagctaatcttcattcactccaatattactcttttgtaaaaggatattaacatttttaccttttgtgtaaaagaaaacatggaaaagattaaacctttaaagatgggattttttttttgaaaaaaaaaaaaacaaatcaatagaaaacgcatctaatcttcattcactgcaatgcatacattgtacaaaatcaaaagttatgaaaaggaaaacttttgaaatgggaaaggggaaacataaataaaaggcagtgaaaaacgaaaaatcatacacacacacaacgaaagctaaactaaatcctttcagttctatttttcttcttcttgcatttgaggttgcccctaaagcaagacaagttgaaaagatggaaaaagaaaaggtttttatgaatctataagaaagaaaaatgaagaacaaaatcttaaataatatgtaaaataaatgaaagataatatattagtaaaggagtagagagagaaagaaacctgttagggagagctgagaatgccaagagacaaagcaaggaagaagatgactgatgaggaaagaagtggaaggggcaatataatttctctctatatatatatattaagcgggaaaccaagaaaggcaatatttatttactctacacgtggatgttcaccattgtatcatttttttctttagaattggaaagagaaatgtcaaaacataatacaattagattccatattaatttgcaacaaaaggtgtacgtgattagggatccacatttccctcactggaataggccccacggagactcgcctcttagagcaacttcaatgttcgttgctcgtgaagtttttgtcagtctaagaaaaacaatcttgattgcttgaccactaaaaaaaattgtgtgaactactacaattgctactatcaaacaatggtaggtgaatgattttt

SEQ ID NO: 58715 - DNA, 896 bp, Cannabis sativa
gctccagcattttcaatccaaatggcataaccatatagaaataaatgcctttatcaatttgaaatctagcatgttcctcgtctgccacatgtacttgtatttaattatagtgagagtatgatccataaagctcagatgttcacaccctaaggtagtgttaactattctatctattcgtggaagtggaaagcagtactttgagcaagctttgtttgggtctgtgaagtctacgcacattatccaagttccattagtctttttgagcaataatttattggcaagccatatttgatataaagcttcctagagaaactctatattggtcaactggtctacttctgctttcactgcttctgctcaaactagatctaatggtcttatctcctgacagatttgttcaatcgtgggatctgtgtttaatgcatgaaagatcacttgagagctgattccagtaaggacaaatggctccaggctaacacatcactgttttcttttactataaagatgattctttctctagtagctggaggtagattatttcccactttcatgactttcacaggatcctcatcattgatgcacacttcttatttctcctccattggtttaattattattttcaaacctacatgtggatctacttcatcttcttcatagaccacccccaatgtcggctgggtggatgttccaaattcttcacgacttctttctcggaccatcaaaaatggttttgtagagacattgtagtagatcaatgaactcttatgattcccttttattgttctaatgctctctatatcacatggcaactttaagcacaattagtgaatccaagttacagcaccaaagtcaattaagataggtcatcgtaagatgaaattgtaggttattgtgta

SEQ ID NO: 58716 - DNA, 1757 bp, Cannabis sativa
gttgttcctgacattttgaaatagtcgtttgaagtattcctgtcagtttttttaaccatcgcctatacgaccatcgcaaaatgggcagattaggcgacaatttaaaaccgtgtctattgtggacttcccgacaatttaaaactgtcacctataaaagggtataggcgacaattttaaactgtgccctatactataggcgacaaataacaagttgctactataaaatttatggtaaacatgcgcccaacaacaagtttctactattttattaattattaaacgaactataaaaaaaatagttagaataattctacaatccataagttactatgaaggctatttttgtggtcgacaaaaatttgcgttaacaatttagtgctttttttgagagtcttggtataaaaattcagaaaaatccctcctcataaacaaaaatacaaacccatgttaaatggctgacaacagtaatcgtcctaaagagaaaatccatcgtcctggcaaagaacgtatgggatctcaaagaaccaacacatatgaaacaccacgtttaggaaggaacgatggtaatttcaatgttgttggtgatcaaatcctagagagaaggagtgaagacgcctatgatcctactagttacgtaccacttgtagaattagagaataggcaacttcgacaacgtttggctaaatcaaatcaaggaaacacagagttggtgcgagaagtcgtagcgactagggttgtacagggaacagttcctcaaagccaacctgatccaactgtaaggagacctcaaggaagacctcgaggctctaggatatggaggcaggaaaataaccaagaaaatcccccaaatacctaggaggaataacctgggaatacaagggatgtcccaatagataatcaacctaatcgaagtaatacaaggaaccatgaacaacgacgagatgtcccatacacttcccatggatttgcgaactaagagaatgaacaaacttatatgcctaaatcatctcgcatgatgaagaggcgagacaaactcaaccaagaaactaaggatttcttgtgataatgaaagaaatcttagaaacaaacctaggtctagtggtctcctcctgagacatccataacacactactaccaaaaaaaatttcccgatatttttaaacagtcgtttaaagtactcccgtcggtttctataatcgttacctatacgaccatcgcaaaacgggcaaaataggcgacagtcaaaaccgttgctaatatggacagagggcacggtttaaaaccgtcgcctataccctgttataggcgacagttttaaattgtcgcctataccctcttataggcgacagttttaaatcatgccttataggcctagttatgtttttttaagttttttcagcgacagtttttttagtcgttatattggaaaaataggaaaaaaaaaatagatttgctgcaattttttcccctgcattaatttttaaattttttacaaatctgtagtcataataattaactaacactaatataatctaaatatatttaaaattatgtatagtcacaataattaaactgatactaatatcatctaaatatatttaaaaatctataattaagttaacgctaattataataatctaaatattgttgacctcacttttagccaacgacaatgagtctgatttgtaagcaacaagtagtttaatacgaaggaaatataataaggcaaataaggacacaagaattttatagaggtt

SEQ ID NO: 58717 - DNA, 674 bp, Cannabis sativa
  modified_base (640)..(644): a, c, t, g, unknown or other
gtttgagaatagtcacaagttaaaatccaaatgtaacaacgcaagatcaccataaatttcaattctaaagtcaagaggcagaattttgaaattggtgatctggtcttaagaaaggtatttctagcctctcaggagccaggagtgggggtcttagaataaagctcggaaggtccatataaaattcgagataaaatttatgatggaacatatcacttgaaaaggctatatgtatcacaaatcccaatagcatagaacactgagcacctgcgctaatactatcagtagactatgtagaaagttttcttatatttcattttctttttattttatatgtttaatttccatctatgcctctgggaagaaatcatttcaataaaacaagaaggtattttcatttcatactcaatttttaaagtttttgtcttgtaacatgtgaccaagagtctaaaactcttaatcctttgggggatatcatacattatatgattataatgttatacctttctatagaaaatgactaaagtaataacaagtgtaagagtaggtagtatcacctaaaattggaactctaaggaactagaagtaagttacagttgggttttgtgccctaaatagaatccatttcaatataatcagattnnnnnattaataaagatcagaaactacattttatg

SEQ ID NO: 58718 - DNA, 510 bp, Cannabis sativa
ataatcttagttagactcgacctgcttcagtaaacgtgaaaaatctgcacttttgcttcaactaaactttacgcacacaatgctaaacccattaattatagatcactaacaatatagactaacacaataatagtgggaacaacaaagaaaaagtgtattgtttgtgtatttgcttggattttgctaaaaaaaaaacagttgaaattcaatttgcatgaacatgtaaacaaattgatgattaattttttggggggcctaattaatatctttattttcatgtgaatacagttagttgagaaggatccaaatgcagccatagtattattttgggaggcaataaatgcaggagatagagtagatagtgccttgaaagacatggcaattgttatgaagcaacaagatagagctgaagaagcaattgaagccataaaatcatttagaaatcagtgttcaaaacaagctcaagaatctcttgataatgtccttattgatttgtacaaggttagttac

SEQ ID NO: 58719 - DNA, 850 bp, Cannabis sativa
  modified_base (375)..(382): a, c, t, g, unknown or other
aaaatataaaaattaaagattagaccaaaacatttgataaaaataataaatgaaataacataatcataattgaaaattaattattatttttttacaatcaattttattataatagtattttctaggatgaagttatttttatgatattaatactattattttaataattttattttattactattttttaatttataaattatattaatatgttaactttcctattttttttattattataaaaaaaatcagttcatgtgatatgttgttactaatgatttggtttgttggtcacaaataataataaaaaaaataagtctacatttaactatttgaatattatttttaaaaacaacaaacaacaacaacaacaannnnnnnnataataataataataaaaaagtgatttgcatagaacaaccaaattctttacatattaatgaaacagtaacatctattctttcctgtatgaggccaatcttaatttaaacgcaaataaatgaataatattacattacatgtgaagtatattctatacaaagaaatgaaatacttgacttgtaatcagtcttaaaggatagatcgataatccctggttatgttatcctgcttggcgccattaaaatttttaggctgtatttcctatatattatacgaagaaatatacataattttaatctcttcttatttacatcatattattaaatattaagaatgacttaatgaaagagaaaacacatattctaatattaccataatttcagaaatataattaatgaaagaaaactggaacaacatggaaaacagctaataaaaaaaacgaattagcaaaactataaacaacttatat

SEQ ID NO: 58720 - DNA, 1014 bp, Cannabis sativa
  modified_base (591)..(592): a, c, t, g, unknown or other
tgtatttaattagcacattctctatattctctcattcagaaaaaggttaattaattatagcaacatacaatcgttggatataatatcaaaacatgctctgagagatgaaactataaacaatacaatgaatgtaattaacaatattaatgactatcaaaaggttactaaattatatataatatattatagagttctcaaatttcatttgcaccaattgatattaaaaaaaaaacttaaaataatttttaaaaatctcttaatacttttcccaaaaaaaaaaaaaaactcacatcattttatattaatttcaatacttatttaattttttttccatttttttaatttttactaataaaattcatttcatataattgtttattttgatcttttgacaaaatatttaaaatatatatattttacttttcactacaaaaaatcttacttttattaattatcattcctatattgtgactaaaagattcgttgctaaaagtattcgtcacaaaaattacaatttgttgtgactaaatgtggttttagttataatacttgttgtgactgagaacttgtgtctaaatactatgttttagnnacaagtaattttttgttgtgaccaaaagtcacatttaatcacaaaaattttatgttgtgactaaaaagttgtcactaaaagtagctcttttttgtaatgtttgtttgataaatatattttttaagagtatgataattcgaagaaaaaaaattaaaaaaatactataattgaatatgtatattttatacaaaataaaaattattaacatgcatgagatgcttttataaacttttgagtgtaaataaaacttactgtaatttttttatgtagcactatttaaagtaaatcaaaacaaattacgttacgtacatgataattattagcatacaactgcaaatagaagatttcataaacttgtttaactacaaattaaggagaaattaaaagtagggcagccttaggttaaaagtacggcagcccta

SEQ ID NO: 58721 - DNA, 1647 bp, Cannabis sativa
tagttgttgttttactgttttattatttttactattttgttttacagttatgggataataaatttggtaatgaagatttttatactacacgggtgacttctacttgctcttttaaaatcattgagactatcaattctattttgacccctgaacagaaggaaatgtttggacaaactattttggatgttttttaagaactccttcttatgttttgcaacaccagttgttccatagtttgttgttgagggaagtggtccagccgaatgataatgagatatggtttaatgttgctagttcgatgctaaggtttagcgttgaggaaatggctttggtttcaggccttgattgttttggtcaatgtgacaagttgaggtataaacaagaaaaaaatttgttgaaggagaagatttttgctggttttaaagaaataaacaagaagaacgtggagaatgcttttattgggaaaatgtttggtgatgatgatgagcttgcgttgaaagttattgttttgtactttgttcacttgttttatcttaagtgattcagacctaaaaaagtatctgacttagagtaggatattattgacagtgggaggtttgatgaatatgattggggcaaagagtgttattgtttatttcttgatttggttagaaatgcgattgcaaagaatcttgtcaaaataaataaagttgataatggagagaaaatagatttttataggttgagagatttggcctatgtttttcaagtttggttcaatgaatgttgtgtttatattgatggcattcattgttctaaattgcatgctcgtattcctagaattctgaactggtctaatgatactgctccttctgttaaggagttcaagaattctatcttcagtgtttctctttccaaggtatttagttttaaaaaatttatttcaatgttacttttatgtttatactatgtgtttttcatgttgtattttctgttttatgtttgttgcaacttaaagtcaagaatttgttcccaactaaggaagaattattgaggttacatttggatggattctttgtggataagaatctagatgacatggggaaaggaaaatatgtgcagattgatgatgttggtagtcaaggttctgttgatgaaaatagtttatcttttaaatttgcagagtttcataggagattggcagatatttctactaagcaggaagcattctctgctaaatttttcattttaaaagaagattttaagaatatgatacattttttgaaatccgtgcataaaaaaattgacatgttattgtcaagacctcctcccaaggtttgtttgtaatttgttattaaacttttaatttttgtttatttttcaagaattattgatttttgtttattttcttatgtcaaggattgtcatgatgttgaggaatatgataatgaggaagatgctgagattgaggaggcttctcatggggatgaggatgatgtggaagatgatggtgagaatgaagatggtgtgaatgaggatgtttctcagggagaaaaaatgataataaaagtgtcattaatgatgaggaggatgatatagatggtaatggtgaaggggatagtggtaatgatgttgaggtattaaaagatgttgtcaacgatgagaaaa

SEQ ID NO: 58722 - DNA, 900 bp, Cannabis sativa
  modified_base (789)..(789): a, c, t, g, unknown or other
ttcaagacttatgatatttttgacgagtgttgctcaaattttgttgtatttgtgataatttaatcatttggtgatagttcaaaccgcaaaaatcgcatcacacctttgcggtgcggtttctgcaattttttagtttcgcgatgcgggtgcagtttgggaaattagaaaaaccgcacgtactgattggtttgaaaaaatagtcaaaaaacacaccacccgtactgcaaacacccaacacccctaataaatgaacaaatcccttaaatttataatcatatatatatacttcttgtttttatataatggaaagtgataattcattagaataaccaatgtcagttattacaaaagactagacagtaggagggaccgtgctaccaaaaaaaaatacaatctgactatacataaaattagaatatattttactacataataatgaaactaatctattcatctgcttattttgcaaaaaaaaaaaaaaaatctattgatctgctttacttgatttaatcgtctatcaaattaagtgacaataaatagtttatcgtcatggaatcaagatctcctatccaaatattgtatcccatattatatctaaccaatataatgatgacgcatcatttaattatttttgtaaactttactcactaaaactaacagaacaattccattaattacaaagttttcatttttttaataatttccttttttcttggctgtttttgtcagtagtttctttgttttttttggtcaagattagtttctttttttcaaatctagaaccttatnaaaatattattttttttaatttaaatttattatatctcatattaacttagaattttcaaactcatactcttaagtcttgcaagcgccgctatagaactagaagaaaaatta

SEQ ID NO: 58723 - DNA, 1221 bp, Cannabis sativa
  modified_base (413)..(415): a, c, t, g, unknown or other
  modified_base (1194)..(1195): a, c, t, g, unknown or other
atattttggctctaaaatatatatcatattgtagtgcccgttgcaagcttcgaaacggtacatagaacgtctaaaatagatatccaagtcaaaagttatgacaaaaatacgatttctgatatcctaggaatttctaaaactatgaaacaggaaaatcctaatttttgcactcactgaaacactaccaaacttatccagctctctccaaacttcacaaggcgctaaccataaatattaccatccttacgtaatagaaataaaaatcgagcccttaaatgaaaagcaccattaacattcgaactaagctttaaaaagttccaaactcaatttttaactcaaaatcacctcaaattaaacaagaaaacatcggaactagtcccatgactatcccagaacaatcctataaggtcagnnncttcgtaactattctaattcacaaaacccttatacgaaactaaatgtttttaaacttacaacgaaattaaaccatactttaagctttccctcttcaagaatttgctatcctgctactaccggagcttagatcgctatatttcaagttaaaaatcgaagaaaatggatattgggagagaagattttgtggaaagaagaagaatgagggtttcgattttcgttcttctctacggttataacttaaaacttaatatatatatatttaaaatgaaacaagtttcgtttcatatatatagaataataatataatattaatatattaataataataatataatattaagaataatattaataaaaactttattattaatagttatcttattattttatagccactaagaaatctctatttctagagtatttggccaacttcgagtagccttaaatacctcgatatttttaaaatcaacttatcctaataatcccatcaatatttctaactaaaactgttgtgacattgttggcctccaatcgggtctctaggatcaccgagcatgaaaatatttttatttcacaaatacctcatattatatccacgtatttcaaataaatctctataattagcaaattacacttatatatccacttatcgagtcttcagagtacccagacttaagaatatttttgttccacatatagctcatattacattcacacatgctatataaatctctgcaatgaacaaattacgcttatttactcacatatagcaaaatnnaaattttatgctgaaataaattagta

SEQ ID NO: 58724 - DNA, 1455 bp, Cannabis sativa
tattttaaatgagtgatttattaccattaaccaaatagtttgattttaaaaaaaaaaattgtgaatatcttttataaaaattagctattttcacttcagttgtatctttttgaatggtccattatacaataccatattaataaaagaatatataatattaataattttataatacagtagtattttttttacctataaattaaattaatttataatttaaaaaaaatttattgtttattattttatctaaagatgaattctcatatatattttgagatataaaataaataaataaaagtatcatatatcaatatatctctctctacaaagagtccttcaatacaaattatgatatttaattaaaccaattcaaaaagaataaagaaagaacttttaaattacataataattaattcaatttgaaattattttttaaattaaaaatttgaatagcataataattaatttaattttaaattacattttaaattaaaattaaacaaaaaagtactaatttttttttttaaaaaaaaaaactataattatagaactacgatataatttataacaaatattttttttatcatttaaattaataaattatatattatatagtaaaaatataatataatttttatatggtaaaaaaagattacttgatttataatgaatattaaattcatttgtatttatgctaattacaaatatataaatttatcacttagaggaattttcataaatatggaaattgagactcataaatatgttaagaaaacaaaaaaaccatatgccattagtattattaaattatgccataaaaaagtaaattactaaaattttccaataatttttacttataaaaattatattaatcaagtataaatataatttttctattattacttaaataatattttttttataaattagagggaagatttaaattcttttattattaaaaaaagggagtctaaatggtcctttaaaaacaactacatcatgaatcataagtataatttattatgttatttttttttcatttattttcttatacaaacacatacaattttttttattattaattctacatttttaatatttatcataaaattactatatattttttatgtttaaaaaaattacatatttaattttaatactattagtttatttataaaatacacatagatatattatattttagattatatatatatgtgtaaaaaattataaaatttgggcagcgaattagttcctaatcaacataacaatctttttccgaaagaataaattgagacgtcatttgtgactaaatagcataataataattaataagtcaaatactttgaaaaaaaaacctcactttaatttctttaatttttttttttttgaagcattgaatcagttggtcggttagcataacttactaaagcctggcgtctggctgcgtgtcta

SEQ ID NO: 58725 - DNA, 626 bp, Cannabis sativa
  modified_base (214)..(217): a, c, t, g, unknown or other
cccattccagttgaatcccatctcttagaggatcctctctagtttgaaagtcttatacgaaattctgaactaggggtgccccaaactagtggagattgagtatctttactcagttaaggccgttccatcaaggaagaacaccgcagggggctttttctatctcggtactcatcctagcgagcctaaaattattgtagacttgccaaataaagtnnnnttcaagaacaacttcttctggacgtctggtctttcccccatcggcacaaccacgtttcgcaaacttcgtaagtgattgttctcttcttgctcatttacatcaatctttgttttagaagtttatgatcaatgttttgctcgtcttgatagctctcctgatgaggcctactcctacccttgagatggttagtatgcacaggcgcctgttaactcttccctacggtctttggtcatgcaacttccttttgaacgaggctaacctgcgatcggtgggccttctcgcttataagaaatatacttgtgattacaagattcccaagtattcttcttggcagcaaataactgttccgcccgaggaccaggcctgggatctcttggctcaagtacaataccttcaaaatactgccctc

SEQ ID NO: 58726 - DNA, 901 bp, Cannabis sativa
gatgagtagaacaaatcttccagagtttttatggggtgaagcacttatgagtgctacttatattttgaatcatgatccaagtaaatctgttcctgaaaccttcctttgagttgtggactggaagaaaacctactctgaatcatcttcatgtatggggtctccagttgaataagaatttatgattcaaatttgaaaaagttagattcactgttatttcattggttatccaatgtactcaaagggctattgcttttactgccttactcgtggtacgcaaattgttgaatctcagattgctaaatttcgagaatttgttattgcttaaaatatcccttcaacatctcttgaaatgggggagtcatctaagggaaattttaattcttatatctttttcaagagatgataataatagcagtcttattcttactctagttaatagcgctcccattgctgatgcatatattgctcatgatatcgaagatgacgagggtcttattattgatgaacaacctattattgatgaggaatctattattgaagaaggttttgttgttgatgagggtaccattattagagaaatccaattgtaaaatatgtcaatggtcaataaatagaggttattctagaagtacctcctctatggagatctcaaagataaaagaagtcaacaaagtgtcatgataattttgtttaccttgaaaaaggtgaatgtgatcttggtcattttgaggatcctctcacttatagtgaagcacttaatagtccacattcttcaaaatggataaaagctatggatgatgagattaagttcatggacaaaattaatgtatgaaagttagttctattacctgatggtttcaaactaataggttgcaaatggatttttaagaactaaaaggat

SEQ ID NO: 58727 - DNA, 1275 bp, Cannabis sativa
tgcggaaattactcaagcgatgtcgtaatactcaaggttcatcttcttctcctttgtcacgagatgatgatattgagactctagtttctgattttgaagattctagcttctccactgactccattgcggaggttgcgaggcaaccccgcaactcatcatgaaaatcattagctggaatgcacggggtttggggaacccgagtgcattgcgacacctgagattgcttgtacaacagcaatcaccccatgttttgtttcttatggagacaaaacttgttcagaattctattactcgacttcgacaattactacgttattctaatggtcttgaagtctctcgggttggacttagtggtggtataatgcttttatggactgatgatattgatgttactttgctgaacatggggcctactttttttgattgttatatgaagttcaatggcagcccaagtttccactttactggtttttacggggctcccgaggctgctaataaatcggattcttggaccttatttcagcggtttggtgatgttgctccacttcttccttggctagctctcggagatttcaatgagattttatccaacaatgataaatcgggaggtgggttgagacgtgagtcccaaatggaagcctttaggactaccttggataaatgtttcttgcatgaagtatcttttattggtgatccttttacttggataaaaaaccgtactgctgtcaatactcttaaggagcgtcttgattggtgttttataaacaacctatggacaactcattttcaagcaccaacagtggaacacttggacttttttcattctgaccatcgggccattgctgctggtttttcctgcaccacgcaagctgatatcccacagaaaagcaggagtcgattccgctttgagaagttgtggcttgctgaccccgagagtgctgaaatcatttccaacagttggaactatgaccatgctactgaccccattgctgccatgcttcacaacttaaacacatgtgcaaaaagcttgcaaagttggcatataggcaaatatggcaagatgaaaaagaacattaatactttgcaatcaagggttgctgatttaaataatacctctgtccgtaccagcgaacacctccacgaattgcaaagtatttaatctgtcattgaggagttacttgagcaagaagaagtttattggcaacaacgatcaagggttgattggctttctagcggagaccgtaatacaatgttttttcatgctaaagcatcctc

SEQ ID NO: 58728 - DNA, 1767 bp, Cannabis sativa
caaagaaatctcagaagcagtttcaagcttctttaaaatgggtttgattcctaatgatctgaatgaaactactctagctttggtgcctaagattgataccccttttggggctgttgatttcagaccccatagcttattgtaacaccctttacaaatgcatttccaaaatgatgtttagtcaacttgttgaggttttgtccttcttcaataattaaaattagagacctttattcagaataggtccctcgctcacaatattgtgattttccaggacttgattaagaactacaaaagaaagaatacttccctgagatgtgctttgaagattgatttgagtaaagcttatgatacatttgactagaattttcttgaaaggcttcttactagtcttcaattcccctctcagttcatcaagtggattatgacctgtctcaagtgaaccacatactctctattgatgaatggtaaattctagagaggttttcacggagaaaaagggctaaggcaaggagatcctatctctcccgtgttatttgttctagttatggaatacctcactcccttggttcaagttggtactaaacagagtaatttcagatttcatccaatgtgcaaaggcctcaagattatcaattcgtgcttcccagatgatctcataattttttgcaaagctaatgctgagtctgttaagtgtgtgaaggttatttttgatgagttttgcagcagtacaaggctcggggctaatcagagcaagtgtcaagtgctttttggaggagtaaccaattatgatagagagaagttaattcaaatccttcaaatcaaaagagggttaatttcccctaaaatactttggagttcccttgagacctactaaatggaagacaggggactgtggtataatcatcaagaagatcaagatgaggctgcacacataggctagtctccatctttcatatgcaggtagatctcaacttattaattccattcttttaggattgagaaacttttggatgagtattttcttactctagaagtattgtgaaagagatagataagttgtgcatgtggttcctgtggggaaataatggcttgaagagtaaatttacttgacttcttaggatgatgttcgcttacctaaagcctatggtgggttggattttttcaagggagctaagtgaaataaagttatgattgccaagtatgtttaggaaattagcatacgttaagaattgctttgggttaaatggattcataatatctacttaaagggccaagattttttgggggtatcaacttaaagctgatgctagttggtattggcgtaagttgtgccatattagaagaattttttctcaacaaaagattattgatgcaagctatcttcgaaagtttaatacagctaagttgtagaaaagcttcattcaacttaaaaaagtgaattatcatactttgtttggaatagaaatttatcttatggtaggttgttaatgctaagcttctcactcgagatcagttttaaaggatcaacatacagcttgatagctttttgtgtctagtctgtgattcaacagaagatcacaggaagctctttttctgttgaccattttctcagcatgttttatagagagtccacatgtggtgcaagagcagttggccgcagttgtttaaaccctagatcaggtggtttcaaggttcgaaaaaaaggagtgaaaaatgaggttgctgctgctattttagcagcaatggtctaccatgtttggaccaata

SEQ ID NO: 58729 - DNA, 1273 bp, Cannabis sativa
caaatcacacaagttgagatataacatatagcttcttccattcaagtattctctccaaagttattcttattttccaacaaagtggtatcagagccaagtttgtgaaaaaaaatagcaagttgaggaatgatccccttctaagttccaatgctcatcaagagcaactatgacaattggagtattaagatgaaggcgctactaggagctcaagatgtatgagatattgttgagaaaggtcatgtagatcaagacgatgttgctctttcccaaactcaacaagatgcgttaagggattcaagaaagatggacaagaaatctctctacctcatctatcaagcggtggatgaagatgcgttcgagaagatctcaaatgcaacaacggccaaagaagcgtgggagaagcttcaagcttgcaacaaaggagcagagcaagtgaaaaagatccatcttcaagctcttaaagatgattttgaaactttatttatggaagatactgaatcaatttctgattatttcactaaagcattatcaattgtcaatccgttaagaagaaattagtgacgtaaaggttataaaaaaaattcttcgtactgtgagtccaacctttgagtacattgctacaatcattgaagagaataaagatttagaatccatgactattgagcaactcctgggttctttacaagcctatgaggagaaacaaaaaaggaaaaacaagtgaaaggagaagatggagcaattactaaagctcaccttggaagaagaaaattctgacaacagtaaagataaaaaaggaagaggacgtgaccgaggaagcgaacgtggacgtggtcgaggacaacgaagagaaggaagggggagctataataataataatttcaacaatggagaacgaagccgaaattcacaagcaccaagagggcacagaagaggcaactcattgtcaaggagtgacaaatctcacatcaagtgctacaattgcaacaagtacggccattatggctccgaatgtagatcaaggatggtcgaagaaagagccaattttgtcgaagacaaaggtggagaagaaggaactttgttgcttgcttgcaaagacaaagatgaagctctagaaaataaatggtatcttgacactgcggctagcaaatagcaatcacatgtgcggagaaagatgaatgtttgtggagctcaatcaaatggtaaaagggaatgtctcttttggagatgaatcaaaaatacccgtggaaggcaaaggtaagattcttatacgctt

SEQ ID NO: 58730 - DNA, 768 bp, Cannabis sativa
agggcacaaaacccaacaccatctacattattaacttcccaaaacataatttgtaagaatcatcttctctgagaaactttaacaaatgaatcaaagaaactattagcatgagcaagacttcatgattaatcagaatttaggctgatctagtattgatcattgttatgatatgaattaagtttttatagtaaacgacatgttagataaagagagctttaatcatattggaccttgtcatatataatctttactatatgcaggaccttcactttgacgtcatactacatctgtaatctgaaccaagattacttgcactgaagaacagacattagtgaaccatagtagcaaccattgattaaagataagattcccatactttactttaatatgttatgtttctgactgttttattcatagctaagtggtcctagttctctgtacaactacaagacacaacctcacatatgaataagaaattttctgatatttgtatataaattattcaataataaatgttcataatttaatattcatgcatatataaaaatgttcaactcttcattaataataagaattggtgggattaaaggctactcgaccaaccatatgtcttaacaaaaaataaagcttggtttaaaagtcgcctgactagctatttaaggtcgtgcagaaaataaaagaaaaacaaaataagagcttcaaagctctgaaatatcaaaaggaataggtgtgttcaaattttcaccagcctagtccttaacagcaggt

SEQ ID NO: 58731 - DNA, 1367 bp, Cannabis sativa
ataagttgaatatgttatagttttctataagtataattattgttttaaaaataaatttaattaaaatattttttatgtaaatttgaaataaaaaaatatatttaaaactaaattttagatagaaataaaataaaaagataaaaataggtttggaatttgttagttgaacctacaactaataatattcaagattaattataaataaaaaaaaatacatattaattataatgtagttttcaatagttaatttgagctattgaattaaattaaagactataaattactatccttattcataaataaaatattcaatccctactataatagccccatataacatagtttgactttgacatgacgaaaaaagaattgaagatagaaaattgcatatggacagattctctaacttgagaacattaaagaattaattaggtaaacatgtatatacatacaattaaattttacatgtgacataattccctcaaaatttgaggcatttaatgtcggtattgtttttcaaaattaacatacatgatgatgatgacatggtatacaaaataaaatactatttttcttacatgtacactgctgcgtccatgtgtgctgcatgtgagaagtagatatttattttggctctgtgtgatatttagtttgtacttgtgtgtctcctatttatacttttctatttactttcaggcagcttttgattagaaataatgaaatagaatagaatagaaaagaaataatttttatttcattctattgtttggttgtatttaaaattattggaataccatttcgatagaatgttctttttattatttttatagaatgactattctattttgaaatagaaagaaagaccattctaatgtaagatttgaaaaaatttaataattttttttatcaatttttttttatattttttaaattttattcttccgttcctattctaattctcattcctaatcctattcttatattttcattcctaccaaccaaatgtcaccttaattcttgtatctatctatctataaatttttataagagagtaccgcatcaacttttattataattttttagttaattttttatttaaaaatacattttgaatttatgtgaatatttgttttagctacaatatctgtaaatttgaaatttttttaaataattaatatacaatgctacaaataagtttggaattttttgaatatgtataataaagttgaatatcaaaaactttatttttggtactatataaatacaaattaaaaatgggaaatttgacaatatatgcttaaatatagcatatattgttttaatatactatgtaaaaaaaaattaaaaaaatactctccaattaatta

SEQ ID NO: 58732 - DNA, 783 bp, Cannabis sativa
ccgccacaggctgtccaggagtgggaaaataggtttacaacaatgcaagccagaattaatgagcaagaggaaaaaatcagatgtctgaggcagtagggtactcctacagtgcctgctccagcaatgcaggtagctcctacccttatggtgtaggatggactggttgttgcagtgaaccaaatggaaccactctatgaaaggttccgcaagcatgcacctccagtcctttttgggaggtctcgatcttatgaaagccaagcagtggctaatgattattactagaatcctaaatttcatgggtgtcaccgacaatgacagagtggtctgtgccacattccaatttcaagaagatgctccagtttagtgggacatggtgtccttaacttatgatgtaactgttatgacctgggaaaaattccaagagttgttcaatgcaaattactacaatgaagcggtcaaaagtgcaaaaagaaaagaatttacccagctgacccaaaaggagaatatgagtgttactgaatagacaactcaattttatcgattggcaagattgccctctagaattgtggcaaccgattttagtaagaaagaaaaatacctggctggattgaattcgaagataagacatgatcttatgattaccactaatgacaactccacctatgctaatatggtgggaaaggaactgcgggctgagagcgtaatggagtgcacttaggagtctcgagggactgatgttattggtggggctcctactcgtcctacctctggttatggtagggg

SEQ ID NO: 58733 - DNA, 601 bp, Cannabis sativa
ctaaagtaatttacatggccaacccatgctgctgtcccatacaagaagcctcctcccatcaagaaggacatcaacaagagggacacctctaagttttgttgatttcacaatgatttcagccatgattccaatgagtgtatgcctttgaaaagagagattgaattcctaatcaagaaaaacaatcctcatgtacaattatgtgcaaaatgaccaaactcaggcacaagttgcatagaatagagaccaaactcgtgcaaagacttaaatttttaccaaatatttcttgagttattattctctcttggacaaccactactaatctaactctaagtctaatttgcctaaattaaacatatacaagtaggagatttctaagatggaggatttatatcattttaggatagaatgtcgggaatatagtcatttgtgccattcaatttcttaagagaaaacagaatgacaatataagcaaatgattcataaaccattcatccaattatatactatcctagcaaattggaaatgaataagccaagaggaaaaaataggataatttcgattaaaataagaatccaacaatgtcctggtaggcgagagtcaa

SEQ ID NO: 58734 - DNA, 996 bp, Cannabis sativa
  modified_base (32)..(36): a, c, t, g, unknown or other
aataatctggattacattgaaatagagttttnnnnngggcataaaacccaacatgtccttagttggaactgtcgtgggctctgcaaccgacaaaatgttcagttccttaaagacgtctttcgtcacaagaggtcagtttttatataagaaagatagaagaagaagaagatagacaaaatatattatataatatataatacataacaaaagaagaatatatatatacactcactcacaaccttgagtgtaattagtggagatcaccatgacttgaacaaggtataacacttttgtctaaaagttattgcccctatctctaagcactaagggaaatctctagaaaatagctttaggaattatcaagccttaggattttttagcaaaatactttcttgatagacaacccaaatgagcaccgaaaacctctttttatagtatttttgatataatcatttgaaattcaaactcataacctctcgtggatgttatggactcaatattaagtgtaaatatgagtaaaagagatgcaactcatgcacacactataacttctatagcattacgaatttcaaattaagatgtgtaacacctttttacacacttaatattggtgataattttggagcttactcatagtaataagtaaatccctcatatgttacaaataatgacaactaatatatattgtcatatgttacgtattattggtttattatacatattaaatttatacattatattatttataaataatataacagaacatgcctcagacccaaaccacgaacccgaactgggaccttgaccctagatccaaatttggactcaaactcagaccttggacccgaacacaaccaagacctcagactcgaacgcgaaaccaagatctagacccaaacttgaactaggacccagattccaaacctcaggttccaaaccctgaacatggacccaaacttggggttcagggtctggggtctgggtctctattcaagt

SEQ ID NO: 58735 - DNA, 3957 bp, Cannabis sativa
  modified_base (2651)..(2654): a, c, t, g, unknown or other
ataaatatatcgtaatacatggaagataatactcgtcaaataatgaggacctatcactatgattcatatgtatattgtataataagaaatattaggtttaagtggtaaatctaaatgctgaccgagtggaaaaatattagaatatttttatttaatattaaaatatttctattattagtatacaaaatcatttaaatcgatttcgcttgatctcactgactgtttgctgacggtatattatcacaaattaaaatgtgataagaaaaaatgttctaaatatgatcagattacaattaactaattaatttatttctcaatttaatttcttaaaattttggtggaatgtctcacctatataaatatagggtctcgatccccgagctatattcattctatgaaacacaataaatccatctaaagagtttagagaaagtttggaagtccaattacccacactaatcagtttgtttttcttttgcagattcaaagcttgtgtgagtttgaatctcaaagaatttaaaagtattttaatcctttacttatattatgtatatattcatttacttccatatttttatgcatgattatgtatgcttcatatttgattcataaatttttaacagtttatacaaactaatgatctatatatatctaatatcttacaactttaactaattatcgagcgataatcatacttaaacatttaaccctgcatgaaagtaaccagattctaaatatattataataacaaataaacaagaaacataagtaaaaatgagaaaatattatttattcattgtcgtgtaagcaacgacatataatattcttatatcattaaattagctgaagaagaggtaggtgtagagatgggtactactctactagtaccaaatttatttcatttctataagactgtcaattataaaagaacacgtgtcatgcatattagtatttagtcaccacagttgacgaagtcatagttgaccataaggtggcctcgagcaacgccttccttattagtgtcaatctggttaaatacatttacatccaagtccagtccaccattgctgcactgatccacaattcttactgtaacttggtctcctgtccctgtgtttgtcacctggacacacacacacatatattatttctatgtatatatataatttatacttaattatatatttgtatgcaatatctataaatatatatgtatatcatttcgtagctatccctaaactatttctatatagaacaaaatagtactgatagtaaattaaatttttaaactttgaaaattcgaagtccttcaaaaacgtgtgaacacttaattgtaaagaaaaaaaaagtaaataccattttagactctgtgttttgtaaaaattattaattggactctctgttttgttaaatgataaaatggaccctatattttcaaaaatagtaaaaataagaccttgagctcaattttcaataattttatttttaaatataaccaactttaagacaatttctaacacaaacggatacagaaattgtaactagttttatcataacatctctagattagattattattaagttttattttgacaaaagaatagttcagagttctgtttgtacaaaattttaaaaaaatagaaagaatcattttaatctttaaatagtttcatctctccccatatctgttagttcagggatctagactcccatttttttctttaacaaattaaaaatagttgtttgttgaccaaaaaattttttcaaaggagaataatgggaacaaaataagattatattttaaatacaataatcttttaatattttaaatcttgatcgaaatagtgttaaaattactaagattcgataacaatatatgaaatatataatataatgtataaatggtaaatttaatttttatatcatgaaaatactcgatgatgaaatatgataaaattattaagctataccaattattgtctctaatttatagaatataattaatatacagaaacaaaaaacaattatgcatgcataatatagtggggtgggcagtagtgtcttactctcaagcatttgccgcaagcctcctggccacgagggccgacgggtccgcagaaggcagcccagccatacttttggcgccaagccaagggcttgtcggcgtcccaagtggcacagaatgcactgaccttgagcaagtcccagttattatcttgtggattgtacaaatggtatgttgctctaacattgctcgcactttgagccgatgctccaacgatcacggcacacatcaccaccatcaccaccgcccacgccttcctcatcctcatcattcccattaattctcactctaattaatacctattactagctatatacttgatgtctttattaatatttatgttcatcatcgttcgggcttcaacaatttataagcacacatggatcccttagcgatttacttaaatgacctttgaaaagtatgaacttgactgacctattgactatatatttataatacatcctataggttcaccgatgcaactcctaactgtttcgaaatttataaaaaaattttagtctaaatttttttatactcgtgtacgttatagttatttaagccgtcttgtaaaattttaaaaaattcnnnntaatttacaatatagaaatcaatgtttaaaccgtttattttacacgcgtataaaataaaaatgtcacgcgtgcaacagactctttaaacactgtttttgacgtattatagaatttttcatatttatattatgacagtactttatttgcgtgcagcaaatattacgaaatttacaaagccacgtttttgtttgttctgttggatgctataatttctattacatttacatgtacgcatataaaattagaaaaaccatgtatattaatttcgtgaattttggtatgccaattgtttttttttttttttaattgaataaaaagagagaaattaatatcagtgttattagaatattgacatatatattccattcaaacaatagagctatttttctttgatcataatagcgcgttcatcacggagaaacatctgggtgatgttcgccacataaataggtaagattataagatatagagtttgctaaattacaaatttcattacgtgtgtaaatcaaagtacattttccgagtttagaactttaagtaatattctagatgcatatatggtgactattaatgtaactaaatcaaaaaacaaatatatgtatattgtcaaagcaaaaccttatctcaatagtatttggaacgtccaccccaaaaatttcagaacagaatttataaaattagagatagaaataatatataattattagatagcataatttatataggtgtttgttcgttactaagaagatttggttttgagtctaattcctctcaattttatcttctattttgatttatatatgtaagagcaatttgcggtgaaactcttttatgttttaatttttatacacttattgtgaaaattatatacgcaagtatacatagtcaaacaagtaataaagtgataagtaagatcgtctccacaggaattacaaacaaagtctccaacataattacagcattgctttggactgtgggaaggtcactggtgtacttgaaggcgaactacgggggattctacttgctctgaagtttgccaaagaccaaagtctccaatgtatcaagatcgagtcggattctttgactgctgttcgagcatttgactctagagttcttcctcactgttggagtacttttccgttatttaggcaatgtttggatttatgtaatttgttccaaaaagtagtagtgtcttatgtacctagatcggagaatgtagtggctgatactctagcctcttgggctagagtgaacaaagccaaagctgctggtttgctaagggatgtagccccctctgtggct

SEQ ID NO: 58736 - DNA, 880 bp, Cannabis sativa
actcgccaataaaaggatcaagagggtgttaatagacaatgggagctcggtaaatatcctttataaagagactacagaaaatggggctcgaaaagcccaaagtaaggccttgtatggtgaatctttgaggattcactggagacagcattaccagtcttggcataattgagctcgcattaaccttaggcgaggcacccctatcttctacaattatgtaagacttcttagttgtggacctgccatcgacttataacatattgttgggtcgtccaacactgatcggactaggggcagtcagttcgatcaaacacttgtccgtgaaattctaaacaccagaaggtgtgggagtggtgcgtggtgactagatgttggcttgcgattgttatcgcatagagttgcatcataggaaagccggtcatcagttgatggcgatcttggcagaagaaaatgaaaagaaaaacaaagatattgacccctgagttcaagatgagaaaaacctattgaaagcaattaagaattggaagaggttattctcgacccaggaagtcccacagagtgtgtatacattgggaagaacctggacgagcatcgcaaatagcaactaataagttttctgaaggcaaaccagggtcagttggcctggagtcatggagatatgatagggattgaccctaatgttttctgtcatcatctaaatgttaatccaaactacccagcaaagagacaaaaaaggaggcccttggattccgtgaggcaaggggcactaaaacaggaagttgacaagttgttagtcaacaattttatccgctaggtgttttatccctcgtggatagcccatcatgttctcttcccaaagcctaacggaacttggagaacttgt

SEQ ID NO: 58737 - DNA, 957 bp, Cannabis sativa
  modified_base (44)..(44): a, c, t, g, unknown or other
taaaagttacttttaccagcacagtagcgaactgtgctggtaanagtgacatttcttgtagtgttagtatattactagctaatgcttctgcttgaatgattagaagtaaccaataaatgtacatcttctagaagaatagataagtaatctacaaaataaatgaggtaagaatttaacttaattattggaaataaattagtaatttcaaattttacctcaaaaatacatatatactaccattctatatataaaaaatgtgaacatatattccgtaattcaataatttaaaaacttgctttctttttcgggggctatagacttaaaaaaattgttaatattatttataaaaacttgaattgacaaattagagaaatataatgaatatatacgggtaacttgaagaatacctctattttatattcattaataaaaaatattctcatatgatattttattaaaatatacccacttttgtaagtgcgttatcctatatatcattaccttttacttaagtctagtacataatttatattaacctaaggagtataatagaaacatcatctatgaaagtgggtatatcttaaaaaatatagaaataaaggtaaaaattaaaacatataaaataaaataggtttactgtaatttcttcttacattttggtctctacattgcattggatatgatattttcccacacattttagtaaagtcattctcatcatcaccaatatacagttttatggtattctataaaaataacatgaaaataaaaaaaaaattatataaataacatcaaaacaataacgaaaataccatacaaatagcagaaattaacaacatattaataaaattacaacataataatatatcaaaagactgcattttctgtaaataaaatcgtaaaaatatttaaagttccgtacaaccataaatgttttaattatttttgtgtatttgt

SEQ ID NO: 58738 - DNA, 1449 bp, Cannabis sativa
gtctggccggacaagggtggtaccctatgggctggccggcctatgcctggaagtgaagctcctggctagccctaggctaggttatgggacatggccagtcctctagggcttgggaaccttggtcggccaaggccaaggtttcaagtgggcagccaattttttatcctctgttgacctcggctaggatctcgtgacggccttggaggcatatacaattgtaatctcatgcatggtcccccttgggaactttgtatgagactcgatagtgagtctattatagtcaagtgcacaacttagtaatcactatttgtctatgtaaatgtacttgagacggtactttgctgatgcttagccttgtataatgtgatttatctggaaggtacccttgggtacagttgactagaactttgtttatagctttgtcaagtttatcacctccctccccttgtctcttctatgtaggtaattttgagtgttgatttagggaggtgaagtcactgtgtcataggtcttgtcagccttgcttattgatagagatcatttaatttgtctgcttgctctttttgtgtgattctagactgatagtcatggatagaacaaaacaatcatggtgtaaagcactgccacatgatccttatgttgcaagggtggcaacaatgggtagagtcagagctgttaaagaggccacacagcctcatgaggatggggatctataaattggccaggcaaaagtgcctaaggtcgaccagggggtcgagagttcttactacgaatctaaagtggaggaggttgcgcttgtcaaatttgaaactcttatttcctctttctttcacatatattttcttctcttattgtaatcgggctcataatgttatggctcattctctagtttgtattgctttctttgaatgtctctcaagtttggtgacctggtttacctctgtctcctaatctaattattctgtattatctattactctaattgctttgtgccttttctataaaattattccttttcttaaaaaaaatcagaaactaagcaatatatatataccgatagaaattaagagcgcctcaatgtgaagttgctcaatcactttgaaataagctttagaatagtaatattttggagcatcataaggttctatggtggtgcatcctttctaatgctctcctggttagatccgtgattggaagaagatttcagattgaggatacaagctatccattatccgggctgggggaggaatctattaaaacatttatttttgtcctgtgatgtggcgatgcacttgtggcgatcttcgccgtgaggtatttaccttgtttgtgatactggtagtcgtgtttgggactgggttaaattcatttgggatcttaaaaacaggggtttccgagttgaagatgtctttctttatgcttcaattgttgttggcactatctggagaa

SEQ ID NO: 58739 - DNA, 2885 bp, Cannabis sativa
taacaatctcaacaatagtttagaggagactttaatggccaaaaaagttcaggagacatgatttaatacatgacaaaaatcaatgagcaaaaatcctaattagtcttctttttaatataactaagcaaaagtcaatttgtgacgcagacatatacaaataaatatataacttgtttggttatataatacattcacgtcaagttattattatattttaatttgtacgaaaattaaatttaagatctatctttttattattttaaaaaatatagagttcagaatagtatttactcatttataaaacttatatgaactttactaactatattattaattgtgctaataacacttaatatctcaaattattattataaattttatataatttaatataataatttttataaaatatcgctaaatttagcactaaaaatttgtttaattatttacaaagttcattttgacaaaggtcatgtgttgattttgagtagcacgtgtttacacgctataattcattattccttattgtaatcattatttttgcttaattagtttgttcctttgtgcaagtagtgacaactctatcaaatatatgtatgtagttacaaatacaatttacgattaagagtgtttttttctcgtttcttttatcactttgtttatttttttagtagaaagaataggaaggaggaagatttgagggttaaattaaatcaatgctttgttgtgttgttatataataagattaaaaaagatgatctaattaagacccgtatatagtaatgtatcaactgcacaagagataccagtgaggtcactttcaacacctactcttgcaattctatttggaaaaatatacaacttggatgctggtgaataaccaaagcaaccatatcttcactcctgatcttaggaaaaataacatcacaaacaaaatcttttaaaagaaaaaacaacaaacctatgtatgagcagtgttatcagtaatgttgtcgtgatagtctgatttatatttatttatgttttttaaaatatggttcgtatcgtgtcttgccacagaaaaatataagtcgtgtcatgtcaatatttttaaaaattaggcccagcacaatctgtaggcccagtattttcgtgccgtgcttacttgtcccatactatattcttatacaagccaacttatttttatatgcgaactcgaattgtactttactttttcatatatatatttacatttattaaactatttgtatattttataactattgttatatttatatagcttcataataatattttaccataaacatatacaaaaattattaatatttttagaactcataaatactcaaatttttatattacactttataaataaattcacatataattttagtcttacatgtttaaatacatatttattattattaataataaatattaggatttctaatctgtcatcttacgttttttgagtttggctcgtgtcatgttttttgagttaatttatttgtgattacatgtcgtatttttcgtgtttctcattctgcattatgcttaaacacatattttttatgtcgtgtcgtactaatttatagcatcttgccttatcgtgtctaaacttatatatttttttttttttttgtgtctagtcgtgtttgtgattttcaggctggtatttacaaattacagtagtagttatgaggtgtcttagtgatttttctattaataattaattaatttaaaatatgttatttttaatattaaattataaaaaaaatatataagctgtccaaaaagcatttatctaacaaaccaaggtctgttcttctcttggtttttggtaatgaaatgaagacaggtggcaaaaacaacagtattctcagaccttgttgtagacatattggcaaaggaaaaccttaataccctgcaacacagtactgaggagaggagtacagagcagagtcttatccaatgcatcggatgccaatgtgtgattgataataagaagcctttttcagtattcacaactgtacatttcttggattttacttgatccacacccatattctattctaatttatgcctcttccctcaagtaattcttcactcccaccaaaccactctttactctttggatacaaaatagtagcctactattactattactagacactcccaatcccaactaggcaactattcatacatgtgacatcagcctcacaacatttctggtttattcaaggttgtgcaacattgaaaatgatgaaggcctacatttccaaattgagacgctcattttgaagcaatattttgattagagaattttagttctgtattgctggaaaactttataggatattgatgtgtgttgtatactgtaataaatttaacaattttaattttaaactaatatttgtggtgaatgatcaccctcaaattttgattagtaacaatatttaagaaaatacaatttaaattagaaccaatcacaaaatcaaaatctaaatttaattaaattagacaagaataaacttagtttaaaaatgaatcaattatgaatctttattgattgaaaagtcagtagtacactattggatatgtccaagaatataactcaacacaatgcaagattgagtgaaatcacttcaagagtgatactcttattacatccctccacacacacttagtgtaatcttggacttaccctctctaaacttgattgtgaatctgagcattggaaatatcttgagagagtagaggcacttctatttataagcgttggtgtagttctatttaaattggtgtcagagctaattattataactaatatcaattttcttcagatgtatcttatgagtgataagatagaattacaattgatagga

SEQ ID NO: 58740 - DNA, 786 bp, Cannabis sativa
taactatgttaagagcatgttccatacccctccatgtcttcatgtaattcatttgtaacccatatttatcattcatctcaaatttaatatctgttggtgtggatgttatttttatgtttaagaacttgtatttaacacagtcccctattatctttcctgaagcttgcttttgatccccaaatttgatgcttagtgagcaagtgtatttttcatagtatttccttactatgaaattctttgttgctttttccaaacactcaatttgaaattcctttgtgcaagatttttttttacatttattgaaatatttgttttattgcaaagttgctgatgacgctcttcaaagtttccttatctttgtacatctgccctttctcaatttttggatatttttttatctgtgatgaccaatgcttcttcatcgttaatttcttgttgatcatttgtctgtcgtattagttgttccatcatttctgcagcaattatttatgcatagtcaacaaagtcaaatacatcattatcttcttttgtgttttctttttgttgatgtgttggtgttccccctaactgagtaccatattcaagcatgtggacttcttaccctgtgtcaacctcattaaaaaaaaaaggtatttgtgttggggaccatatttatgtaaaaagaatgttttgacatgtcattttctcttgattttaactgcaagtaaaactctaggcttcatcatccgtgatctttaatgctggatatccaaactgtacctaaaactgcatttgtaggttagttgt

SEQ ID NO: 58741 - DNA, 1414 bp, Cannabis sativa
tgaatttaacccttaacccaaaaatttaaaactcctgagttatgacttaattttttgtgcattttccatcttcttaatctgttgggtggtcctggttggtgtttttgcctgtttattattcgatatcccggccaaacactcatctcgtgtgttgtcttttgtaaatgaaccctggtgagttttggggaggcgaacaccgtattgactaggatttgcttcaacttctgtacgaggatcaacctcgtcttcatgccagtccgtcctcttcgagtgacagactttctaactcgagctttgaagatcaggaagtgagtagtgatagttctcctactccagaacccaaagtgcaacaccactcttactccgagtagatcgtaggagaagggtacgattgcttcatttgggaattgaagaagggttagaggcgttatcttccgtccaactggatgtatattgtccggccaggtgttgctggtacccttcttgttggccgtccaagttctggtaactttggcatcccaatagctgtccctatcgttactgttgcacgacacacacatcagtatccgtctaagagaaggatgatggctcccacaaagcagaatatgcagaaagtcaatgcgtctgaccctcacgtggccaagcttgccacgttgccaagtgtcgagtaggatctgcccgccgtggaggaggaggatcacgagggggacattaaggtctaggagatagaggaataggatgacgtccatcctgatagcccttccaaagctgaggaggaaggagtggccgaacctccaaattttggagggtataatgaggccggggagccagtatccgtggagtgtgacgtcttggtcgagggggaagactatgtcaccaaggcagttccccacaggaggcaaagtgctctaggggccagatgggtgtgccctccgtccaagataagtgaggcacgtatgaaggctttggataaggctgggtacctgggcagacttgagtgttacgtcccctctttgaatcaccgggcaaccaatccaaagaaagggttttgtgcttggtcgagtgctcacactaagcgagtagtgatgctgcctttgcattcgtacttcaagagggttgcagattattttcacttttgtcggacccaattcactcccaagggcattaagtacttgtctaccctattcttcctctacgccattcaaggatggggtgtgtcgtccccacacgtggtcaactagttttttcacttgaagtctacccctaagcaaagtaggtcggggtacttgtacttctctcagctagacttcaagtggctgacgggcaccgtggacagaatgttagcaagataaggggttttgttgacgagtactacttcgtggaaagcatggataccacctatactcgctttcaa

SEQ ID NO: 58742 - DNA, 1373 bp, Cannabis sativa
ttgattagtgtttcgaaacttaccagtgataacaatgtcctaattgagtttcattctaatgtttgtttggtgaaggacaaaacaactcagaaggtggtgcttcaaggagtgcttagagatggattgtacagactggaaacaccccttcaccatcactctaccacaggttcaactcatacaaagtccacaaataaaaaccagtctgtgtcaacctgttttcctgcatgtttttctgctgaatctagtgtaaaccagtgtgaaactaatgaaaatcgtgtgtctagaatagatgtttggcacagacgtttaggccatccatcacccaggattttaaatcttgttctagagtccactaatgtaagaaaattaagaaatgaaatgccaactttctgtgatgcatgtcaatatgggaagtcccatgctctcccacataagctgtcatctaatcgtgcaaagactgtccttgaacttgtgcacactgacttgtgggggcctgcccccattgcatctaatataaatcatagatactacatacatttcctggatgaccatagcagatttgcttggtggtatcctcttaaagccaagtccgaagcattaaatgcgttcatacagtttaaaaactttgtggaaaacaagtttgataagaaaattaaaagtttgagaacagactggggaggtgaataccaaccctttactgctctagtgcatcaacatggaattgaattccaacatccgtgtccccatgattcagctcaaaatggccgtgctgagcgcaaacataggcacattgtcgaaatgggccttactttgcttgctcaagcacaaatgccactcaaatattggagtgatgcatttgacactgctgtatatctgataaaccgacttcccactcctatccttggccacaaatcaccttatgaaatcttgtttagccataaacccgattatgcttttctcaagacttttggcacagcatgtttcccttgcatacgcccttaccaaactcacaaatttcagtttcattctctgaaatgtgtgaacttggggtatagcaatgctcacaaaggctacaagtgcctcactcccactggtcgcatttacatttctcgcaatgttgtttcaatgaacttgagtttccctttaaaaagggatttctcaataattaccacacaccacaatctgtcattgtgcacagttcttcctggtctagtcttccagtccctacatttgacaatgtccatgctccaaattctggttctgtcaatccttctgctgaagcctcctctgatgcatcaccaacgtcacctcaggtgcattctccttcactagacatgcatttcactgaaaatagtccagtttctgatcatgca

SEQ ID NO: 58743 - DNA, 1466 bp, Cannabis sativa
agaatcaaaataaaataataattcaaagatactaaaattatttactaaaattatttatcactaatagatgactttttcttttctaaaaaaaaaaagcatatacaaagttttaaatagacatatttgtttctaaatgggagatattttttttttataatttcataattaattaaaggttattttggtaattcaatagtaaaaagcccatcaacattctcatttttattaaggttatagatatatgtgttcccacgtatagcccatagaatgtgtaaagcaagtacctaattaacaaaaatcaaatccaaacttcaattttattaacgatttttttttttttttttatgattaagatttaaatcccttcaactttgatatgtacaaagtttgcctctaaacttttcaaatcgttaaaaaaattaaattattaaaaagattagattcaaggacttttgtatccaatttcgttcaatttaactgacatggcaattgtctatctactaaactgtgtttttcgaactttgatattttactcctaaacttttttatgtattaaattgtgttctctgaactttcattcacgttaaatttctgttagtaaaattggataataatctaaatctaagtttgagaagaatttttaatgacctaataaatttaagaaacataatttaatacatattaaaattaaaagagaaaaaatcttttttttttttttttgataagaaaagaatactttattgataaaaccaccatccaacaaccgaaactgctctaaaacgagcaaacaacaaaaactacagtgtttacaaaatcaaaatcaaccttagtcctctcttttagagaatctctattgttactcaaacaaagcactcacatgttattaatttctttgagtaaaaaaattattgaaaaattttataatgcacttctaaaaggagtattgcaccgatacactcttatatgtttcgatttttcaaattttttttatagtcatgtacgttgtaattatttaacacatcatgcaaaattttgagaaatttaaaaaaaaaattaaagcaccaaaaacaggatttaaacaatgttgtacgtgtaactcttttattttatgcatgtgtaaaatagaatgtttgaatagtgctttctatattgtaaattattttgaatctctcaaaaatattttgcaagatatgttaagtaactataaagtatatgactgaaaaaaatagactaaaaaattcgcctggatgccgaaataaataaggggtacccaatgcactcatttttattgagtgaattataaaaacacccaaaattatataactaatatttctcattaataagtgtaagatctcagagtttgagattcaagtagaaaactaaagacacaaaataacagagagaaaacagagaaggagaagactttgaaaaaccagaacttaacttctttattgattactggtata

SEQ ID NO: 58744 - DNA, 1504 bp, Cannabis sativa
  modified_base (827)..(830): a, c, t, g, unknown or other
  modified_base (1440)..(1447): a, c, t, g, unknown or other
gccaacatttgtcattgctcccgccgtgtacgatgaaaaagtggaggagtctactccacctataattgagaaggtgttagatgaattcaaagatgtgatgccgaacgagctcccatagagactgcctcccaagaggggagttgatcaccaaatagagccggtgtcgggtgcaaaggccctagctaaagcagcatatcgaatgtctcccccggaacttaagaaggagtagttgaagagtcaagctaacgaagatgttggaggcaggattcatcaaaccatcaaaggcaccttttggtgcttccgtgttgttccaaaagaagaaggatgggaccctgagactgtgcatagactaccgcgccctcaacaaggtgattgtgcgaaacagataccccattccctttatcgctaatttgtttcaccagctaagtggagaaaaatatttcacgaagttggacttgagatcagggtactatcaggttcggatcgcagaaagggatgaaccaaagactacttgtgttactcggtatggggcgttcaagtttcacgtcatgccgtttggcttgacaaatgcgccagccacattttgtacactcgtgaacgaagtcttccatgatgtcttagacaagttcgtggtggtgtacgtggatgatatcgtggtctataacgccactttagaagagcatcaggaacacttggcaacagtgtttcagaagttgaggaaagaacagttgtatgtaaagcgggagaagtgctcttttgctcagaaaagtatcaagttcctgggtcatgttgtggaacacgggaagatccgtatggatttggaaaannnncgggcgatccaagagtggacgaccccagccaatgtaaaacaactatgctcgtttctcggtctagccaattactatagaagatttgtggagggctattcgagaagagcggcacccttgacagagttgttgaagaagggtgttatatggacgtggtccaagaagtgcgaagaagcttttcgaagtctaaaagaggccatgattgaagatcctgttttagccttgccagatgtatgcaaacccttcgaagtacagacgaatgcgtcagattattctttgggaggggtactcatgcaggagggccaccctgtggcatttgagagccgcaagcttttcgaagcagaaaggcggtatactgtgcaggagaaagaactcttggcggttattcattgtttacggacgtggaggcattacttgttggggtcgaagtttgtggtgaagacggacaatactgctgttagtcatttcctcacgcaaccaaaactgactcccaagcaggcccgatggcaggaattcttggcaaaattcgacttctactttgagcacaaggccggacatctcaatcaggcaacagatgcccttagtcgaaaagtagagttggcggcactaaagnnnnnnnngggcatgtcagctagccaagtgggtacaccaatcaaggagcgcatcaaggagaacct

SEQ ID NO: 58745 - DNA, 1046 bp, Cannabis sativa
  modified_base (781)..(792): a, c, t, g, unknown or other
ctatcacaattataatcgttaactacaaacggtatatagtactttccttaccttagtcctgagatttaagcacgcatgccggcctaagtggaagaataaagcttaacaatcctgggtccttaccaatctatgctgctagtaggattgattcttaaaagaatttaggttgaaaagggatgaaatttcaccttccccctttgcttcttcttgagccgaaagagaggaaagagagagccaaaagcaaatgagtccatttctaggtttttctcttttcttccttttttactaatataaataaacatttaattaacttaaaataaattatgagctcagcccaaaatgcacaaaggacaaataccaaacttataaattactaatctactcctctcaaactcctttagcctaaaacaaaacctaagggtattttggtaattaaactaatccatcaaaccgacactttaatattctagaccagtctggaatattccaaaataattcatttcatattaccgtgacatcactgaccacacagtcaagtttccacaattgccgggcccgaaaatactttatttttaaaaaaaatggtacccacgatacccacatatttttttaaaaaaaatatccgtaattaataaattacgctttatttaatcatttaataaattcacaccaatttccctaagtaagatcataatcttacttcattaccaaaataattacatattttataaaatatgtccaagtaaacactatattaatttccgggatattacaactatcnnnnnnnnnnnnaaatttcgtcctcgaaatttatctaaacagttcaggatacagttcccgcaatacttttctattctattcaaaaattgtactgattgctcttcatatgacaagtctatttaagattcaatattctcgtaactccagatatgaatcgcttctacctcatacttctaaaacattgaggtacatattggaaactctagataagcaaggagtatggctagctgataagctatccgacgtaccctttccagaaactcaaa

SEQ ID NO: 58746 - DNA, 1576 bp, Cannabis sativa
agatgaaagaaaattacaaaattaattgttataaattattgagtaaattgcggcataaatacttaatgtttcagattttatacacttaaataccttatcattatttctagaggcaaaaatacccaatgttacaattctcttacatctcttactaccacttccgttaactcataaatatggacacgtggagggcccaaaaacattacatttatttttttttatattaaaatttaatatttttaatattaaaaactaaatgctacttgttttttaaaaaaataagagagatgcaaaactaaattaccataaatgagtgaaccagtgcagtatatgtccaaattattatgagaactggttttttttttcaaaaaaaaaaactaagtagtatttagtttctgatattaagtatattaagttttaaaataaaaaataaataaatgtaatgcttctggaccctccacgtgtccatatttatgagctaacgaaagtagtagtaatagatttaacaaaattgtaacattgagtatttttgcctccaaaaataaagataaggtatttaagtgtataaaatctgaaatattaggtatttatgccgtaattttccctaaattatttagttgatttatgagcaattaattaactatgattaatttggataagaggatccattaacaagttaatcgtagccaatcaattaaattattggtttattaaaaaataatttaattaactaagatagttggttgagatatttctatttttaataaataaaatacattaaaaataaatatcataattttaatttcaaattaggttgttagataatattaaaatattaaatctaacacaattctaaaatacctcaattcaaaataaatattgaactaactttcaaatttctaagttatttcgataattttaaatgaatgaaataatcaataagataaaattttgaaaattaaaatatttccaatcttataatttaataaattaaaataataaaataaaaaaaacttgatatttaaggttacgatattatcatttttaatgaaaaaaaaataaaaaatgataatataaaggggagcatgaaatttagggtttaaaaaccttaaaatatctcaattttaacatcttcaaatgtctacaaaatatcttagcatttttaatttatttttaatgtttaaaatgcttaataagtcaaaaatgattaaatatctagatatttctattatcatttttcttaacttataatttaaacattgaaaataagaattaaaaatgtgaatttcaaattgaaataattattgttatgatatctataaactatttagactaattttaaattttattaatatttaagtagcatataagttaattatcatataatatttttttaaaaaaatataacaataaaaaataataaaattaattttaaaactcttaattatacaaattagtaataatccattaaaaaattagatattattaatttataaaactatttatgttcaaattaaaaatcataattttcactaattattcaagattttcagcatttgaaataattaaaaaacaa

SEQ ID NO: 58747 - DNA, 2530 bp, Cannabis sativa
  modified_base (1617)..(1627): a, c, t, g, unknown or other
acaaaaattataatttgttatgattaaatgtgtttttagttataataaaattaaattagtgacaacttttatttaaatactattttttcaaaaggatcacaagtaactatttgttgttataactaaaagtcacatagtagaaaaatattatattacactaaaaattagtggttagtacgtaaaagtacttttttttagtataaatatacaacaataatgatattaaattagggtattttgttgccaactaattttacatcatggatctccattatataaatttctaattggacaaaaaaaaatggcaaacatttttattccagtatgtgtataatatattaattaattaattttttacaattataacaatattgtctaaatttttaagaataatttttaatgttacaattttagtgtaacgtctccgctttaaatttttattgggctcttatacttacggaattatggtttttatacatagtgtactttcttctcactcgcacactacttgaaaaaaactacttcccagagatcacccatcctaaaattactccaaatcaagcacgcttaaccgtgaagttctttcgtgatatgggctaccagaaaacaacatgtattgacatatatatgtagtaccaatcaattcatttaagctctcttcaactgtgcagtctcatacctacacagtctcaaaatcatcccacttgacattccctaggcggtgtggaattaacagcttactcagtattttgtcttacggatcatgggactactgactgccacatttagtgatgtattattttattttgaaaatattatataatggattaaaaatttgaaatttttttttacaaaaatacgttaacacgaacaaaaaattatttttattttttaaatttttttatttataaaaatacgtttcagtaaaattaataaaccattttttattattttgtaatttatttataattgtactataattgttataaaattatttttttattatttttttataattaatttatacttgtcgtgtggttaatttatatataaagtaaacttagtcaatgaatgtgtaacattattggccaatctataacaaaaattaaaagagagaatgataaatgaatgagtaatttgtggcataaatatctaagtttaactctcagttgtaaataaatatttaagtttactttttagcggtaataatacttaagtaatttgaaacttcggtaagtacttgactgttaagtgttaagtaaattaacacgtggcaatctctaattagtccaagtcattaaagttttatttttttaaaaaaaaataatttaaatataccaataaaaaaataatacgtggataactacttaatacctataaactttcagaaatataacttaagtattattaacgctaaaaattaaatttataaccaggaggtggaaattaaacttaaatatttgtatcgtaaattaaattacaataaccaagaatatccctaataatagcatataccctttttaaaaaataacaaaagaataccaaaaaaaaaaatcacacgatgcaatatttttttttctctctcaataattttcagttttattattattattattnnnnnnnnnnntattattattattatttaaattttgattggaaattttgcttaatttttatttaaattaaacatgttttattaaagaggattgctgtaacgttttactacgattaattataagtatgaaattaaatagtcttttagcaattctctttattaaaatatcttttatttgtttttattaaaaaagacaacaaaaaaggtgttcataagtacgcattgttataaagccagagaaatcgaactcataatcttcatatgcatgcaagtttgtacgatttatatattattattattataaggccaattttttaatatcttagttattgtcatctctcaagtactttttcttcaagtcatttatagctattaatagattgcatgctatgtggaaaagtaaaaaaaaaaatatgactaattaatgttaataaggtaactttttaatttccttttaagaaaaattgactacctatttagtttttgttctttcttttttgatattgtactatttttttgtaaaaaataattacatataagaagatatgatttttttgaagaagaagattaagaagataaattctagtcccattcattatttgttctaaaagagtaatatatatattttttttgtaaggagtaattttataatggtacttgtaattttttttcgtttatagtgatgctaatggggtattttacgctcaggccaacccaatcatatagcagtttagacttttatacaagactccttatattaaaatgttttattattatttttataatatatagtatacataataattatttataagagtaaatatgcacttagcacctaaaaaaataataataaaattttgtagtctcaatagaggtgttcataaaatagcagattcaatccaattcaatccgcaa

SEQ ID NO: 58748 - DNA, 1845 bp, Cannabis sativa
aggaggcatgatttaatgtcaaagttcggggggagggggaggggggaaattgctaattagccttttaataaatcacaataaattataattcttgtaattaatactttagtaaaaaccattttggcaattataacacatgtgtaatgatattttttcagtcacaactttgtatttttagtatttggactaaaaatatatttttagtgtagatacattatcaaagaattgagagtaatcacatatagtatagtgtgtgtgttttttttttttttttggagaaataataacaatattgctattttatacacaaatcttggaaaagaacataaggcttttggaagtaggattttaatgggaaaagaaagaaagaagaaaaatgtagggaaacaaaagtgtggatttttttatttttaaaaaaatatatatcaatttctcttttttttattattattatttgagaaaagtaatttttcacgtttggtaaataaataattttatagtaaaaaattcaattcaacaaaaaattttatatcgaaaaattaattttatttatttatttatttttctactttcttttttttctattcctatatattgttgttaattttctctttcaaatccaatttccaaacattggcaaaaagatttgtgattttcaatttcctatatatgagtttttcagagtacttatccaatgacataagtgatcatagcttgaaatggacccttctgttatgatatataggtatagtttcaaataataattatcttaaaaaaaataataattatcttggattcaaagtcaagtaaaatctagtgaaggaaacgatcgatctaatagttttaattgaaaccaaaaatatttcaaattgaaatgagacttttgttagtacatttttatgctgacaaaagttaagtaattgtgctagcaaaatagaatttatttttgctgtgctgacaaaaaagattgacaaatctatgttggcaacttttgccagtgcaaaataaaaagcgctagcaaaaatgacttttttcaacgcataaatacgctggtaaaagttagacttttttcaacgcataaatacactggtaaaagttaaacttttttcagcacaaatatatattaggaaaaacttacttttaccagtgcattaacgcactgggaaaagtcttacttttaccagcacattaatgcgctggtaaaactttgtaatttaatttaatttataattaatattatttaatttaaaaaatttatcaattatttattaaaataaattaaaaaacatagaatatgaaagattgaaaaataattttaaattgttctaattatatatgtttatagttataattatctaaaagttagtaaacaaatgcatctttaaaatactaacataagtataattttctcacctaaaacaaaatgaatactactacatatcggttgtattatcatcaatatcatcattatcttggccatcattatctcccgtctctactcgtttagatccaacatcatcaaactgtagtggaggagggtctaactgaaatcctagaatactcgcactcaatttctgcactaatgcctgaatcattaggtgttgattgtcttgattttgcttaagagcctgattttccttcataatggcttgattttcctacaaaatagcttccacatcaatcgattgggaccctgacatggaagatgaagaggtaggtgtgcgctttcctccaatttccttaagcttaggtaactgtccaaatcctttcacataaagtgaacgtggtggactaagaacttttgcaactatatccacaccgagtgggtactggctcccaaccccc

SEQ ID NO: 58749 - DNA, 831 bp, Cannabis sativa
tatgttttatattgtatactgtattaaatttttactattccacgcttgatttttagttatttcattgttgttttaattgttttgttttgttgttttacagttattttataaaaagataatatttttgtaacaaaaaaatcgtatggcagtaaaattatatattattactcaaaatcaagtattttaataaaaaccccaatattttattaaaatgtatctacttttgtgagtgatttgtctaatatatcctcacattctatttaagtctagcacataatttacattaacttaagagatataatgagaacatcatctataaaagttgatatatcttaaaaaatatagaaataaagtaaaatagtatacaatataattttctctttattttttagtttaggcctctagatagtgtggccctaggtatgaacttagcccacctatacctagggtcagtcttgccaaaaaggcacaaatggtccatttattgttgtatattctatagagttatatcctagataaaatgaacatctcggtggaagagttacattttagatcatcctaaatgaatggcttatgtatcttagatgggatgactcaaatatctcgaactggataactcatatatctcggacgggatgactcatatatctcggacgggatgactcacatttctcagaatggataaatcatttattttggatgggataactcacatatctcgaattggatgatttacattgttatattttgatataatatttttgattgattaaataaatgttacaagtttattactaaagagataatatttaatctagtgggggattgtta

SEQ ID NO: 58750 - DNA, 725 bp, Cannabis sativa
tcctggtgagaaagttgcccacgaagcaacactggctattctcggcaagctttcgaactactcgtgggaagccaaggcagtgctaaccctggctgcctttgccttggagtttggcgacttttggctcctggcccagcaccagcaaacagatcaactcgccaaatctttggctatactcaggaaagttcctgtcctcatcaagccagctgagctccaaaagcgtcgtcaagctattcttgagctcaacaatctgatcaaaaccaccatgcaagtcattggcctgtttgacgagtttgagaagctctctaatacttatgaccctaaagacgttactggtttggctgttgccttggaccaccttcctgtcgatgtctactggtgcattgtcactattgtggcttgctcgacaaagatctgcaccctcataagtgaagagtatggctgcttatttatttgctcaaataatttctatagtattaattatagttatgtatctcatcagtcatatttaaattaagtgcatggttaattttttttttttacctagggagaagccacaggatctagcaccgtactctcagaaagtgcattacatcctcaacaagatcaagatacagcttatattctgcagaaagcaaataggtttgaatgcttatctatgctatgaatgcttttttagttaactagctcttgaaactggtataactgtgagttgttctattaat

SEQ ID NO: 58751 - DNA, 1226 bp, Cannabis sativa
  modified_base (628)..(633): a, c, t, g, unknown or other
  modified_base (750)..(753): a, c, t, g, unknown or other
  modified_base (811)..(821): a, c, t, g, unknown or other
  modified_base (1021)..(1038): a, c, t, g, unknown or other
aacataaaatgtcacacaaaattagattaaattagatatttcaactttaaataagttttatgatttaaatactaacaatatactacactagtcatttaaaaagttatcgaaccagctatttatttatttattcaaataatagtttagaccctgtattgtgaaaaaatggaacacaatgataccatgaactttattttggtcaaattttagtaaacataattttaaaacttcattttcttaaccgcaaaaattcaccgtccctaattataatgatcatagtctgaatttaaaatatttggaatgaaaaaataataaaaatagagtaaaaatagaattaagtggccagccccttatatgggtccatcattagttctatttttgtcatttttctcaatcatttatctattttttacaaatactattttctgtactttcaatcctataaatgccaaaattatatattaaataattaaattaattatcaaataaaatcgtcatttatattatttattaattagtgtctataaagtttttcaatgaacaaataaaccctaaaattctatttcttcacaatcaagtcatatcttagtgaaaattcataaactagacaaagtctaactttagaatnnnnnntgattaattaaaattaattaactgggtcttacaagcagtttgtctcaactagtatggggaccatgagcttatataactgaacttccaataagcatatctagaatttaccaagtaaannnnctaacttattaattcctctttgaaccactatatatttagaattacactctcaattatnnnnnnnnnnntatatgttccacgatacagatacactatgagattatttatttgttattatcccaaatgatcctctatagatgatttacattgaataaggattaatttaccgttacacgattcaatgtattttatcctcaaaacacttagctaccaataaatgatattttaatgaactaatataatcactaaaatgagtactcaaccattnnnnnnnnnnnnnnnnnnctcgaaggaaatcattgtttgacttcttatccggatagaagctatagaatctgtatctatgattagcgctctcactcaatcgaactatcctgttcttaacctatatgttacgagaagaaccatttggttgactttaacaaacagatttacgaacacaaataatgtaactgaactagaacctaaccatc

SEQ ID NO: 58752 - DNA, 700 bp, Cannabis sativa
gacccaaacatggaacctgactcgggacacacaaccggggctgggacctagaatcgcacccgatctcaatcccgaacccaaacttggacctgaaaccaaggaccagaaccagacctagactcgtgacagggatccagatcttgactcgaaatccagtaaatggggcttggaacagacctgtagtcggtgtttgaatctgggagtcagactaggacccgaacccagactaggacccaagcccaaacccagacctagaccaaggagccaaaactagcacctaaacaagaactgctagaccaggactgtgtaacaagactaggaccgtgaccaggacccagaccaagacctagaaccgaactcgaaccaaccccaagacccaaactaagaccgaaactcaggcttagacatggccgtgtacccagatcggaatcgagaattggattagacctaaatctgggacataatcccaaacacagactcggacctagatagggatcaaggtatgaacctggactcagacccagacccagaccaagatcgaaacctgggacctagatcaggacctagatccggacccaaacccaaacctggaccgcaccggggacctgaactcttacatagaccgaacccaatcccagatcgggatccacacttggacccaaacctggacctagactcaacaaggactcaaaccccgacc

SEQ ID NO: 58753 - DNA, 585 bp, Cannabis sativa
tcatagatttgtatagataagttctcagtttatacaccacaaccccacatttcagataaaaacacaataaaaaaaaatgtaaacaataaacacttgccacaatttcaaatctaaatatcccacaaaaaaaaaaaccaattaaaattcacaagaaaaaaaatttcagatcaaaagagaaatattgaaatccaaatccaggtgagagacagagagatagcttactcgacatcaggcccatcgtcggagaacgacctttgaaccaccgcgtccggtgctgcccgaatttgacaatgatgatatgggtagtgaaatgtgagatcaagaagcacattccaaggagaacacgaatctagagtctatttgtcaataggaggtacaaaatccattggatcagagtggaatatctcagattccatggatttcgataaacattaagatttgatttcgatgatcttcaagcttaacttttagaggaattttgttctccaatagcttatgagcttaaccgtatcgcttaccatgagaaatagtgtcagaatcacgtcgaaaattgatttagaggtcttaaagttgagactttgattg

SEQ ID NO: 58754 - DNA, 840 bp, Cannabis sativa
tagaattctgtaaaaatgaaaaaaaaaaaaaaaaaaagttttgaagtgtaaaaataaaaaagccatttttttaaacattgcgattcaaaaaaaatcttgcacacatatttaaaaaaaaatatctttttattatctttttttacccaatccatatatttaaaaaaaaaaatatttttctattattgttttcttttaaaacaataaaatagaaaaaaaatatttatattttaaaaattactattgtaatgtcgttatctattacagtcattaaaaaattattgttttattattgtttaaaaaaataaaaacaaagtgtatgatatttctaaaaatatgaaagtattataaaattaaaactataacggttaaactataattattattaactataaattttgaatattattatacatttttttataaatagcacttaaattaaatatttttttaatgaaaataatattttattaaataacaaacaaaaaattaattatacaactaaaaatatatattattaaaataaaaactataaatataattaagtatacatttatatagttcaaattcaacatgatacttttttattttattttttttattaattacaatattataaattaaatgaaattaaattaattttaaatgaattttctcaattatttattaaagaaagaaaatagatcatatatataccaactacaatacattatttgaacatttgttccaaataaaatagaatgctttatttttttttattacagagtatataatttttataatttataacttattataaaaaatatgtttttcagacttatttaaaattaatttaaattttat

SEQ ID NO: 58755 - DNA, 1282 bp, Cannabis sativa
taaacacctaataataaaataaaatataacattattttcacttcatacataatacaccattatttaatacaattactagtttgtcttaggtagttatactttatgtatgtaatatgagaactgttattagaaattaatagtgcctaatatcagtcgcgctttatgattagttggtaatattttttaaaaattattacatacgttaaattaagagaaattacgccatatattatttttttaacctttttttttaaaaaaatttattacagtttgagtttttaaagtggttgcagtgctagttacaataggagtttctatacgattttttgttacaatttaggttttaatgctagttacaatagggatttttatataaaatttcgtaaaaatacaaaaaaaaaactgttttgaagtataaaatgaaaaaaacccattaaattaattatatagatccgatacttaattataccaatagtaacataacaactaggatgaaagtgcctagtttcttcctcggtatcatattactattagtacaattaagtatcgagttctatataatttaagataataacttttaaaaaaatcgctaattagctaatcataaaaccgtgttgtctaataacaataaattgtaatatatatttatagatgtacttacaattagaaaagtgccaatccctattcccatgaggatattgggaaccataaatgcaacgagaatcatgagagtttctatgatagaaaggcaacaaaataggttaagaacaaaataggaatagtgagaaaatccaggatgtaatttcaccatttcatatataattgttcctgttgatatagctgtcaccagcaagaatggaaatgatgaaatgaaatttgatatcatcactaccgatgctccataatgattttttatcctttcacggttgtaaacctacatttacattattttatattaaaaaaaaaagaagaaaaatatgtaatacacttctcaaaaggaatatacacagtacataattactaagaaattttttagtcttttattttttttttatttttttttatttttatatataattatatatgttgtaggcataagaagagattctaaccaaaaaaaattaacactataaaaaactgttcttttttagcgacaactttttaaatacaatataatttttttgtgactaaatatgatttttagttacaacaaaatgttatttgtgactaaaacatagcatttagttacaagttgtcgctaatttagttttagtcataataa

SEQ ID NO: 58756 - DNA, 1372 bp, Cannabis sativa
aataattacatatgaattctgttatttgacaaaattgtgtagcaatattattttggagagaaaaatgaaaattttcactaataggcaaatcagataatagtcgattacattattatatatcactcaaagagcataattaacaaaataggaaaactatgtcattttacaaaaataaaaatgaatatcctaatagcaccttcaactaaaataccaattatctccaactacatagttaaatttttatgggagacatgagaattggagagccctcaattatctccaacacgctcaatatattttgattaaggcatgaatatattctgaatttgaatattgaatttattttgatatttgataattaattaatgaaagttagattttttttattattatttaagcgtttatatattacaactatgttttatctgggacttgaatccaagacctccaacactcacacacccacctatggctacttaagctagcctcaagttaatgaaagctagatcaacccaatacaaaatctattctcataatatctaataaattacttaagttgaataatcttctttattttctctaatacatttatttgccatataggtagcaatgtagcataggcttatgagataatacggtaagttatataggtgcctataccaatgctctatttgtttttagagaaatgtgaaagggtatttatggtgggactcttaagagatataatatcgctattggtgtaatctaatatcaaattccacttattttaatttaataaaaattatatagaatcgttaaccatttataaaatgtcatgtcataaaagtgctagacatcttagcgtcccataataatactctatttttctacataaccatctttaacaatttgcactgcataaattaaaattatttatgcctatgtaattaataagttaataatataaagaataattagtaattttgtctcttgaatttttgataatattgattctgcctcttaaaatattcggcttgttaaaagttaattcctcctaaaattttacacttacataaatttagtccttctaataggttccgtctcattattccgtttaaatgctgatgtatttttgtaaattagcaatttcgcctataaactttgacaattatcaaattgtaccccctcaaatcaaaatgagaagtattaaacatttttttagtaatcttaaaaaaaaaatattttttttttaaaacttaaaaaattaatttagatcttaaaaaatatattttgaataattaagaaaattaaaacataaattaaattttaaaactaattaaggtgtttaaaaatttatttatttttattaaaatatatatttagatataaaaaa

SEQ ID NO: 58757 - DNA, 1499 bp, Cannabis sativa
aggttagacaattctttgtttggtcatgtttattttctttaatgggcagtgcccagatcctcattttaagaaaagacatcataagaggagggtggtgcaaaagccattagtagattccatagctgcaagtttaatggatggaggggaggtagataaacacttttcttcatcttttcatgccataatcttgtattcattcttatctatattgttataataataaatatgtgtatgctgttatattggcaattaggtgttgatacagtcagatgtgtatgaagtggcagtggacatgaggtttcaatttgatggtgagtcaaatactctaaaacacattgatgaagtagattcgagtgtgttatgtgatagtgagggatggctgttgaagaatccaatggggattagaactgagagggaaatacatgctgaatttgaaggtgctaaaatatatagaaggatgtacagaaagtgcttttatcaacatgaagcaatatcaagctcttcgatatgatttcagtattgaccattgcgataacttcatcatatgacaacaaaaatagttgaaaatgtattttcaaagtgtgtaccattacactatccatccactgaaaaactcaaaaggcaatcagaaagaattatgttgagttttggaaagaattgtgtactatttttctttcttcctaactagcattcagcagcaattgttgttgaattgttgaatatgtacacacaacaaaattatacagtagcaatttttcaatcaatcatatttagttattttaaggttttcgtttcacgtgtattaatgtgtaatggattgatgtcaattaatttgtagttgctaacgaagatatcgtatttatacttttgaaaatttaaggtcgtattttggaaagataggaccattaaatagtatttttattttattaaaaaatgtttttatgaaaaatcctaagataattgcaaaatgaagtttttaacatttttatattttttttaattctatttgcataaaatgtgggtttttaatgtaattttatatgtatttttgttattttgttatttttttttgttattttgttatttttttttttatgttattttgttgttgttttgaagtcgttttacaaaaattttacattttcacggatctattttttttaaaaaaatttctttaattttttctttacatttgtatggattatttgtatttttttacaaaaataaagagttgtttttgaaaaatatcattttgatgttggtgcgagtgaaagcaacatgatttgttttacaataacacagtgcttctttttcatcattttgatgctacagtaaaaacgtgaaagcaatatactttttctcataaaacaaataatacctgtaaaaaacattccacataaatgtaaattagaaaaatgtaaataaaatataaaattatccgtaaaaatatatataaaaaaaattgcttttacttttaaatttctcaaaaaaataattat

SEQ ID NO: 58758 - DNA, 634 bp, Cannabis sativa
atgaaatgaaattataaattactattaatatgtaatatgtaatttaaaatttaatatagtgatattataaattataaaaaataagtaatttttagtttaaatagtaattaaaataaaattataaatgaatggtaatatgtaacatgtcatttaaaatatcataaaatagcataaaatattgtaaaataggataaatattttaaaatagcataaaacaaaatttattgatataatgaaataaatatacaatagaattccaccgctatgaaaataatgagattgcaaatataaatctcacaagagtgagtatctctctctccctctctagaggttttcttgactctcttgctttgtctccatagcaaagagtgtctgcttctctctttaagataataataatgaataacatcgaatcatttatatatagcctatccatgctattaaaatgatggctcttccgtgattaatgtatataacctatcaatcaatatgtatatatatactaactattattagcaaatatttattaaataatttactttaattacttaagtgaatcgcactatagttgtcacaaaatacaatgtacttttgttgttcctgttctaactcgtgcatgaacttttccatccat

SEQ ID NO: 58759 - DNA, 1115 bp, Cannabis sativa
gaaatgaaagcgtattcaatacgcaaaaaggatggtacaatttcctaggtggcaaatcaaaagtaattatttaattaaaaagtactttgaaggggaattgttatacccatatttcgagaagtaaataaatgagtctgattgcgtgacacatgtacgaacacaattaatgatcaaagtaactattcgactgacttaacgaaagatccaaaataaaatacaaatcttagaatataacttttatgtgatataatcgtgatgttaagcaaccaacaagaaataatgaggagttgttgtggcataatcaagataaagaacaactaatctcactcttgatgaacatcttgtaaaattcatgatatgggctaagggtgttaaccttgtcgagacattcaagaactgttttggtgttaatattgttaatgttgagaggcttaacttgcttaaacttgttcctggtggtcacctcggaaggcaaatgatttggatcaagtcggtctttcaagaagcctagtctcaatatacacttccttcgatgagtttccctagaagaggagtccttatatgaacatgctcaaccataagtcactatcactaagtcaaaatgcaacgattatctttttattttaaatacagacagttatgtacacctcccgcctattaattaaatatgaacatggggaggttcatatttcataaccgttgttggattagatcaagagtaattataatcttattttatagtaataaaaatattgtaacgaccactattttttaatttaaggaaactctacaaaattgtcattgactcgtaaagtacgtaaaattaattacaaagccatgtaaaagaatctttatcttctctttatttttttacttcgaaacatatatcatttattatttatcttcatacatagaattaattatcaagccttattaatgttaacaaaattttgagaagagttatcatgttattaattagtagtttatataaattattaattagatataataattgtgatgattttattaaattaagacagtaataaaataaatattctattttatgaaaaaataaataataataaagtgttataaatattaataattatgtggat

SEQ ID NO: 58760 - DNA, 4282 bp, Cannabis sativa
  modified_base (696)..(697): a, c, t, g, unknown or other
accacccaaaatttaaattaaaatgaatgaaaattaaccttttcatttcaaagtgaagtgccaaaagtgtggaaaactattgcaatctatgataatatattttttttctttttgaatgtcaaaaatatgatttttagaatgccacaattactaatattaaatagactgattataatttttgtttccgaattataacattactataacaaatttttcttgaactattgatattgttggatttaagagcttttgtcaaattttaataagacaagtctaatatcgatgaaaattcaagaggcataattttgtatatgtcaaaattttagggacataatttgatagatatcaaaatatggggagcatgatttagtacataaacgattaccgaattaataaaattaaatgaaattggacaaaaaaccttaaatcctagaaaaaaccaacaatcaactcacttgttttgatttttttcttcttttgtaaatttatcttaatttggtctcatgccctttatttggtctaaggcccaacaaatctcctcatttgacccgctctataaaaatattttcccacggaatttttttcaaaaatattatacttttataaaacaatagtggaactcaaaacagaacaactaaaaacaacaatagaacaattgaaaaacaatagtagaacaacagtgaaaacttaacacannacacaatataaaacttatacagtatttttttaaaaaaaaaacacagtatttttttaaaaaaatccgccccacaatatgaaaggaaagaagttgaaaagttcagtatgtggtgtaattatctcatatagtatgcattttatttaagtataattctttcgtctcatagagatgtttagatcttcaatggacaatttacctttattgccctttatttggtccaaggcctaacaacacacgccactaaaatcataatctaaacagtaacaaataattcattgtatagtttatttacctatttggcgccaaaatccgttaatatcataatccaaacattaactaactaaactactttataaacattaaacaccaaccattcttctcatttcccattctctctgttttttttttttggctctattttcatcccaaattgaagaatggagccccaaaactcattgtacggaacactagtcaaagacatgaacaccttgtcactcccatatccactatcaaccatcattcgaacacattcaactcaattcccagaaattctttacatcagcgacataattttcggggacaccaatgtccgccgagttaggccggtcatctccaaccacaacggccttgtcaaactacaaggccgcgaatggaacacatttgttcgagatcgcggggttagagttggagacattcttctcttcaaactcattttccaaatcgccccaatcatcaatgacatgattatcaatgtcacattaattcgattaaacccccaaaattacctcactttcactcctctcttaccttactacaatcaagaacaatttcgattccatcatcgaaattggcaacaacaacaagaaccaattttgtgtgtgaaaagattgagttttggagatgtgtgtggtactcttgatcatgatcacaaaattgttgtgcctaaagaaatgtcacaaatgattatggcatcagaattggatcttcttgatttgagaaatggtaatttttgggttgtgttgagagaccaaacacttgcgaatattaagattttaatgagtttggttttgagtgatgataataaggttttgtttggaagttataattggttgggttttgtttatcatcgtaatcttaaagctgaagatgttgttgtcttctgttttgatcttcatcaaaggattatcttcacaactgtttatcgttctcatcaatttcttgattgtatcattccacttccaccaggaactcaaattattttttttaaatcttgattttatatttatgtattatgatcattagcagtatgtgaagaacaatgaaatgtttgaattgttagtaatagaagaatatgaatttttctttattataattttcaatcatattgtatgaattttttaccatatttctacataccatgattagtttacctttgttttatgttattattgtcgttttacatgtttgtttgtcgttcgtagacaatgtataattattctatttatttagtacattacattacatgcttaaagatcaatcatgtgatgagtgaaatgaggaaacgcttaaatggccatagggggtgcgtgtgtgttggaggtcctgggttcgagttccagattatgcatgttgtaatatataaacgcttaaataaaaaaaaaacgaaatgagcaaacaaaacactattcatttaattattattattattaatattagttcaggaaaaaaaaattattaataatattatctaaagacatggcttagttgagcaacctctcattttcccatactatagaattattaattttaagttaatttggattaaaaatattcagattgttaaaaaattttcttaaattattgagatttttagatttaaagatttttgtctaattttattaacgaaagtctgaagtgaatgaaaatttaataggtaaaattcagtacatgttaaagttcaagaggcatgattttgtaaatatcaaagtttagaggcacgatttagtatatggacaattagcatattcgcaaaatcaaataaaattagataaaaatccttaaaactaacaatctcaatagttcaagaaatttcaatggcctgaaaagttcagaggcatgatttggtacatgtcaaagtctaagcggtaaaaatcttaattaaccttaattttaatagcggtgaaatttttcaatccaaaaattttaagactatataaaattttgtatttttttaacatgtggtacagtgcagtttgaaccacaatatcaaaatttaaaattacaaaccacaccacaccaagaaaatttcaaaccgctttttttatggtatgggcaggttactttaagttaagaatttattgtaattcaattcaattattgttaaaatctaatattaagtttgattaaaatttaatttattgtaattaaattatgctcaagtgaagagacaattagcaaacttgtttaatcaaacacacaatgatttcccaactgttttttttacctatctatcctattaatccggggtccaaacataactaacataactaaaatcttcaaactcaaaatataatactgttcattaaattctaaacataactaacataacggtcaaatgtcagatattaaaagttaggtaatatgatgaaagaattggcgccaaaatccgttaaagacaattccaaagaacaaatctcacaccatattatataaaccaaacacaccactctccaattttccctttcactttctcagaaaaaacactccaatttcccctcattttccatcttattaatcttcaagaacaatggagaataataataacaattcattgtttggaaatgtagtaaagaataccaacactttcttcctcccaaatccactagcaacttcccttaaagccctctcaaatctccaaaatgccaccatttacataagcgacagagctatgggcataggcgatattcgaatccttaagacggtgttcttgcttgacggccgtgtcaaaatcgaaggacaagaatgggacacatttgtcagtgagcgcgggattcgagttggagatgttcttctcttgagaattttttacaacattccttacataatcaatgtcacattatttagaataaacccccaaaataacccaattttgatcaatcctcctaaaccccaacaaaataatgttcatcatgatcataaagatcttgatctaaatttgggttttgaaatcaaaccatttttgtgtgtgaagaaactgagtgaggctgatttgagaagtgatcatcatcaaattgaaatgcctaaagagattggagaaatggtaatggaagaagcagaggatttgattgaattcttgaaaggtgatgattttggggttgttgttagggatcaaaacattggggcaattcagattgagactaagttgaaaatgagagatgatggtgtggttttgtttggtgaaaattggtcccaattggttgatcttcgtggccttaaaggtggagatgttattgttttctatgttgatctttgtcgacgtgtcatcatcacaaccgtttatcgttcccatcaagaacttgatttctt

SEQ ID NO: 58761 - DNA, 1287 bp, Cannabis sativa
  modified_base (125)..(158): a, c, t, g, unknown or other
cacagtgtccatgaatttctctaattttttctataatatgtaaatatttttatattagttaaggtactaaaaaaataaaaaataataatataaaagtagctaaataaaaaaaaataaaaataaannnnnnnnnnnnnnnnnnnnnnnnnnnnnnnnnnagagagagagagagaaatgaataaaaaaataaacaaacaataaaactttaaagttttcctacaagtaaatcaaaaatttgcttctttaaaatgaagaagagtttaaaggagttaatggaagagaatgattcattaaatttttaatgatgatgctcttttaaaggagttgatgttaagaaatgattaagtcactaagttactattaacctataactaatttattatccagttatcctctaattaactaattatttcttttatttttgttatgggttgttctagaattgtgtgagtcatcacgtaatttattatatgaaatattctcttgttgtacaattgttcaatcatgagctcactctgtttaacggaacagtaacactcaataccaattgagttgagttttttttctctgcatttccctttttcatacttttcaaacttggtatcagagttgtacaacccacgcctcaacaaaatggcatctccaaatcaaaccccactcaaagacggtgcctctcgcacaactgcagaagaaaacaactcaactctccaaaacatcgttgttgttactccagctttgcaacagatccctgatcgtgcttctttttctaataccccctttggtaatactctaacacaaccttttgccttgaaatttgacataaataacttcactctgtagaagactatggttagcactataatcagatgacatcggcttctatccagtctaatacattcctacatgagctgttgcaagaggcaactcaccgagttttggagttacaatcaacccaaaatatgagcggtgggggtgtgtgatcaattgctcataggttggctctatggatccatgatagaaacaattgcaattgaagttatgggttgctccacctcaggtttatggagagccttagaaagtctctatggtgcacattccaagtcaactaggttgaaacttcaaactgtcaaaaaaggcttaatgagcatggtggattatctcaaaatgaggagatcttgagcagatatgctcgctttagctagtgagtcatttcctgtgatttctaacttagatagagagtatctttccattattgttcaaattcaaagggagcaaaacatgacatag

SEQ ID NO: 58762 - DNA, 1028 bp, Cannabis sativa
ccaaattgtgctacagtgcatgaaaagtaaattggctcaaaagattaacaaattatttaatttttattgaaagaaaaaatatcctcatttcctcccaaataaaaataagacaatctttaataatattttacttaatgtctacttttgttggttgttgggtgaatggggagggtataagttttgggtcttacagttttagcattctccgttttccatatgaggtaatagttctaaaatagaaaaagacaatccaagattggtgaggtacacaattcaccttgtacttttcttttatttaaagaagattcacacttactttgagcatttgactgtgttgctagtaccaccattggaaatcgataatatggttccaaagaaggaagtattctctgttccacagttggggcaagggccctatgcaaaaaaatgaagaatcttatataatatatacatatcatcaatactgcaaataactacacaccaatcatgaaagtgaaaagaagaggtatattctaacctttaagatcaaaaagtccttcacaatcgcattcgtcagcgtttgagctagccatactatgagtggtacagcagcaaaccatgtgaaaatgaaactgtatggctctgggagctgcagaatcaacatcactttactcaaagtttagctatgaaatttaatttaaagtacatcaagacaaagtattatcaagaatttgtagcttgaaacatggaggaaagtggtgagttttatatatgtacctccagaagataagtaatttcaaacccagttacatcatccaggaagaaaaacctgtgatttaaccatgaacttagtaaggagtgaatcacctaactacaaattcaataatctatactgttcattcattcaagaaaagaaacaatggcataattataaactctagcatctaaaacttcacttagtattcctaaagtatcaaaaaaaaaaaaggtttaaagtcatctctaacaaattctttgtttccatcataaaaccaattctttgtgcccaa

SEQ ID NO: 58763 - DNA, 980 bp, Cannabis sativa
ttatttccatatcaaattcttaaaaaagaagaacccatcgacttaacctcggctttgcatctttcttagtcatcatgtacttgattgccgaatggtttgtataaacaatcaccttgttctcgatcaagaagggttgaaaccaacatcttcttttcagtagtggcataattcaaatgatcattattcaaggttctactagcatagtagatggtacgaaaaatcttgtcaatttgttaatccaacacaactccaatgacataatcacttgcatcacacataatctcgaatggcaactcctagttccgtgtagtgacatttggtgctgaaatcaatttctcctttagagtttgaaaagctttcaaacactccttcccaaactcaaaaggaactccattcacaagtagattagataggggcttagagatctttgaaaaatctttaatgaatctctggtaaaacccagcatgtcccaagaaactacaaactcccttgactgatactgaaggggtacgttctcaattatcgacaccttgtcaacctcaatgccttcttttgagatcttatgacccaacacaatcccctccttcaccataaaatgacactgctcccaattcaacactaagttagacttttcacatctaatcaattttccaagttactcaaacagtgatcaaaaaacgaaccaaacacagagaaataatccatgaacaccacgatgcaattctcaattaaatcagagaaaatagccatcatacaccgctgaaatgttactagagcattacataacccaaatgacattcttcagaaagcaaaagtgccatatggacatgtaaatgtcttcttctcttagtcttttggtgcaatagttatttaatgataccctgaatagccatctaagaaacagtagtactcttggcccgccaatctatccaacatctgatcaataaaggggagaggaaagtgctttttccttgtggctt

SEQ ID NO: 58764 - DNA, 881 bp, Cannabis sativa
catctttcttaaagtagtcacgttaattaggcgactgaactaggttttttattatcctcataacatagagccgctctacattacttagttgatgaggacactacaataatttattatttaaataattaaattaataatcattaaaatttacatatatttactacgagctccttgatacttattaagctttttgggatcttcatactctttctcattaagtatgtgtcatatgcttccttaattgcttttaaaatgataggacaatttgttatgggtgcatgaacagggtccaaataatatacgtggtatgcctagggtaccaatatagcgcacacccaatgcttcctataagaaaaaaaaattatatatattgaacatatattatattattgatgggtgtcgtataccgtatcaaatttactattttttaattccaatacttttaattatttcagtatgaaagcaagtacacgtcgatatatcccacaaggactatgattaacttattattcagcatcaaacagaaattaaaagggagttttgagttgtaattaaatagcataagaagaaaataaaaataaattataattgagactacgatatgcgaaactagttaaaggttattcttcacccttgacaatcattcttaattcttattaatgaaggtaatttcaatttcaaactattaatcccacagataaagctgaggaatcaattatctcaatctctttattgtatgtaatcaaggcgaagcgctcaataattaactattttaactaaccaataaatccacgaagcatgcaatttatttaacttagataaagttttgagatttatagagatagattaatttaggcaacaaatcaatgaagcatataatt

SEQ ID NO: 58765 - DNA, 1185 bp, Cannabis sativa
agccagtgtggtggatactacaaacgaaacaccaacaagatcggagcatgttctagtgattcgagaatttctagatgtctttccagaggagttactagggttaccaccgaagcgggaaattaatttcaaaatttatttaatatcgggggcagagcctgtatctaaagctccgtatagaatggcacctacagagctgaaatagttgaaagtttagttacaggggatgttggatttaaagttcactagaccgagtacctcaccttgaggtgcaccgattttgttcgtgaagaagaaagacgaaaccctacgaatgtatattgattaccgagaattgaataagttgacagtaaagaacaagtatcttttgccgaggatagatgacctatttgacaagttgcggggaaagagcgtcttctttaagatcgatcttcgatctggttatcaccagttaaggattcgggaggaggatattccaaagatagcttttcgtacccaatatggacattatgaattcttggtgatgtcctttctgattaacaaatgctccagcgacattcatcgatttaatgaaccgtgtgttcaaggactttttagatgattttgtgattgtcttctttgatgatattttaatctactctgattcagaagagacacacgagaaacatcttcggatggtgttgcaacgtcttcgggagcataagctttatgcaaaatttaaaaaatgtgagttctggctggcccatgtaagcttcttagggcatgtggtgaataaagatggtgtcctagtggattcagtgtaaattgaagcggttcgggattagcctcaacccaagtctgcaactgaggttagaagcttttcgggattagcaggaactacagatgatttattgaagggtttgctaaaatttctacgcccttaatagaattgactcaaaagaattgtaagacaagtgcgagagtagcttccaagaattgaagcagaggttaattactgcgccagtgttaactttgccggtcagtaatgagaaattggtgatttattgtgatgctttgaaacaggggttaggttgtgttttaatgcagtccgaaaaggtgattgcttatgcatccaggcaactgaaagagtatgagcaacgatatcctactcacaacattgtactagcagtagtcatttttgcactgaaa

SEQ ID NO: 58766 - DNA, 762 bp, Cannabis sativa
taaagtaaagtgggtatacaatgcaattttctcaaaaaatagtatagttggattcttatttataaacaaataaggtatttttcaaaattagtaaaaaatgtgtaattttaaaagggaaaaattaatttggccctgggctaagtgggtcctaggtacagacctagtccacctatactcagggtcgggccatactttaacgttcacatattattacctcttaaaatggatacatctctttatctattttactatgtagaaaaaaaaatagtttttttttatataattgtgtatattataactatttaagacatcttataaattttgagaataatttaaaataatttataatataaaaaacaatgttacaatagtctatttcacatgctcataaaataaaaaattgcacgtgtgcaacaaactgtttaaattttattttcaatatgttaaatatttttgaaattttgtaaaattttttaaataactaaaacatatataattataaaaaaattaaattaaaaattcccttaaatatggaaatatatatataaagtatatgagtgtatgtgtttactttaattttaagaagtgggttttactttttaggatttaatattatagagtaagatatacatgaacgtgcatgtaaagacatttaacggtgacatgcacatgcatcaacaaaattacgtacgtatatatatttatatattgcgagttgtggggtttacctttgtcatatttttttgtcttatatattgtttg

SEQ ID NO: 58767 - DNA, 642 bp, Cannabis sativa
aaaacaatgaatttggtttccctcttgataaaacagagtccaaatcaaaaatatttgtcaagtttcaaactttattccaaaagttacaagcccaaaagtttaattacccaaacaaaaaccgatttcagcatccacttctatattcagtagaaaaaagtagatagaaaatgaagtatcctagttatagggtttagacatagctgagatagtgaaaggaaggagataaagaacaagcaagaaaagtctcattgatatttgcacattgatacaatcatatcaagaatccaaaattaactgaaagaaccaaaaaggtgttagttgacatctacaaacagctctataactaacttcgcacaaagattgactaacttccaaactaatactataatttataaactataacaaccaaattccttgtcaaatttccaacttgaattaaaccaaaaactacaattttaccaaaaaataagaacacccttttctctttttcatcaaagcttaggttagaatctcagatatcacaaaaactcaagcatggaaaagtaatgaactaatgaactttagaaagaacaacggatcaagttccaaacttttttccaaaattcacaagcccaaaagctcaattacccccccccccccccc

SEQ ID NO: 58768 - DNA, 667 bp, Cannabis sativa
caagatctaaaatcaacggtaaaaaaaaaagttccctatcggtaggaaacttttgttaggtcctaccatagtattaccctatatatatgtcaagattttagattttttttcatcgatcatgatcgatgaggatttaccatatagttggttttgcagttatgtaaccacatgtaagtcactacaaaaaataattatttttagtgttaatttgtttaggcacaatataaattttttgtgattaaatgtgacatttagttaaaaaaaaattacttgtgacaaaaattgagtatttaaatacaagttgttaccaatttagttttagtcacaacaagtattgtgactaaaataaaataaaaaattataattcgtatacaactaatattatttaaagcgtaacttgccatcagaaattattcaaaaactttggtatggttataatgtatattgttatataaaaaattaacacatgattttttaagtgtcacgaataaaaaaaattaacgaccttataagagcaacatattgttaaggtgtagaaatatatataatatcatatatagggttgttcatctaatccaatccctacttttttggtcaaacaatatccaatccacactaagtgcggatttcatattttggatccaatccaatccgcaatagtgtggat

SEQ ID NO: 58769 - DNA, 535 bp, Cannabis sativa
ttaaaatcattagaaccatctccttggttttttttttttttttttgatgaataaggttcttgtattactcaaacaacatttttacaacaatttacaacttattgtgattacagccgagttcttcctcttcctttcccccattcacacttttttttttataggctattacacaattaaaattttcagcaaagaattagatattcacaatccactctttatctacatcttcagttttcctaggcataatttctataatccggagcttgctttcccattgtatgcgtttcaccattgccttgatatgcctcaccttttggttccataaaaaatcattcctagcctcccaaatgtgataaacatgtccagctagaactgctttcagcatgcttctttgggttgctgaaatagttttgttattcttgatgtttgtcagcaggctgtgtaatgattctacttttgttctccatagcagccaagttttgacttcatgtaggcatttcctgctgtaattacaagcaaagaaaaggtgcctaat

SEQ ID NO: 58770 - DNA, 1353 bp, Cannabis sativa
cagaagattcactggaaaaattggcctgctctctcggcttccaaattttttggtggtttgggatttcgttcccttacttcacacaatcaagctcttctagccgccaaagcagcaggcggcttgttggcggatttggtctaaccctgactccctgttacattctctgcttaagggtcgatattttaaaggtcataacccttcttttacctggagaagccttctttggggtactcaacttctcaatcagggccttgtttggaaaatttgctctggaaatgatgtacctatctgtgccccaaactggatccccaacatctcccacccaactatcgtacatcccattgatccctcctcctccactgtctcctattttattaatcatgatcgcacctgggatattgataagctttaccattacttcccttcttatcaagctgaggctatccttaacattcttttggatattggaccttctaataccctcatctggggaccacatcactctggccttttcactgttaattcagcatatcatttagcccagtccaaggccctcaatccctctccttccacttccaaccctaacccttataaggattggtggaaaactctttggaccttgaaaatccctcccaaaattaaacatttcacttggaaggcattcaaccatcttctcccgtgttctttaaacctgttccttaaacatgccatcccttctcccacttgctcttattgtgggggtgatgcagaatcggtttctcatgctctccttcactataccagagttaaaggaatttggcatcataccatctttaagcagttttttgtagatcattacaggcttgacattaaagatttctatctacttagcctttcgttgcttcccaaagaccatcttcccttatttcttggtctcatctggcaaacttggaacatcagaaatgcccacctctttcaaaaacattcccctcaggctaatgttcaagatacagttgcaagttttttgcaggactaccaggaggcccaagctcttccccctggctctcatcacactgccactcattgttctgctgttttggatcacattttgtccccctcttctacggcactttttgttgatgctgcacttaacactaatgcccctgctactggtattggaatggtttttatgcagggtctttctcatgttcaactttcttcaaggattttcaagcccggagcttcttcccctctctttgcagaagctcaagctctctatgaaggtatgaattggtgtgttgcttctaatttacagccccggtttgtcttctcagattgtcttaacctcattaccaaggtgaatggtaattggca

SEQ ID NO: 58771 - DNA, 677 bp, Cannabis sativa
ttctcattttgtgaagaaagtttaataatacatgttttcaaaatagtcccacattgtttaggaatcatgttgggtgttatactatatagtataaataaagtttattaattttcatttttatttgtaatcaaattaattttttttaatatttatatatagtgattgaataaaatattattattatttaatttaatcttatttaattagctataattttttatttattattctgtcaaaatcttagtattagaaaaaatgtgtaaagcactaaaaaaaatatctatatatttatataaaggaaaggtgatatttatatgtgttatactcaaatttcgactaataataaaaagctgacacgtgtactaagatagggatacgaaccagccaaaatcatacattattagatgcacattaaataactcgccttagaaattaaagttaatagaaatattcgaactcgttaccatataggcaatagcgagatatgaataataactattaacaggtgagattggtgagacaacaagtccatctcgggataaacagaatacgcaatgaaaattgttcagaatgagtaaccatagaacttgcagctaattgatccatatactcgtgagtatgttccaagaatgacaacaatattcgttcaccttgcttttgacgcgttgaagtaaccg

SEQ ID NO: 58772 - DNA, 752 bp, Cannabis sativa
aaacatggcaaaagcttaggaacccattttccgtatagtgtatacacaacacacacatatatttatatatatatatatatattcaccatacctgactttctttaattacctcttctttctttttctgtatcactctctctgtaaaacttgctttgccgtacaattccactctcacatattaggtgtgaaatagttttcttttgctatgttattgttaagtactgatttgactttgtacacttgcattgaaaaatatgtggtgagtttgagtcaggagcttcattcacccaacattatttctaatcatcaatgaaaaatattgttaattttgtgaattgagagagccagccagccagccagccagccagtagtcctctttttctttctactgttttctctttttactcttaacctttaatctttttgtttgttgttgttgttttgatggagtggaagagatacagaataataataataaggttcagtattattagtactaaaccttctctgctgttttactatgttcccatcttcatcttcactatttcagctctgttctacaattccaacagcttcaaaactacatgcccaggtgagtacactaaaaaataatactattactgttcttcattttccaactcccaactctttcaacgtcgaaattgaaagatacccattaagttaatatcaatatatgaaatccatgtaattagctccaatatatttatgttactgttattagttactttttt

SEQ ID NO: 58773 - DNA, 1025 bp, Cannabis sativa
agagtcagcaggagcctgtgtcgctcgaccatctcagaggtaggagtaggtcttttcgagacaactgtcaaaaataaaacgaaattataatcaactaaattcaaataaaagggttggattacttaaccaagtcttatgcgaataatcacttatgaattatacgggaagtggttgtgccaattggggaaaggccggtcatccaaatcaccagcacgtaccgatctaaccagacaatctcgcttgaactcaatactacaagtccttaatgtatcacctacagaacatgcgatggcccgcaccttcaactctattaatttttcctcgaaagtgacgttagggtcttggggagtccttgaattacgtggcttggaagttatgattgcaaaatccaagtcacctggttcaaaagcaattgcgaccttgggtaaaaatagaggcttagccaaaggaatagaagatgcactaggtggtttaggctaagcagcatctcataagaaacggcgcatgccttcaataatttcttacaagaagcgtctatgacgattagcaatgacctcttggtgaatcttcactaagtgctctctaattcttgcattatttacctctaatttggatttgggtcctggagttctgggtttataaggaacgacaagttcagttggacactctatctctaattcttctggacgataaacttcaaaactagattgggacattactgcaaggaggaagcaatcccaattcctagaggaaatttatcaaacttgaagttggtaaattggaaagtttggaaaaacctacattctgcctaaaccctaatagttaaccataatcaattatgccctaatatttctaaaaccaaatgaagtaaccaaggtgctgactaagaaattagaaataaaacctagaaagacaacatcaaaggtacgtaagaaaatgagaagaagagttacttactatttggagctggattatgagacgatgaacagttctacaatctacgaatcaatgaacggcgttaagat

SEQ ID NO: 58774 - DNA, 1677 bp, Cannabis sativa
  modified_base (1639)..(1642): a, c, t, g, unknown or other
aaacttgaaactaaaagttccctatcgataaataacatggcaataccctaaataacacaaaaatgagaaaaactagggttcccgaaatttccctaatcgttagaccggttccccaactggaattctggttttgggaaaaattcctagaagccaaccggaattccagttcctacaggcctctctgatccggaattccggttcagtgcagcaattactaaaaaatttataactcaaccaaatcaaccccaatccaaaccaaactttccaaacctgttctatacaacctagagaacattttcaaggcaacaaaacatccaccaatacacagaatcaaaatccaccattaatgagccaagcttgagttcaaaactccaaagcttgctcaaacaacataagagctcctaaaacaacttccaattagctaaaaaaaaacataaaataactacagaaacaatctttaaacaacaatagcaaaggctccaaacttgggcaacaagacatttatcttttgtaggaagggcccagctcattcactcagtgctccttggccttcgaaattattggatgagaattttcatactccctcatagtatcaccaaggagattgaaaaattatgtagatgttttttatggggatggaatgggaatagaagcaagctccatgtgtcttcttgggagaaagtttgtcttccaaaggcttatggtggattagatttcaaagatggggtcaaatggaatcaagcaattcttggtaagtatatttgggccatttcttccaaaagtgatatactttgtgtgaaatgggtcaataatatttatctcaagaacaattccttctgcacctatgacttaaaatagcaaagaaaggtagtctaaaagactatgaaaaaagatacatagagagattgtatatgtaaagcagtttttttttcccattgtttgggctactttgatgtaatttgtttctgattaatgaagtttgttctttcttgatcaaaaaaaaaaaaaacttcaaagcatgcaaaatattcatttcttacaacttaaggaaattaagagaaagttgctcaaagtttaccttagcttggattacacttagaactgctggaaaacacagaattgaaggagcaaaaacaagaaccctagctgctctaagggggccgaaagagagagtgagcttgagagagaaaaagtgttgccttccttactttgatttttcttgaaaatgaattaatattcgtcgcttaattcaactaatatcagcataaaacatcaattaaactaagtccactaaaggacaaactactaatggcaaaaagactattttgccctcacttaagccaaaaagtcataaagtcacataaggatattttgacaaattctaaattctcgactgatctcgacattcccaatgtctaacaaaactaccccgctatactaaaatactaaaatgtgattctactgagccttacacagcgttccaatgttgccgggcactgaacatgcaaaaatataaaatttctatatatatataacatataaaatacattttgaattcaaataaatcatcataaaaaattaatttaaattaataactaattttcataattaaaccttaattatctgctaatttccaaannnnagctaagcggtctttacaactatcccccccttgaa

SEQ ID NO: 58775 - DNA, 846 bp, Cannabis sativa
  modified_base (65)..(65): a, c, t, g, unknown or other
  modified_base (203)..(204): a, c, t, g, unknown or other
ctatatcgtggaacatataaagtgctctatataattaagtgtgcaattccaaatctatagtggtncaaggaggaattaataagttagagcatttacttggtaaattttaaagctacttattagaagttggattatataggcccatggtccccatactagttgagacaatactgtttgcaagacttagttaattgattttaatnnatcaattataattctataattagactatgtcttatttatgaatgtgagctcgtttggtaaacctctcaggatttttaagaatctttggcacttgtcatactttttgacacagtccattgaatcctcgatcatggtaggccaaaaatactcttatctgagtatctttttggataggctttgccctccagcatgattaccgcaaaagctttcatgcacatccacctatatcgtctcagcttctatcttggtgatgcatcttagaagtggcattgagaggccacatcgatacatcactccgtctaagattaaatacggagcaaatttcctcctcatgtttcttacttcactcttgttttctaacaagattcatgtctagaggtatgttgttatggacgtcatctaggttggactatcgtccaacatttcaacttcttctagaatattaattcttggttctattaagaagtgtatgggcacaaagttttccttgtcagtcaaggtacttcttgcatgatgagcgagtgcatcaactgtcacattctcatccttggggatttgccttatagtatatcctttgagccaacttattaagtcttgaatcttgctcaaatatgatattattttttcacctcgagttgtata

SEQ ID NO: 58776 - DNA, 1982 bp, Cannabis sativa
cggaaacccaggccaccccgcgatttcgggaggcacaatttatcccaagctcggagatgaattccatggtttcctttttcaaagccccaccaaaaatctctgaccatcccatctatcttgttaaccattcgactagagagtttagtcgcttgcatagcatacataggcagagacaaacccacagatttaataagagtagctcgccctgctttagacaaagttttagctttccatccctgaagctttgaagtaagattatccagaataaaattgaaatccgcatctttctgcctagatctaaagagaggcagccccaaatatttgatgcaaccttcaggggaatcgatccccagggcttccttaattaccccgcgcaaatcctccggggtatttctactgaagaaaatagacgttttaagtttgttgacctgttggcccgaccaagagcagaaattctctaagcattgccaatatctgttggcctctactaggttcgctcgaccaacaagaattaggtcatccgcaaagaagatatgggaaagggtcgggccacccctactcagtttaattccctgaatggaaccattatccagaacttcgttgaatagtctagacaaagcttccgcagcccagataaatagataaggtgaaagagggtcaccttgccgaagcccacaagcaggcttgagacttcccaccgggcccccattgagacaaatatttagtgaggtagtagaaatacactgcgagatccataagcggaactgttggggaactccatagcaggccaacatgtggtcaataaatttccagctcaacctatcgtaggctttaaccagatcaatttttatagcaaagagaccctccttgcctttcttccggttgaaagaatgaataatctcctggacaattacattattatcatggatgttcctccccgggacaaaggctgcttgagtcgggcaaatgagagagggaagcagaggttttattctgttcgctaaaatcttggagataactttatagaccacattacacagggagataggtctaaattgggatgttcggaccggattttggaccttcggaatgagaacaacatttgtagcattaattcccctatgcatcttaccagtgataaagaaatctgagaccgcgtcacaaaagtcagctcctactgactcccaataatgtttgtagaacagaacagacatcccatcaggacccggagccttatggttactcatggcaaaaagaactcttttgacttcatcaggcgtagggcaactaactagggccaccgagtcctcgggggagattctctcttgaaataaatgagcacaattgtactcagcaccattgtcatccccagcaaagatgcctttaaaaaactcaatgaattcgcacccaatagcctttcgggccagagatccaaacattgtccttattcaaaatactttcaatggcatttcttcttcctttgatagcagccgagaggaagaaaaacttcgaacacttatcaccttccttaagccaagacactctggctcgttgtttccagtagatcgctttcctttccagagattcattcagcactcgacggatctccctctcctgattccagtccctggcaccagcagggagactttgtagagtattgagttctagttcaagatctttaatggccacatccaacttcctaaactgggtccgattccaattcagaagggctacccgagtggcacccacctttttataaatgcgagcaggggcccaattgtgtttgaccgaattccaagcatgggctactaccagattgcttctagtgtcacgggtccaaccctcttcaaatttgaaacatctcttgaatttgggttccatgccctccgaaagaagacagagggggcgatggtccgagttgctagtttgggcagaacagagaatagcccttggaaatagattaatccaagctccatttacta

SEQ ID NO: 58777 - DNA, 2239 bp, Cannabis sativa
tttaacgaccaaaaaagttcaaagggcacgatttagtacatgtcaaaattcggaaggaaaaattactaattagccataatattactttgataaataagttctctctaataaaaaaaattaatgtctacttatatttttttttctttcacactagtatgatatagttaccaaaagttcacaagttgttatgttttttttttcttagtctatccaaaaatgaacaaacaacatctcatcaataaaatactataaaagtagtgcattgttatattttaaataaatcgattattgtttgctagtattacctgcattaagtctccgagattgatgactagggcaccaggaataggagtgacattgtaccaatgatcttgatgaagaacttggagaccaccaagttggtcttgtaggaggatagtaaagaagctactatcagtgtgttcagtagtgcctaacaccaactctggttgtggacatggtgggtagtaatgcccaaatgatatgagtccatccccacaactcatctctataaggtggtttgtgcttagtccaagtgcttccgatattagttcaaatagaataaaccctaatctccttactttcttcgaatattcaataattatgtccctatataacaatatcaatgcaaaaatgtatttttgtgaagtaatttcaataattgatttgaaaatcttatgtcaattatgtatagaatttaggctgtgttagcttataaagtttggttgtatggaatacactttctaaatttcaaaaaaataaaaataataaaattaattaaggatacatctttgtgttatataaaattttacttcataaaaatatcgatggttaaatgaaatgaaatattttaatattctaatttcaatatcaacttaataataattaatatgtagcttaagttcaactctaaaactaagttctatatacatactaccatctatattatatactcaattaaattaataatatataattataagaaatgatatgatcaaatatattagttacttcacttaaattaatatgtaattaattaaaaaaaccttcaattaattaaaaaaaattaaatacctgcaaacctgaggaaactcatcattagaatcatcatcatcatcaacatgaggagcaaaagtcaaagtatctctccagttagtaaccggaccggaataaaggtcaaaattggtattatacaacaccttgcgcgtgtaatcacgcgagtaccattccttcttcacctcaccatcaagctcgtgaaactcacgcaccccttctatcatcctctccaaaacgttgaccggtatcccatggttgaccacctgaaagaatccccactcctcacaaccacggcgaacttggtcaaccacgtcgccccttttactgccggaagattcctcgaggtcaattatcgggatgctttcgccgtcgccggagatgggttgatgatggtgaataaaggtaggatctttggtgttttggtgaaggaatattcgtgggatgttttctatgccggcgtcgacgagtcctttgacgccggttttggcatcgtctaaagctttgagctcgatttttcggtcgtatgtgtcggaatttgcttccgttgtaaggttgccggcggtggcggtggcggtggcggttgcggtggtggttagtaccattgttattattattatgtaatacaactttgtactagctctttagtggactcttattatggaacttataaaggtattaattaaactagagtggtttatgttactaattatattaaattattccctaaaaaaataggtgtgtgtcatttattagattaaattataataaagaggtctccatcttaaattacacctatataatatgtggtatagatatgatttagaataaatagttgaaatgagtcttaaggaaattcaaaaaaatatttttaaaaattatatatttttaaaaatatttttaaaaatattttttcttttaatcgtagtaaacaatttgttttcttattttttttttgagaaaaaacgtctatatcatagattcaaataagttagacctctcggtcgttacacaaaatattgttaggtacaaccgaaaccaggatagacccaaatacttgatgagcaaacgtccatctagccacattatgagcggcaaaattacaggttctacttataaaagcaaaattacaactaataaagagtggagaagacttagaacaaaatga

SEQ ID NO: 58778 - DNA, 546 bp, Cannabis sativa
  modified_base (510)..(514): a, c, t, g, unknown or other
tttaatgcttaaaaaaaacaggcatgacatgcatgacatacaaacgttttgaaccctattataggacatggtaattaatcatccaatttttttttttttaaattgttcatatgattgctgtactgtaccactaaaaaatgagaaaaaaatatcttcaatgtctcaatttgagagaactccaccataggggaatatttttgtctactatacatcggttaatatttatatatatataatttaattaatcctcttcaaaaaaaaattagtaaatattgaaaaatatatatgtatatatatccatcaatgggtataaatttccaaatgagtattaataattaagtaactttatataaattataatatttgatttatattacaaattataactatagtatttattaattgagaccgtcacatttaataatgagaagggaaaaaaagttctaacgtgctctccatttgaaaaaaagaggaaatatatatactaatttatatatatctattctatannnnntgtgcctatataactgaaattcttggtttatg

SEQ ID NO: 58779 - DNA, 1589 bp, Cannabis sativa
aaacattttatttttaatataaataagaagtcacccatgaatttttcataaaccaagaattcagttatataggcacactttatataaaaaatagatatagataagcatctattacaaagtaatataacaatattgagacagaaagagactagctagtttgtcaaaatggccgttttattaaaatagaaaaatcaagaaaagctatccattgcaaattcatacaaatatgattctcaggtgaataagaatggtcgtttaggcctgatctagagatatagcaaatgtacgtactggccagtaatgttttactttttaagagagaagtgggaaaatgatgacctaagcttgactaaacccctgtcccaaaccacatatgtctttttaagccatggaagggacgctataaatattattatgtgtgagagcgaatatatgagtgagtactgagtatagtgttccaaataataataataataatataacagagagagagaggccaacacacaaaagggtcattcttcttacaccatcacagtgttacctccttcctctgttatatctatattatcccacttctccaagaggaccccatatctaatctctactcactacaaatttatataaatattatgtgtatatctaattatcatcagctaataacattattatttttagaaaggtgcatatataaattaattgaattataggatactttttttaaaaaaaaacaaattatatatagggatacttggaaatattatatctttatatgttctgtaagtattaattctatatgcatgtatatatatatgcagcaaattattagaggttatatatataattatgtagggaaaattaatacaattacttttaaatgcaattttcaaaacataacgtacaattaatagtaatagtaagtagggaaaatttatagtatacgtacccttaattgttttagtacagtctctatataaaaaaaaaaaaaaaatagtccaattaatgtttttataaagttatttaattaaaattacttctaatttcaaaaaaaaaattaaaaaatttacggtgttaaaattattttgttgtacgaaacattattttttcttatatgcgcacgcggtacgaatttttattgatgatactataaagtataaactataaatattttagaaatttgcatctatatatagttttaaataattataaaagattattataatatttttcttaataccaaaacagatataaaatatatatcaaaatatttttttttagatttaccgttatatgtgtatatatataatacacatatacaatgatacattcggctaataattggtcttaattataaataaaagcaattaaagtagacaattatatatattaaaaaaaatagtgtggtcctggtcagaaaatttgtaaaaatattagaatgacaaggatcctacgtaggtagccaaatccaatgactgcaacaacttcattattaatgcctatttcgtattaatttaattatctccatttcttactaatcagcgcctcgaaaacgcagtcactctctcactagtaactagttactaacacattat

SEQ ID NO: 58780 - DNA, 788 bp, Cannabis sativa
tccccaaaccgcccatcccacatatagaaatcactctatgcttataaggaatctcttttacagtcagatgttgtaccaattcttctatgtctttggtgagtccaacaacatcagtctccccgaaatgagaataagttcgcctcaactctctttgttcttgaacataactcgaacaagtttgatctgcagcgttgtccattgatttcgttactccatatttttgtaactctaaagtccatgtatcaatgtttgatgagatctcctctatcttagctccaactctatggacatcaactcctcttttgaagatgcaaacagatcttttaagtacacttatcacacctttgttcttcttcaaagccactttgaagatgtaagtttcaataacatcctccaaggcataagagttttctcttacttggacaaccaaaaggcgaactctctcatcaccatttcttacagaagcatctgcatcttttaagaaagccctcatacattcgagtttgatctttgcattctcaacttggcttttgacaccatacaagaacttggcttcattaattagcaagtctccaagcctttcaatcacaaacgaaacaacagcttcttccactgccattatcttcttctttttcttcagtaaactaactgtacttaactgtgtttcaagctttcaatgacaactttgtccaacaacaattgataaccaaagctatcattaaacaacaaaattttataatctcgatttccttagttgcacatgtagatttgaatatatctatgcaaga

SEQ ID NO: 58781 - DNA, 856 bp, Cannabis sativa
tacgttgtattttgttccccaccttgcttgttggagcatcgagtagctggtttaacaagtttactcatcattcaataacttcttaggagcaactatccaaggattttaagaaataatttcaagctgctagggataggcgacccgaagcagcctcgttaaccaatataaagcaacatcccgatgagacacttaaggcgtacttaagttgttttatcacggctgcggctagggttaggaattcggatgacatcacacaacttatagcccttcaggcggggatctatgctgatccattaatcgtaagggcgagttgtgggatgacttacaaggacgtcaagtgagaagcatcactgagttcaacgaaagggctcaggtgtttgttcgaaaggaagaagcctaaaaggaaatgaatctgttgaaaactagctcgggaagaaaacccagcaatgtttcaacaggtactatttccacgagaattgacaactcgggggctcctgcttcgaagagaaaggatggtattaaggaaccatcgaaggatagaaagaaacaaaaaaaagcatgataagtatgtgcccgtgaatactatttataccgagcttaatgaaacacgggagaatatttacctcgcacatgagcaaaaggttgccttcagcaagcctgagtccatgaggaatttgaggagtaaaagagatgctgacaaatattataaattccataaggatattgggcatacaaccgacaaattttgccaattaaaagatgagatagaaagtctcatatctcgagaccattttaaacagtacatgaaaagacagggctagggatacaaccagcccagtctgcccaataacccaaa

SEQ ID NO: 58782 - DNA, 765 bp, Cannabis sativa
ctcggttagcaacttgtgaattgttgtattaggggctaaatctgtgtggcgataagtgatggtgtcatttggcctcgggatccacttgtcttcccaaattctaaccgttcttccatttcccactctccatcgggctccttcaactattatttggcgaccccaagttattccttgccatatactcgatgcccccggtttacacttagcctgcagaaaagaagagttaggataataactgtgtttcaaaactcttgccaagagagaatggggatggtgaattaaccgccacccttgcttggccaaaagagcttgattaaactccgttaggcttctaaaacctaagcctccttcttctttcggcttgcacaacttagcccacgtgctccaatggatctttttattttcttttgtatccccccaccagaagttggcagctaatgaatgaaggctatggattagtttttttgggaggcggaaacaactcattgagtagctagggatggcttggatcacggcttttattagtatttctttaccggcttgggagaacatcgtggatttccaactcttaagcttattccaaaccttgtctttaatcatctcaaacacctctttctttcgcctcccaatgaaactaggcagccccaaatatttcgtgtgttgaccaacaagagatactcccaatctattagcaaggtagttacccaattggcttgagatccggctgcccatactaacttttgacttctcaagattaatttgttg

SEQ ID NO: 58783 - DNA, 923 bp, Cannabis sativa
  modified_base (161)..(166): a, c, t, g, unknown or other
  modified_base (384)..(385): a, c, t, g, unknown or other
gatttttaacatgtggagtttgagccatacttcaatttgcatctacatatgacctcaaatcgcataataatacacaatgtggttactttacaactaatgtcaaatgttttagtaatattcatgacactaccaacaacataattttttattattattattannnnnnttattattattattagagaattactaaagagtactattggtgtctagcacattctttagtgtcataccgttattagtataattaaatagtcaatctcacatgacttaaaaaaataaattttaagaaatatcccaaccaatgataatgataaaaagacacatataaaaagtgttaacattactggtgccccataacaatgctcttattattattattannattattattattattattataacgaaacataaacaacattaaatccaaacaatacaacaaaaatttaaagtttcaataatacaattaaacttttaattttccaatacaacctaattttgaagacagagaaaagcttaaagtcattgttaattaatattcctacaaaaataataaagttcaacagccccattaaaatacagagagaagtcaatcaccaaaactcaaagttttctttctctttctttccttttattgtttcgtcgaagattccttcattgaaagtaagaattactaatttcattggttaattttctcatattatattcttatttgtgatccatataagttatgtaataagaccatatttgtcaatagatctcttcccttataatttgtgcatttttattttaatttttgataatacaattaattacagagtattcagttatggatgaaggcagcaccgccagaattggtctaagtgtctacccactgcaccgtactaaaactcttcatctggtttgtactttatattata

SEQ ID NO: 58784 - DNA, 1147 bp, Cannabis sativa
tttttctaacttttttattctttgtggtgcacatggcacaatcttatcagaagagctcaattcatttgggccaacatttctttgggttataaaaatactattctggcatgaatattcttttggatttgctacctttatttttctttaatatgtatatatatatatatatatgaaattttcgtacctttttagcaataataacgtaattttttttttctttaaaaaaaaaaaagagaaaaagtagacaagttttaattcaaaatttgtttattacttgactagctaggtcgactctccggccctttccctgtgtagcctctaccttgaaactcaaatgctttgacgagagggctcttacagttatattcctaaagctgtcatgggaatttaacgaggtcctatatatatacttatatatgctatatatatgttatatacatagccatgtggttagcttattgcctctcattaatttaatatcaatatatatatttacatatatatatctcacctcttaattaaaattgatatggccatatgtacatatatatagatattataaattatattataagcatactgtaattatcaaagggaatctttctcttcaaaaacaaaactttgagtgaatggttaatcatacatattgatttgactacttttgatgaattattcttgttaatattattgacgaaaaagataaatggacgtattacatacgcacaaactagtgaaaaatgaggatcatttaaaagaaaaaaaaaagtgttgctggttctaattgcgagtattgtttttctaagccactacaacaaataggggcgacaaaaattgcccctaaaactatagaaattcgcacctaaaaatagtattaggggcgacaaaaaagttgcctgaaattaggggcgacactcctaaaaatcgcccctagaaaggcgtgtcagaattctacttttgacttttaggggcgactatatggttgccctaaaggtttttaattaaaaaatatataaatattttgtaatattaaaaaaattaatatttaatttataaaatataattataataataaataaaataaatatcaatatgaaatataaatttttttcatgttaacaaataacccaataacacaataaaagtaaat

SEQ ID NO: 58785 - DNA, 1053 bp, Cannabis sativa
  modified_base (326)..(328): a, c, t, g, unknown or other
  modified_base (1006)..(1007): a, c, t, g, unknown or other
atagagttgcaccgagatgccaatagatatatgctaggctatcagatagtatgagttatctactaccacatcagtatgactagagaactgagtatcggctagattcgcagttaatcatactttgtcgagaacgttcctgacacagttagggctatggttgggtgcatgggcgcttgattataatccaggttattgctatgttgttgtttatgctttttttattgagtgttgttgactcacagttgctatttccatgtttaggtaagggcaaggctatggctgagcagccgtgagagcgagcaaatggagattgtacatgtcggggnnnttaggcctagagcgtacggtctttgggacatcagggcatattttgtatagtcactagccgataaacttttgtatatatacagtaaaacttttgtaaatgggatcccgatttattataagaatattattttagtgtttataattaattaagttttaattaatcacgatttttaataaactcgtttagtagcaacgagttgcatagtcagttaaaaatcacgttaacatgcctaaaatagttagggtgttacaattctgtatcagagctgccaggttgtcttccgaagatcgtcatgacatgtacaatcatcattagtgatcagctcgtctcacagttctttaagcttttattgctttagtagtttatctaaatagtatgatttaagaaaagcctaatatgaagcctgttagtagcctgataactgaataggcgcatgtttttaatttccaaataagcagtaattagtaagttattcttgattgtgatctgacctgactagctcttggttacgggggttgttctagtagtgtggacgctaggcgaaacaccaggagttaaggtaactcgatcaaatctagtagcggtcagggagttcagattccccccaaatgttcgtggtcgaggtagaggccctagaggcagggcacatggtcggggttgttgggttttatgccctanntaaaactcatttcaatataattaggtttacttattaataaagatca

SEQ ID NO: 58786 - DNA, 911 bp, Cannabis sativa
caattaataatttttacaaagcacatggtctaaaatggtatttatcctttgttaaaagataatatatcaatatattaaactaatttaaatatgatatatacatcaattaatttgaatattttaaggaaaaaaaaaattgtttacatggttaataatatttaagaaaagtaattagttgagttaggaggattggtttaatgtgttataggacaccaatttttcacttgttatcttaattcactttcagacacaggtttccaccaccctattgcggctatttaactattgttaattaaccttgtatttttatgttttgagtgttgttagttagtgatattttttaaaaagttatttttttaattaatatgaggcatcatacttaattacacaaatatcggtatgatatcgaggagggtgatagacaccaattgtactttttagtaattctctaattttttagttaatttttgtgtccaaaattaaatattgtaatatattcttttttaattttattttatgactaattcgtattgctactttaatttttaaatttttttgaatatgtatgtttaaaaaattttaaatttgtatgtaaaaaaactttaacactgcactatttggaacttttaaaatttatatgtatgatattataatcgtaacaaattatgctgctacaaagaaaaattgtaaaaaaaacattttacatatattttcgagctaagttgtaactaaaaattcattagtctatctaagggcaaattcaaccctagctgctttctagctacgttggtagattttattttttattttttttaattataatactctaaataaatgtttatatttttgacaatatgagtctcatttttgtaacagcacatattgtaatggagttgcactaagacacacca

SEQ ID NO: 58787 - DNA, 804 bp, Cannabis sativa
ttcctcccaaccaaacgcctccctaatctttatcttcattcttcttgagctgttcccgcttagaggaatgggacccttttagagttgagaggcagcaaataagtaaaaaacttagattcatatgtgacaagtaattttaactaatgatcttctatcaaaagtgattttttacataagtatgtgccctagtagtgtataatttatgtgtacatattactacataatttttataaggtatgcccgacactaccgtaggcctggttcattcgtatgatttgtgtcgagctttaaatggtcgtttttctaaaatggttttgttcgttttcttattcggattctaattcaatctctacttttttagctttgcttttataattaataaactaattactaaactatctatgttatcaattgttaatacatattttttttaataatactttacacatagtacttaaattttcaactcaatttttttgaactaaattaatacttagttttagtgttaatactttgtgtttgttaccaatttaatttatatataattgataaataaatatcaattattaattgctattatctaatagccaagttttgaatgtgttgtacttttagacaagtctgttcgtgctcataagttgtgtctttgagtttattatgtcatgtcgtgccaacaagactgtatagagcaaatgacaagttcctttgctcccaagatgtatgttgcagccctatcaaggtggtctagtggcgaagacaagatcacgagtcttgagaaacagctcagcagcctcatgggagagg

SEQ ID NO: 58788 - DNA, 1403 bp, Cannabis sativa
attaacaactacttaatatatgaatttctgaaataaccaaataatcataaattaaattttatttttcaataattataacgatcaagagagcgctcaactaaatttatacggcttatcatcttaattaccacaaaatattgggaccaatacacattcattatagaaataattagtcatatgaatcatgactttcctttttatttaaagtagaaattaacacattcacataatttatcaaaattaatcttcttattatacatttcatagataaaaattctatcactaatattttttatataaaatccttattttttagtttttaaaaacatataatgttatgacgaagtattttacagttgtcatcctccattcatttttgtggagaaaatgttccacctataccacaaaattaaatgtaaaaactttcataaatcgtatgttaaattatttctttctattaagaaaaaaggtctaaacaatattttaaaaacaacaacatcatcagtcacaagctcagtttattaaattcaaaaactgttatcttttttctttattttattataaaaacacatgcaatttctttgttaattctaccatttaatatttgtcacaaaatcgttatctttctatgtattttaaaattatgttttaagttttaatattattactttgtttataatacacatcaaaatattatattttagattatatcacttaataaatataatatatatataatttacaaaagttggacaacaccgcgcgaagcgtgacttagttgcctagttaataaaaaaagcaagtcaaatagtattagtaaacaaatgagtaagagggtttggaaaaaaaaagaaaaatagaagaagaagaaagtcaatgactctcggtggttagggaaaaaaaaagaaaaaagagagagttgactctcggtatacacatacaatattattaattaaaaattcgttatactcttaacatttaaatattgaggtgtatttccataaataatttagaaaatgcatatgctgaggtaattttttcttaaagttatgcgttgttgaaaaccactaagaattgttttcccaactagctctacctttcggtggttgcggtaaaaagccctgataaaaatcactacttaatttgaaattaactcaaatttaaaaataagtgatctttgaaaatgtctatgaaatctcacaaaaatgtggatattttaccagcccagcattaaaacgaaagcaagtttaaatatgttcgggtagataagttagagaaaaattacgtatttactaacattagttaaaaatatttactctattgtaatttttaattgtgttttagatttgtataaagtagtcaaattgcaaatatgaaacaaagaatgtgcgaacctcaaacaa

SEQ ID NO: 58789 - DNA, 757 bp, Cannabis sativa
ctttcaaaacttactgaattgagctgagaaaactcaattcccagctggccccttggtggttcgaaagaaaagagagaaggagagagcttgatggtgaagggattaaggttttctaggtttttcttttaacctaagataaatgaattctttcttttttttttaattaataaacatatataacctatattaatattacttaatattcagcatagtcttcccacaaaagacaaactaaggtttagccaaaaatgaccactatacccctttaactaaaaccaaatagctactaacccacaagggtaaaaagtcattttcaaatcccaaaaattccaacccttccaaccctcaaaaatgatactctgataacaaaattctaatacatataaaatgtgactctctaaaggcccaacgtcgatttgcacagcttccgaacacaatcgcaagaattgagaaatttacataaatagcataataaacatatatgaacttaaataaatttccacaatatgcatttcataaataataatttaatcccatgtataaaccctaattatataataatccaaagtgttaatcttaagcggtctttacattggatctttccaatcaacccatttagctctaaccctaaacctaatgaatctctatcaatagaacattaagggttttgattcaatagatgaccctagactctctcttgtctgacaaactgaatcaaaagcaaaccttttttttttctattttctattttctattt

SEQ ID NO: 58790 - DNA, 1294 bp, Cannabis sativa
ctgtttgagaattattccaaattttaatatgcacacaaaaaatatgaataaaaaagagataataataaaaacaaaaaaaaaattacaaaaatacgtttcgtactgaattttcaacatttttatggttttttaaattttatttacataaaatacgatcttttatgttgtgctattgttattttgttgttgattttttgttatttgtaccttgtctttttaagttgttttgttgttgtttttgtgttatatttatgtgttttttttttatatttttataaaatattgtaaaaatgttaaaaaaaagtttgaacttataaatgtaaaaattttacaaaattttatattttatgtaattaagtattattattttttttgtttgtcttccttaaaaaattattatattattccaatattttatatccaattaaatgaaataatagaataaaaatatattataatatattgatgtataataccaattttttttaagttagttaatgacaaatataatttcttttgtacatttaaacatctaatttttcaatagagtaaaaaattattttgtctcccaaactttgtcacttaaatggttgtgctccctgtaatattagcgttgtcaaaaatagtcagatagtaaaatttaaaatttttgtcaaaaaataaaattattttgctccttgaactttgtcacttatacgctccttgtaatattagtattattaaaaatagtcccttaacttttatcaattagtaaaaattaaaatttttgttacttttataattgcttatgcagctaaaaaatttttttttaaaaaaaagtaattaaattttaaaaggaaaacgtaatgaagaatgcaatgaaataattcaaattaatttataataaaaactcattttaacataaaaattatatttgtaatctaaatttcaaagaaaaaaaaaacttgaaacttaaaattgatttgattatagaatatactaaagattaaataaaaataaaattttgtaaagtttattttgaatttaatttcttaggtaggaaattaaattagacaatattatgccacatcagcaaagaaaattgacagaatataatataatactattttttttatagtcgtataaagtctaaggggtatatttaaagggaaatttgaatttctatgcattcattggttcaaaattggtacactaaacttaagtattgtatcaatactggcaaaataggttaatttttcttaaaactccatactactcctcccatttaaaccaaccgtctctctctctctctctc

SEQ ID NO: 58791 - DNA, 768 bp, Cannabis sativa
acccactgtctttgcttgagaatttcggtcctttccttaggattagagttttgctcgatattaccaagcctctacgtcggggaatgactatccgtttcaggtccattcacgaacctaaatggataagcttcaaatatgaaagccttccaaatttctgttacttctgcggccgccttgatcatacttataacaaatgttctcgttatcttctccgctgtgacaactttccttcccctcccagtttagaatatactgactctcttcgtgctctggctcaaccccaacacaaaaagaatccttttgacatctccaatgccactccttttgaggagcttttcccgcctcctgcctctccggcccatagtctccagcatactgttgaccagttcctacatgtccattccccaccccgcaccaacaccattgttacttccacattcccttcctccacttcctcccctcctcagccaactcatcctgccattccaaccccaatcatgaccacttcgactatttctcacactgccaaagggaaaggcattgcttcgcctgtttcagaccctcctctctctaggccccctggtattgtaattaatgaatcctctacaagatcctctcccacttcctcagttggtccccgtaaacacttcactcaacagtccactcaagttggggactctgtcagaagtatgctcaagcgtgctcgtgcagcccctggtgatgacgctatggtcccttctctttctgatgatgaaccaacggcgggtg

SEQ ID NO: 58792 - DNA, 1118 bp, Cannabis sativa
tttcaaattatagtacatgtataaatattatatgtactcgaaaataattttaatataatatagtattaaaaaattatttatgggtaattttgttacattgatatttcttgatattttgattttttttttttcaagcgtaactctatttagttataacctctcaattagaatattatccaagtgtattcttggatagaggtatcagtaaattgtataagttaagaatactcacttattacaacaaaggttggctcagagttgaaatggactatagacaaaaacaaaaaaattgggctcttactataaacataaataatatttttaaaaattattaaaaaattaatatattttttaaaaaagtattttttttatttgggcccttaaaatgagtgggtcctagacacggcctaacctacctatgcctagagtcggtccttattacaactatacatgtgtctatcaccatataaacaaattatttaagaaaatgaacaaatgaaattgaagagggatacttacaattggaatagtttggggaaatttttttcaacaaaggataaaattcgaagcgaaactctacaaatggttataattcagaaaaggaaagaaaaatcttgtttaccttttgaacatggaactaggcatttgttgagcattctgtaccaaaaacaattagcattaaaatgaaatcatcatggaaactaactaatgttctttaaaatcttacctgttgcttttcgatccaaatgaactttggaattgattgctgatcaaagaaatagaaacacaagtacattcagtttgatatgatgattttgaagatgaaatatggaatttaaaacttgataaagaatgatagagtaacacttacatattatctcgacaatcggatggttcagaggaaaaattattgtaagaaacatcaattcggctgcagtaagaaatttttacagattctcattcttatgcttgtaaagattaagattttgatggctcgtttgtaatgtcgtattaggtcgtattgtattgtattatattatattgaatatgattatatatcatatttttatataatattatgttaaactttatttatactaaaatattatatatttagg

SEQ ID NO: 58793 - DNA, 1861 bp, Cannabis sativa
aaaatcttatttattataatatatttatgtatagtaaaaagaattagttaaaatagtattattatattttgcttatattaattttgataatgcttagtcaatatttttgataccgcgatgatgataactgttttgaatgaagtgtctattacaagtgaaatataatgacaacaagtttgaaataagactatgagtgagatacgatgatgataataaatttgaatgtagtagcgctacaagtaaaatatggtgattaaaataactttgaatataatagcgattgcaagtgagatgtgatgacaacggcttaaaacttttttttaaaaaaaatttacataactaaaatataatttttgcatcataatatgtagtaacttagataaaaattttgtgggttacagtgtttaacatatttttaataaaacatatttaaaaatcatgatttttttttctatattttgttaattataaagatttttaattttaaatatttacacggatataaaaattagacttttgtttgtgtttattgaatcaatcaactaaataaatagttagagtatagtttgtgactaatattttccaaaatatttgtgttttgttttctagtttaaggggacttaatatagtctctcttttttgagagttttgtcatgtctctctctttttgagtttctgtttgactgtcttttgttttattctgtccagttcgtgtatacaaatatcttatggcatccagtagtttcaatatgaataatatagaagaatgttggaaagacatccaacttgaggaggaagaggcagaggagactttttatgaagagaatgaagaataagatgatttggctattgacaccaaatggtgtctcgttgggcgactgcttatagggaaagtctctgactttcgtatctttcagaatcttatgactgatctttagaaaccaggcaaaggtatatatgcgaagcaacttgatcagaaccggtttttatttcagttttatcatgagttagatatcaagcgtgttattgtgggtagtccttagacctatgatcgtaaacagttggttataactcgtctcaaagatggtaacaaccctcgaaccattagccttaatacgcttgatttatggttacaaatccatgatttgcaaaatggcttcatgaccatgaaggtggccacggatgctgggaattatgtgggaacttttattgaatcagatccgaacaactttactgtggtatggagggaatatcttcgggttcgtgtaacgcttactcttgatcttcctctaaaacgaaggatgaagtttcgtaagcgggatgatgactcattttatgttacgtttcgatatgaaaatgtcccaactttctgtttcatctgcggtttaatgggacactccgagagattctaccctcgcacttttgacacaccagcccacctgatcctcaagccttacggtttaggcttgaaagctcttccccgtcgacaccagaactttgctacttcaccattcctacggtcaggcaaggcttctgctcattcatcatctggtgtgaacatcaataatgcaagagccaattttggtaagtcaactgatcccatctttatgggaatatcttcccctgatatttctcaatctaaaactaagaataaagggattatgctttatgatagtcaacaagctgatgaggaattgactcaagcttaacttaaaaggaaacgttttgctgccgagagaagtaatgggcctgctgatgcttcggtccatgctgaatcttgttcaaaaaacttgaatatggtgtgttctagtgtccaggcccaccaatcgtcatgagtactttaagttggaattgtcgtggg

SEQ ID NO: 58794 - DNA, 833 bp, Cannabis sativa
gagacagtgactagaggagggaactggatcactacgttatgagagactattcagaaatccatccaaatatttattagtggtgtatatgaagcgtgtcacagtcatgtacactaatctacatttttttttttcaaattcataattaccgcaaactgataacatttccggtagtcggttgtggactgtggactgtggactggttgttgccacgtatgtaatgtagtttattattttaaagaataaatggcaaaaatatataaatgaagttcttggttaaaaattggtatcttatattgtgttaaaatcactactacaaaacaactttttagaagctgttttttccacaattttcataataagagaagttaaaggatgtaaaaatgcccacctattgaagattgactttagaagcagttttttatagaaattgtaggtataaaattagactataccatttaaagtcggttggaatggaaatatttctgagggtgatttgaatagcctatcccatcagttattttctaataacagacggtatagggttatataaaaaccgtatcagcttcttcttcttcacttcttcttcctcacgaaaccaaacaccaccagcagagacatacccaaacgctcgccaccttcgccaaccacccttactccagcccatatctcccctatttttgcaccatttgagcctattttttaaaaaaaatcttctatattttcgataactaaatccatacacactacgtacaaaaatgggttttcccgacatttttaaatagtcgtttaaagtattcccgtcggtttctataaccgtcgcctatacaaccgtc

SEQ ID NO: 58795 - DNA, 783 bp, Cannabis sativa
tatatttttcacactattttttttatctttatatatacaaaaaaatatatataataagtatacatttttatatttttttctaacactttttcgctctctcacaaaattttatttttatacatttcatatttctttttctcttttttacattttcttcttattcatactcaaactatttcatactatttttatttaattaattgcattttataagaaaaaatcttaattaacttctttaaattttacttttacactttttctcgtaattttctaaaactttctagctatcttagaaaaaaaattaagagcactcctatatatttctctcttttacatgattgataaaagtagtaattttttaaatattttttagtttattcagagttaatttatgaataatttgtatattttaataaggttgatgtcttgttatttagagttatctttttgttattttatagttggtttacgttgttgtataggtattttatagttatttttctgttactgttatatttttttttgtacagttattgtttagtttatgtgcattttttatggtgtatacatttaatttattccacataatttttttgttgtatatatgtgcattagttttattatttttatgttattttttttttttttggttatttttaagtggttttcagaatatttttttgttcaacggtcattttttaattattttttttattcatgtgtatttttttatggtgtagatttttagtttcttcctaataatttttttttggttgtgtgtgt

SEQ ID NO: 58796 - DNA, 751 bp, Cannabis sativa
aaaaataaacttaggtatttatttgcaactatgagttaaacttaagtatttatgccgcaaattattctaaattcttaaaaaaaaattgtgtgtcatgcactctcttcataattttttttacatcatataatgtagttatttaagatatattataaatttttaaaaaaattaaagtaacttacactataaaataaagttctaataatctagtaaaataaacaacatattatttaaatttttattttcgtaatattttaacattttttaaaattttataaaatatcttaaatatttacaatttatttcgtcatatatatatttatatatattataactatctatatgtgaaaaatatgaaaatatgaacaaaatgtatctatacatccacttttgatcctaaaattttcatatctttgtaactacctattttataaattagtctaaaataatcatctcaattttattttgatcaaaatattgataaaaatgtttaaagttaataggtgatccacatattttcttagtaaatttttccattaaaaaaaaaaaacttaatttatcaaaaagaaaatgtatataaatatatttaaatgcgtatccaaaatagatacaaactcatatatttaagtatgaaatgtcaatttttttttccttagaggtatgagatgtcaattctgagtaaacatgtaatgaagcatagatggtactcatacaacattataatccattcattttgtccactatttaactc

SEQ ID NO: 58797 - DNA, 926 bp, Cannabis sativa
agagagagagagagcaaggaagagacggggatcacaacttcaaagtgttcttcattctagttcttttcttctccttccactcttactaaatattattattttcgttataatgtctagttctgagtagttttcttttagttaatggacatttcaaaaccgaaggcatgaattctcaattttattattgaatgttattttctagtttccattatatatcaaattacttctaatcttctgtgttcattgtcatgattattgctttaatcttgtttagatggccactaaattaggttttattttaatctaccatcatcataggattactattaacctactagtctaggattcaaagtgtttgtgaaaaattacaatttttatttgtgataaaaaaatagaacctaggttaaatgaattatatgcttcattcatttattgcctagattagtctatctccataaatctcaaagctttatctatgttaaataaatttcatgcttcgtggatttactgcttacgtaaaagagttaattattgagcgctttgctttgattacatacaatagcgagattgagataattgattgcttcagctgtatttatgggattaatagtttgattagaaactaaaattacatttattaataggaattatgaatgattgttgagggtggcgaataacctttaactagtttttcgtatcataatctctcacttttaatttgtttttttttgttatttttatttctgctattttctctcaatttcaaaactccctttttctaactcttgtcattaatttttgaataatataataaacatagtcaacgtgggttcgacccgtacttgcttttataatgaaatatttggaggtatttgaattaaaatattagtaaatttcttgtggcttattgttggaaatattttacc

SEQ ID NO: 58798 - DNA, 868 bp, Cannabis sativa
aaatataaattagaggtaaatttgattaattgattaataaaagaagtatttttcaacttaccccttttatattttttaataaattattaggttatcattacatgatatattaaattttgcattaagatttacaattatacaatataacaaaagagtaaaaatttatataaaaatatcataaaactactttttgtatcaaatataaattaatttttacggtaaaagattttctttttatatcgatatatatgggaaaagatttacgatgaatttgtcacgtttcttcctctcagccaaccataagtctaattttgacaattacttcagtactattgtaattatcttataaagcaagcaaaaaaacaaaaaaaaaaaacaatagtcctagtccactttaatatactgtacctattggtaaaattgtccaatttataataacagcttctttatttttttattaatattattaaccggttttgcatgtaataaataatcttgaaataattatatataacatatttctttttcaaattttcctgtcatcgtctcgtaaaatatatatgtataattatatatacacgattgatgaagagcttttccaatcagtaagcatattatatatatatattatttcttctttctttgatatttatttttaaagagataaaaaatatggtgatagatgatcaaattgcttaatgatttgactagttatctattttagattgcatatatacatactaacttcacaacaaattaattaagaaaacttgagccacttatggctaaggagtgaaaacgatggattattttgactctggcaacgataattaatccaaacactaacaaccacatacaaataatatat

SEQ ID NO: 58799 - DNA, 1895 bp, Cannabis sativa
aaaaattgtcaacttacaacgacataaagaaagagaaaaaattatgaacttacaacgacagaaagaaagagaagaaagagaaaattttgtcaacttacaacaacagaaaaaaagagaagaaagagaaaaaattgtcaacttacaacgacagaaagaaagagaagaaagagaaaaaatggtcaacttacaaagacagagagaaagagaagaaagagaaaaatttctcaacgtacaacgacaaaaggagagagaagaaaaagaaaaaatggagaatttacaacgactaattagagaaagaaaagctcacttagctctaattgaaaaggtttgttatcatatttttgtgtttaattggtaaattgattgttatgtaataactaataagttataaactaactaatattgttttatgatcataatcaacacaggtgacacaagttgatcatactggtcaaaaccttaaggatttcttagaacttgaaaagttatgtgggtacaaaccgtcgtgtagatatgttggaagaaattccaaatggcaaatctactcttcttctaacatattatctgggatgccgttaacaaaattgggattatttttgaagaaagatgaagaagaagaaagagaacaagaagaagaaaagtcgtatcgagaaccgaagacaaagaagctaagacaagcttagagtatgctaaaatatgttttgtaactaaattttctttaaggacattttatttaagggttgggattattaagcattacttgtttggtaagagtaattagttggggtagttaaagctgttaattataggagtttactttaaagtcttttggtattctattcaattgcacattaattcattcaacaaaatttaatatacaaattttatttttatctttttttcatctttctttgctctcttttatcatgtgatgatcgaaattatttgaataaaatattaactataaagagtataaactacggtttgtaaattacttctcttagagttatcttttattagtttgttctttgtaaagcgatttgtgaaatgagtcgctcgtattgttgttagaaccgctctttttattgttgattgtatttttttttctggtgttgatgctacctcggagttattaacctctgttttggtgactgatttgagatgaataaaagtttgagatgtctttaaaaatactacaaagagtattataaaacaaattaaaaaaacaagaacgatggacttataattaataataattaaaaaaaataataacctaactaaattttatatttaaaaaaattaatttatttatatattattattattattttacatttaataattgttattattttttttttctcataaaacttacaaaatgcttaaatgtttttagagaataaattatatatatatatatattattatttattagtgaataattttgtactaaattgtgaaagatgtattttttattttgtattttgtaaatattattgatagcaattgagacttgtggtaattgtctattaaacatatttggtttgctagggtttcctattaattctctctagttgccactcttattttttttttcccaactgcatccaccttcattggccttgggcgtggctctagtcgggactgccttcactaattcaattccacgatgtggtgatctcctgtctttcatgtatgtattttccttttcgacgttttgctctctgggtgtggggtttcatatcactacaaaaaatcttatgtttagtcacaacaatacttatgacgaaatatgaaaaaaattgtaactaattataaattaacatttctatgttatgactaaaaggtgtgtggctaaaggtattagtcacaaaaatcacaatatgttgtgacta

SEQ ID NO: 58800 - DNA, 653 bp, Cannabis sativa
acatggttagggatgccttttttatatatagagagagagagagagagagagagaatggggtactttgaaggggcaaacggaaggatgagtacagatttggggcccactgatgtttatttagttcctcagatactttgtttaacatttctggaagttttagctggttttaggtttatgcattttataatttgggtttggaaattattggttctttggatttggatgaaaagtttcgtccttcagtgctgtctatttcttccggagcaattcaacgtgtttatctgttaaacggagtgagtggtatttgctatgaaaatttggggtgcatatgcccttcttcattaatgcagtcattgcattggagtacaaatatggggtgtgattaccgaagtttcttttttctttttacccatattaaggttggtttctcaaaaatatatgtatatatgcagtatatattatattcattgatcaagattggaaataaaagaagcgtcatatttcttaaatttccatttttatcaaatttgagtaattacattggttctgctcttgttacttactacttactacttatacttttcttgttttgtattttacttggaggtggaaccagcaaatggggttgaggttttgagattcaatcaaaaaaa

SEQ ID NO: 58801 - DNA, 1593 bp, Cannabis sativa
  modified_base (47)..(47): a, c, t, g, unknown or other
tatatatataatcatgaaatatataatgtgaaccatgcaacataaantgttatttctgatctttattagtaaatctgattgtattgaaatgggttttatttacgtcacaaaacccaacagttaggcagataaaatttgggataacatttgcccccaagtccctatttgaacatctggtcggatagggactttctagctctcgtattgtttgtagtagtctctgttgagcaaccttgtcttgccaagtgttggcttttttgcatggaatgcatttggatcttctctctatatatatgtctcatcttttcttcttgggtatctcttctttgtacctgtcattagcaagtttcaagcttttgaagtttttggaaactttttgattctcatgttagtttgtaatccctttggtatattgattctcatgacagttttaaaatgtacaatgtgtgactttctgatggaaaagattcgattttggccctcattacaattcttgaatctttgattaataaaggatacgcgacacatatttgagttttgaaagaaaaacatacatgggattcaaaacttaccttggtcggcctgggaggtcttacttgagacctggccggccctaaggcttaatcatgggagttagccagctttagggttttaccttataaagctagcctgttcatgcttgggtttggtgaccttggcttgttcttggctgagtcatggaaccctagctgccctttcaacacttggaaacctttgttggggtgggccttggttccaagtgggtagccagttttctatcctcttttgacttcagtaagaatttggctctataggcatatacaaccttagtcacatacgtggtttccttggaaactctatatgaaacttaatggtgagtctattatagttgagtgtccaacttaagactcaacatggcttggaacttgtaaggaacgctaccttagttgtagcttggtacatggcccctatagaagctctattcggttcttttatggctatatggttcttccagggccttggcctaatgcatgtgaacagattttatatttggcctcaaggctttcatgttcttgctttggcctataggccctttattttttaaaactactatcatttagccttaaagccatctatggcggacatataattatcatggctatcttcttatggccttgacaggtaaaggttcggattcactttgtcaagcccaagtatgcctgcacgacttatagaaaggtttagtagcttattctaagcattaaaatttctctacgtaagttctttgtgctagtttgatgcattgcaaggtaccaagcgtccatccaggcaagtctcttggtcactgctattcaccaagtttcacagactttgcgtgcgttcttccttagggtgctatccatagtacgcatgtggaactgaaagagtaactttaagaagttaatgttctgagcaagtggtttagactgtcggtcttatatgtaacaaaagcgtacagcttagtgtctgcttttgaaatcacgtagtggctacccctgcatggcttaccgcgcaacgaccatcactaaagagtga

SEQ ID NO: 58802 - DNA, 683 bp, Cannabis sativa
ttggagtagctttggtgggtttttacatacttggaactcttggatttgtggtaaaattctttagctcttctatatgtgttattgctgattttatttaatgctctttgaactcgttcaatggtgctcttgtgagttgttaatgcatgttgttgatgagtatatggattatgatgttatatgtgtatttgagctattgggatgttataggttgcatttagattattttgtgtgattttaaggttcaaattattgtttgagtttttgggttttaagcttgaatttctaggttccctttgaagatttgaaggctttgaaattcaagcttgaatcatgtgtaatatgtaagactattttcatgctttgggtatgctgtgaaagtaattttgagttttgttttggcttaacattgttgtgtaggattgtgagatattaaatttgagtttatgaatggttttggttgagttttgggtatggttttgttgaggttcgaatatatggtaaagtgggcatttttagaccttaaaatatggttttctagttttttcaaacccagtgaccgcagccgaattattggtcgatgcggccaaaatctagcagagagccatcccttttctcgattttttttttttgccataacttttgactcgggactccatttgggacattctttatatcgttggaaa

SEQ ID NO: 58803 - DNA, 2453 bp, Cannabis sativa
tttttttttttttttttaatgtcatactaccactgtaccacagaaactctcttttgcgtgcgtcaatcagtttttattttttatttttatttcattctctctctattacataaaaaaagttgacaataccattaattatttgaacttaagaatagtacatcatgaattatttttcaaggtaattattttttttagaataattactttttatactataattttaatttaatgttattttgtgtgatttgttagttaagataagatgcaactacgttgttttttatttatttatttaacattttttgtattactttgaaacttgattaaaagtgtactaagttgaaagaaaatataataaattattttcaaaattagtattattcttttttggtgatataattttgtgatatttaagatattttatttaaaacaaaaaaaaaaaaaataccagtttgtcttttaattttttaaaaaacttaataaaatagtttgataaattaatttatttaaaatactatacgagcacaaagtatatgaaataataaaatactttttagtatcttaaataaattactttttagtagcgtattaaatttgattggcatatcaattattttctaataacaaaatttgttaattaaaatttttttaaaagaaactaataaattacattttattttagtcatttaatcagtgtaaaaaaaatagctttgtaaactttgtcaagaaataaaaaaaactttgtaaattttataaaaaaataattgaaaaacaaaggatgagaattgctatgcggcaccggcggtgccgaacaccacaactacctgacagtgacttaatacaaaataatattatttagtttatttataatacttttttattaattatatgggacccacaaccatttttgaccctttccatctaaataataagcccacgcgcaccatctgccaataaattattttcaacattttttctaatatttaaatgtttattcatgtttacataattttcaattaccagtagtatagtcatttttacatatttttttttaattttttttttacatcaaattctctttattacttttttaatctcaaactttcttcttcaaaaacaaaaaaaaaaaaattctcaaactttctagtatttttatattaaatgcttatatatgaaaaaaattcattattttatttttcaatacatgtatattgtattaatattcttataatttttactttttcattttgttatttatgattttagactaaaatttttccaaaaaattaaaattccactcatataaaaattaatataatttgagatgtattttatgtaaaataaaaattataaaaaaaaagtatatttatagatttttagagggtaaataaaagataactatccacataaaattaacataacaaatattttcatttttcggccgtgtcaagaaccttgaccttctctataaaatgcataaccttatctataaaatgcatattaaagtcattaaaaagtaaactatatatactactaaataacaaatttatatatgatgttcataaagttttgaaattgacatcattccaaaaaaatatacatggagtattttactttataataacatctcccagtcataaaatatatgcttcggtacatatatattagtatatatttttaggatgatcatgataaatctttgggtcttggtagtaatacattgtttggcttgaagttgcttggtgcggcattccatcactcaatgtaagacctacttaattacgacaagaatacaattaatcaattagtttttcaattctatatttataaatatatacaagaaaaatagaatgaaacttatacatatgataaagtaattaccttgagtattttacaaagtcgggtttcaaaaatttggtctaaattaataagattgtaaagactgcgagtaagatccattcaaatgtttgaaatttattaattcacttggaagtgatatataaggtgtcattgtttccgtatgttgttcctagattcaaaattttagtgtaaatatatttttatataaacataaattcaaaatagaaatttaaatagttgtttacctttaagatcattttttcttgtaaatcatgggtaacacattgagttgaaattgtggatacatctttcccttttgtagcaatatcatctacaatattttcactacgttgagtagttgacatactagcccaaaatatatctttcaatgctagaacccatcgacctttttccttaaacaaatcacttaaccactcattgtttgaaagttcaaactcattcataaaatgtctccacttttctatagcctttttcattgctttgtcttggtctatagcaagtggtgcacattcattcatgcgtataaaccatgttctgaacaaccaaataaatgtattagtatcatcatttga

SEQ ID NO: 58804 - DNA, 1153 bp, Cannabis sativa
atataaatactttacataattcaggattccgttttaaagttacaactattttttttttaaatatagtagttacaaaagttgtcaccaagcgactctcaaaatgaaacttacaatatcccgaagatcttaacacttcaagtctaaccgccccgatatgtatatatttactcgagctcactattgttcagtctttgctttgtctttacctaaacatataaacatttgtgagtcgataaactctctaagaaaaacataaacataacataaaaactgaattataatcaggtgctcatacactcaatcacaactctatatcccgcgttcaacgcgtactaagtctagaacgttcgtatgacagtacgattgatcataatatcagtctatactcagtactctagtcgtaccgatgtgatagcgtcaatctttactttgccaaacatatatccatcagtattcaatgcaaccctatgtacactaataccgctcttactgatatggtatctattaggcaatatcataaaacatgcacattaaatatgtaaacatatatgcaactattatactttaattctaaatttaggtgttccggtcaatttgagtagaaattactgatcgacgatttacaggtccctaagtcacaacataagtaaaattaataagtgatatgctaaattactttttgggaacttaaactcaaaactaaaagtttttctattgataaatatagcgtgaaaataccctaaatatcgataaaacgtgaaaaattggggtctgaaatctaaaaaatttggtgaatcaaaacctcgaaatggtttactgtcttctgaggtcctccaaaaaactgtgcaaaaaacacttaactttgaaaattttctcaaatctaccctaaattccaccaaactctccagaatacctagcctattgaagacataattaacataatccaaccaaaaatagcagctaaactccctgaatctaatttcttcattaaagacctaagtttgagctgaaaagctcaaatcttgatctttctcaataataaccataaaaattagtataaagcaacataattatctaagaaatagcctcaaaaaatgaactcaaacactactaattcaagttgtaacctaaacccaaaaacatgcatgaaact

SEQ ID NO: 58805 - DNA, 543 bp, Cannabis sativa
tctttcaattattattaaatcaatgactatttacttactttcatagtaaaataatatatatatatataatgtgcaaaaataatataattaagctcaacaatatgtccattattcctccaatatatttagtcggctggtagttgttgtgggtagttagcaaaatggataatttggggaattcatttttaattaatttttgttttaattcatttaaattatttgtccctttgaactatatattcacatgttagtaaagggtgagactaatgttatgtttcttttattatcttttaaatgcaaattagaaactttattaatttgctaaatgactagtaaacaaaaatgtaaattaatatccttcaaaaaaaaaaaaaaaactgtaaattaataggacatgcatatagaaaagaataagatgttctaacaaacttataagcaatcatattaacaaatttttaaacgaaatataaaaaaaaattgtttaaactacgaagaagccgtcaacaatcttcaacaatcagtagactgtaaaagttttgcttc

SEQ ID NO: 58806 - DNA, 1550 bp, Cannabis sativa
tggtaaaatatattccaacaggtggcaccacctatactgtttaggacacagtgataagcgctccctattgtaggaatattgccactggatttttttgggttaattaattaattcaaaaaataaatatttatttaaattttaatttaaaaattagttatatatatttagttggttgagatactccttcaaagtagttaagagattctcttcaagtagttgagaggattctctccgagtagttgagagaatttctcaagtagttgaaatattctctcaagtagctgagagattctctcaatcgtttataagaaataaatatctataatagaactggctataaatatttcttcaaataattaaatatgatttaaatttaaatatttaattaaataaaaatttattggttttaatttaaatataccgtataaaccaaaaactgatacgtattacttttgtgaagcctaaaaataattaagtagattaatctcttttccatcatcactccaaaaagagttctcacccatgtgttaagaattaaactaagaactccatatacactatatcttactagcccacattagtccttgtgtgtggtggaagattcaaaatgttgtagtgtgagttcttcgtcatcatctaaggatacagcatacgaaaagaaataaagataccctgataggtttcaagaggtaaattttcttttcttctatttaattttagatctaatgcctatacatatggtgattttaagaatgtggtatgataataattagaaattattatttcaatgtgtacttaattagtaccataaaactaacaaatggtattagagcaattctattatgtctatattaaatgatgtgtgggttttattcatttatatgtatgtgaatagatggtaatgatattgtgaatgtatgtgagatgtgaatcgttaattatatggtaaaaaattaggtgtaggattcccctttattttttctaaaaaaattatgtaagtaattaatggggcataagaatttttatgtaaatttattttttttaaattatttttatgaaatattacgttgtaatgttcatggcatgtgagctcgattttgtatctcaaaaccaggccatgctcgaccacgaccacagttgcatggagctctcatccattagactccgaccatgcaccaccatggaccattgtggctttgggtacaatgcccttccagtagatcacaggcccctctgtgcatgcggacacaaaggacgttcaatatcctaatcgttccaccaccctgggcctcaacggtctaacacatctaggcaaggatgaacctcgtccaaggcttatcggtcctacttcgtgctctcatcagtgtcacaacttctcacgaggcaatacacgggtgttcaaacctcgtccgtctgtatgagaagttgacttgtttaggttgatggatccttttgatttgcctagtgtgtgggactttaagctcatggcctcactgtggccatggtggctggacgccataaggtatatgtatatatatgtataatatata

SEQ ID NO: 58807 - DNA, 920 bp, Cannabis sativa
gttaataaaatattataataaaaaataatttgtgactaaaacgtaatatatagatactaatgttattaattttgttagtgttatgacgtactacaaacactatatttagttatgattaattataatttttgtgactaattttttcgatcaccgaatcacaaagtcaacttataccattaccatttcggaattataaaatgtcacaacaaataataacttagctaggattaaaatgtaatattttagatactaattggtgttgtgattaaaaatactatttaatttcgataaaatataatatttgtgactaattcttttaatttaaaacaattatttttttagcacaaaatttattgtaccaatcttttacaaattataaaaaacagggtttgatgttatcaatttatcatccattgtttgcttttttttttttttttaatgtaacttgtttattatttttcaccaaattcataaattgagtgaaaggaaattaatctattaatttttcaaaaattagtaaaaaaaaattaccttagagtctcgattaagttccgcccaacaatcatctgtgcaagaaaatattatttacgagaataaattatgtaaattgattgagtaattaataaaaccaataactttaagtagatatttatcgagggtgattgtggtaggatataccctacattgtagggtacgatcatacccgatcgattaatcggtatatttactacaaattgcccctaacatatattgttatacctatatttatatatcgatatcctaatgcagcaaggccacttgaaaccattgcatcagctgtaaaataaataaataaaaaataatctcatcaaaattatattagaaaaatcttagatcattaccataattaattttaatttagataataataaatacaacat

SEQ ID NO: 58808 - DNA, 1596 bp, Cannabis sativa
gtcccaggccgagtcctaagttttagtttgggtccgagtttggggttgtgtcctggtagtgaggtcctgggttccaagtctaaggtcgggtcctgtgtcttgtgtctagggtcaaattttgtgtctcagaccccacttctgaaccccagtattgggtccaagtcccccatctaggttcggatcctttgtccaagtcatggtccaggttcgggtttggggccaaagtcccccatctaggtcacggttcggttcttaggtcccaggtttgagtcttgggtctcaggtctcagtcccgggtcccgggtcccgatcccaatccaggttctggtcctagttgaggtttagggctctgtcctagtctgtgtctgggtcccagtcttgatctcggtccaggtctgagtcttgggttcgagtccgagttctggtacgagtctgggtcttggtctgggtctgggtctggttttcggtctgagtttaggtttgggaattggtctgggaatgggtctgggtttaggtctaggttctggtacgggtctgggttctggtccaggtcttgggtcacgggtccagggttccaggttctgggtcgcaggtcctggcacaagtgtcagtttgggttcgggtttgggtcttggtatcgatcctagtttgggtccgagttcatgttcggttctgcatctagatctgattttgggtgcaggtccaattccagttccaaggtcctcattccgattcttgttccgatttcgggtcccgagtctgagtctggatttgggtcctggtctagcaatggttccaggtttgggtcttggtacgattcaaagattgagaaactgactacggggtgggtccaagccccgggtcgtgggtcaagattcggatccaaatcttgggtctcgatctcgttctgattcggatactgggtcctagtccgtgtctgtgtccgtgtccgtgtcggggtctgggtcggggttgaggactgaaaccggggtcgggtcttgggtcccaatcccactcctgggtcccgattttggttctaatttcaagtttggttccccaatctaggtctgggacttgggtccaagtctgagtctccaatcctggtccgggttgtgcatctgggtttgggtccaagtccgtgtctgggttcgggttcgtgtcctgagtcctgatctgagttttaattcggctccgtgtccaggtccgggtctgggtttggccctagtcagattctagttctgggaatgagactgggtcccagtccctcggtcttgttcccgggttccggtacgcttacagttctgcatccagtttcgggtcacggggtacgggttaggtccgagtcctggtctgggttcaggtttaggtctgagtctgggtctaggttcgggtttaggtccgagtttcggtctaggttttagtccgggtatgggtcccagatccaaacatcgactatgggttaggtttaagccccgggtctaaatcaggatctcggtctcaggtccaagtcagttccacttcgggtcctaggtcttggtcctagtccgggtttaggatctgggtccggggtcaggtcctgggtctcggtgctagttt

SEQ ID NO: 58809 - DNA, 631 bp, Cannabis sativa
tgctatggatgaagaaaatacagccttggtgaaaaataaaacctggggtttggtccccaaaacaccccatatgaatgttgtgggaaacaaatgggttaacaaacataaatggaactcagatagctttttccaaaagtataaggacgaattggtggcaaaggggtgcaatcaaagaccgggaatagactatggagaaacgtttaaccatgttgtcaaagcctctatagtgagaattgtgatcactatagccgtagcaagaagttgggatgtaaggaaaatcgacataaacaatgcctttttgaatggatagctctaagaagacgtttatacgtaccagcctgctagttttgaggataagaagaaacctaactatgtgtgaaaattgcaaaagtcgctacacggtttaaaacaggcccctcgcccctggtttgagaaattaaagtctacacttctcgattggaattttaagaattccaaggctgattcttcactattcttttacaaaactgaaagttagattattccatctcgatttatgtcgatgatattattattacaaggaacaacacaaaaatactcaactaattcagaatagatctgaacaaagttctcattgaaagacctcgactca

SEQ ID NO: 58810 - DNA, 1057 bp, Cannabis sativa
attttaaatttctttctatggattatctatatgttttccctttgttcaatgcaaacttggccaatgtggcatataatatatatcttgcatttaaatttggttatcctgagtggttgacttatgttggtagctttggcagcatggtcagatctgttagattatgcaatattgattgtttcaagccaactgcaaccactgtttgaactttgaagaacacaagagatcaattctaggctgagtttaatttatggtttactttttatttatttgattggttaggggggattgattgtgttgggtgatgggaatatgtcatgttctctatttatagaggagaaagatgaaaggtaatttaattaagaatctgagcaaattgttaacctcaaattgttctctttccaactaaataaatttaaccctgcactactctctatctccttacttctcaaatgtgcatacaccaagtttttgtgttgaaatgtgttatttcttaagattttatttaataattttttccctctattttacgatggtattttttctttagttttcgctacataatgtttgctttaaattttagaacacatataatatattgttcctttaaatttttcagaaacaaataataaatgttaaagtcatatgctattatgatttatcaattatcataaactatttcttcacattaaggataagtactatatgagtatgtaaaaattgggaacaatttattttttattattaataacaatgtacatatcataagtttatatacacaacaatattttattagtttaatttgataaaacaaactgctcatataatcatactttatttagtcactgaaatctaaaaaaaaaaaacatcaaaaccttaaatagaactattatttacgtggctcggcacgtaacatctacctagtatatatatattgggcaagacctagcaaaagtttcctatcggtagtgaacttttttgaccattaattttagatcatgtggttattatgatctaaggtatatactcttacgatagaactgcttgtatacaattaaaa

SEQ ID NO: 58811 - DNA, 1120 bp, Cannabis sativa
ttttttattatacgtacatacataaataaccatttaataaatttctgaacgattttttttttttttttaaataaaacttgtaatgaaattgtggttacattatttacttttaaagagctcaattttaaatttttacacaaagtctcaaattgtttgggtgaatgtttaacagacctcaagtatcttttagtacttctgatagtttttatttattttatttttatttaaacgtttatatattaatatacataattcaaaaattaaatttatgacttttaacataacatcaaaggattgcatttgtgataattataattaattagtatatgtacctctttatttaatggtgtattataataaatgaaaaaactacaaattcacccgatttaattaatttctctccagtttttttttttttttttagaaaattcaatgttataatttctctctagtttttagtcctgtatatagaattacaagattttattatcaatatatgtatataatatttgttattattatattgtataacaaggttaattttgcttgttggattattttgtgatgggaacgtaattggttgacagttggaaatgcaaatatatatttagagaggttaattaatgtattaatgttgttaataattaggtggttttcatagttaattacaacgtgcattccattttattaaagacaaaatttattttattaagatcgtgcaaacaactatatatattctggctataattaacttttaatttattttatatacatatataataaaatatatgatttattataaattactacacccttgttgacaatgtgtaccttggctgtgctagatagatttaatttttattgtttttttttaattatatatatatattttgagaaagtgttttttttttattatatatgaagttacgtaatatacataaaaaaaaagttacattaattaaggtaataatatgcatttatatataatttaaattagcatgaaatcttcacaccatttcactttaatattatacaaaattatgcattaaattagtatgcactaaattctacacaataaatagtatttgattttaaatctacactaatttaatgtaaaact

SEQ ID NO: 58812 - DNA, 1269 bp, Cannabis sativa
gaatgtatttatattactaaatattagtttaattttatttaaaattacatagattaaaaaaaaatacatatacaaaagggcccattttttcttaatttgctaaaacagtcttgggcccattttttttaaagcatgctggatacaatatgtgtaataagtagaaccatgaccacaataggtatgagaatgatgaccacaaagctaggcatgcataaaagtctattcgaatcacattcacaacaacaaactttgtaaaaataatcacaatcacgatgcactataaatagacaatttatgtatagccaatatgatgtgatcagatcacacctaaaatctaaaatgataattatataactatgtataaaaagattatgtgtgtttgatctaaactttgttaaagtattataaaaaaaattatatattatccctaaatttataataacgatgagggagagagttagaggattcatggctaaccacagaatgaggcggttggggtttaggctctgacccccacaaaagatcccaaaatattaaaattaatatctatatagaaaagatataatctatatagggacacgatttttttccgtgatgtacttttacggaatatattccatggtacattagataggtctcagggtatgttaccaaattttaaccgtaatgacccctaaatcaaccccagccctcagatcaaataattttcccatctaacggttgtcgtacatcacagaatacattccatgaaagtacatcatgggacaatcgtgtcccaatctatatatatatatatatacataaatgaagcttttgaagaggtgaagtggcttcctcctcttttaatttttaactttctctaaattattattttttctattttttatttaacatttattaacaactaataaattaataaaacctaatatatatatatataacatatttaatgtattaatagttgtaaatcctaattaacatctacataatacattaattatgatcacatcacaataataacgcttctttcattagttttataactatgtacaaaccttttatattcaccataaattaataatacacaacaatacgtcaaaaaaataataataattatatacaacaaaaattctaaatcaatgctaaattttgtaacgtgaatgtaactgtcaaaaatcataaataacatatattattagtaacaataattatggaaagctagaaaaaaaaaaaaaaaacgtataattaattaaatatctattctatata

SEQ ID NO: 58813 - DNA, 2985 bp, Cannabis sativa
tataaaataagtaccgaactaataacattcgatattatgcaagatgatacacgaaagatcctttttttttgtgttgctctttttagccctctatttcttatctttaagaggtcttcctccactagttggttttctcataaaacttcataagtaggcctatatttctaaaaataattaaattgttaatggcagaataaaaccaaaaaacaacccctcacttgcaaaattatcgaattgagtacgattatatgagcgatagcattagcatctactttaccagaaatatcaatgaacccgattatcgaaattgcacatgatagccttttttagttgtttctaaacctatttcttagttcaaactggaatcatttcccttccaatatttttctattggagctttcctgattccttttatcaatcataattagaaactggagagtactaaacttttggtgaatgagcttcagtaaattgctttctattcaagtccaaagccaaaaaacataaaaataacataatgtgtctatgagtaaggaaaattacagagacaagaatatcagcagtctgcaactcttacacatagaattattgacataaacttagacaaaaattctaatcttattgaacaaaatttctgtgattcctctgtatttctagtaatctaattaccaatatgataaaaacaatgctgccccacatctttttttttttttttttttttgagttcaattcatttagaactattaaaaaaataggagctttaggcaaaaagaaccttattctgctgaaaattttcaaactcttaattctcatctgttccaaatagcttcatccttgacaatggagacctcaagtagccttccacttcgaatttctttggagaaagttcgcggtacttggcgaattgctctttcgcctctgaattcctatcgagcaagctgtaaatcatgcctctgcaaaaatatggcctaaaatcattagggtcctcgttagtcaattcctggtaaagctccaaagcttcatccaatttcttctgcaagaattgtatttgcgccattatcaatttcacatcccgcgcttccttgggtttgttctcctcctcagcaatcctcaaagcttcccccaatcgcctaatcaccgcatcaccttcaccatttttgtccatcaacagagcattctcaaacaatgcctcaaaagacaaaggattcgtagcaagaatttcctcgaacacttggcgggcactatcaattttacccatttcgccaagcaacctcgccatcaaaaacttccactcattctccccaggctgagccgaaaccaaccgttccaaaatcctcaaagcctcatcatcctcacctgcctcgagtttctcctgtagaagagacttgagagcatcaatggcttccaaattagagtcgagaaactcagaaagcggagaagacgattccggaacagtatccgattcatctgtttgttcggtgactgtggccggagtttctgctctggcgtgaaaatgcgtagacttgcatccgaacatggaagctgttgctccgatgagtatggcagctttggcgaagcttttgagggttttggcaatggggttttggggtgaggattgaacagaagaagaagcagtgagctttagggtgggaaaatggagatggggagaagaggaaaggggttttgaggaggtgaaaggtatggaattggtacggaatagggaagaagaagagaatgtagctaaggcggaagaagccattgttgaagaaagaggcggaggttgtaaggagaaagaaagaagagaaaagaggggttttagtgtttaggtagaaaaaatgggtttgggtgtaaatttattatggggaaagaccacaagagtagtagtggcaaaagaaattaattatttaagtttaaagtgtggttggtaaggggaaagaaaatcttttctattttcttaaaataatagcaacaaaacatgttcttttccaaagaaaaaacatctgcatcttgttttcttctaattttttttaaaatttacaaaatattttaaagaactgtattgtacattattaagagaattactaaaaaaaatattattagtgtctagcactattatattggtataattaaatattgagtcttgtataatttttaaaaaaaaaaattaaaaaatatcgctaataaggtactgagcattattggagctcactcatttttgtgggatataccataaaagccccaaaatatattaatagagcatttgggtataagaaattagactctatacccttttaatattgtccttttttatttttactatcttttttaaagtctattatttttatcttttttaaaatactttactaattttgccattgtcacttcaatatactccttatatgactatcttatgttagggtattaaataataactttttacgttctatgatttttttttcttcaaatttagaaatattattagtgtgtaaataaaattactctacaagaagataatcttaaatccaaacattcctttcagtcttcaaaaaatatatttaatatatgaataatatatatcaattttcacaataatatatcaaattcattgtaacgaaaaactaagttttgactctctctgaagtgcttcctactattgtccaaagcaatcgaggtgcttttgtcaaaaataggcttcttgctcacaatatcacgatctttcaagatctcctaaagggttacacaaggaagaacatctctgcaagatgcatcatgaaaattgacttcaataaggcttttgacactgttgatttgtagtttgtggaacatttgctaaggcttttatgctttccttctcgatttattaattggataatgacctgtctgaagggaatgaactaccaccttatgcttaatggtagaattcaaggcaattttaagaagaaaaaatgcttcgataaagaaatcctatgtctcctctcctttttg

SEQ ID NO: 58814 - DNA, 1465 bp, Cannabis sativa
acaatggataagaagaaatattattatagtaagtatttattaaggtgtcatttggtaatatttttttttctaattttttaatcacaaaatgaaagtaaaaattttgtttttaaatttttttttttgaaaaacaaaaatgcgttccgtaaccacttttgttttccaattttaaaaatagaaaacaaaagtgttttcagtaaagtttatttttatttttattttttgatttgatgatttgatttaattctggtctagggtctaggtccgaggtccggggtcaaatggtcaaattcgattcgggttcgggtcagaggttgggttcaacgtcagggtcgtgtcgggggggatttgggtccgggtctggtcggagtccaaaatattgattaagaaaaaaaaactatttaaaaaaagattgaaagtgacttttttttgttttcaaaattttgattttcaattaaaaaattgaaaaagtgaaaacaattttataaaacatgtttttaaaaattttctgattttaaaaatagaaaactaattaaaaaagtattaccaaacgccacctaagtttttccaagaatgttaactactacatcaaaaacagtgttcacaacatttgttaagttttttcaggcatgtttcttgcccatttaaattacgaggtaactataagatatacattgtttatgttttatttatttatttatttttcttttcattctttcattttctttttcaaactttaaaatagtttatcgttacgttattatttggatgactctaaaaaaataccattgtgatatgctctttaatataaatatttcaagaagtgtgaagcatatattttttcgttatttttaaaaagaaaaaaccatttagttactaatatagtgattagttattattttataattttttaaaatcttaattaacaataattttagaattttgtaaattaatttatattatattagagcatctttaatcatactctctaaacacattctttagtaaaaataggaagtgaaacttgataaaatgagctccaaccatacaaaaaataactctttataatagagaatagatagagagctctctaaatgtagggagctccttacttttttgctaaacttttttaatagtattttaatcaaaagaattgatagtcttccattattttataaaattaatttatagttgacaaatttaaattataaaatattattaaaattatcaaatactaactaaagtaaggggcatgattggagcaacaaccataaaaataactctctattttaattttttttttaactattttagctaaaaaatagagagtaccattggaaaagctcttatacaataactaattagctttcaaataacaaaaaacaattagaggccttaatattttttactgaaaattaaaataagggacgagatagggttattaatctgctgaagggttatgaac

SEQ ID NO: 58815 - DNA, 1519 bp, Cannabis sativa
gtcttatattgtttggctattatagactattttttggacaagtttaagaatgtgtttcgttcctcaaaccccatcataggccttgagctagagaatctcatttcgcctgtcatttctaatactatgaatgatcgtctggtgtccattccctcccgcgaggatattagaaagttggtttggtctatgggtcaattcgagtagctattatggacattcaaggaaaagtattttaaaatattatttatatggatgtccaaatcacctaaattttttctattaattactattaattgtaattactatttctcttcttagtttcctaatctatgacccacatatttgtataaataggagatcatcccgttataataaaacattaaaaattctcattcagtttctttttctctcttcatcatcatcttcttttcttcttgtatattttatattattcataataattttataaaatattaaaaatttgatgaaatataatctcatagggttaatgtacaaatatagtaaatacatttgacaaaattaaatatctataacttccaatctatattattaataattttatattaccatattttgtgactatatagtaaatacatttaataaaatcaaatatgtataaattccaatttttattattaataattttatattaccatattttgtgattataccgtgtcattgctgtcaaaagcttttttttttattaccataccctaccttacctttttttttaaaaaaaaaaaaaataaataaaataaatttcattcaagaatcaaaaataaaaaattaggcaagttctactgtaaagcaagacttacacaaaggaaattaatctcaatccacatgactcgagttttatttgccaaccgtaccttaccttattatcctttaaaattgggtgcattgtatctagtgtctaattataattacgttatttcaaaatggaaaaaataaatattcaaaagattggaaaattaaattttgaagcccttctttgaaattaatttcttgtatgagtattagaaaaataaaatttttatttattcatacaaacttttatttattttcacaatagccatgtgattaattcagttttcatgaaatctattgaatatatagtaatataataaaccatgaaatcaaaacaaaagccccaattcttaaacaacaacataagaaaaaaatttaagttttgataattgaataaatactatattttgactttggaatgatttatatataaaaatgcataacaaaaaaacttataaaaatattattgaaattacataataagaacactaataacacatataattatttaattgaaaaacatgaaataaaattaacaacgattgtgacccggcaacaagagaataaaaaacacaccaaacacaaataactcatcatgagaataagaactaagacaaatgaaacacaaataatcaccatggctaaacaacttagttaaagttcatgtgaagtggttattagcccaattatt

SEQ ID NO: 58816 - DNA, 1696 bp, Cannabis sativa
  modified_base (465)..(479): a, c, t, g, unknown or other
ttttgaatccatttctgaatccatgccagcagaccattatttatgttcgagacttgccgttgcttgtttataggttaatagatcgtcatcaataccgtcaccaacgaccgtattgatttcaccatccaagacataacgagattgttttgtggagaccctcccattacaacgaggagccgtgaccttctgaactggaacattagtggtagatttcatagttgtaacaacttgtgtttgttcaactaagggagtgggattttcttctgcttgagtagaagaggatggaacattagaaggagttatatatgaaagcatttcttctaacactactttactttgcggcttgaagttcttaatatagtcatcttcaaggaaattagagtttgtaaaaacaaacactttatcatcctttctactataaacaagcaaacctcaattcacacttctagtttgccttctttcttnnnnnnnnnnnnnnnagggcacccccagattctataatagcgtaaactaggtatacgaccatttcatagttttaagggtgtcttagggactgatttagtaggaacaacatttaaaatatcattagccatctgaattgcatatccccaaaaggacgttgatagggttgaatagctctgcatagacctaactatttctaaaagtgtgtgaaatcttctttctgtaactccattttgttgtggagtgctaagggcagtatactgcgattcaattctaagttcaattaaatgatgattgtctaaaactaaaaatttattctaaaacttgaggcgagcttttcccttagcttggaccgatactaatttaccatttccaactctgagctttaactcccctggatttagataatcccaagttcaagcagctataatgaagaacaaacatggttagtagatcaggaatcaacaatccaaatggatttgtcattctctaaaacacatgattcaaaaacaaaagagtgaccttcattccaattgtctagaagtctaggacatctttcttcctgatgtctcttctcatcacaatatgaacatagaagagtacgactgtccattgttttaatatttgaacttgaagaagcagcattgttagaagcatcatactcaattacctgcttctttttttgcatgtctgcaaaactggaggaaggcctccttgcaggcaaagtctgctcgttagcatgcaattctgcatccaacttgtctacgttggatgagttaaaattgttgatcatgtaagatacaacaaatctattatactcaggttgaagactattaagaacgaattgaacccattgttctcttgataaatcaattcctagcaaattttctttccgaaatttcatattcatcatcattaagtgtgaattaatgctcttaccaggagacattttcacactatagagttcatttgcaaaggcatgtaaaaggtgagattcggggtgtggtttatttatttcgacactacaaatatcaataaacagaaataaatttttggttcacttaaattcatacacaagttcagaaaataacaggtaagttaacatgtttgcaaaaataccaaattaaaatatattcaattatttgccaaggttttcaacaaactgatacaatgcttcgttttagtcgagagtcaaagatatcatccattaaatagagtattcaactcatctaaa

SEQ ID NO: 58817 - DNA, 980 bp, Cannabis sativa
tatcaagaaaatgactgacatgaacaaatggctaaacacccaattcaaaatgaaagacttgggtgaagctagttatgttcttggaattcaaattattaaaaactagaacaacagatcacttgctctctcgcaagtagcttacattgatatggtgcttaagcacttctcaatgagcaatgtcaaaggggcagttattccttctagacatggctagcgactatctaaggagtagtgtcccacttatccccgagggatagaaaatatgagaaaatttccttatgcttcaacagttggaagtctaatgtatgttatgctatgcactagaccagacatttgttatgcactgggaattttaagtaggtagcagtcagacccatgaaatgaacattggacagcagttaagcatattctgaaatactaaaataggataagggattatgtgttagtctataagggtggtgctttaaatcccttaggctataccgactcagatttctaggcttgtcttgatgacagaaaaagtctacatctgggatggtattcacacttggaggtggagcagttgtttggagaagtgtcaagcaatctgcaatatctgagtctaccatggaggccaaaaacatagctgtcgttgaggctactaagaaactggtcctgctaagaaaattcttcatagagcttggtgtaaaaccacttgtgttactttgtgacaacactggtgctataaccaatagtaaagagccttgataccacaagaggagtaaacaaattgagaggaaataccacatcatcagagaatatgtggcaagaggagacatgctggtagaaaaggttgatactgaagaaaacctagcagacccattcactaagacgatgatatagactctatttgaaaagcacagagagaatctaggattaattgaaatgattattattttcatgttattttaaagtgggagtttgttagattttgtgcccta

SEQ ID NO: 58818 - DNA, 3695 bp, Cannabis sativa
  modified_base (2500)..(2506): a, c, t, g, unknown or other
tattaactttaagaaagagaataagatagagaataaaataatgctgaaaatcctctgcagaatgtctccagtattgacttctgtctttgaaattcgtactcttttttttttctctaaattgcttcccccaaatcaaatccagttcaccctttatataggctttcagagactaaaaagataaagacgcacatgttaaatgcctattcgaattaggaaaccaccaaaactcactcgacacctaaagggctggatcgcggcccgtgtgggagtttcaccagatggcttcgtttcgacggtgatttttctactgcattgactgatagtattttggccataactctctcgatattgctcagaatcggacgattcaagattttccgaaaagataaaagagagatctagaacttttacgttttgactttttttcaaaatctaatcagaagatagtcgaattcaggcttgatgtttcaactttatttatttatttatttatttttgcataattttctctattttaaatatcatctttttgtgagatatttttatctttttttccatcttttttctctgatatttttctaatattcttttattttaaattttcaaaaataaaagataacaagcgtaaaaatactacaaacacaattaaaactcaattaaaaatatactaaacttaatctaaaattaataccaaaataacctaacaaatatgctcgtattaatttctaaaagtatgcaatatgttcttaatgttttggttttcatttttttttcttccccttattcaatgtccctgcttctgttgtatctttctttccaagaatggttctgattccattgtaaggaatgtcaactttaccctataccccacaaaaataaatgaatcaagtatatatccaaggttaatttagacattttttctccaagtcaaacgacttttaactctaataaaaaatgtactgttgtgatcgtaaacaaaatcctcacagaacactctcgaaccctaatcactttcacacacacccttatcaaattgaaaccctagatttgagtgtcttctccaaaaactcaaagttctcatcagtcttgaaacaaaccttctcaccctccccaaatcaaagattaatccacaaacacatatacacacatataactatacgatggtaaagacaaataaagaatagagaacaccaaatttatagaggttctccaaatgttgctgggtacatcctctttcgagctcacctcagaaatggctcatttccactaccagatcttcaatgatcagcacagtacaataatggattccaaatcacagataattgattggtaatccttttcttttacatgtatttctcttagtgtttatctctctatttcttactatttttcttctctttgtgtatattctctcatggaaacgaacctctgagcccaaacccttaggctctaagacttagctccgtaagtctcttccttctcctcttcgatctttgtttcctagtttatctttttcttgcatttgtagatccaggactcaagaaagcgagctgaaagttagttgcaaaagttaactaactttgcaactaactttggttcagcgtaagaatttgttaaggccaaagtttgtttgttgtacttttattttatttgttgtaactgtattaatgttaatttggacagtgtatatgtatatgaggatttatttcaatatgtacaaaacaagtctaggtgacactttagttctttttattctatttctaaaattttgcgagattcttaatttgttagaaaaataaccacacaaacaaaattatgcacgtgatattttttaaatatattagaactaaatgcctcacgttgtttataaatcattaagtgtcatttatatgagttataaatatgtttttaaattttagtatgtgatattgatttgtccaaaactattttttaaaagtaattgattaatttcttacgttaataatttacaatttatatttacttataatttcatagaattatatataaatatatttatttattaattttattttatacaaaattctttgtctcaagttttaacctaatttgataaacaagtaattaagtggacaaaaaaatgttgtccaataagcaagctaaatagtaataatagaccatgtacattgtagggatactttgacttcctaattcgtcaccccgatcacgtatgacttcaaccttaaaaagttgaaaaactctagttggaatcaatccagccaactttcttattacttattagtattatgtagtatggccatgggcatgtatgtttttagtattcaaataatgaacattacggtttttcaaaatagtatgggcatgtatgtttttattgccatataaaagtctctatttttttgtaagaatatatatacactctaatttttcattattttttcaatacacaatatacacatatatggtacatatcgtgagatttatttatttattttttttnnnnnnnaaaaaagaaaaagaaaaaaggaagtcaaataatttttggtactgctaaaaaatttaagttgtaaaattaattagtttatctctatgagtgattttaaacaattgaacagaacagaagtatatataaaaaaaaattggaattattctaatctatccaaattaatctacgtgcatgaaacatataaattaatactttaattaagtttatcatcttttagctattatttggaattaattttttaaacaataatatgtctattgtctattataattacaagtacatcaattgagatacccttaatcgagagaatataaaaacaattcccctacagaattgtttacatatttatatatacatacatacgtatgtctataggtcatgactattgcaatacgtgttttatgacccattatccttacttgattgatcaattaatattttagcctcatacaattaatctcatacatattatatacagttatattgtagactggttgaccttttttattttttttttaaaaaaagaaatatttatatggtagaagagaaacaaatgtttcttccaactatatatctgctaaccagaaactactcatcaagtcaatgaatgagcaagttgtgtggacctttcagctttggctttggttgtcatttaacaatatgatctatataatatctgtcatggctcctattcccaaatctaacatttcttaataataatgagagaataatggtacgtagtttttggctaccttttttctctcttttcatttcatgtcatcgtttcgtaagggacacgtgtatgttatgttgatttgtttagtgaaacatagctgttcgtgcgcgtgttatttaatgattttgtgattttttatttattttcttttttgcaaacaatgatttttttttttgacgtaactatgatttttttttttttttggataaatagtgattttgtgaaattgttctataacttgtaatttattttacatatggatgtatatattaatgagattttttctattataaactaaaaatgtaataaatttatatttatgatcctaaaaaaggaaataaacaaaaatagaaactagaaagttgttaattacaaaaatgccggccaagcaaaacggaaacaccatcttcttcgtgacccagccgcaagcttcttcgtgacccagcgatccaa

SEQ ID NO: 58819 - DNA, 1059 bp, Cannabis sativa
agatttcagtaaataaattatttgtttaattttctaataaatactttcttatttttgtttttgctgcatcgtttttgtttttctgccataaaattatggttacttccaagtcccaattgcaaagatcatagaaaccctttcacgaaaagccagagaagaactcaagcaaataaaacaaacagtcacaagaaaattccttataaacatagggaatgctaattaatctcaaagctaaaccaaacacgcaacaacaaataccccaaaggcacttttcattatcactaaaacaaaccacaccaagctagtacatgctttgtgagacacagatagatagagcatgaaaagtatatatatgatagagatagagaagagaagatagatacagaaagattaatttatttctatcgaatggaactaccaaagcaaacatacaataaattttaacaaattagaaatttttccagaattagaggacaagaatattctgcaaaagcaatgtgacacaattttatgacctatttctcctagcatatactaactattgctattgaaacagcaagatattcataaaattttaaaggctaaagccaaaactttggttctcctcacagttgattatggagctctcctcgtaaggacagccaagagatagctgagagcatagtatactgaggaaagaagtgagtttattgccataattaagcattattgccataattaagcattagcaaacatctcttttcctaatggaatgaatcccctctcaggattttgatatatttggtaaatgatataattgtactttacaaaccaatcaagctatttcatgtaacttggtcagaagtttacctatcaatcgatataactcaaaaaattgcaaatagcacaacaccattcatagaattatatcaattgatacaatctaacactacttcacaacccacatgcccccaactccaatacaaaggaaagaaacaaatatgaaccttaaaaaaaattaaataggaacattaggagtccaatcacacgtttccaatagtacaaaagaatcctacattt

SEQ ID NO: 58820 - DNA, 742 bp, Cannabis sativa
ggtgataattacggggcttcgggagatatgattccaattctttgtcattttttcgatgaagttttttcggttaaaggacttgactgtgtgcactttggcaacgaggaaaaggggggcatgttgtatctcggtttcaggtgtggttgcaggagtgatttcatgcagagtttggatagtacattcggtctctgtgaggttgagagcaacagagagagaatttgttagatcatccatagggtaggaatctaaaatgtagtgagaaacctcagacagtaaaggtcctggcagagtgtggaatatagaaagtgattgaataaatattaaaagacacaaaaacttgtatgggcaaaggattataaccgctcggttagtcagggaagggaattttctgggaagagaagagctatgaaagatagacacagcttcaggtattgtagtaataaaaagccaagaaacaactccaaaaataacacaaacacagagaaagggattgttcgaaatggtactctgagagtataacaacttatgaagagaaagaagaacaagactagaattatgggtccacgggtggagagggtaacgagaagatgcgagaaaaatttgcaaaggggacaatcggttgatactcctactagaacataacctaatgatcaaagagttttgcagagagagtaagttagattttactaaatcgcacacatcaaagcttctcctaggcttaactatatataggcaaataccc

SEQ ID NO: 58821 - DNA, 2034 bp, Cannabis sativa
  modified_base (1994)..(2009): a, c, t, g, unknown or other
tatatatatgcagaattttaggtaggaaaatcacttttatcatagtgtttttaattttaagcacttaaaagatattatatatattttcattatatatatgacttgatataatagatattttatatgtttttgattttttttttaataattcatgatgtaaaaaattatgttcaaaataaaaaaatatgcatgtaatgtaactagatatttaaatcttatttaaaattttcttaaaaaagaaatagtatgtccaatgatgaattaatgatgtcgtataaaaagaagaattagtattttttgcgtcctaaacttttgatacaacctcataattctgtctcctaaaatatacgtcttgttaaaaattctccctaaaatataacagttacataatcaagtcccttctgttaggttatatttcttttgccgttaaaaattaatatttttccccattaattttgtccccttttattaaaaaaattaaatttcaaaaattataattttctattaattttgaaaaagaaaaaaattaaaaaacctaataaaagtattaaattaacaaaaaaaaatattaagttcacttaaaaaacttaaattattcctaaaaagataataatttcaaactttattttatttataaacacatatcttaaaaaatcaaactaaaattattatccaataactaatttaaataacaaactaagattttgtgaaaagaaaattaaacttatttatatttacaaactcttatcttaaaagtaaagaaaaataattagaaattcaataaaaatataaaattatttgaaaaaatagaaattaaactaaaagaatattatgtttatttaaacaaatctagatttctagagaaaaaaactagactttattcttgtaaaatttagtttttaaaaaaagtgaatttttaatgtacttttttttttaatatgtaaatggattttttaataaaaataattaattttttaaatcacttaattagttttacaattttaatttccttaattattaaaaataattttttttaagatctaaattaatttttcaagatttattcaaaacaaatgttaatctttttcatttttatttagagaaggtatgttttaatagttgtcaatgtttaagagaaaagttaataatttacaaaaacacattaatatttaaacggaataatgagacagaacctaacaaaagaactaaatttttataaatgtaaatttttttaaaaaaaattaaattgctaattattcataaattacaatataaaaataaaaaacacctacaaggctacaacatgaggaaaagtgataccttacctaataattttcaattatttaagtagataatggatgcatttatatgctcttgccactaaactcaattaaggaatctaaaactcaaagtggggtatgtttctaagtataaatcccaaataaaaattaatcaacaagttatttgaaaccaactatatagtcataataaaatagtactatatatagttgccatttcttaccattttttctcttctttcttttatggcttaacaaaaagagccaaatagtctataaggatgtgtttgtgtgtgttgatgttcttttggtccaaccaaatagaatctttaatcctcataactcccacgcacgtccgcacgcttgcccactttatttgttattctaattagtaaatgctaattaatatcttgttttatttaacaacattgctataatatatcattagtatttaaagacagtattttacaattggttgtcgatattttttaaaaattattatattaaattatacgagactcgatacttaattgtactaatattaatatgacatgttgaagaatgctaaatactaatagtatcttttctttatttaatatatatagggatatgattttgttccgttattgtactttcacggattgtaatacatacgacaaccgtcagatgagtgagttatttgatctgacggctgannnnnnnnnnnnnnnnattagggttaaaaagtagaaacgta

SEQ ID NO: 58822 - DNA, 705 bp, Cannabis sativa
ttattcgttgtattgatgtctagaatgttagggagtttagggtttgttagatttttgaattgttatttggcttggaaaaagtttaaattttttgatccaactagactttgtaatgatctcatgggcttgtttgtgggccttgtatttgaacataaataattttggtaaattgataactttgtattctagtgagttgagtgctagtgaaaattagatgtaggtgatattttattgatgcttatctttgtaaaattgaatgatagctataccatacttgtgaaattgaccgtagataaaatttaggttgctcatctgtgtgattggggtgtagtcaaaggcatagccgtcgactctctgatgcttaagtcagtatattattcatagaaaatataatacaaaaagaaaaggctgagttagaaataatattgttttagatgagtggcattccagttgttgcctatttctcgaccatcctctgcttgaagtcaatatgccccttgtcctattactttactaatcttataggggccttcccaattggggcccaaattactagctcctgtctctttggtgttttgaaatactcgacggagcacccaatcaccgtccttgaatgttcatgcttaaatgtttttgttgaaatgttgagcaaccttctgttggtatgctgcggctctgattaaggctttctctcttttttcatca

SEQ ID NO: 58823 - DNA, 1626 bp, Cannabis sativa
  modified_base (1003)..(1006): a, c, t, g, unknown or other
  modified_base (1453)..(1460): a, c, t, g, unknown or other
tttgttttaggggtaaaattgtaagggaaaaatgttttaagtatagtttgcataatgtaaaaaatgctagcatagttttagtgtactatttatttttaagcatatattgtcaaatttcccaataaaaaaggctcaagcaattagttatatggattgagatttaccaaacaaagtggtttcttaatttgaatatttaaagccagatgcatcccaccagctgcaattaaaatagtgtcaccaggcttgaagagaaacacatatataaaatgactctaatgaaaaagttacatttgcaaaacaaatttttaaagcaatttaatattattatcaataggattctctttctattcctatatataatatgggtttgtgcactgtgcaatgataaattcatggaattacactaagcagccatgaaagaccttaacagtagctcaagcaaccataaactaaatttacaccgaactaatgatagtctgcaaaattaatggggaattcgccaaactaacaacatgaaagtgtgaaatttactaataaacatttattcaattttacaaaacactcaaaatgaatgaggttatttttgttttttttttctttatatatatataagaaaaaccaaccttgcaacagctacaactgagtcaatgtttgggaaaacgccagctttggattctttaagagaacgatcaactcgaagccatagtcgaagatgacatgccaagtatccccatctgtcgcaaactagggctgtgttataccgatctgcaaccacacatcatctaatctaatctctattcatttatttatatataattactatcaaaactacttcactttcatttctttcattccccaaattattttattctctagagattaacatatatctcactgctaccaatgtaaagttttctacaattttatatgtgtttaattcattattttaggaaattcatgtttagagtgttagattatagaatataatcaacatacatgttannnnatctagatcttggtaaaataacttccaatagagagaatgaatcttattttcataactctagcctgacaaaatttaatggtagataattctgttctcttatttcttctaattaaaaattcactatactaaactctttctcaatattgttctaaggtattttgagtattagcccacactattcaagttgatattcaggccttttgtggaagactgtgatgaacacagtgaaaggagagaagatctaggttcaatttttggtaatactctacaacagaaaggaacaagagttagataactgaacgaaaagaccgcaatcaatgtaagattttcttaaatcccttatgtgtcaatttcattattttaaagtatccatgttaggatgttagattagccttaatttaaagattaaccttaatttacatacatgcactacaaaaaatcttactnnnnnnnncaacaaaatttgtgactaaaagtgaaaaaaatgtgactatttataaatcaccatttctatgttgtgactaaaaggtctgtggctaaagatattagtcacaaaaattacaatttattgtgattaaatgtatttttagtcacactacttgttgtgactaaaactaaat

SEQ ID NO: 58824 - DNA, 769 bp, Cannabis sativa
ttgcacgagatcgtgtggcaaagagttgagcaaatgttgtccagatctcggatgaagtgtggcagtgaataacatgtcgcaacatgtgtgttcagtaaacagaatattcatgagagccaatgcatcaagaattgatcaaaacgaatccattgttgaatatcggattgggaatattacctgcaagaatggctggaggttggggaatggtgccaagaatatagccatcgagatcgtaagcacgaacagcagccaataccagagatcgccaaagagtgtaattggtacgatcgaatctgaggtttagggggaggagatgattgttggggaggggaatttgagcttgtggttgttcgatccttattgcagctggtggatcaatttgtactccatggccattgccattgtcgccattgtcaccttgagtagacatggctccgataccatgaaagaactctggaaacagagtttttgagcagagaaaagagagagagatgaaagtagaaagtgatgaattgaatgctcaatctccaactgattgagaacttttatatttatattgaaggagtagtacagaccttatacaagaaaggaaaactttacagagactaacaaacctctaacaactctaacaacttaaaacagaaaaatactgacagaaaaataataacagaatttaactgatttttacattctaacattaccttcataacaaaacgaaactaagtttggtactgatttaattgtgacaaccttgattatatcactctcc

SEQ ID NO: 58825 - DNA, 1097 bp, Cannabis sativa
gtagtaaacgggctatgtcgtatccacagggaggcaaattaccactaaagattagtttagtaaataaaaaaaatgatagaaatgtgattgaattaaaaataataaaatggtgagtgaaaagggatgatcagataaagaacttagtaaggtagagatgccatggaataaaggagatgtgattaggccattgaattgggctttcatgccctcttactcactttgtactataaatctgaaaaatgacataaaaaattaaaataaattaaatattttcaattaaaataattttacaactagaactatgaaaatatttaattaaattaattttatataaacaattaaatgcttaaaatgtataaatttgagccttaatcacaacccccaactagcttattggtagtctctagcaattcaagcgaaagaataataatgtcaacataatatttccaagtcaaaaattttaaaaatagcacaaatattcaagcaaaatattagtaacaagacaataaaaagtatacaaaattacattgaataaatctagagttgtaagtgtgtgcaccaaacctgaactttcttacagcaaaaccataacacataaaaactttcgaaataatataccaagtaaaagtctcaactccattagcctcacaggttaaaaaaatttattcttggctaagaatttcactcatggagttggaaattgaaaagtgagcacttgaaatgaaaatagatagatcaaattaggacgaacatttgaatagacattgaaacaaagataggttataaattatttggacaaaccaccataaagaataccacaaagcaacttttcgggacttttaagcaaaaatagacaatcttttacatttattataggagccataaaaaataaataaaaaataataatctactacaatttttttgaacaagaggtaacatattagacaaaagaatagaaatgttgctcttgcaatttttttcttttcttttttttttcttttttttttgaacaagaggcaacatgttggatataatgatggaaatgttgctcttgtattttgtttcacttctctcttttttttttcacataaaaaaaa

SEQ ID NO: 58826 - DNA, 807 bp, Cannabis sativa
tggaaacatttttggaagctaaatattccttctaaggtcagaatttttttatggaaagctgttcaggaatgccttccagtggctgccattctgcagaaacgccatattgcaggctcagctatctgttccctttgccgtggcaacaatgaatccattgtccatgctcttttcctttgtaaaagagctaagaaagtttggagaggatcctccttttcgatcgatagaataattcatgaatcctcaactttcaaggaccttttctttaaagcttcggaaacatggcctcaacaagaattggaacaatttgcttgtattctatggagtatatggacagagagaaataaagaatatcatggaaccaaacctaaacctcatgaaatgctccttgtttctgctctttcatatttaggggagtatcaagcatctcgacaggctactcccactcatctcaggaatgaggttcacagaaataatgaacctacagtagcgcctaagtggctcaatcctccttctggtcgactgaagcttaataccgatgcagcagtagataatgtgaaccgtatttcaggttttggtgcaatcctacgtgactctgatggtcaagtggtggctgcaatgtctaagcctcatcctggttgtttcaaacctgaagttatggaagctttggctcttagatatagtttgcaatggcttcaatcaatgaatttacctatacactacattgagactgattctctcttagtggttaaaggattgcaagctcggagtcttaatgtttctgattttcatagtgtcttaaatgacatt

SEQ ID NO: 58827 - DNA, 1170 bp, Cannabis sativa
tggttgttcatcaggaactagatgttgtcttatctgctaccttctgtgcaagaagatccatgagcttttggcactgaatattagacaagctagacacgagatctttctcccctgagccactgtcagttttctcatcatccacaccagtaaaatttgcagaagctgaaccaggtttagtctgagttcctttggcatttcgattgggaaatttcccatgtaatttatgccgaggtggatacccattcaatctgaaacatcgatctatcgtatgtccattcatcccgcagtgtgtacaattgtattttgatcgaaaaggctgcacagcaccagcaaactgtccagcagaattgttcaaagaagtatcaacatcgttggaattagtagatccaacaggtccagatgtcaagcttctttgtctttcttcttgaataactgcagcataagctttattcacagtaggaagaggatctctcatcaatatctgtgaccttacattgatgaaagaatcattcaaaccaaccaaaaattcaagaagtctatcctcctcttgctgttcgagtataactttcatagcaccacaattacaaacaggttgtggtctaagctcacgaatctgatcccataaagatttcaatctggtaaagtagctagtcacactgctcgaacccttcacaagattctgcatagtctttttcgcatcaaaaattcttggagcgttcctttcattgaacgtctcatgtaactcagaccaaatatcagctgcattatcaagatacatgatactatcagcaatttctccagaaattgcatgaagtatccaagagatcacagtactgttacatctgcaccaaccaagcatcaaaaaatcttcattcatgcatgttcctcatctggttgtggaatcttgccattaacaaacttcatcttgtttctagcaacaagagcaatcatcatagatcttctccaggtactataattttcactgcctgttaagatcttcggtaccagaacaacagctggattgtcagcattcgatagaaagaaaggattggatagatcgtttccagtgctggatctcgagttttcaccaagaacagagtacctgtttgaatcgttggatacattgccagtgtcacgattattacgagtctgagctccaccaccacgtgc

SEQ ID NO: 58828 - DNA, 941 bp, Cannabis sativa
gggtaattgcaagcttaccaggcatggagttggcgatgtgagtctgaatcttccaccaccacaagattgggagcaaatgtatgatgtgatgcaggagaccattcgagttgtaaagatagaaaaatttatacggttaactcaggtcagcatggtgacagagtgataccaaattggactgatcggtaaagtttgcttttgatgaattggccactaaggccgctaggaaagttagattgattcagaggttggaagagcatatcacctgggatgtggttataatttccaaacaacatgggcttgttcgaacctatgctcaggtgattaagttggccattgttgctgagggtgcaaaggaccaaattcgtaagagaaatactatgagaagagattcatggatacaaacatctaatgttggtctcggtaagggtgctgaccctagttatcgtaagaaaaatcctaatgaatcgtcaactacaagaccgaataagagattccaaggtaaccaaggtttctgacatggtggaaacaaaaattggttaacttatccagagtgtctgaggtgtaagagacaccatcatggtgaatgtcaagctagagcctacttctagtgtggggtagtgggttatctaagaagaaattgctcaactgcaacatctagatcaaaagaaggatggcactttagctcctactcagtcattttccttgacccaagtagaggccgatgctggcccttccattgtgacagaccagcttactattgctagcacattattgaccatattaattgattctggtgcgacacattcctatagttcaagtagagtgattagaaatttacatagacctagtgatgttttaccgagtggtttttgtatcttactgcctactagagaattggttatttccggtaggtgggttaggtcccttccagtgtttgtgga

SEQ ID NO: 58829 - DNA, 1853 bp, Cannabis sativa
taaactactcatgttcttgattatgcatttatttatgtgataaagtctagcatgccaagtattagaagaacacaacaacatataaatagaagcattaactttattaacttgggcattctacttaaacatttcctcagtttcattccccttccctaaaaatatcctatttttgcttagagtaaacaattcagcccctatagtttgtgtaaaccccgtcttgtttagaaggtagcccaagaccagattttttctcatctctaaagcgtgcatcacatcttttactatcatagttcttctagtggtgaaattcaattccacatttccactagcagcaactatagtggcgtgggagtcacccaacaacactttctaatcctcagtagcagcaacttatgttttaaacatagttctatcatagcaaatatggcaagaagcgtcaatagctacccaccacctttcagatccaccaatgatgttgatctctgaaatcatagctgtaaatggcagctcttctgtcaggttagcctacagagcataattaggcatgttcttacactttcgtgccatatgacctggcttgttacagttgtaacacatgaacaaacttgaatcatttctattaggggtacttgcttcctattattttggttactttgatggttccaattttcattgttattattagttcgaggttgattgttgattcaaattctcttttcaattctaattcttaaagttgttttccactgggtttcagaacagtaatgaatcttttattagtgttgttgttgtttccaacaacaagaacctcttccttttggtcttgtatcaagtttcctcctcaatttgaaggcgctcgattagactttccaatgaaaattcttttattttgtgcctgagagtatttttaaaatctttccaggaaaggggtaatttatcaatcattacagtaacttaaaattgttcatcaatagtcatacatttagacaaaatttcgtgagctattttgtgaggctcgtgagactaggcttcaactgatttatcatcggtcatttgaaacttcaagaagtggctcacggcatatttctttattcctgcctcctcgttataatattttttttgtaatgcttcccatttttccttggcagatttgtcagaattgtagtaatcatacaaatcatcagataaaccatttaaaataaaattcttacacagaaaatcattctctacccaggtttcccttttccttaacctgtgattcgtacttctctacttcatccttcttctcagcaagaggtggaatctcagacacaactagtttcaaaacagtcagcacaaacacaacttttttgatagtcagaaaaaataacatcttctatctccaatgtttaaaatacaaaacctcaaaatgaaaaggcttataaatgtcaacagtagaaccagaaaaataatttgtagtattcatagtagaatgaacgtctaaaattttttgaacagactgctactgaaaataaaagagcatcgatattactgtatgaaatttctaggttgagtcgcagactaggtcgctctctttaagacgttcacggtattacccaggaatatgcaagaagtcaaaaattgtcgatcatccaaaagataaaagagtccaatcaaaataccacagtatcggagctctactgcacgatagagaaccatcaaagtagcagaccaaaaaactactgctcagaatacttatataatataatcataaatataaactgtaaaggtttttttctgtgtgagaaaagataattttctcccgtttgttctaatgcattatacagggaatgcatagaaggtagtaataggaa

SEQ ID NO: 58830 - DNA, 550 bp, Cannabis sativa
agatcttttatgagggagatacgaaatttgaagagattcattaagtaagatggaatagcttgtaccattgtcttgatcaaagtttctttacctccttgaaaaaaaattatgttttccaattgaagagcttttgccaaacattatctctgacatgttggaatagagtcttcttggtccttcccatgaaacatgacagacctagatgtttctcatgtagaagactctccaaatttgaagtatgttacatatctcccttatcaagtccttggtattcccatggcttatacagaaagtcgacttagcaaaattatccacttgacttaaagctttagcataaatatatagtgtcatccaaaattttgtccacctaacgtggcatgtccacgtaagccaagacagagtacatgtggaatacagccgtgccaatagcaagacaaagtctccttacaaggtatggtaaaactgtcaagtagcaagcgaaaggagttaagtgacttgtcgaggagttataccaccatgtctggtcggtcaaggggagtctatagaccgg

SEQ ID NO: 58831 - DNA, 1203 bp, Cannabis sativa
  modified_base (802)..(806): a, c, t, g, unknown or other
ctcctaactttgtatataaatacaaattattcctttgaataaaatctactattcatttaccatattttacatggtatcaaagcagattttgggattagaatttgaaattcgaaatcagggtttatctgaaattggagttctcaattagggatcataaatttgagtttttcagttagggttcatttttcgaaaaccatcttcataggaatcatttattctcaccgcccacttagagaagaattgtcgagctgccgcgatctaccaaaccccaaagttcggtcgccggattcctcgcgtgtgtggctcacatgccgcttctttctattgcaacctaccccacgcgccggcgcatggaggcgtgtgtgacagagatttcgatgacaaatcatcatcggttcgtttcaggttcctcttaaacctactcgcgtttgttcaggttgtagtttggtttttctccctactttttctttaggtgttctttacttgttcttcgttgttcgactctgtcttgtctctttcgatatttgtttttgaagttatggcagagacaaaatcagatccaaaaccactagttgtttctgatgtggttcccatgatgtctagaatcacggaccataaattgattagttcgaattatttggaatggagtaagacgattcgactttatctaaggagtattgacaaagatcacacttgactgatgatcctcccaaaaaaaagatgatttaagaaaagtgtggctatgtgaggatgctcgcttgtttcttctaatctgaaattctatcgataatgaggtaattannnnnattaatcattgtgaattggttaaagaactaatggattacttggggttttcgtattctggcaaaggcaacttgtcttgtatgtatgatgtttgcaaagccttttatcgtgcggagaaacaagatcagtctcttatgaatgactttatggcatttaaaaaaacgtatgaagagcttattgtgttactgcaatttactcctggtgtgaaggtgcaacaacgccaacgagagaagatggctattatgagttttctttcaggactctcatctgaatttgactctgcgaagtcacaggttccttctggttttgatgtctcctctttacaagatgtgtttactcgtgttcttcgcacaaaaactacctcttcagctcctgttaatagcgccttggtgagtcgta

SEQ ID NO: 58832 - DNA, 1146 bp, Cannabis sativa
acttaaaaatttaatgctaaaagtggagtgaaagataagaagtaaagtaagtaatagccaaattcgattagatatacagtcatatatattaaatgcctctcaattaatttaacgttacataaattaacttcattcttttaccttttaacatattaatttaacatattaatatatataacgttaggtatatatataatatatttttatagattagtagataaatatgtaaccttcttttgttattaaaataaataattaccccaacttggaaactacatttccacgaatgtgaacatcaaataaataaaatcatgtcactataatttactttatattttcaaaaagaaaaaaaaaaaaaaaaaaaaccctagaaaaagtcacttaatttgaccaaagaaaaaaaaaaggaaacaacaaagaatctgaggtcccatggctcctttctttggctattagtcaagtttaccttagcctctcttttaacccacgagttgtttattaaaaaaataattaaatattttttaatttttattttattttttgtgtactaattaagattttagtttttttttttttttttgtctaaatttattaaaggaagcttgatgtgaattaaaatttaggggacaagatttaatatatattaaaatttaggaggcacaatttaatgtattgttaatgactaaactagtaaaattaaatgaaattagaatgaagtctttgaatctaagttttgagacatgatttgattcatgtgaaattttgtctaattttactaatggaagcccaggcatgaataaaagtttaagaaatacaattaagtaaatatcaaaattcacaccaatctataacaagatatcttataattaattagcagttttctataatcgttattaaattaaaataaatgagactcgcaattaatgactttttaagttaaaaataattttttttctaataaaaaagaaaaaaaaaactatcatttaatcattgtctatattaaacaacactttacatgaaattaatcttgaaaattaaactacattacatatgtagcaagacaactctaacagacaatactctaagcatcagtagtgttgtttaacatttttcaattttcgggactaaaaatcccaattatttaat

SEQ ID NO: 58833 - DNA, 628 bp, Cannabis sativa
  modified_base (266)..(270): a, c, t, g, unknown or other
ttttgccaaatatctagaggagtgtggaattgtcccgcagtacattatgccaggatctcctagcatgaatggtgttactgaaagacgaaaccatactcttagagatatggtaaggagtatgatcaatcattcaaccttaccagaatcactcttgggagaggcacttaagacagcagcctacattttgaatagggttctaactaaagcagctacaaaaacaccttatgacctttggacggggcaaaagcctagtcttaagcactttnnnnnttggggatgtccagctgaggctaggccttataggcaaaattaaaagaagttggaacccaaaaactatgagcagctattttattggatattatgagcgatctaggagtttcaagtcttatgatcccaaagtaagaaatatatttgaaacgggaactgtaaagttttttgaggatattgagtttgggggagaaatattgttaaagactttattttttaggaggatttagaatcaaccactccgctcgaagatgagttgattcctattccattagttacttttgacaatgttcaggattccaatcctaatattgatcaagttttagatcaagagcaaccaaacatagcaagcaaaccccag

SEQ ID NO: 58834 - DNA, 1131 bp, Cannabis sativa
aaaaaaaaaaaaaaataggaaaatctagggtgctcttaaatgtcccaactactagactagttcccaaccggaaaaccagttctgagggggtctaccaggggacgaactagaagaccggttcctacagatccaattgaaccggtcgatcgattcagtgcagaaaacacaaattcccttttaaacaactcaaattgaccccaattcaaaccaaactttctagagtacctaatagggccataacaagtacaaatcatgcaataaaaccacataataacttcaaaaacaaaaaccaccattggagagtaaagcttgagcttttaagctcaaacctcacaatcagcctccaatcaaactttatctagcctaaataacctcaaattcactttagaaacaggaacaacaacaattaaaatttgcagaaccctaagtccaaaattcatgcataaaacctaacttaaacataagaaaaacaaaaacaaaaaaaggagctatggtgtttacctcgggttgaatctctaaaaatctggttagaataccttgaatcaagttgagaaaattctaaattgctgctggtttctcaaggaatcgagagaaagagagagtattggagagagagagaggaagttttatctttctaattttctaatttttgaataaaaggataaatcttattacttatctaatctatttactaaaaacttcatattataaatcataagataataccactaaagtacaaaaaaatcaaatggcaaaaagactattttgccattgcctaagccaaagggcatccttaccacctcggggtaatttgattaaaactaatacctcgaataatcatgatataaccaatattaatctatattttcccactataactaaaataataaaccataagaaaatgtgactctattggccaaacattgcgttctattgttaccgagcatagaatatgaaacacatgaaaatttatatataggataaataatacacctagaatttacatatatctctataaattcataaattataactaaaagtctaattctgagtaaaaccctaattatctcttaattttcatattaaagttaagcggtctttacacaaaacttccatcccggagttcccaaa

SEQ ID NO: 58835 - DNA, 1195 bp, Cannabis sativa
gtagttttgttgcactgtcgtaagactctaatagagtagcgcgctcaaggtcaattagctcttaattaatatgaatcacaataatggttataaaaaaaaaatatgaatcacaataattatgtatggtggcgttgtttttgagaaatattaaagagcactaatggtgcctagtgtcctcttatgtgtcaatatcgatataatttaatataatagtttttaagaagtatcgttaggcaccactagtacctaatagcaatgatctttgtttattgccactcttgctgatgatatatgatatatgatatatttatatatatatatatatataatttttgaaaaatgatcgatccaatgctcattaaagaaagaataatgtccacattgctgatgatattaattattgaatatattgcaatcttttattgagaaaaaaaattaattaattatagtagaattatacaagtgtcacacttgtatattttatattaaactgatacctataaataatgctagaaaatagatatggatactgatatgttcggtaagtttcttttcgagattggacaaatctccaaattaatgcactaactctgatacccaagcgagctccactttccttcactctaataatcttcgattgagtttgccattattgcttggaaactttgaaccatgcatgaactctaccagattcatatcaaatttgattggcattacgaacgaagtgtcaacattcgattgaaattttattcattcacaatcaataaaagtcattttttgttttgttcaatttcgcaatatagtataagagcaggaagaaaagctttctctcgatcttgactcctctccggcatcatcaccgtgtgttcttcttctctggcaacactctcaccagttggagtttcaccttgctctgcgcttctcacactctcactactaaagaaaagtggattctccgatagttttaaacagtcagctaatgtattattgtccgtctctataatcgttgctatttaaccgttgcaaaatgtaatagaataggtgacggtttaaaacagtccgtaaaaaactctattggctgtttaaaaccattggcaatagtaaacactatagctgacagttttaaactgtcatattaaaaagaactagatcgctttaaactgtcacattaaaaaaaaactagatcgcctagtca

SEQ ID NO: 58836 - DNA, 998 bp, Cannabis sativa
  modified_base (28)..(42): a, c, t, g, unknown or other
  modified_base (72)..(86): a, c, t, g, unknown or other
ttaaaaatacttagtacaattaaagatnnnnnnnnnnnnnnnaaaatacttagtacaattaaagatataaannnnnnnnnnnnnnnaaattattaaaatggggtgtacttaggaatttttggggtgtaaataaaatttcccaataagaaaaaataaatatgataacttaaaatattacgaaaaaagaaattagcatgcccatcatgtactttttatcattgtgatcattatattagaacctacatagggataaatttcacaatgttttcaccaaaaaaaaaaataaaatataaatggaatattattatactaaaaaagttgatgatgaaaatttgtcaaaacaaatatcaacaaaattttaactaaacgaatagtttaatttcaaaaaaaaaaaaattaactaaacaaataccgttcttcgttcttcatcgcattttactcagcatcaatattataaaatatattattgtaaggtcattattatatttacacctcaaaaatctatataggtagctcaatatgcaatctaccttaaagtaatttttaaaatttacacttaatatatttttatatcaaatttttctcatatttcttttaaataatgtacatttattaatatctttggtacactaatgaaattaaatatattttaatttttttatctaaaatatttaatatatctattttttgtagaatgtgagaaataagaaaaagaaaaagtagatataaaataaataatatataagtcatataaaaaataataataagagtattacttttatattttataatggtatgggatgcaaataaaactatcattatttatgcttttagggcggtgcaaatgaaactgttgtatacaattaaaattttatatatattataataatattttataaaccgcacccgcacggcgaaacgatagaactgcttgtatacaattaaaattttatatatattataataatattttattatatatttattttaaaaaataa

SEQ ID NO: 58837 - DNA, 910 bp, Cannabis sativa
ataaatcacttcaaatttcttatattgataactaattagattgtaaagggttttatttagggcacaaaacccaacagctcagcctcctcatcaatcaatgctagctctaccactttcttgtacaaagtgtcatgtgaagtggtaatattcaagtcccgactgattttggtgttcagtcctctcacatacttttgttttctggtgaaatctgtaggcaccagatcaccagcaaacttagatagtcgatcaaactctagggtgtattcggcgactgacatctttccctgagtaagcttcacaaagtcttccatgtgtgaagttctcacaacgatgtagtaaaacttttcctcatacaaacttttaaattattcccaggtcattacactaacatcccgggtttggcccatgatatcccaccagacgcaggcatgatctggtaacatgaaggctgcacagctcactctttcagttcccggatattatccaggatacgagtaatagtgctcatccattgctcgaccttaattatatcaatacctcccaaaaaagttgaaggttgcggcttcacaaacccctcaaataccgagtctctatgcggcatgagaaacccctggttacccaccactggcacaggtgctggtggtaacacttgttcaacaggggtagccggagccggttgccttaatcatcgcaactcttcttcttgacgaagtataatacctggcattttttgaaacatctgctgccagtcagcatgaggattagcattaccaacccccgcattatcccccgaattttgcggaggtggaggcggtgccgatgggtttgtttgggcattcccaggctctacttgctcgccctgtggtctagatgattgcatggggtccattactagtacccctgtaatcaa

SEQ ID NO: 58838 - DNA, 2246 bp, Cannabis sativa
  modified_base (1819)..(1821): a, c, t, g, unknown or other
  modified_base (1932)..(1954): a, c, t, g, unknown or other
tttctggtttctgacccatctagcacttgttttctgcattttttttctagtttttgacgatgtcgcgaaacatcgcgaaatcttgaaacatctctaaatgtctccaattcacaacaatgtttgttttctgtattttttttttatttttgacgatgtcgcgaaatatcgctagatgtcgcgaaacatcgcaaaatcatgaaaatagatctctaaatatctcaaattcacaacatcgcgaaacatcgcttaatatcgttaaatatcgcaaatcatcactaaacttcatccttgacctcagatttattctatcattgcaaatacatcgtgaaatatcgcaaaaaactggtaaatcagaagaaaaagtgcaaaaaacgagagaagttttttttgaaatgtaaggcggtcgaataacattagctccggtgatgggtcgtccgactagtagagtgtgtgcatgtgtgtggtgtgagtaccctagagagagagatggatgtttggtttttatttatttaagggtaaaattggatgagaaaaatggtgtaagtatattttgcatcatgaaaaatatatttttcgtggataaattaattttaagcatataatatcaaatttcttattttagtttagtatcaaataaaatttgtacaatatatatatatatattcaatactaaattttcttaggtcgaaaattatctataatgaaatgtcaaaataaaacaaaaagtactatattaaaattaagaatattaatacacttgcacatattaaaattttaaatttggtaaatattttataaaacaaaaaatttatatggaataaaatagttttaacaaaatctaacacttaactagaggagatcgcaaatctcaacttctactttagtgataaaaattatcaattagtgaataactttgagccaaatgtgtaaaaaatataacaataataagtgtactaacttataggtaaaaaatatgaaaaagtagttgaagaagaaaagaaaaaaataaataaataagcaattgtcttattttatttaacttattattaattttttatttatatacttcattttataaataattatatataatgggattccttcttttggctgtggctccgcccctgggtcctagattacttcaggatcctagagttagctgactatagtcttcttttttgtattggtcttgtttagctataaaaaaggacatgtttcagtaagcttgacaacttataacacgacacgacgatacaacttgaaaataatacgaaataaataagtttaggtgacacaattaatttttgtgttaaaatcgagtcagcacatttatcaaatgtgttacttttgggtcaacacgcttaacttaaaaaatatatgattataacacgtgtaaaaatatataagtatttttaaaaaaaattatattctatttttacaacatattctatttatacattggataaatagaaaatatctctatacatgaatagaataatgatacaccaatcaagtataagctaaatctataaccaaacaagaataattaaatctaacaaacctcataaaaataatttcttctaattttctttataaaagaacaataataaattaaaactctgaattttaagagtgataattgtgtttatatacataattatgttaattgttactacaaaaaactgctacttttagtgataactttttgatcacaacataattttttttaactaaatatgacttttagtcacaaaaaatattacctatgactaaaatatagtatttagataaaagttgtactaatttagttttagtcacnnnaaatattgtgactaaaaatatattgtcacaataaattgtaattactgtgactaatacatttagtcacatactttttagtcacaacataagaatgttaatttataattagtnnnnnnnnnnnnnnnnnnnnnnncaaattttattgtaactaaaagtattttttttgtagtgcgtgtagaattcatgtcatgtaatagcatgtttaatcgtgtgtaaaacgtgtcaattttaggtttgtgtcatatgataggtttattaaaagttatcgtatcgtgtcgtgtgacttgctaagaaattatgtacgtcatgtttgtgtttggggtcttgatgttagggttataaaacacttaaagaaatatataaatcacagatctaaacatattcctaaagtgctttaatatagaaaaccctaaatcataaatcta

SEQ ID NO: 58839 - DNA, 1015 bp, Cannabis sativa
  modified_base (157)..(162): a, c, t, g, unknown or other
  modified_base (263)..(263): a, c, t, g, unknown or other
acgtacaaatatcttgtgtcaagtgatttaattttctgcaattatttttatattctatcagttctggtttgtttctgtaaaactggtttctgcaataacaaaattacattctgccgctgtagacgtatacagttttatatatatatatatctattcnnnnnnaagtgtgcctatataacagaatttcttggtttatgaaaaatttatgggtgattttttatttatattaaaaataaaattatttattattaaaaataaaatantttatgagaaatttatgggtcactctttatttatatataataaaataaatcttgacagtactcttacataatccaactattctacaccatattttgaatagttatcaatatgatttagggtatcgctgaaagtgtttcataaataattagttctatgcatgcatgcgtggatttatatataagagtttttatgaattataattttgatactataaattatttgaaaattaatttaaatacgtgtttcataaataattagtttcacgaaacatagtttatattccttcaatgatgaaaaaaaaaacataatttagatcttgaataaataaaaatgacaccttaatttaaaaatctcactatatatatatataaatatatatatatatggagagaattattataaaaggaaaagggagagttgtttgggcatgcatgtttagttattattacaaaaaggaatgccaatcttattaatttctctatgtttaagttattaatacaaacaaaaaaaaaaaaaaaaacatttactaaaactcaccaaaacttatcataattaaacatgaggcattagatgcaaaaaaaaaaaaacaaacaaattagagagtacattacaacactatttttgatcatgtgctcataaattagaagcacaattaaatatattagcgaaatagtgattaatatctaaatttcagagttgacgaaaaatctacaactgaatgaggtaaagactactacaatatttactttat

SEQ ID NO: 58840 - DNA, 990 bp, Cannabis sativa
taatctgttgggtggtcctggtcgatgctgtttactgtttatggttcgatatcccggccaaatactcatctcgtgtgttgtcttttgtagctgaaccctagtgagttttggggaggcgaatactgaattggccaggatttgcctcaacttctgtacgaggatcaaccttgtcttcttgacagtccgtccttttcaagtgatagactttctaactcgagctttgaagattgggaggtgagtagtgatcgttctactactctagaacccgtagtgaaacatcgctcctactccgagcagatcacaggagaagggtacgactgcttcattttggaattgaggaagggttggaggcattatcttccatccaactggacatacattgtttggccaggtgttgctgatacccttcctattagccatccaagttctggtaactttagtatcccaattgctctccctgccatcgatgttgcacgatacacacaataatatccgtccaggaagaggatgatggcccgcacaaagaagacgatgcaaaaagtcaacgcatctgatcctcatgtggctcaggtcgccacattgccaagtgccgagcaggatccgcccgccatgaggagaaagatcatgagggggacattgaggtccagcagatagaggagtaggacaacgtccgtcctggtagccctcctgaggttggggaggaacgagtggttgaaactccaaattttggaatgtataatgaggccggggagccagtgtctgcgagggtgacgtcttggttgagggggaggactatgtcaccgatgagcttactgaagcagttccccacaagaggcaaagtgtcttaggtgccagatgggtgacccctccgtccaaaataagtgaggcacgcatgagggccgtaggtaaggctgggtacctgggcgaacttgagtgttacgtctcctcttcgaaacaccgagcaagtaacccacaaaaagggttttgtgc

SEQ ID NO: 58841 - DNA, 1150 bp, Cannabis sativa
  modified_base (40)..(71): a, c, t, g, unknown or other
cataaataattattttaatatcaataaataattttcatannnnnnnnnnnnnnnnnnnnnnnnnnnnnnnnttaagctaagcggtctttacaccttcaaaactcctcccaccagcagctccagagaagagtcattgtcagcaccggccagctgctcactaacctcaagaaccaaccggttcatatagtgagcaagcatcttcttgcctttcttggcctccggaagcaccggcaaaggtgtagtagaggtctgcaccagctcagacccacctctcggttggtcagacctgtccgaactccctcctcgagaatcctttgactgggcaacttttggagtggaggggtttgcaaccgctagctcctcagaaagattgatgacctcctcggcaggcgtcttttccttggaagaggttccctcactgcctttggacttcttggccgagggagatgcgctggagccttcgccaattctcttcttcagagcatcaagcatcttttgagacatgtctgcacaaaataaaaaaaaacaacattgttagaagaaatagacatcagaaacatgaagcataatagtcaagaagcttaaaagcaggatggagtattatgcaagatgattgctcgagcaggtctcgaaagtccatcggacctgacatgcctctgatttcggacataatagctttcccttttccgagcacgagaggaggcgactgagcaggagagatgggctccctgatgtgaattgcatgttcgataggcctgggctgggctggaagttttttcctccttttgagtggagtcacctgctcttcctcagcctcatcttcaagattcaagggctcctgagcatattgcttggcccttgcacctcccttcaacttagcctcgtgctttagttaaatcaactcattctctagatgagctcgtttagcccatccagcatgagatttcctcttcctctccctcattgtcttgggaatgaaatcctttggatagagcccgtacctcacaagattatcctcagaggtcaaccggatgatattccggtcttcccctggcagttgagcaagcttttgagctatattcctaagagcaagagtgaggggaggacgttgatatgttggaatatgctggaaccgagtacgagtgatgcc

SEQ ID NO: 58842 - DNA, 799 bp, Cannabis sativa
gccttgtgcaatggcccaagctggccaatgcttgggccggccctgttggccgagttgaggctattttaatgacccaacttaataatatcggtctagaaattttcaacctattgacatcctgaatttttctaacccaacccattttttccttttatgggttggggttgggttgggttaggttgggttacaacccttatatcatataaaaaaaaataagatttttatataagttaaaacataaacataagcattcaaagttaaagaaattacaatcattaaaagtcttaaaacatccaaagtctaaaaacattaaaattaagaaatagagaatccaattgtgaaatggataattaattaactgaatgagcataagctttatatatacaagcctaataaaatgatacaacaataactaactaataactaactgtaatttattaccgctagaataagttaactaagccaacctataaccactttaatagaaagctaagagcctgtttcactatatttttataatattgcttttaaaaatgagaatggaaaataattttttatcattttaaaatttaatagtgtttggcacaaattttttaaaattatttttagattttttttactaaaaaaaaaatcaatattttaacaccataccataacacaaacctattgatgggttcgagttcgggtatgcttccgggtctaagatctaagtatgtgagcaaaaatataaaatataatatgtcagaaaaaaaaaaatttttgaaaattaaaaacaacatttttgatgttttatgttttc

SEQ ID NO: 58843 - DNA, 1105 bp, Cannabis sativa
agcgtatattatacaatatacaaactgagtatagatagtgtgacgagtcgagatgacagagagcgaggcccttatctcactagaaggtggtatgcatgcgaggaagatcatctcgacaccacaaagcatagttatcaaagttaaaacaatattagtctcgagaagccaaatgataagcaactgctcgctacgaaagttatcttggctccattcttagcgaggcatccctatgagataaggcttatcgtatttttatgattacgcattcatctcgatccaataaaagcgggatattcacaactgtgtaaacaccattttttatttggcttgatttgttgtaataataagatcccacaattttagggataatggttgtaaacatattttggttagctttgtaattaactgccgctaatcaattataaataatggcaggcaagatcataaaagggggacgaaaaaactcttatgcaagaggccctaaacaaatacttagaaatctgaataagattgactcgtagactatgtagaattttaactgcaaaaccatgtaaaaaaatctggtgttcatattttttagtttttattatttctatgtgaattatcattgtgaagctcaaatttgattaacaaaaatctgcgtcaacaccctgtatcaaaactatcatgcggtctacttaatttactaaaaattatggctgccacataagaatgagtggccccatagtcaaataacacagagaagtaagagttattaaccgagggctgacctgttaaaactaaggggctagcttctgcatcagcctgagttaatgcaaacacccttgctggagcaggtttcgcagcaaccttctgctcttctttcttaagttgggggcaatcccttttatagtttcctggcataccacactcgaagcacacttgccctctacactctcccagatgatgctttttacaactagggcattttgggaaagtgtgtcgggttttagagctaccccgtcgattccctcgaccttggttctctcgaaacctcttattctgacttgagccatcagatgctgtaggtgcctttcttttctggtcagtggtcgagccactacct

SEQ ID NO: 58844 - DNA, 1013 bp, Cannabis sativa
atgttgatcacctattcatacatatacatgaatgtaatttttaatattgtttatatacatgaatttacatatgtcactcttctgcttatatagttagttattaataaccacgatcagcatatgaacatgaagcccaagctaaacaatgagctacaatattcgcagactcaaataaaaacttggtcttaaattagtaaaccaagtagagaagacttttatccttgtagcagagcttcaaattaagatgaaatactaattaaacggaagaaagaaaacacactgctacaataatataaaagatgttataataagtagattatatttataattatatttgaagttgaagacatttgtatgagaaaaatgtttatctagtgtaacaaactcaaagcaaagctgcttatgtgaggccatcattgttcaacagagccattggttactaattagtaatgctaaagattggtacttaatttttacattaagaaagaaaaatcaatcaatgacaagtacggattggacagacctttccacatctcaacaccttttcaccaatgaaaaagttgacatcctcccgttcaatcatgtcttcttcggcgagccataaattgcttgtccaagaatccaaatacaactgaaaatatctgaaaattatgatcaaaatataggctttaacaaagtactgaaatgaaagaataaaattaagaattttaccatgcatgtagcgaggtctaagtattgattctgtctttagattaggcatgcttttagttttgcgcaaaggataaccacctatgcacaccgaagtaagtgtgtgggatcacgaaatgtcacctatgaaaaagttgaagacatttaattgtatgagaaaaatgtctatctagtgtaacaaactcaaagccatcatcattcttcataggaatgtcaatggagtgggtcggatatgatccgactctgatccgagctgatccagatcatgtacggatctgccccgccccgctggatcagatactcgg

SEQ ID NO: 58845 - DNA, 920 bp, Cannabis sativa
tctctaaataagaaaaaatatggaatgttttttaattaatcatgcaaatttattaataacaaacagctaaaatcaatgcttgtaattcaatcgggacatcaatcttattagtacaggtgtttatctgatttaatttgcacaattttactcatagtgcatctgattcgctttaagtgcggattttatattttagatccaatccaatccgcatagtacttcaaatccaatctaatccaatccgcaaaagtacggattgaatcgattattttgaattagttacttttaatattaaattatttaatgtttattaaaaagaatattttaatatcacattaataacaataagataaagaaaattattgttgttttatgtatcatacaaaaaattaaaataaataaaataaaaaataacaaagtcaaagcaacaagaaaaaaattgtatgtataaaaaataatttaattttgttttaaattatgttttcttataaataagaatgaaatatacatttgacttactatatttttaaatatatttgtatcatatatgcaggggcggagccaggatcaaatatcaggggtggccaaaactatattaaaatttaagtaacaatttttttgaaaagtaccgttaattaatacttaaaattaaaatataagcgtctctttttcatatcaagaacgtcattcataaaagaattttttacaatttctttcaagaatttattttttaatatagactatagcaaaaattcacttaaaaatttatatttcatcttattgtaaaatgtagtcttcactatattcatgattgagaaagattgctttgtggtaactataaaaattataagtatatgaataaaaattatcactttatatataagaaattttttttcttttttttctacttttttttttttttt

SEQ ID NO: 58846 - DNA, 576 bp, Cannabis sativa
tttatttttagcggtttaactactcaatgtttataaaactgtaatttttctctaatttcgtcattacatactctgttattatcttaaacaggacacatataactataatgcctatattataagtcattgagtctagataaaaacatgtagtatcaattacttttaaatatttttttaataactttaaaacagagtttgtactgacgaaactggaagaaaattacagctttacaaatattgaatacttatgccgctaaaaataaacattaaatttatgttgcctataaatttaaaactttatgtacctatgctgctatttaccttatttttttatacttgacaaattatgaacatatttatcttaaggtcttattgacaagttaaattgaaaacaaaaaaaactagtttatctccttttcaaattgaagttatgaggaaaatgcatgaacaagtaatttgtaattctctcttgtttcttctacttgagaagtgttatacctatcacttcgagtctctgagtagaaggagaggtgtaatattgagtgaaaaaccaaatgagcattattgagaaatata

SEQ ID NO: 58847 - DNA, 1299 bp, Cannabis sativa
  modified_base (392)..(393): a, c, t, g, unknown or other
acatgagtcatacttgcttttagtgtatccaatattctgcatataagtgtcaaacctcaagttccattgcttagatgcctgcttgaggccataaagagacttctcgagtaagcaaacctcatctgggttcccattgtcaaaaccctcaggctattgcatataggtttcctcttctaatttcccatgttagaaagtcgtcctttcatccatctgttcaatctctaggtccatgcttgctgcctttgccatcatggctctgattgaagcttgcttgaccactgaagagaaaatctcattgtaatcgatgccttctttctgagtgaaccccttggcaactaaccttgccttgaatctgttaagctcattccctgaaccttctttatgcttgaaanncatttacatcctaccaacttgtagaactttggtttcttcacaacaatccatgttctattcttcctaagagactgcatcttttcttggatggcctgcagccgtgctgcagcatctttacttctcatagattcttgaaagctagtgggttctaaactgtcaacctcttctgcaatcataagtgcatatacaatgaattcaacataatcaaaacgatcaggggcttttctctatcttctctctctatctttagctaattgatagctgcttagtttctgttgatcttcattgtcttccctttctattgcctcagttccatctagagcaacattagttggtgctatgggagcaacctgctccacctcaatctggacattctcatctaatacagtttcactatctttggaaatgctcttggttttcatggccatttcatcttccttgaaaacaacatctctactaatcaagcacttcttgaatccaggttctacacaccacactctacatcccttaacctcttcagggtagcctagaaacatgcatctcaatgctctaggttgcaacttatcttgtctaacatgcacaaatgcagtacatccaaatactttcaagtgatctaagtttgggggtccataactcttgtgggggtcttgaagttgtttggcatagatagtgatctattgattagataacaagctattttaagagcttctccccaaaaggttctgtccaaacgagctcctagtaacatgcacctaaccttctaaatcaatgttctattcatcctcttagcaacactattttgatgaggggttttgattacaattttatatctcttgattcctaggcatacaatcccttgaactcatttgagcagtactcaagaccattgtcagttcttagtacctt

SEQ ID NO: 58848 - DNA, 649 bp, Cannabis sativa
cagctgaaatttgtgaaattcttcataaccatcaaacttttcgcatttcgccagagcccccaaacaggccaccaagtatgaatttattttctttccccaacattcacgaaagttattttcatttatcagttcgtcatagggattggtgttataagtgtttttttaacattgaaaaccattatgttggctgatatttattatatgaatagtagatttcaagaactattgtgacagttatatgagttttgagttagttgggaatcagttagtttagttggtagtccagctgtatattctgttatttttgatgcattattttgtttccttgttgcttagtataagtagcaaagcattggtgtttgtacataacttgattgattcaatacaattgttcaatttctctctgttctctctgttttacttttctcttgttcaagctcattcgagctgttatggtatcagagcaggttgttgtcttcctgctattcttcatcttggttgttctttgatctgtgttctcttgtgctgtgtgaatattgttcgaggaggcggagctcaaggtcgtggcaatggagtccatactcgaacgaatcgataagttgaaaacaattctctgaactcgaatactttctcagttcttggagaaaat

SEQ ID NO: 58849 - DNA, 681 bp, Cannabis sativa
aatcgcggcggcggcaaaggcagggctagccgattgctccgacatcgaaaagggtggtcacgctaagatcaagtgcctactctgtggtggtgtcttgttgttattttaatatttttaggtagctaatatataaatatatataaaagctgaatatcttgacattttatttttgctatttatttagaattgaatagaaaaattttcttatattttcttcggtctttaactaaaaaatgaccacatctttcctaaagataaagacaaaattcagacttacttgataaaattcaaattttaaaatattctattctaaactttaattctagttatatcatatctaaaatatcatattaaaacaaaacttttttaaaattttatataatatgatgttaggtagtggacaacaacaactataactctgattatttttcatttatattggttttttgtttttgtttttgtaggtatactacaacttgttgttttttattgttatttttgtatgtacacttattatttttaaaaatatcaaaatttttaaatacttttattatcacctttaaaattaaaaatttgtctcatttgttgcagtttaaaaagaacatataattctcttacactaacaaggaaattaataaaatatgtgatgaatgggcaaaatatgtcatgcagatgatggct

SEQ ID NO: 58850 - DNA, 887 bp, Cannabis sativa
ataataataataataatgtatattgcagttatttaagatattttatgaaaagttttgaaatattttaaataatttataatataaaaaattggatttaaataatttatttcacaagtctataaaataaaaatgttgtgcgtatgtttgactcttatttttcatgagttattttttttttaatttcttaaaaatcaataaaaaaaatttaaataactacattatacattgtcatacaaaataaataaaattaaaaatatttaatgtcaaaattataaaaatggtgcgtcagtatatcttcttttaacggtgcaccataaaatttcaccatatatataaaacaatactcttcatatatacaccaaaaaatggatttaataacatttgaaaatgttagtgtgttacttagttttaatgacattatttattggtttagtaacatttttgacaaaagtgagatataccagtgtgagtaaaaatacaaatgtcattatattatcttttactctcatttgaaaaaatgtcactaaaaagtaattaaaaagatttttgaaatactaattattaaattatatatttatttattatataataaaatgatatttcatataaaaaaaatatgataagcggttgggttttttttttttttttgaatagtcagtgattttttttttgtttctttccaaaacatataataattaagaatcgatttaaaaaaaaatgtaataatcctggactattaggattataacaatggataatcataacgtatttatatcgtagtacatatagattattctatagaattgagagtactattcaattctaaatctatagtggcgcaagacgaaattaataagttagagaatttacttattgaaagctcggtt

SEQ ID NO: 58851 - DNA, 2208 bp, Cannabis sativa
  modified_base (184)..(186): a, c, t, g, unknown or other
aaattcaattgccatcactcccttcattaacctcttgcaattcctcatcggtttttgttcacttaaacttgaggaattcccatcttattgtcaacttgaatctttttcattgtattttaactttcatcgatttctcttaagttgacacaactttaaaatttcccaatcacttacagttaactannnttataaagtgaattaatgtaacccatacagtagaggcaacattgctcataccaggtacccataactaaactagaaatacacatttcccaaattctcaactaataacaattaatcaaagatcattccgtgatcctgaaatttttttctgtgtttggtagagatcttgatgatcttttcaacgcactcagaaatatacatacttcaagtattttctctgctatattgataacctattggtacaaattaccataccaacttatagtgagtctcccgttgatgatgctaatccatcaacatctaagaccctcatatatttttcctgtcattaccactaacgttttactccctagttcatacaccaccattgctctcttacaatcatcactatcttcatacttggttaaccactctaaaacttattttacacgtaattatatagtttgttgtttaataaacaacttactttgtgacccaatattcaccaatcactcaaatacatgtctattaaattgcatctcaattcataagcttttctccattctgggtgagtatgcctttctataattgcttaataaagtaatttttttttcataattttaatggtctccttatataccatattgactatccagtcaattatgaagtactctctatcattaccatattaccttaattaattcaggtaatcatctttaccttagtgatacaattactcttcctgatgttcttttatacgttaccctggtaacgtccccacttcaggccttcattggacccttacttccacagagatatggctcttatacacgagtgcatcactctagctgcttcttggatagatgactagccccacagacaattccaagggtttcgaacatttttttttgctttgacttgcatgcttcattggaaaattttcttaatgaaatcactccaagtcaaggacaataaaccatggtgttccctcatggtaagctatcaaaacatgatgcttcttgctaacataggtagacccacgcctacctaatctcaaaattactacacaatcgtcgccttcaattcacctagtattccagaccatactcataaatagttccacctttgctaatgctagataacttttaaacaaaagattttgttatttgaatcaagtagatcgatgcctccattaactagtcatgtcctatattccacttgggattaccagcaaatttaactcatattgtcattttcttaccctatcagataaactaccactatataacatacaggcaaagtccattagatcttttgatgtccccccaattgagagtacaatgtttaataacaatgtaaattgaaataacaattataacgtttctcataaattgtaatttgagtcggtcgaaggactgatactcaagtcgccttaaatcataagcagcacttgggcaggacccatacacttttatctttaacatcattctttcttaactacgggtaggttattttcaaataacccactagcccacaataaaacaagatctggctctacattggttcaaatggcgccttttagcatcttgaacactaaggataaggtcacaatttcttattctcaccttgaccgctatcttgaccaccctagaacttttttgtcttgtccgataattagtggttcatttagtttttgcttcccgatctactagtaagctggcttcatatattccatcacatatagtggtacaacaggaagtgccggtaatagaagaacagatacaagatgagcctattgtcgtttaagatctcgaatatatttttccttattgtctaatcatatcttgcatagcagaatttacatattccaaaaattatggcaataaagaattctctttattatcgtttgccccgagcccagatagctcattaattagactatttgattgcccttactgtataccttatcaaatatttagtccacatcttctaaccatttaaaacttaaacggatatcaatatcaatatgcatataccatacacata

SEQ ID NO: 58852 - DNA, 1400 bp, Cannabis sativa
  modified_base (767)..(769): a, c, t, g, unknown or other
aaaaactgcaccacccgtaccgcgaacacctctaatagctggcactcaaagacaaattatcccttttgaactatccccaccaatctctataaatacccctgagaaaaatggaaagggggatcagaaaaatgggagtgttttctgcgagtacagcagaatccttcccatgatggttacggaagtccttcctatctccattgtgaaattcgttcaaatcttgttactctttgtacttcttgcaaaatctttgcaagtgtccagactttacatagaagtaacacttccttgtgtccttctctctggacttcaatctcgattgagagtgctggtgtttattcttcaaactcattttcttgggtgatcttcctcttgccaaatacatttcttctttcttggattccttctccaattgtaactcgaaatccttcgacttaaatgcggcaagaacatcttccaatgcaataacatccctgccatacttgatggcagtcttgacttcttgatatgcaattggaagtgatctcaacagaatgatggcctgactttcttcatcaaccttgtgatttatattagccaaacctacaataatcttattaaatctatcaatattttcaactaaagaaagagaagaaatcattctaaaatcgtataacctttctagcacattgatcttgctagctattgatggttttaagtataattcttccaatttatcccaaactcctttcaatgtcttctttgtgatgagttttcttcgaacactgttnnntagatacatgatgattgtgtagtacgccatctcctcctattatgctttttcctttggtttcttttcggccaataacttctcatctccaagaaccttagaaactttttggtgcacaacgatccccttcaaactttctctccatagagcaaagttcccagttccaccaaatttctccaatttgaatctcgccattgatgacattcaaagtttcttcaagattgcagcggaaaaaatctttatccattacttagctctgatttgtgagaaaattaagactaaaaggtgtagaatcaaatcaataaaattttaaacaatcaaaccattagttatgataagtttagcaactagaaaaataggggcgaacagagtacaagaaaccaaaaataataaatgaataaaataaagaaaacaacaccaagatatatattggctcaagaccaatagatcgatgtgatctatggctctactctagttctggaacaccaccgtaaaacttctttattgattgagcaagaataggtacaatataatcgacacaagattctctgttgagccctcacaatgtgtttcaacactcacactttcacccaagaatattcttcatctacagaagattcttcttacaaaaccc

SEQ ID NO: 58853 - DNA, 623 bp, Cannabis sativa
tgtgatatttttgagagtattaatttaaatttttctctttgaaaggatttcattatgagttgtttttatgaaattgagctttatattctgtaaattttctgccaacaccaaagttatatttatctttttatcaagtttttatgtgttctacatatattattgatacataatctatagtataataatatctgcaaagagataatactacataaacacttgaagtcaaattcaatgtttatgaataattatcatttctttagaaataattaagatgttatttaataaaagatcttgtgatctaataggggtgaaaaagttattgatatatgcagttcaaagatcttttacagtgaactctaaattatattcaaaatactacataatctctataacacatatattttaattagaaatagatataatatgatattggaactaggaaactagtaaaattattcttgatcatgtatatgttccaatatctcctacaatagtaatagataccactaaagtccctagacatagaatcacaataccttatctttgtgggaggattttaataaatccagcctattattatgacactaatgatgacttaaaatgatatgttcaagaaagaaatt

SEQ ID NO: 58854 - DNA, 872 bp, Cannabis sativa
taagttctcacgattttatttttgggtatcttaccaaaagacgtcatactgatagaatatgtggaatacttatatttaagataactcttgcctattcttctgatgtaggacttggattgataccccaacaatttataccgcaataatcatcaacgggacacgccacctgactacctcaatatcaggtagactttcgatacaagacaccatacagatcttcatttttgaggtcttcgcccacacatcacatatgcagcccactatcccagcgctcttgaaccattggctctgataccacttgttgtgttttaatcacctcaaaacacaattaagaacagagatgaaaattagtgcaataaaatgctaactaatcatgagaacgataaatataaaatataaaatacaaaataaaaattatattacaccaatttaacgagctttgattagttgcttggcagtggcaactgcttactctccatatagaataatctttagcttcaatttttattgattcacacttggtattacaatagtaaagttctaaaagttatttttgtctgcaaaaaatattggtatttaaaggcattgtccaaaaatattggaaaaacagaattgtccccaactaatttaactaccaagattgagactttaaagaatttacttgtgttaaaagtgaatactaactaaattttaactaacaccataatataatatatgtcattaaatattatttagatttaaatttaaaactcatataattaaatatagttaattataatattaaaattttattgatcatatttgagttgaaaatattaaacaggtacgcccttaaatacaagttgccaaattaacattattgaaaatataca

SEQ ID NO: 58855 - DNA, 935 bp, Cannabis sativa
gactggatcgtcgtcaagaccagacccagtaaactgttattcgttcttcaattcataaatattttctttgatttgaaatacgagaaaactgttaatgatatctactttctaccagagaaatcgaagataaagtaagcttatactagcaagtgaaatatgagaaaattgagactcaacctgagaaactgaggttagttgatatgctatatggattttctatctctgttatgctattaatgcaacttaacttgtaaatttctattgtatggttttaataaactagtatattagcaacttgcatacatttattttatttttaatattttctagaaaaaattaaggttaccttcttcaaatgttaattgagttcagtattggtcctttcattttaaatatccttcctatcaataatttgcactaagaaacaggaaagatatgttatgaacactgtaaatattaatttagccataattaattcataaaaattaaacaatagaattataaattagcggaagcataccggtgaccattaaatcgcttagagaaaggtacgatcttccaattttgcagtgaaatatttctcactattaccgtttatattatcaactgacaaaactgttagtaatatttattggctatttttatttggcacctcatcaaattagaaattatcctgatagtatccacatattaaaatcatgaaaatcatgcacttaagttataaactttatttcaaaatagaccacataaattttaattatttatttgatgactcaacacacatctatatctatatatataaaggagacgtatgagcacgtgacactctaaagctattgttctctactctccttaattctcttattttttatattttattatagcataaatctataaattatattttactattattttaataattaaaaaaatta

SEQ ID NO: 58856 - DNA, 3209 bp, Cannabis sativa
cctcccggagagtaaggatgtgtcttatgctctcctccgggaggcacattccatgtggtgttcctttttcgtcgaagacttagttgattttcgtgaatgatagttctttcagattcatgtgtcacccttattcgtgtccacgtatgttgggaaaaaccaaaggcaacaagtactagttattactctgcgactgaaaggaacaagagttagagtactgaacagaaggagacatatattttgtttccactcatgcaagtgatcgtaaaatattatgtgttatttgattattctattagatttttattttacgatgttaaattattattttgattatcaacacacatgttagcgatttaagatccttgtaaaataagttctaacagcaaccacctttgagctttgtgcatgattggatgatgcttgttacgtatcgagcgagacgaggtctatggtgtctccccctaggcgacctttggagttggtcaatcgaccctagctagatggtctggcctactgaccctagaggaaggttcccccacaatagttttgtattctcaagatgtacccctttacttcttctgtggatgttcaagcttgggagtacatagtatttttatacaccttacatactattattcagtcttaatacttgcagttgtatggtgtttgagtgatgacaaagaaaggacgttgagtatgcaaaacgaactttggaacctttaataaataaactaccaccatgtcaatgtgaagaaattgtatagtatcaaggtcatacaagaacagagtgtgaagagcgagtcaacccgggctaacactgataggatcagttggccaggaccaccttaagggtcactcggtctaacccatctatagggtgactcttttgtcctcttacagtgtgtacaatgaccccgtacttctccgtaagtatttcatgcaattgtttatcattcatctgttggggttatttgtgtcaagtgacttagcatattcttcatgagtttagtctcctgtaatctcgtaccatgtgttatcgtcttctccacatcacccttgccgtaaaaagatatagatatagataattttcataacatatatatagagagagatatatagaaatagatatagagtttgctatatattaaaaaaaatcattggcagattcaattaaatgacttcataagaatgaaataaaactgtgttaattgagcattatacattgaaaaaaaaagtgtacccaaaaagagtaaaaacagctagattctttaatattattttctctaattatagttccttatagtgttaaaatttagaaaagcacaacttgaaaaaactaaaacccataataagctaaatcatagccttgttgtacatgtgcgttaacaacctaattgtaggcacagcttgcaaaggggtacgcatgaaagagaccaacccaggggtctcagccatgtcaatctccccaagcacgcctttaggcctagtccagttaaattggtgcaaaagctggcccaacattgatgtaaccaaggtggtgccgagttgagccgcagggcatatgcgcctcccagccccaaatggtaataaccgaaagtcatggccctttaggtccacattctcctttataaacctctctggtcgaaactctagtgggtcggcccacaaatttggatcacgcccaatggcccatatatttacatgcacattggttcctctagggatatcatagccaccaatcttgacagtctcactagccttgtggggtagcatgagtggagttggagggtgcagccttagtgcctccttagccacacaatgtaagtatgaaaggtttatcaaatcagattcattcatggctcggttaggcccaattacacgatctagctcttcttgggccttcttttgtactcttggattattgatcaattgcgccatagcccactcaacagagattgcaattgtatccattccggctgttatcatgtcccaaagtagtcccattatggtatcctcactaagttgatacttatccttgagacaaagtaacacatcaacaaaattcccaatgttagccttgtttatcttgtgctcctctattatatcctgaataagtttgtccctacgagccaagtgttgagagaatcctttgtttggaaggaaaaatacccacttaagccaccaaatattctcaatcatgtgtagaaaaattgaagctccattctcatttccattgctcacaattgctttaaattctaatccttgctggtctaactcaccttcttcattctcaaatcgtttaccaaacactagccttgataaataattgaaagtcactgatcctaaaaactttcttacaaccaaacttttcccattaacactattagactctttgtaaatggacttaatcatggacctgacttcctcctctctaatgtgtctaaggtcctcaagcttcctagaagagaagagctcaagtgtgcatatctttctcaatttcaagtagtgaggcccataatcggcccaaattaactcagagccatctttggtaatcttagccagtggccaagtcctatgtcgattggctagttttcgatcattatctttgagcacttccttagcaagttttgagttcgaaacgacaacgtttaggttcgaacctagccaaacagatatgattggaccgtaagcttgtgctaactcgaaatacccttggaaagctaatggattattcaaggtaatgtgaagatttccaatgattggccaggggtgagggccaggggggagcttgaaccttaaaagctgatacaatttgtatattaagaagatggtaataacaaaaattccatataggagatgaagttgagacattatagaagatagtaagaaaattggtacaagttttgattttttttttattattattataggtatggcaagattagtagatgtagtgatatagtttagtagatactaaatattacttgtcatttgttagtttctataattttagcactatttaaggtcacataaccctcgtgtaattttatttttattagtaatgaattatagtttcaccatgttagatgcatgattattttagtttagaagggtcacgtaataagtgtgtttcagttaacattacataatatacacagggacacaatcgggtgtacatgcttttctataatttattattatattttttt

SEQ ID NO: 58857 - DNA, 745 bp, Cannabis sativa
  modified_base (710)..(720): a, c, t, g, unknown or other
ttggagtcatctgatgaagtgtttcagtcagcatcactgtatccttcaaggatagctagaaacttctgataatgttatccaaagttcatggttctctttaggtatctcatgttcctctcaatagcatgtctgatggcaataatcgcaacgagccttcattgcgacaaaccaagcacgatctcaaaattcgtagagatcaagattccattcaaattttcaatgtcgatctcaaagtgatgttaggactaaccgtagttgcattctttgttatatggttcttcatagttgacctcgttaaggccactaaagtatctcatataccttaggttatcactcctttccctgctctgaaagttaccgacctacctcaggtaattcttggcttagatatgtaaggccaaggtatatggggtctaaggtaaaatcaaattttgggaccctatatatagtttaactattattaaaatgatagttctagtaatttaggtggcgtgtggttagagataatgaaatagaatagagtggaaaagaaataattttcattctattcctttatttggttgcattttaaagtattagaatatcattccaatggaatagcttttctactattttggtggaatgactattccattttgaaatggaagagaagacgattccaatgcaagatttaaaaaaaaaaattaatattttttttatcaatttttttnnnnnnnnnnnattttattccattcctattccaatt

SEQ ID NO: 58858 - DNA, 890 bp, Cannabis sativa
tactattttatattccttcttcttcttcttttaaaaattaaaaataaataaatattttgtttttaataaacaaataattaataacagctagctttgaactttgacccactgaaacacacgtagtgggaagttggtcataatttagtcatctcccacatgaacaaatatcatcatcatactcttaataagctagagcctactcactttagggaaaaaaatatttttcatttcaaataatatatataatagtaattttttaagagataattagactacatattgaaatttctaatttttttttacttttatacgtagtagaatttttttaaaaaatattgtgtaagttttatactgtgtagtgtgttaagtttttactgatgttctactattattttttagttgttctactgttgtttttagttgttctattttgtgttccactattgttttataaaaatacagtatttttgaaaaaatttccatgtgatagtatttttgtaaaaattaattcaaattctagtatttttataagttttcctttttcaaaaatatcacttaatttttaaataaagggtccaataaattttcattttttagacccccacccaatcgtagaacacgaacttaactcttaattgcattgctttcttcacgaaatcatttgtaaattaatgggtaaattatgtatcagattttatacacttaaatatttaatttttatttttggaggcaaaaatagtcaatgttactattcttttacatccattactatcacttccgttaacatatagagggtacagatacattacatttttttttttattttaaaacttaatattcttaatatcgtaaactaatatatatatattacttgtttaaaaaaaaaaaaa

SEQ ID NO: 58859 - DNA, 868 bp, Cannabis sativa
tttgtcagaatcccttcttggaaaaaacgcatcattttattttggcggttgtactatttcgagtgtcattatgaatcgtcccttcatattctgccttccaaccattggatttctcaatccttacctttcttgtcactggacttactggactttgtgtataaaagggctttgtgtataaaagggcggctcaagcttgtcatttttcacaaactcctggttctctggtgagatctatcttgagaatggatcatctctttcttactagaatgtcccttctgagttcagaatttcaccttcccaaactcataataccaatatgcaccaactatttttcatttgttcccaaggacttcaagcctcgattggagctggaaacgatggattcccaggctgaggagctttcgaccaatccaaaccaagggaacttcgtagtccgctatgggagatcctcataagtgttctttgaaggtgagtatcatcccttgtgaatggtggtttgagtcggtttatacatatcattgattttttatgtttttagttgctccattgaccttttttctttgtctccacagggataggcagagatcttttgagtgatcttaaaggtcctcctctaatcgacgagggatcccagaagaatgttggcagatggacccaggagagaagttggcatggtttctatcagagaatccaaccaacccaaggcctgcaccagaggacttttgtgccagcctctttttgatataaaggagtgtcctgagatctctacttcaggaaatgggatcttctgatgatgaggagaatgaggtctgtgcagagatcaaggctctctacatgcagacggtctttcttgagctacatgtagccg

SEQ ID NO: 58860 - DNA, 1336 bp, Cannabis sativa
  modified_base (1269)..(1270): a, c, t, g, unknown or other
acaatctcaatagttcagggggaatttttaacgactaaaaaaattcagggggcaagatttgatacaagttaaaattcgggggaaaaaaatcttaattagccttaaatttaaaataataatgctgcactagaagtgtttaaaatgattttatgtagagttattttatttaatatatgttataattttattttatgtctatatttaatattagttatgtagagttatttttttttaatatgtaattataaaggggtcagggcaaccacttggctatacacagtttcaccaatgttaattcatttttttttattatcaaaaatataaaacattttttttacaattttttttactttttaataaatatcctataaaagtggggatctatactagtccattttaattcccaataattggggtttggaagaaataagagaacaaataattcgtagtgtatgtgaattagagcatggaataagggtactatttaaagattattcgataatgtatggtactcataaattttattgtcttttcaatcacttatgatattgtttagggtgggactatatcactatgctataaacaattaaacatgattgacatatgtatgtatttgtgtaataattttgtgttacttgtatattcttctgtactataatttttttttcattaatcttatttgtctgtatctatctagctaccctaaattattatcttcttggagtcaattcatttgacttttatctactacatattttttatttttttttgtatgtataatagacttttcaatgttttgtctatttccattttttttcacatccctacccatcaaaggtcacaactctctttgtcaaaaaagaagaaaagaaaaaggggggtcaccacactctccattaacttaaattgagaaaattttaaaaatacatttatattttatttataatttttaggacgtatattttatttataattttatatcttaaaatttttatttataaaaaaatatgctagtaaaattttaaaattataaaaatatattttgttcaataaaaataataaaataattaactaaaaagtaacgaaaaattaacctaaaaataactatgaataaattataaaacaacaaaaaataacatcttcacaattataaacaactatggctaaactatatattaacaaattattaatttaactctaaaaaataattactaaaagatctttatttattaacaaaatttgcataaaattaattaataattattagtnntttaattttaaatataattaatttaattcaatttttataaataaataaagtatcaagttacaagtt

SEQ ID NO: 58861 - DNA, 1929 bp, Cannabis sativa
aaatttatacactagatacaaaaaagtatataaagctttggtggcatatataccaagaagtagttaagaagtaataattttgaatgcattacgtaaatttatttatatactaaaaagtatatacatatttagtataacaataaaaatatgatgttgacccctagtatgcaatcataaattaagatactctattacggtattattgttcagcttggaattatataaaaatatgtttccatgaaaagaacgctaatttttttttcaaagccatctttaaatattattattattagtattagcatttgataaaaaagaaaaagttcctataaaattgcaatctgttgcacatagtgaaaaaaagaagtaaaaacataaaatattataaatagagattaacatgcaaaatgcaatagtaaacaatagactgtagttgttggcatgggttcttatctcacagcaatccacatctacaaaagatattttttttccccaaacagtcacccaccacatcttttctggcactctttcttttcttattttcttgtacatccaaagtcaacgaactcattttttactccactctcagcttcatatgcaatttaaccaccaagctctcatacattgtgatatctggaaaaatgacactctaaacaaaaaatgcccatcttctccttttttttttttttggttccgaaattgatacttgcaaaagatgagttgtgaccacaaacaataatcactaatttttgacatattatatgatgaggaaatcttgaaatagacacaaccacagagtgaaatccccgaaattgatgttaacattcccaaattacagcctttttcttatctatgaaatcctcaacctaaagatgactctctgtataagaagaataaaaattcccaaattaaagccttttttttatctataaaatccccaaaacgatgccctacaaattcaattgacccaaagataactctctagaagaagaacaaatatccctaaattacattgaaagtgatactgtacaaacaacaaaaatgactgatgtaaaataataataaaataatgatatattaaattacaaaaattgtataattattattatttaaaatcatttaattaaaaattctgcatttattataatatataatacagttaagttataaacaaaaaaaaaatatggaagtcggtacataaataataataacataaaaaagaaaagaaagtaattactaagagattaatgtaataaaattatattatatgtactaatctgaaatttttcctatattatatactaatcatcattactcataatcattaagtccaagattaatattttatttagagcatctaaaataagataaacacacacatgccttctattgatgatccatttatggagccattttggttccaagaatgtctaacaaggatcaacacaaactcaagattagagtaacattacagaggagcacaatatggagctatcccctcttttcttctcataaccattaacctaaaccctttcacttaagatatatatatatatatatatgtcacaccttcttaacccaaaggggttatacactaattgggcttaagtggtacaataatgatacactataatttaatgagtcaattatagttttaagggtgctctaatgtgcctctaacataataaataattattaaccatccaattatggttgttgacaaatattgggcacatagttaataattgtgtttatggtatattaaacctatgattatattagtccacaataataattctaacattctcctacttggacaatataaccaactgccataacattgtctaccacacataaggtaaccaattaaaacgtacataatatcatattgataggatacatatattatgtatgaattgaccttgaagacat

SEQ ID NO: 58862 - DNA, 1736 bp, Cannabis sativa
tcttctatattcaaactctcgtactgttctgctattaaggatgggaagcgattcccaggctccataatacaacaatccaatcagagtacagaccacacagacgaatcaaactaaagaagaacaatactaggataaaagaatcaataagacagaactttaacaggaccacataagaacaacactaccatgtcaaaagacaagacaccactatttttcctttcatgatcttctagtataattaaaaacaagtttatataaaattactcttaaaaattgaaacacattgcatatgtgccaagacaactctaataggcaactcccattagagatactcttagttaattatcgtgcctgaaaaggaattttgtttaatttatttcatgacgatatttgttatagttaaatagttaattgcagtaaaagtcccaaaagtttaatctcgctaacaattaaccctcaaaattctttttttagcggtaaatccactaaactcacattctattagcaattagttatttccatttatttttagctgttaactgtcatattaaactattcacatggacaaagtctacatgtgacacaatatcattggtccatataaataatttatttaaaaaatattaaaaataaattattttctttttttaaaagaaacaatttcttttttgtttttttttttcttattctctttatttttcatcctttctttttttttcctaatttttatttcttcttcttcatcattcttagtagcatcaccaaaaactacttttatccaccataatcaccactaaaaccaccactacccagtacccattaccactgcaaccaaattattacaatcacaacaatcattgcatttgtagatccaaatcaacctgaaaaatacaaaataaaaatgaaatccgaaaacaatctcagatccaaaaaataatctcaattctaaccgattctctttgcccaatttgcagatccaaaaaaataagatccacccgattcttatcataaacatcttaccaagaccaaacacaataccaaaatgagaaaatcaataaataaaaaaaagaaaaagaaaaataaatgatgtaatgatatcatgggtgggagctccgacaccgtgggttggtttttggggtttgcgacttcggatgaacaaatctgtctcctttcgctactggtgtgtaagcagacgaaagagaaagagaaagagaagatgaagggtggggtttacgggagtaacgacctctgtccgccatagaagggaggaagagagaacggctgtcgatgttcttctcctttcggtgctggtgtgtgcacaggcaaaagagagaatatagtgagtggtggggtgggttttgggggcagggacctccgttgtggtcctagcttgagacgacgacaagtagagatcaaaggaggagcgaacgagtgagagaggaggtgttggtttgtgcgtaggctgtaaatagaaagggtgtgcaagaggtagagaaagaaagggtgatggtttgtgctgattaggaaattagtaggggtgtacgtcgatcagtttggttgggttataacatatttttattaatccaatataaataccgggttacaattatttactcgtaacctgcccacttaaaaattagaaaaaattcaacccgcctaatgattttgttggtttggtcgggttaagccgtccaaaccactcttcactttttttttataattattattgttaattt

SEQ ID NO: 58863 - DNA, 849 bp, Cannabis sativa
atagagttagggaggggacttagctacaaaatcctagttggactgggcctgctcatcaaaggcttcagttaactagaaaagttcacacttatgcttcacctacactttacgcacaaatgctaagcccattaactagctattgatcatcaacatcaatatggactaacacaacaaagaactatcaaatcaacctaagttttaataaaaccaataaaatttaatgtaagctcaaataaaaagtttaacatccgacccatctctctctttccttagatctttaccttaattgataattaattaattaattaacaagtatactaaatattagtagtatatagttttattttgagttgttttgagaaataataaaagagctagactttataagtttataagcaagagagtactcttataataaaagggtaattaattagctagtgattattgcatggggttaattattaattagttactactaggcatcaaaggagtttgaatattttgattaaagaattaattcaacgttgtggagtgtgataaataagctggtagctagctcacccacaagatgcctggtcaactcatctatatatcatcttttaattttcttcctttaatgaatttttgatacgttaattatttgtagtttttaagattatttgttcgtgtgcattgttaattgtttcattgcatgtatatatcgacatgttatgtttttgcatatatgttgttgtgttgggtggctaatttttctcacacaaaaactaccttatataatttgttgataaatattaattaactaggtggttgttattatatatagtgtttatttgcacatggtccttagct

SEQ ID NO: 58864 - DNA, 1056 bp, Cannabis sativa
gttatggtctaattaactgattgtagtgagaaagtcacaacttttgtattttagtttttcatccaaatttaaatattttatattagttttttcatataaaataaattgagtgtatttatgaatcaactaaaaatattattagaaatctctatagtatattcttaaaaatgtttatacactttttatcaatttggacattcaagagagttttttattttaatttttttatacatataaatgtgtacattgtatttgtttaaaatcacatgtaaattttaagaaaaattaaaatagtttatagcgctaaaaatagagttcaaataattatttaccacgcgtttaagaaaaaccagtcacacatgtaataaaatattttaaccttattttcaagaatataaactatttaaaaaataaataaaatttataggtgatcctaaataaatataatatatataatcatgaaaacaaatttgactaaaaaattttataaatcaaatttataggggtgtaccaaaagagttctttcaagttgtatacttataattagtcaatattaatttatgtctcaaatacaaatatatatatatacatatatattctataatatttttactgcattctcaaaaagcagtatccctcacttgttttaagcagggccaaccctgagtgtcggcgggctaggcgtgcgcctcaggcccccgaatgctcaggatcccaaaattgtgaaaaaaaaaatattaatatataaataaaatattaaatatgaagaaaatataataaaaattgtttggtgtagtggtaaaaggtcttactttaaaataagaggtcatgggatcaattcccaactcctattttataatttttattaaaaaaatatttaatgtgtagttatgagggattgaactttggatctcttaagtttttttaaaaactttaccattacactaagcactaaatctattattttattatagttaaactatatataggggccccaaaatttaatttcgcattaagccccatataccttacgactggccctggttttgagcaagc

SEQ ID NO: 58865 - DNA, 1325 bp, Cannabis sativa
caaatattcacgccatacaccttgaaaatttttcggatccgattcaagaaatacgcccatatagttccctgcttgttgtactgcccttgctgttttgaatccaggttggagatcatggatttgcacctatatatcaagcttgtttagtgcaattgtcctcgggttatcaccctttttcagccgctcaagaattaactgctttcggtcatacgtccatggacttcccgttagcactctttgaatatcaatctcatgaaaaaactggaagaggaatctattttgttcaatgatcttgacatacattcctttccccggtttccataaatccgccataatattttgaaatatcatgaagtctgacactttcccggttaataatcgaccaacaaggcaccaacgattatcaaaattgagttcttccacctcctcctcttcataaacaacctcgttatcctcctcatcatcaaggcatatatttttccatttttgttccacatccttattcactccactggatgaagccattacaaacaaaatcaatcaaaaacaaacgatctcacacaaagaattgagaaacactctaatacagagagacaacaaacatgtcaagagacatgaccttttagatttattcttaatttaagtttgttttaattgtattgttttagtagtctaaaacataagagaaatttgagacataattacaaaactttatataggaaggcaatagagcatctctaataaagtagcaaaaaggtggtgtattgctatattttagtatatttaagaaaaattatactccaatattttaagaagtgtatttcatttagtacatgttaaaagttgtaccaaatttggcacaagatatagcattgtgccaaattatatcttgtaccaaatttagcccacaataaatgctacttttaatttactataatgctactaattattatgattcattgacttttactaaactttatttaccttatttactatattaccattatttaaataataaaaaaataaagagtaataaattttgtatattttcaataaaatatgaaataaccattaatataattaattattctttctttattttacatcttgtacattgaagcacaattataaatattgggccaatatagtacaaatttattttttgtgtcaaatttaacacaaattttaaatcttcccttaaagatggtcttagaatcctcattctcacaagtcacgttggtaaataaattgggattttttctcatatagctttattttggaaaaactttacttttttactctcatataagaaattaaacaaaaaa

SEQ ID NO: 58866 - DNA, 1512 bp, Cannabis sativa
  modified_base (1205)..(1207): a, c, t, g, unknown or other
gacacctatttaaaaaaaatgactctatataaaattatttttaatacctctactgaagcattatcctataattatattgagtgatataatttaaaatataatattttgatgtatttattataaaataaaaacaaaagtatcgaaatcaaaaacataattttctatttttaaaatttataaaaaggagagtgattacgtggaaataataaagaaattgtatatatttctatgataaggtaaatgaaaaagataatagtatcagatgaatttaataaagtagtcttgtaactaataatgtatttatttttaaaagattgtttataattttttttctttaataaaaagaacaatttaactactattcataaattttttacattttatctgttttgaaaattgaaaaatgagggatttatataaaaatgttagtgatagaatttttctatatgaaatgtttagataaaatgattaatttatgtggatgtgaaatttataccctaaaagtaaattgtaatgatgaaaaaggatatgatcagcatcttttgaatcttcttcacatatagtttttcttgcgcgtctcgtgcatcaggggaagtcaaagtcccatggtcagcaaccctctattgagcagccagcacttgcgcgattgttataatcataatgtgttttgtataatcattataatcattgaaaaataaaatttaatttgtgattattttttattttaaaaactcatattttaagtaattaattgttaatatttttactacataagtaaactattataaatcctgatcgttttctatttttcagttatttttaaataaaaaaaacagtctttcaatttatattctatcacctcaattttcttatttcttcatttaactattattagatattattattaataattacacttgaattttattctattattatttattctttattgttgtacgtaatttttttttaagtatatcatacgtcacttaaaagagaaatgaataaaaaatatgaaatataaaaaaatagagaaaatagaatcaatatatatatatctttaaatataaaaatgtgtctatctaatagtgtttgttggtttaacagaatattttaagaatataagaatatttagttaaatttaacggtattagtagggttagttttataaatattaatatcatttattttaaattaatttaaannnatataaatattaatattatttgttttaggataattgaacttatataaattttaaattcatttaaatctatatataaatatttatatattatttataattattttttattgttattttgttattaagagtatgttcaatacacaatattaataactattgttcaatataaaatattaatatatgtattttaataattaattaatcagtagtatcatttaatttattaaattttaaaaatatacataacaaaaataaaaaatataaatacagtagaacctctattcaagaatactctattcaagaat

SEQ ID NO: 58867 - DNA, 1598 bp, Cannabis sativa
  modified_base (50)..(60): a, c, t, g, unknown or other
  modified_base (589)..(590): a, c, t, g, unknown or other
cttaattgtgaagaaaaaaaatttcgggtttatttgttaattaagagacnnnnnnnnnnntaattaataaataagttaaatgacaattttatttgacaatttactataatcattaaataaatatttttgacatttatagaattgaaattggaaaatatggcattagtaaaagaaaagataaattattgaataaaatggaaaaattgtaactagtgaggcccactatgtatggccggccactatagttattttttttttgctattattttatcttttttattccatataatttaaatcttaagcccttgaagaaatcttatataaggaataagatggctctcattctaataacctaattcagacttttttgtcagataacgaaattgagaacatccttctatagaatttcaaaatcattctcccttttcttcttcattcaattcgaactagagtgaagagtacatgcccactcatattaagttaagtactcaatcatagtgtgaaagattgtgaagaatctaatacctgaaggagatccaagttcagatcttgttattattctgttatagaaaggaacaagggttagagnnctgaatggaaggagtcattataattcctctgccatcaatgttaggttttctaaactttatctgagtttgttttcattattttaggaattcatatttagggtgttagattatagaattataatcaacatacttattagtatatctaaattctagtaaaataacttctaacatggagatggtcttaatggtgtataatttagcgcccaccaatttagtgcataatttggtgtgttattggagtaaaaaaaatgtaaacattccacaccaattaggtaaaatgatgcaccattagaaatgcttttaggagtgattaatagtttttaaatacttacaagaataaacatacttttttatcttgaactatgacttttatagattttatttcttgaactttgttttgtaacaaaattttctcttgaagtgttcaaatcgttgaaaatattccttttagttacaatctactcaatttttaaattaatttacctatgtgaccatgagttacgagtataattgcagtacgaatatttattcaacaactataagctatttgaaatttaatatattaacattaaatatacaaaaattatctctaaaaatgtatatacatatttgcataatttattattagagtgctatttatgcttttattttgaataaataggatttttgtccccgaattataacctttgtagagttttgccccctaaatttttctcagttgcaagaattccctctgaactatgcaaattattgcaaacattccctcaagttacgatttcttcatttttctaaataatttgcttatgtgaccatgagttgcaagtataattgtagtacaatgacttatttaatagctttaagctacattaaattcagtttattgacgttaaacatacaaactaggggtgagcattcgatctaatccaacctttttttcctcatctgatccaatccaattagtaattggatttggaaaatcatcatccgatccaatccaattagacctca

SEQ ID NO: 58868 - DNA, 1613 bp, Cannabis sativa
aaaatcttaaatgaaactagcaatacgtggcttgacacgtacattcacctagtatatatatgtatatgtatatactaggaaagaatccgcgcttcgcgtgcggttgtattttgtttaatgataattaaatcataaaattatattaaaaatatttatactttatatttcaaattaattttgatattttttttgtatatatttttaatagtatgaataactattctattaaatttttattttttattcttaataacacgagaaaaataaatttatactataaagttttaattattctaattattttgaattcaataagtgataattttttaattaatttatttattatagatatacattattatatgtttagtttttaaaatatagtttgaaaaaagatatataaaaataaaaaaaattcattaattttaaaactgttgttattaccgtatctcatttgtagtagttaccactatattaaaagttattgtcattactgtatcttacttactatccttcctaataaatttctctttatatatcttagagtatcatgtcaccgcctcgtataccttctttatatatatagatatataaatagatttatcattaaattaatgtttatacatttatctttttttttttgaactcttaaattatgtcagcttaagaatatattagtacatcaacaaattataaggaaataaaaaaacacatacagtcatatatagttacatgacacaaactaagaaaaaagaccataactaagaacatagtcgtatatagttacatggttgtgaatatatatagtcgtatttgagattggtgaacactttgatcaattagatattttatattttacaaaaaaattattaaaattagaaaaataataaaatattaatttattggtttataatctaataaaatattaaaaaataagagatttaaggaagaaatagatagatatatttaaactaattttaaagcgttatgttaccgtcttatatttctcttttatatatatattcattgattgattgataaatagataaatatatatagatatatagattttttaataattttttttcttttttttttaaaaaaaaaacttaaaaaatttattaattaatgtaaaatgataaaagtataagaaaataaatatatgtgtaagatatagttgtttagcgattaggggttgtccagttctaagctcacgtggttgatctaccatcttttgccaagagtgtaagatcgagatgtaagagacaccagcaaagtaaatgctacacgagagcatgctttcagtatggggtagtaggctatttagaagaagctgcctaccattgcagcgactggaatagaggggtgatgacattttagatcttgtttgggtgtttgtttgacctagactgagactggtgttggtcttttcaccatgataagttgaacttctatgaatcatactttgttaatagttttaattgattccggtgcaacgtattcctatatttcgagaaggatgattgggagtttgtataaagttaaggatgtgttaccaagtggttctagtaccctatttttttactgaagaactagttattctccagcaagtg

SEQ ID NO: 58869 - DNA, 752 bp, Cannabis sativa
cttgatctttctcgaaagtttttataaagattttagcaacgtaagtgctttattgaatgaatgatttcggatcccttaatagtaaaatagctctactatttatatggaagaattacatcagtttggtttcacaaaataattaataagtaaaaaatagaaaaaattatttatttactttctttcctaaaacacaaaaataaaaagagaaactaggtgggtttactcttcttttttgttggtgcaaatttatcccacaaaattagggatgtgattgaagtttaaatgcttgaacatttagaaaaaactatcttataagatatcccagccgcatttactctagttgatgtatgcaagctggctgtgaggttaatgttattcggacggtggaatgtaccttgtcaggatattctaacttattcttctaatcagttgtttacgaatgataaatcactttggatggtacatcatggagtgtattgcccgtcaaggtcatgaaatattccccacgtgtcgctgagagagatgccacgtcaccttgtgtgaatttcgggataacattttccctccaagtccacgtgggaattcttttcctcacatgtggacttattcaaccactaagctagtcggatgggtgacacgtattcggtcattgtagtctgccttgagtagtaagagtcgtctaagtacatttgggagcttaaaaaccgtgggtaagtcctctttattcctttttattttctttaaatatatgc

SEQ ID NO: 58870 - DNA, 1008 bp, Cannabis sativa
gtacacgcttaccaatattgttaaaagagtttcggtattgaccgtatttaattattggacgatatttaaataaatattttaaaaaatacgtattgtgaggttaatatttctaatttttataagtgcttaatttattgtaattaactcctaattttaatattttagtggtaaaactttcaaaatttgtattctattagtagtttaatattttcattcatttttgatgttaagtaccatattggaatatctacgtgtacacagtgtacacgtgacacaattttattggtctacataaataattatttaaaataataaaaaaaattataaaataatttgaaattaggaaaaagaaaattaaaataaataaaatataaaacataattaaaataaaaactaaaagaaaccttaattttgaaacctaaaattatcacacatccacatctctctctctcagccgcatcttccaccctctccttcattatcgcacctctccctctgttcattattgtacagccacccatccattctccgaccaccccaaaaacccatccacggcaaaaatggaagccaaaccaccatctgaataatccaactaccatcaccaaacacaatcacacatcgcatatccaaacaaagaaaaaagaaacaaaaacctatttgtttttctctctctaacttcttcatcatctttcctgcatcaatggaacccaaatcaactcccaaacaaaaaattgattccacattccaatttaacatttgaaatctctaataaatttcttttaacattctgaatgccaaacaattagcaacaaaaaaaataataggaacaagatttggtctctcaatggtgttcttccacctggttttcactacaagaaaaccctcttttgccggcgcaaggcatttttgcgccagcaaaagtacactaactgcgccggcaaagcttatctgggaagcttggtcggtaaaggactttttaccagtgcgtagagtaaatgcgccggtaaa

SEQ ID NO: 58871 - DNA, 780 bp, Cannabis sativa
tttttttttttttttttgcttcaccctttcatgattatttaaaccaattttccttgtcatttattctcaccacctacccgattctctttctttgttttcttgccttcttgttgttgtttctttctctcagataatcatggttagaacaaagaacatagggaaaccaaaacgggtggaagaaaccgattcaaccccctcgaatgatcctcctgttgctccaatcttgcagcctgctactgcaactgcttagaaaccaggagattcatcgcttcctcagcgtgaatctcagcccgtgaagcccaagctgaaaagaattcctaaacaagtcgtaagaaaatttgtgcggctctaaaaatgttggacttcatcctcttcatcttcgaaagagtctcctccacctgctacatcatctcctcctgctggaacagaggagggagttgctgcatcaactccaactggtccttccactcgcactcgtgcccagcaagcttctatcgagaaggaactttgcacaacacaaagccatgacaagctagttcctccagccaagaaacttaaggcgaatcccccttcgatttcttcaagttctgaagaagaagaaccaatggaggactcatctgttaactccgtgtctctccattctaaaaaagagattcctaacgacattggagtctcctcagacagtgaggaaactgaactcaaaccagagcctcccctgaccaaatctgctttagcgccttctcgtgcatcttcagcagccaaggcttctgctgctgccaa

SEQ ID NO: 58872 - DNA, 1141 bp, Cannabis sativa
ccttccctccgagcctcaccacctaagctctctgctgctcggcctctgccttgtgcctctcaacctcagctctctgctgctcggcctcagccttgtacttctcaacctcagcggcaagctcctcctccttagaattcttcttcgcttccaacctacggaagacaatttgaagaacctccctttcttcttggaggttgttcacttctttggacaaggaggtcatggcagctttaagttgatcagaagcctctaactctttggtcagctcggccactttcttctcggcaacaagaagttttttgttgacttcacccagttccattcggacggctccaagttgaaccttggcttcatcagcattcttcctggctaagtccactttcaacctcatggtgttggacatggtagcattcttagaggcagccgacttagctcgggaataagcataagccatcttcagatcgatctgcacagagaagaaacattagaatctgagctaagtaaaaaaggataaaaggcaactatcaagaaagacttaccctcgtaaattccttcaggactcctcccatcaccagctccagggaaagctcattatcagctccagccagctgctcattcaccttagggactaaccgagtcatgtagtgggtgagcatatctttgcctctcttagtctttggatgcagtgctgcaggtggggcaggagcccgaatccgctcttgaccagctcggatccgtcctttgactgctcgggcctgtccacaacggttggctcctcagagagatcaataattgcctcagtcggtgccttctctctggacagtgttgtctcacctcccctagacttcttgaccggaggagataagtctgagcttcctcccactctcttcttcagagcttcaagcattttctgagacatgtctgcacgaaataaaagcaacatggttagagaaaaagcactagaagtattaaagcataataatcaagaaagttaaaggcaagacggagtatcttgcgcttcggaagaagcattttcccgagtaagacctgatggctcatcatcatctgactagtatctttcctcctccaggacggctttcccctttcctactagagaagtggatggccgagtaggtagact

SEQ ID NO: 58873 - DNA, 1651 bp, Cannabis sativa
gaatggtttctgttgcagaacttgtgttgcccatgaagctcttgaaatgagacaaaaagtggtgaacaactttggagttatcctcaactacttgtccctgctcattaacaaaagaagcaatcctgttagtatctcttctattcttaatgcacgcatgaaagtaagcagtgttctcgtcccaaaacttgatcctgtcaaccttgctcttttgtttaagtaggctgccataaaggttgctgcattttagcttcttctctctagcttggtttagttccatctgtaaaatgagagaatgaggatcacgttgaagagcaaggtgagccacgttgtatataaaaaaaagaaaaatcttattataatattttttttaatgaaatcttattataatattcattttaaaagaatcttaatttatatttaaaattttaaattttaaaaaacaatgcgtaaaaaatagaagagaagaatacatatatatatatatttaatatagcagatattaatttttttaataatataacctatattaataacaattaatctatatttcataaaaaaaaatatctatatatacatataatcttcatctctttcacatatcaattaattatcaatcaatatatgtataattgagaagtatgatgtggtgatataaaattctaaaatcactccacaactatttttctttttctctcctttattctctcaattttaatattttattaaaatataaatctacaaattgatattattaaaccataaatgagaattaaaaaatatttatacagaggatttatgttattattttttaaagttcggtatttattagccaaaaatttaatattttaagtatttatgtcacaaattttttaatagtaaagttaaaattttcatataattttactaagtaattattattaatcaaaatacacaatttattttttatatataatttaaaatatattttatatacacagcgaagagcgcgagatgtttactagtataaatatagatatctatgttctctagcgtcgagcttttagctctccctaacgatgccaacgccttcttttgatgagagtcgggccactaccgccgtggtcgatttcttctcacacaagaatagaacaatcaacgatcgcgatgattcgaaagtcgttgcaacagtacgcatcaagaaagagaatttccatgggttttatttcttcttcttcaaacacgaaaagggctccgcctctctctgttttctctctgtgcacaaccgtccacaacaacataaacatcaaacgttcattggagttctctatccatttccatataattgctgctctcatttcattgatgatctacttttgtttgaataggttattttatcatacggtttgtcgttttcttagcattaaattttcattttatttgttcttgtatattgaatatttgttttgtggaattttatttgtattcccatttaggtgtccactcaaatctacgtttgtttattcttttgacctttttttctttcctttcttttcaaagccattataatataagaattagttcaaggtagtctccattacgttgattggagagagatatggagacactacaaaaaatagttatatttagtgataattttttttagtcacaatat

SEQ ID NO: 58874 - DNA, 1930 bp, Cannabis sativa
tatcatattatgtaaagcttaattaaagtttttccctaaccatcaaaactatccaaaattcacccctttaattgtattgagctttttttttctaaacagtttgttgatacacaactaatgtgatggcaatcgacatagtgcatgagttcaagcaaaaaaatatatctataaataacgatttaatatatatcagctagcttaatatttatatctataaatatatctgacattgttagagttaatatttacatatttagtgtcggtaaactagatatcagctagcttaatcaaattaaataaaggtacatatcggaacaatacttgtggtaaatgaaacataagcatttgagaaaatgaacaaaatgtaaatgaaatagacgtttacaatgatatgtatagttgaaggagactctaaaaaataaaattaaaaaaaaatgagatgacaaaactttataataatcataattcaaaagaaaagttctgtttattttcatattaacatatgtatatacattaatataaaggatttttacccggagaggcttggcaagttattcatagtccatgtaccctacattttcatgactgcttggaagatagtttacccattcattgacaaaaacaccagaaagaaggtacataattataacccatataaagagattcattaattaagttgatatatatgcaatgcatgatgttaattgattgggcagatagtatttgtggataacaagaagctaaaagatactctgctaaacgacatcgctgaggatcaacttccggagatttacgggggcaaactatctctacttcccattcaagactgctgactactctgcaatacattaattcatatctatattctacatatcattccatcataatttgtttcatttcatgagattaatataatatcatatcatacaaaccttcatttgttatgagagtaattataacgtgtataccatatttatttatatacacatatgccgcctctagaaaccactagtgatggtagcatatatatagtgatcacaaaagatgacctatgcaagattttgtgtcggatcgtttaaataggatcgatttcaattgcagtttaagttattacatttcctctatatttttttagattagagtgacttacttggtaagttatctagatatatattactatgaatgaaacattttctattatcattttagctgtgattccaatacattcttcgaatggtcataagttataagggagtgaggactctacagatacacaatataattttgtgtgaaatatatttgtggtgattgaatcaccattcaagaataacaaatagatcaaacaatgttaacataacaaatcaacataaaccagatgaatagatggcaataaaccagatgcaagattaaacagaaatagcagaaagaacaataagaacacaagagtttacaaggttcaatcacaaagtgagaaaaacttgggatcttaatccttgggaggaaccgccttgaggctttgccttgatgttattagattcagctcagagaacaagtattacagatatgaacttcatggagtcatgctcctacaacaccctcatgtgttactcgagagccactgagtttcaagatctcaggctctattacaagaccaattactctctctgttttcactctcttaatgctaactgaaataacagaaaaatgacctttatatataggtcgaacaagagtacaagattgggcacaaaacataacagaaaactgttaacaaccaactgtaataactgcctgaatacttaaaccagtaaatttacagttgaaactgcctgaatacttacactagtaaatttttggtaagtggttggaaatatgtgctgaaaatcgctcccttgttcagaccgaatgtaagttgtcaataagatgtata

SEQ ID NO: 58875 - DNA, 867 bp, Cannabis sativa
tcttactcaaaacaaagaatgaggcctttaccacttttatcactcggaaaagactgattgaaatcagacaaggaagaaaataaagaaacttagaactgataatggcttagagttctgttctgatgagttcattaggttctgtcaacttgagggaattggtagacacaagagagttgtaaaaaattcacaacaaaatggacatgcttaaaaaatgaataggattctattggaaagagtgagatgcatgctcaagggtgctggccttgacaagaaattctgaggtgaagcattgaagactgcttgctatttgataaataggtgtcctttgaacagctctcaaattcaaaacaccacaagaattctggataggacatgacccaaatgttgatcatctcaaagtatttgggtgcacacctttgcacacaccagacaagacaaactagatccaagggctctcaaatgtttgtttcatggttaccctgaaggggtaaaaggatacaaattatggtctttggaagagggacatagaaaatgcataatcggcagagatgttgtattcaaagaacatgaaatggctatgaagacagatgcaatgaatagcaagccaactaacaaggagatgacaggtctagaaattaaaagtagcagagaagaagagcatggttcagatcagatggatactcaagagtacatacattcagagacagatgaacaagcaacagaagatgaaagttcaccagtagattcataagactaccagcttgttagagaaagagaaagaagacaaataaagccaccagaaagatttggctttgctaattgtacagcctttgctcttgcatcagcagaagatattgataacacagt

SEQ ID NO: 58876 - DNA, 787 bp, Cannabis sativa
  modified_base (48)..(62): a, c, t, g, unknown or other
ttaaaaaaagagataaaaatgatagattttaaaaaagaaggtaaaaannnnnnnnnnnnnnntaaaaaaggtatagagtgtaattttctcaattatcaatggtgcggccctatgtaaagcgagtccataagcttcatccatgttcaatttgtcagggagtatcgcatttggtaacttcatgttaaaggcgtgtactagggtcgcagtcaatagctggaccatgcgcaagcccatggtcatcccaacacagattctacgtccagcaccaaatggtatgacttcaaagtcagttcctttaatatctacatgggccttttcaccaccaggtaagaatctttcgggcctaaactccaatgggtcagtccattggtctgggtcacgagctatggcccacacattgactagaagggttgatcccttggggatgtgatagccgtttatttggcaatcctggcttgccattcgtggaagtgataatggggtggacgggtgtagacgaaaggtctctttgataacagcttgaagatatgtcagttgggttaggtccgcatcacttacaagcttatctcgacccacaacgtgatcgagctcttcttggacttgggccatgaggttggggtgtttgatgagttctgctatggcccattctactgtgcttgatgatgtgtcagtacccgccatgaacatgttctgtaaattttatgttaaaatgtaatatcagtatgttgtaactactaatagcattaagcttgtataatattatattaagactaatcaatttactttt

SEQ ID NO: 58877 - DNA, 713 bp, Cannabis sativa
aattcgaaataaacactgaaaaatgaaaaacgaaaaaaatcaaacaatcagaccaaaaaactctaatcatgtttatatgtatatatgcacgtacatatcgcataaaataatataaatatataaaagagaatatcacatatatttttatgcaataaaattataaattttacgtgcaaatatatataaatatatatgaaatatgtatatacgtatatatatacaataatacatatatatatagtatatatataaataaaattaaaatatgaatatatatgtatataagtaaattgaattaaaatgtatatatatgatcagaattatatgaatatgaatgtatatatataaaatatataaactaataaccgatcatatacgtatatatatatatatgaatgaaactcaaataaaatcaagacagagattaaaatcgctctgataccacctgttagactataatatataatataaaaatacagcttatataaacgatatgtaatacaaaaaatactataaatatatcgaaatgtatatgcaatgaaagatcgaaatagctccagccattgatctttgagctttaatccctgcgatagttacggtattggagttcgggcttccttgctctctcaactctcttttagatggatttttgctgtataaactgaatgaatgaggagctcagggaccgagaccctatatttataggtgagata

SEQ ID NO: 58878 - DNA, 2226 bp, Cannabis sativa
gaaatgagaaatgatggatgctaggtattattttggtattttattgacttatttaatctatctatttggtgattacataactgtgggaatattattgttctttaatactgatcagtggtcctgattttgttactaatattttcttattaatataggagttaatccatatcttttaaattaatattttgtaatataaataaaaggatcatttataagctttatgttcctacaaaggtcaaagtgtgacctttgaccacccaagttatggatattatatatctgtcacagcctagggctcgggtcgtgacaatatatataaaaagtatatattttaaatattaatgaacaaaattaaaataattatacgtatataaaacttattatagattccttttagagtaatttgtgacataaatacttatatttaactctcggttacagataaatatataagtttaatttttaacgtaataatgcctaagttatatttttggaacttccgtaagtacctgacatttaagtgtcaagttagtggtcacgtgacaattcctaattagtcaatgtcattaaatttttatttgtttatgtattataaaatttaaatatatatatatataaataagaaaatgacataataacttgatacttaacaagaagatactaacataaacataaatataatttaagtattattaccgtcaaaaattaaatttaagtacttaattatttgcaactcagagttaaatttgaatatttacagcacaaattactcttttttatatataaatatttatatattgtacacacataacgtaccttccgctgcgaatgggtaaagatcgaaaaatgtggtgactgcctttaatagtttctacaattggaaaggcacaataccactatatcaacaaacaaattataattgttctaaaagaaaaacaattatattttataaaaaaaaaaacgagaaaaaaattatatgtttctttgaaagaaaaaaaaaagttatatgtaatatatataaatgcttagaataaactagtctaagctctctctaataacttttgttgatgtttgcaaaaaaagaatttcagaaaagaaaataaataaagctcaatctcaactgaggtgagagacttgtatttataggaagagattacaaacactagagttggttagaaaaactaaccaaagaacttgacataacagcttttacaaaagattagttaaaacatgaaacaaataatctaactgactctctgactctaagagaagacagagcaagacctaacaccccctcaagttacactagggcttgtcaatgttaacttggatcgaaaatgctcaaactgtgttatgggaagaggttttgttagaatagttgttatctagtttcagctgagacatgcctaatatcaagttgatcttccataacacgatctctgatgaaatgaagatcgacttcaatatgcttagtcatggcgtggaagacaggattcgaggcaagtatgtgaacaaggattgtaaccagatcaactctattgtagctaacgtaatggcacggtattaagattttgtgcttgaacaagctactactgtttgtttgcatgaacactaatggatgagatttttaccaaggaagacacaatatcctgatgtggacttcctatcatctacaaaatttgcccaatccgcatcgaagtaggcaactaattgaagacttggtgaaagctggaagtgaagaccgagatcacaagtactagacaaatatcttagtattcttttacagactaaccaatgtgaaaaagtatgagattttaggaattgagagagtttgataacaacaaaagagatgtcaggtctggacatagtaagatattgtaatgcaccaatcacactcctgtgtagaatgaggtcacacagaggtgttctacttgataaagagagcttatttccttgaatcatgggagtgggagtaggagtggcttctatcatattggtggatctgactagatcccttatatacttggattgagtaagataaattttattggaatttcttgtgacttcgaagcttaagaagtagctgacagagcttagattctttaaggaaaactgtttgttgagatcgactatgaggttgtgaatttggtcaatatcttctcctgttattagaatgtcatcgacataaaaaaggagaagtaatagcttgttgtttttcttgatgaa

SEQ ID NO: 58879 - DNA, 1430 bp, Cannabis sativa
aattcaaaaaaaaaaaaaacttaatccttttaaaaaaaaatatatacaaaaaaatttaattaatgatcaatttattatttcagttaaaaaaacaatgtagaatagattttaattatgtgaataattagtcttaaaataagacaataaacactcctaataattttgtaacgtaatctattataaaaaaaaatgtaaaatgcaagattaattagtaaaaagataaaacatactttaaagttatagtataataatatattaataaataataaaacaaaatattatattcaaatcaaatgttgtaccaaatgtcaattaggcacagagaatttagcaataattaagaattgtcttaaaaaatatgaatttaacaataattttatttttattttctcattaggcataaatgttcaaatggtattgtacttgacatactatgatgcactacaaaaaatcttacctttagtcacaacaaaatttgtgactaaaagtaaaatagttgtgactaattataaattattattcttatgttgtgactaaaagatccgtgactaaaggtactagttacaaaacttaattattcttatgttgtgactaaaagatttgtggctaaaggtattaattataaaacttaattagtgacaacttgtgtctaaatattatgttttagtcacaagtaagtttttgttgtgactaaaagtcacatttagtaacaaaaaattatattgtgattaaaaagttatcactaaagataactattttttgtagtgatactaaataaattttagtagtcgcctataaaagtcagactaaggctaagcaagttttaaaaattaattattcattttaatgatttaaagaagattaattcatgacccaaaaaatagtatatacatttcatagaaaagtttctaatcaatatctaattacctctcacattttattgtgaaattagttacttttcatatattgacatttgaaagtgtgatgtttaaatataatcataaacttttttgtaatatgatatggtaagatgactattgttatatttaatattttacatataattagataatgtatacttagaataaaattattaaactaaaattctcaacaaaaaataataataataagaaataagaattacaaaaaatttaagttctcctttctgacaaattttatttgaatatataattagatgaataattataaaagaaaataatttaaaagatatattgataaaaaacatacaaaaattaaaaacatatataaaaaatataccacattttgttacattttttcttaaattaataaattaagaacagtaataatataataataaaattattaaaaatatattattattttttgttattatatttataaaaattatctttgtttttgttaaaaaaaaaaatacacacaatgcgcga

SEQ ID NO: 58880 - DNA, 1079 bp, Cannabis sativa
agttgccgaaaatttaaaaaaaaaaaaaacagtataaacgtaaatttgggcgtggcacagtatttttgtaatacaaggggaaaagttagtaaaaagtgtaaatttccctatattttcggccgcggcccaaacaaaagcccaatacctcaaacaagggtttcacgtattcttcctctcactcccttcctacattgttccttcgtcgattttctaaacttctccgtctccctcactcctgccaccctctctctccgtcgtctctctcactccccgaccacactccctcgccggaatctccaccgtccttttactcagtgacggtacacttaacctttacgcaacgcagcagtacatctttcttcaccctcaaccagaaacgactcaacatcagcagcagcagaaggcggcaacgttaccggaagacgacgaagaagactctctggcgaaggtttcttcattcccaaacccttcattctgaaataataaacttttattcacaattactaatgggatggttctaatacttgaatttcaataggtgttggtgacgaattagccaagttttcttaacttaatatggacgagaataatgattcaagtaacaatgatagaatccaacagtaagttgtgtattactatacaaattattaggtgaattgaattagctttgtaacttgtatgattatttttattttttgttacagagaagcacctcaactggtttctgtgcttaaagaaatgaaaaatgggttggatgctgttcggagcaaagtccaagatttagttgccaaggtaggaaagaagtaattttgaatcaaacccttatgagctgtgtgtatattgttcctagtttatcactttatctctcaatcataattttatttacttatggttttagttgatggttaataagcaattaagcgattttttttcgtggtttctttgatgtcttgttaaaaatatgaatttctcatgaatggtagctctgaatgttatctttgtttccgtgaggtctatgtttggttaattaacccctagcatatgatttgaaatctttgtaaccccgaatattagatggc

SEQ ID NO: 58881 - DNA, 1313 bp, Cannabis sativa
ggagaaccaaaataaaaaaaaaaacacaaaataaccatagagaaggaagaagaaatatattttatagcctccatcttccacacccacgaatagaactactacaatacccaaaaaataatcattaattccagcaagatggagcaagaacagtgaaatcgacgttaaaagaataaattatggagaacaaccgtaaaacaacactaaaaaaaaaaaaaaaactaaaaaataaacacagtatactgcagtatgaaatttataaaaatatacagtaaaaaagtaaaaaatattaaaaaaatagcaaaagtcagtataccatgtaaatttccctaaataatcatagcttagttggttgaggtgtatgatatattatacaatgtcatggattcaaattccatagcactctttttaattttttttattttatatatatttctaagggccccaaaatttaattcgccttaagcccatatattctcagggccggccccgagggtataatagagacatcatatataaaagtgggtatatatattaaaaaatatagaaataaaagtaaaaattaaaacatgtaaagtaaagtaggtatacaatataattttttcttttaataattatgtgaaaattacaccgtttacaaattttttttaaacattttaaggaatatgacatttttttttgttagtaaaaagtttcaacgaccaaaaaaataggagcaacaaccactctaccaaggtaagggcgagagtttattcaaatatagtattcgctatcaacaaattctgaatacaaataagattccctggccagtgacaaccaaattacacttttacgtcaaagtaagtttgggcaaggtatggacaacaccatcacaagatctattacaatgaacaaaactaacaatttggagcctattacaagaccaatgatatcatctaaaactaaacccaaataagtaatgatagaagcattctttttaattttacgcacaacattcaaacaatcagattcaataatgatgtttccatacctaaaagaaaggcattgaatcaaaacgttgtggatagccaaagcttcaaccactttagaaacaaaataaccatccaaatgccaacttgtcgaagctctagcaactctcatcaattcatcacgaatttatatgaccaaaccactacaatttcccatggaactaataggaggatctgtattgactttgagatgaataagcgaagaggtatccatttgggtaccaggaccaaccctgagttaatttgggccttaaaaaaacaaaatttttgggtctttttttttttttt

SEQ ID NO: 58882 - DNA, 679 bp, Cannabis sativa
tcttggaagaatctgcggcaggggtaaccacgacatcgctttttctcttctgaggaacgataggagacgtcgacgtcgttccagtttttgccttgcgattaagaacgggtacttgtattaggaaagtcatctctgcaaggacaagaaaagataagttaaaataacaataaatttaaacgcattagtctatatgtgcgatatgttacgtgatgtcggctgagaagtgtgcttggaaaggtgtttgtctatccgctccttttgcttttcagacggctccttgtacactggctctctttgaagggtcgtgttctctggaattagcttatgttcctgtaacttcaaggtcgtgcacagtaatctccagtcacgatcttgaatagggaggctttcgagaatttccgcggcttttctgcgagttgcgtctagcacaggtcgagccagtctatctgcgaaaaataaggaaaagcgggttagctcaaaatcacaaggtaacataaaaattaactaagtaaggaaatgtgcgacgtactaggtcgacgattaaaatcagtcctaatttctgggacttcaaacacgtaaaaccacttagatttccaatcctccatattggaaaccatgccttccaccccgttgatttcagaagtggcccacttgatgaaacaatagaagccgttgtgga

SEQ ID NO: 58883 - DNA, 1371 bp, Cannabis sativa
taaaaagattacaatccaatgtgagaatcaagaatgtaaaaccttgaacacaacaatggaaaattcaagaaaacaagtaaagaaagagatttgaaagcttactcactagtgaaaaccgtcaagggaagcctatgggaagcttggatcgtcaaaataaagcgagaatcccaggatttgtgggacttaggggcgtcaggctccaagagaaaatgaagagcttctctttttcctttttttggaagagagataaagtaaatggtgatgtgggaatgtgcttgaccaaatgaaccttaataggttttggtgagcctttctcatccaacatgtagcaagtagttacacaacctacaaaataaccatgtagaatattatcagttccttattggggaacgtgagttgccaaaaaagaaaaaatatttcataactgaagttggtacaagaaacttgcccagttaagacttcaacagtcaaaattgaagatagaaagtccctatctgtcagacgtctgcacagggaattgggggcaaatgttatcccaatttttacccacatgacgtggcatgtccatataggcaagattgatgccacgtggagtacaacttgtcagtaagaagaccaagtcaccatgcacaacgtactagatgacggaagtccaaatacttaagcaagataaagatacaacaaactagctaaccagggggtctggccggaccactccaggttgagcctagtgccaataagggctagccagcctccaacaatggttaggttgaccaacctctcttctagcaggcacttttggtgcctctacaacttttagcctagacaacactttcagctacgaattgggcttcaacaacccacgaaaaataggagattaacttcagtcatttacctattctttaggactaattaacaagttattttcttattaatttaatatgtaacaaataggtgatatctcctcattttgagggatatcaacctactatctcttgtatgctctctcctatataaagcgcactaaactaaacctaaagtctctacactctaagttctaagtcttaagctctcactcttaagtcatagagttcaagcactcaaaatcctagctcactctatcttctacacaccattagcagtgtagaagagactaagtctccctcatctctcttgcttgagatttgccactgattctcacaattgtaatacgaagagagccactctagaactcacaatacttgtgatcaatctaagtggtattatctctcatatcattataatcaaaaggaaagtaggtcattacccgctaactaaggaggtcaaacctctataaaatacggtgttctttttgtttgcttgttctatttg

SEQ ID NO: 58884 - DNA, 1947 bp, Cannabis sativa
tgatccaatggctaaaaaaaatgtaaccatgatagttacaataaaaatgtaaccattagaacctcctccatataaatatatatatatttagtgaagatagatcatgacttgacttgcaaataataattaaatagagattggaataagatacaaaaatcataattattttttatcacatgggagaatgtttgtggattattaattatatatgttttaataatttctctaattccataatcatattgacttaatttcttaccaattaaaagaagcttccgtgaaggaagccaatgccactccacctacaattggtacaagagaagaaaccacccacacacttggtatctgctcaagtacaccagaaattatatgcttaaaatgattagagagaatgaaaaagaaagtaactaccatgcatccttcttataacctgttaatccatatgcaatttctaacatcgtgtgtatcataagcttattcttattaatggaaaaaggaaaaaaaaaaacagctttacatcaaccaaagaacactgtaaaagggggattttacatgaaggaaatgcatacctctggatccacatctaggttaatccagagtaggacaattaaccttctttctagcaattcttgcagcagctactatattgtctaagtcaaattcactatcaatattaacaaagacaccttcttgtgcagctaaaaccaaatcgtctaacaacttgccattcccattaaagatacatctgcacaacatcagatgaagcttatactaaagagagttgcagtagaatttctaatacacataaaagaacaagaaatgatgacacaataaatggggccaagattattggcaaaggagatgatccttcctcggatatttgacttaaaacttcattaacagcacacgccggtactggaggttcataactttgcataagaaaaaaggaaacctgaaaatcaagaaagatattttttttttactaaagtaatctcatttatttcatgataatatacttccaacataagtataatgctacataatattgcagcagtcctctccttacccagccttccataaattactctttagcaaacaaaattacatcttcttcagagccaagcacttgatcaagctcttattcaaaaatcatttcatctaagttggtttattaatgtctgcgtcgttcatgattcaacatatctagcttgtatactacaacacaagtactaatcctataagatctccgtttcaggatgggtttaaatgtaataagtctaagaaacgaatcaaaaactataaataacacattaacaagtaaaatacacactttcatgagagggtgaccttaaaagtccaagataaagatgaccctttaaccataaaactagcaaagttacatgttaaaattggcaagagagacatgcatatataaatatgttatagttaaaactataaaaatttattctccccttttcaatgaatctgaattgttacatattcttaacagatcaatagcccttcagattaattgttttttcctttgttgcagagttgtgctttacaattgcttggctcagctgaggaacataatgtcctaatacatagatgtccatgaataaaaccaacaattcaaacaaagtattatgatacatgaatgtaagtgtgcataagatatgtggttagcatgaagaaattggagaactggttggttcaaacatgaatttagcaattgaatttagagatgtttggtacttaattaattttattaaatcagcagaaaatgagttaggaggctaatcacctgcataactctttcctgaaatacaaaagtcccttcctttgtacctcattcccatcatagttgcaaatcgtagattcgtagtattggtcactgttaaaattagacctcactgtaacctttattattacagttttacagatgaa

SEQ ID NO: 58885 - DNA, 1141 bp, Cannabis sativa
  modified_base (1083)..(1099): a, c, t, g, unknown or other
ttctgtctcatcctcacttattttctatcaaggacggggcaagaaatatcctaatggagcggggacagagcgagaaatttgataaagtaaaaattaagtttatcttaaaaaatttaatgtgtaaaattattaaattatttaaaaattaaaatattacatattatttattattcaatatactaattattatataaaaatataacttaaaaaattataaaaataacactaatatactaaaaaaaatataaatatatattattaaatataaaatattaataaaaaagataattaaaaaattaaacgggtctctgtcggggcgaggagtgtcatccccgtccttgctccgtttaacattcgggaacgaaaaatgatccacatctctaccctgttacctatttagacagggtattcttgccccattaagagtgggaccccacaaaaacacagagccctatccctatggagaaaatatacattcctacttgagaccgagtttgtgttgtaatggatgggatgtcttttttagaatttcagatgtttgaacccccccaccactaatttctcaccttaaaaatgccatttcaaggtcggaccaaaaaaatattttcctgtaattttttaaaatactgtatatttttattaattaaaaatacaatattttttcttctttaagatccacttaatttcaggatcggcctaatattgaacttatcctataaattggtaggtcatatctttggctcgattcgcaacatgtgtaacacatggaatagatgccctcaaaaacaatttttagtagaatggagaagagtaatcggtagtgaaatttttttatattttaatttttatgcacttaattctttttttttttaacaaaattcccttaagtttatttttctttgcgaatttgaagcgtctgttaattattatcgttaaaatatactaattggataactactgtatatacctatgtaacgagaaagtaaaatttcaaagtcaatacaataataatctagttatatttaacagcgatatccacacttcaaatttataaagaaaaaaaaaagagtaaataccattttnnnnnnnnnnnnnnnnnaaagttactaattggaccctgtgttttgttaaatgacacaat

SEQ ID NO: 58886 - DNA, 855 bp, Cannabis sativa
taatataatttataattttgacaattaaaagtaaataccagatgcaatatattagtttttgagaaagtttgataatttaaatatcttcttaagttaattcaaaaataaattaaaaattgatgttccaatacttaaggaaacataacttatgtgtgtaaaataaaaaagaaaattgaaaattaatctctaaattgttgataattgaagataacatctgtctaaaaattatagataacaaaaaataatgatactcatgggtggactttaatcttcctttgcttcgacagagacaatagtataatttttgtattttttattttttattctagccgggtccgcatataattagattggccattttttcgttgataaatttaatttggtagtgtcgacaaagcagcggtgttcctgcaaatagttatttattttcatttaagataattacatggtgtgcataattaatttaattaaaaaaaatctatttatgaaaggcaagtaaagttatttttttttttatttaaaactccacatcttataatctattagttgggcagcaatataatccattagttaggcagcactaaaatacatgtatatacacatatatgtatttaaatacacatatgtgtatatatatacaacgaataaaatacataatatgtaatatatatatatatatatatacatatgcttttctaatcattctacaacgaaggaattaaccaaacatgaataataaaaaaaacacttaccttagatgatagaaactttgaagcaaataaaatacgcggtgacaaattaattgtagcaacgattccaacaagtgtaattaattaacaaaagaagtgaaaccaa

SEQ ID NO: 58887 - DNA, 526 bp, Cannabis sativa
agaagcacaaaccgaaacacttatgttgtcaatgacctgttgggatgaagtattggacgattggaaaagattgaaaaaataatcattgataacatgatcaatgcctgttgtccaattcctccaaacaccatttacatcttgtaactgttgaatctgatttgatcttttccttgcactggcagtggcatgaaaatacttgttatttttatcccccgaatgaagccaatattgctttgatctctgcttccaatacacttcttgttgagcaagaatttcaaagtaatttgttttttcaatgacataactttccacatcggctggagtagatgagtgtttcaaattggcaagaagcttcttactcttagaaagccgtgatttaaaattaccagagattgaacttccccaattaactaactgctttaggcaaatggcaagcttatccgtgagctgaatatgatggcttgaatgccatatatcagcaacaagttgagcacaaaaaggttctctattccaggaattttcataa

SEQ ID NO: 58888 - DNA, 861 bp, Cannabis sativa
catctcgaaatacttgagatgagaaagaggatcttctctcccagtatacatcttccacgttggcattttgaacttgtgaggcagtggcaggagattgatctctggtgagagggagttctacgagcacggtctaactcaagatcattattacgctgtccggccatgccatgaaacatattcttcaactcgtcaagcttggcctgtacggctgggctgacttgctcgacatttttttcggtttggattacgtcggcgtctttctgagcagggatttgagtatgggatctgcgctcgacgattgctgtagtattcttctcgtctgttccccttcttctgtttagatcgtttcttaagtcatggtttgttcccaacctatcaaacacagaagagcctggctgccttaacaattgattcgcttggttgacaggtggaataataccataattctggttggattcgtcaggtatggctcctcctgatgaattcccaaacaaggtctgcctgcctacctctgggcccacgagtgggactcgtaaccggatattggacggctgaccattggttgtctgggaggtattcatcgtcgagtcatccttcgtttcccccaggggaatgatgttcggcgtttgctgacctacagtctggtaggctcttcgtatcagcatggtagcttgccaactacgatcttcgatctctgcatggtgagcccttaatgcctccatctctttgtctctccattcaacgaacatacgcctctgttcgtcaaacgcgagatttactgcaacatgcagttcatcctgatcatgttgcagagtgctgctatgactctgcatgagtccgagcgtagcacggagattttgc

SEQ ID NO: 58889 - DNA, 1155 bp, Cannabis sativa
tatataattacatagtgggcagtacattacaaatgttgattgtaatctttacagcaattattccctcaaatcatgggatttgattacaaattatactaagtaaatgtggttttttatttagaatccacatagctgtgagttttctgcttttatttggccgagacgaacgcatattttaaagatatatggtaagccttatctcatggggatgtgttgctcggaatggagccgagttacctttgatgacaagctggtgctcgtcatacgacttttcgagattgatattgctttaattctgctaactacattttctggtatcgagatgatctttctcgtatgcatgccatcttacaacgagatagacgtctcactgtctgtcatcttgagtcaccgaactatttatacttagtttgtatactgtgtagtatacgctaagtgtttttatcgtctcttttccacgcgatgaggttgaagtctcgtcatgcacacttgcactctcatggtttctcgtcgacacataagttagcagtttgtacgcttctatctcgcagaagactgttcagccagccgagttataagcatactctgtaaattgtgtctctaacgagtgttccatgctaagtgtacttacaattccgtgtttgagttcttcgttcttcctagctcgacacgttccctcttccaatgtccttaccaaattttcggtataacaactttgttttggtattttggcaaacatatttgctttacttgttatttttctgaactttcgtatgaatttattgaacgaattatttatttctattttttttatctttgtagttttgtagtgtcaaaatgtacaatcaacaccccaacaccccaatcctcatctagaatatgcctttaggaatgaactcaaaagtgtgaagatgactcctggtcagagcatcatttcacacttactcatgatgaacatgaaattccagaaagcagctatactaggaattattttatctgaagagcaaagagttcattttattctcaacagtttatctcacttgagttgagtttaacttaaccaatttatttgttgttaacaattggaactcgtctgacatagacaagctggacgctgaaatgcgctcttatgaacggacattgtcacttgcatgg

SEQ ID NO: 58890 - DNA, 1451 bp, Cannabis sativa
tgtgtgctgtaaataactagtcctaaaggtaagatgaaagggagagattaattgtcataagagattaactaaagggtgttgaagacaatctctcccctttacaggtaacaacagctcttctctgttttttcattgttattttattttaagttagaaacagtcacaattgaatacatttcaaaatgggcaatttacacttagctctgggctgatctaattatcacaataatggcatatggtaatggtaggtacttgaaatcataatgttgatttttatgcagaaattagagtgttgtcaaatgagggatagagatgaggctcttagtcgtttagaagaaagtagaatggttttaatagacttagtgaggcgatttcaaggaaagacatcaccagatgtgttgagagaattgaatacatgtttcagcaatgctgttattcaaaacttattaagagatggtgaaaaggaggaggaggaggagcctaacattttgcaaaacagaaggtggatatggccaaaagctttaggaaatattgttctcaaacttctaatcttctccgcaaccgcaagcatatcatataaggtcactaattgtactcgaaatcaaaccaagcatttgtactctgtttcgacaagaaaaactcctccgtttttggattcaactgaaggacaaatcaaccataatttattcaatgtgtttcatggcaaggggtgatcatcaatatacacttttttttttttgtaatcttattgttttacttggtatattttttatttttatttagagcatatgcttactttcttgtcgttggcatttttttggtttcaagaactaaataatatattatgcacacacacgcacaatgcaataattaaattaccgaataacttggtgagagttccgcgggagtgagctgccagcagcggtgacaggtagtgcggcatattattgatagaattaaattaagggtaaataaaggtacttaatattttaatattttaagtttttaagtgataaaattaatatttatttttagtaacaaaaattttaatttaaatttattaaaaaaatatttagatacttatatcgttaaaaataaatattaaatttatatcacttataaaattaaaactttaagtacttgtactgcaattcactcttaaattaaaaatttctgctcgagctattaatatttaataaaagagttctttagattgtaaagaaatgcattcacattctctactttacccaagctattagaaatatcctcaaaaatacacatatatataatttatgaatttttttttttcatatttttcatcttcatcaaaaataaggaaataaatctttttggagaagaaacaaaattatcccatttttactagtcctataatgtaatattttcaaaagatattaagggattacattgtgttaagaacctgaattctactg

SEQ ID NO: 58891 - DNA, 1239 bp, Cannabis sativa
tattacccatgaatggataaaattagaaaattttgagtttttatgcttaatttttctatctaattaaaaaaatctgttcattatttgtagggagggctcaattgattcattcgattcttcttggagccagaaactatttgatgaatttgtttatgcttccctaaaaaatcacagcgaatattgacaaatgttgcagggacttcctttggggctccaatggaaatagaagcaaaatgcacatctcctcatgggagaaagtctgtcttcccaagaactccggaggtcttggatttagagtagggaagaaatggaacatagcccttatggcgaagtatatttgggctatatcaaacaaacaagacaacttttgggttaggtggattgatgcggtttacttgagagggttgagcttttggacagttgaattcaaacaagacgcgagctggtattttaaaaagatccttcgtctttggtcaactgttaacgaatccaaaatcatggctgccgtaatgagaggtaaattcagttcaaaattgttttattactcttacatccaagctcacactgttgactatgctagaaacatttgtgatagaatggttctcccaaagcataggttcataggttgaaaaattgtgaatgaccaactgctaaccagagacaatatcagcaaattcatctctattccctctgatctttgtccggtctgttgtgtggaaaaggagactcgccatcatttatttgttagctgctacttcactcgcagagtgattatcgagataacagcttggtgtggccatttcgattggccttctaacatcaaagaatggttttcgaactcttccaacagcctgcagaaaaaggtgctcaattcagttgttttggcgaccatgtacactgtgtggacgaatagaaactgttgtatctttgagatgaaatgtaagacagctagaactatgagtaaggagttaaaatcttgtgtaaaaaccagatgcttaagtggctgtattgggggaaaagggaaacttgatagctatatttttaatgtaatctctagctggttttgagggctgggggttcggtctgttgccttggttggcttgtaatatttgttttactcttgtttgtttgaataaagattccttttcttgttcaaaaaaaaaattaaaaaaatctctcatttttatatcatatgtgctaagattgttccatcggtaaaaaaaattaaaaaaaaaagtt

SEQ ID NO: 58892 - DNA, 1016 bp, Cannabis sativa
ttcacaattaggaatttaatacaatctttacaataattagtcatgtattaccaacaacaaccaagattcctagttgtacacataagattccctgtgtagcagctaagttcttcttcgatacttttcttcaatttgaaatcccttcagatctgattacgaagataacaccgaactcctttcagtctgaactcagcaccacaaggctctgatctttctactatggatatccatcaccaagctatacaatcacacctgaaaacagcaacaaactatacaagataccacacacaatacaacacgatatatttgaactaaccaagattatcaattagctagctgacccatttacagaatgaaaccagctatttatagacaatagttcaaccgacctaagaacaatttataccaacccttaaagcataacagactcacgtggactttaacggaatactagtatgcagttataacagattaataccacagataagactggaatcactattaatataatgtgtcaaaataaaaaaccttacagtgcccattaggaccagttaggcaggatgtcaattagtgtgtccaatgcacttttctagcacgaaccttttggcactacataaaaggcacgacatgtcgtgtctatagatagataggcacgaaaaaaaggattatttggcactatatttgtcattcccatagacttttattcttgtagtgaaagttcgcgcttaaaaagagtcttttggcactacattaaaatgtcggccataatagtaatttttaaataaaaaataatagtatattatataaatcaaaatatatataattttatcaaatttataaataaaaaaaatgtataaacatatttatataacataatatgttagttatataaatgtgaactttaatgtaaacaaattattatttcaaaaaattatatctcatacaataatttttttttagggatctataatattcaaatacataaatttatacaaattatcttttctacaaaaaaa

SEQ ID NO: 58893 - DNA, 2736 bp, Cannabis sativa
gagatttggaaaaatctcatgagcatattgaaaattctagtaaactctgtgcgttttgctgaagcgatgttgtaacaatctgggcaattttaaacatagagaatttagttattcaaatttttttttccattgatactttttattgcatataatttttcagcaattgattgtaatcatatttttaatcatactctcatttctactagtttattttagtttcattactcaaccaagataattttcttaaaatatcaagttgttaagaagagttggttttacatcaaatttgacttgcaatctatgtgtagacgatcttacttatcattatattacctgtgtggctgcgtatacttgggcaaaataaattttcacaacaacgcgtatattgcagttatttagtctcacttataaagtcgaatagtttacaatcttgaaatatagattcaaatattttgttacacggataattatttttcttatacgattagtaagcaattgcttaaactttatcttcagtattgtaaattatttaaaaaaaattaaaaatttataagtcgtcttaaataattgcaatgtacacgataaaaaaagaataaaaaggtatcctagagatggaaacagataggataatctattaaaatacctctttaagaaggtgtaccacatatgtattttccaaactttgattcccgaactccctatcgttcattataatttttgtattattatatttttttcatttaatattttgcattaatttttcattcaatctttattgtaaaggataggaagtctcctcaaatcctctaacatcataattatataaatagataaatagatgatatggatagacagagatatagatagaaagatagagatatagataattcacataaatgcaacccatatattcatataaatgcaaaagaaataaaattatataatataaagaagattacaaattcctagatatgtacacagatatagataactgcatatagtatcaatgagaaaaatgacagccagcccatatattcgagtagtaatacataagaaataaaactctacaatatgaaggagattactaatttcttgtgggccaaatgtagtattcctaattcttctctatcttactattcaatagtcagagcctgattaatcgattgtgcattaataataagatctcgaaaaaagcgtttgatagaatgctgtatattgtatattgtatagcattaccttagattatattgtataataatatttttataaaatattatatttaggttgagttaagttatgttcgatgcacaatagtattatgttaaaataaaatatatattcaactatattataagcgattctaacccctatcttgactcatgattatcaattatacctataattcgggttctggtccgaacttagatcccgactttgaccccaatctcaactcggaccctacactttacaccctgacctgaatcttagccacaacatcgaacttgggaaccctacttggaccctaatcatctctctctatctattcaatgattggaggggcagaggcctttggtgtcccctccagtccaaaattggagtgtgtcagattgggatctagggccgtatcttgacccaaaccctggctctaactcaaacatttgcctagacatcagaccctctctttagctccatacccaaccgaggtacgaaccttgacccagacttcgatcccgacctcgacacaaagttagacccccatccccgtccctgatcccgaaccccgaccttgatcctggccttggcttcagctttgacctggatcccaggcccggacactaatcttgaccccgatcttaactcgaacaccaacctcaaccccaatcttaactcgaataccaacctcaaccccaatcacgattgtaccacaataagatcaaaattataaatattacaaaagaatctaatactgtccattatacatatatattgaataacacaatttataatgtattaaaatctatacaatacttttttaagtgaaagcaccacttttgctcttacaagtaaaagcatttttcacattaattttaaatttcatattaaatatttatttaaatataatagaatattattagcatttaaaacttctccctaaaaatatatttgggactaaaaaattatattctaattgagaggttataacaaaacaaaggtacattaaaaaaatgtcaaaagatgccaaatgtaataataataacaataaataactattaatattatatcataataaaactattgttgtaataaaactattattgaataaatataataccggaataagattattaattttacatatataaataaatttataaactacatatttttattaacatataattaatctaatatagagtatgttatatgtggatagataaaatatatgaatgtgtatataaaatctagaattaaacgaacatatacactatataactaaaggatcaaaatatctctagtcatcgattttttgagcttcaatcccacactgaatttgcaaaagaaaggaaatttattagtgtgggtattcggtcttccaagctcgatttctctactctctttacatagatttactgtgttttacagaatgagtagtgagctcagagatcgagaccctatatttatataggtgagactttccatcaaagtctctaccataataaattgtcagaatatttt

SEQ ID NO: 58894 - DNA, 1500 bp, Cannabis sativa
caacaaattataatttttgtgattaataactttaatcacggactttttaatcaatcacaacataaaaatgataatttataattgtaattttttttatataaggagtaattttaagaaaatgatcacgtatccttaaccaattgagtgaagtaaaaaacacaatatggttaattagaaaatgttgaagacaaatccaaaaggagaaattgttatatagagtcgattaaataatgcatttttattaaaactaaggtcttttttgtaagacaacacgaccatttatttctccgaaacgtttgtcccttcctcggacaaaacgacatggcgtttgtttgagaaaatagactgtttttttattgctgagttcaattaatttcagaattaccattaccatttcaatttcaaataatgactgtattatcattttactcgatctctaatttaacttacacaataataaaataatctcaattatatagaacaaaatctccatgtgagttaatagacatgataacaatcctcatctctttgaactctttgaactggtcatgtaaactacagtatggtcatgtaaactaataactacaatcacaacttgatcttcttcttaatagttttactcatgttataagggctaagacaattttattccaatcatcaagattttgtagttatataaagaagtagtatcatccttcttaaaactatataaaactttcattttaagaaaattttaattgttcctaatttaacactccaaatgtgtagaagtatcttctcttttattagagcatcattaatgagcataaataagcataaaaaaaagtataaattcaaactatatatataaatatagagaatacaaagtttatcctggttcaacatagcttggaattaaggcataatccagctctctttataagttttccactatagtcaatgcaattacaattgttcggatcgttgaacatcatttatctccacattaatatgatattgttcacattgagtttaagctctcataatttagtttttgagatattttagcatcattaagatcaatatattactataaatatcagaattcacgacggtcctaaaaataatttttttttgggaccgtcgctaaaaaattaactatttaaaaccgtcgagaaaaatttagtattcccgacggtttaaaatcgtagtaaacataatatgcgacatttttttttaataaaatacgattttttaatggacctgtattgacaacggttttaaactgtcgcctatggttttaaactgtcgtctatagtataggcgacaatttaaaccgtaacctataagggtccattaaaacatcatcacttacttcttgccacatttcccacgtacccatctattttttttctatttcccatgcccacctatttcttctctatttcccacaccctaaaacgaaaatcttaactctccaaaatcccacccacgccttcgcaccatcgccctcctctctcg

SEQ ID NO: 58895 - DNA, 605 bp, Cannabis sativa
attcttgtatatattcaactattcgactcttctatatagaactataatcatgttatgcatggggagtggctgccaaacatggcaacatttagaatttggtctccactcaaccaacattcacctctagttcttccactaaagctcatcacaagatcatctcttggttaaagatatctattgtataggtagaagtaaaacttaattgtgatatatgtatattttaattattaactaataagttatttactttgttactttgttcaacaaattcaacaaaaaaaaaaaagaaaagaaaagaaaagatcagaaagaaacttcattactattttttttttcaaaacgaacttaattactatttacttgatatcattattacttgccaaatatttggttgtcttgtgatgatcagtaagtctcaagttttccaacattaattttcttggctgcacaaaagggcgccaattaacttatctcattttttccactcttaaaagtttttctcaacctagttctagctattttaagaaaattaaaataataataatagaagtacatgttattattaggaatttttttatttatatacttgaaagtaattttttttt

SEQ ID NO: 58896 - DNA, 852 bp, Cannabis sativa
  modified_base (44)..(44): a, c, t, g, unknown or other
aatacaacctcactcatattgggataattttttttaaaaaaaanaaaaaaaaaaaaacaaacaaaaacaacaataaaattacaaaagtaaagtttgtacggatttttcaattttttttttttacagttttttaaattttatttacataaaatatggtattttagtatatttttatgttgtattcttattattttatttttgatttttttgttatttatatattattttttatattattttgatgttatttttttattagttttatttaatttttttttttatatttttataaaatattgtaaaaatatacgaaagaaagctttacacataaaaaaaaatattcaaattttacaaaaattgatattatgtaactatccattttatttttctttttatttactttgaaaggggattgcttattaactattttgctattattgttgttattttatttaaaaagtaacattgtaccgatcgaaataaaatataggaacagaaaaattcacatattttaatcttgtaaattgaaaatttaatggattttttttcttcttcttaaatcttaattatgtactcagatttctcatattatatgcaatgtgccaaatcaacaactaaattacaatcattttttttttccaaataaataaatcataatcatatcatatattgatgaatgttgtatagttgggtggcttcattgaaattttctattttcagataatgtataatcgtgaaattttaaaattttctgttgctttaactaaaaccagctggaaaatgacacacaaactaattattattattattattattattatgaaaaaatgttatttttaatattactaccac

SEQ ID NO: 58897 - DNA, 706 bp, Cannabis sativa
tgttttctccttaatttgtgtggggcccactaatttctcccattccaaaatttagtaaacaaatgaatgggaatgaatcctatacaattgattcccattcccctttaaacatgccataaaatatttgtgctcttattattgtacgtaggccgtcttttgcgtttgttatttcgatggaaagtaaaaaattgtaagcattgcaaaggaatcaattaatactagggagaggggtttggtttctcatatcgatcgcaatgtcctcaaatacaagtaaattaattaacagcttcatcaaaccaaccaatgacaacactactatatgctttatacgtacgaatgttcaaaaaagaaaaacaaaatattcagcacattctccttgtgtttaagaaacaaacagttgttatatctacctttctcattaaaagattctccacgtctcttcatcaaagttttctgttcctaaaaagcaatatataattcttaattactacatatttttatgtgatactcctctttgtatggtgtaataacttgattcgtattttgtataggacatcctcaagaagctaaggacctcttcatccataccaacgtccaaacttttaacttgaactacaagttaattaatctcaaacgacaagaaatatcttctcatcattttcgtcttcctctatcatattcatattatatataatcaaaatgatct

SEQ ID NO: 58898 - DNA, 1025 bp, Cannabis sativa
caattaggtggtgacacgtgtcatcatagtcaccaacgctttggtaacttttggacagttttatcgctaaaaaacaaaatcattggataccctcttcacttataaacgtaaaactttacggtagttatgccacaaaatatccctttcaacaataaacacacatgcaagtctttatacttaccacaaacatggatatttgtgtggatgagccaatagcaactccaagtgtgatatcctacattgaaaaatcgaaaccaatcaatcgattatgttaacgattaatcgattatgttacgaaacataaagctttaagtgtggatattgaaatcactcactagcttatctttcatggcaaacattatcgcacttgcatgctctgcagcatttcctacaataggaagcaaaatgacactaatgaaagccacaggcatgttcaacgagtccgacgctccctgaatacaagaatcatttcacatagaaatatgagaaaaattcaagaataagaactaaataaatattttgtactttaatatcaaccgaatcttaatgaaataacagtaattcttaagcaaaacgctgctgaaatccttgaaagaacctccatcgttgtaagcctcaacaatgcaattacagtgactcgtggactaaagttcattaatgctccaaccacgtaagaatccttgtattttatgtttctaaagctctctaaaatattatcatccgtcttttggttaagctgccaaaaatctcggttaacagaatgcatttgacataatttccttacctgaatggcatcaacaagatatccagacaagatggatacccaacctgtcaaaatagcaagccatccaattgcttcccattgagttaactcaggaacttcttcttcctccgaatcgtcattattatctacttcctgctaaatattgcagaaatatactcaacttaaattgagctcaattgtacaaaatccatatattaactcaaactttctttagtaaaatgtaacaaatattaaatcatat

SEQ ID NO: 58899 - DNA, 979 bp, Cannabis sativa
aaaaaaaaaaagaattgtcacaaaagtgataacaccatgtcaaattgtaactttataaaacttaaaatataagaaagaaaatgatatgattataccctgagatgtcacacgtgataaaaatggaacaaaaaaattctaaaaaatgtagtatatcggcattaaaaagagtagtaaaaatgtaaattaccgtgcaacaataaaattgaaaaaaaacagtatgtggtgtaaatttctcataaaattttttattttttattttgggcccttgaaaaatgttggccctagccacgggcctagcccgcctatgcctagtacagggctggccctgagcataggcaggctaggcctgtgcctagggcccacctagctcaggggcccaaaaaaaatttgtccctttttaaaattacacattttttatcaatattgaaaaatagcacattttttttccaaatgagggcccaaaaatattttttttcctttggcccactaaattttagggccggccctggcctagtatcgaccctgagagcattgctatagggcaccagtagtgtccatcactttttattatgtatagcatcctaagattaattagcgatattctctaaaagttattttattaagttatatgggattccacatttaattatactaataataatatgacaccgaaaataatactaaacactaataatatctattagcaaataatcgaatgctcctagggaaatagcaatttctcgtcaaattttaataagagctagtaaacaacctgcgcttcgcggcggatgtttaaaattttttgaattatatatatgaaataaattatgtattttattatatgattgaaaaatataagaagttagatgtaaaattaagccagtccgatccaacaatttagaatatgggccttatatatagggatgttcataaaatagccgatctaatccaatctgtaaagtgtggatatccgcacttg

SEQ ID NO: 58900 - DNA, 2385 bp, Cannabis sativa
cgacctagtacttttactagtagtattttcttaaattctccccattccaataccttggtactagaacgagttttatattttctccatgccatcccaatttatatgctcctgactttagaacttcaaccagttgatatggtccttccaagtttggtccgagcacaccagtcgttctatctttggtgttcaaaaacactcttctaaggaccatatctcccacaaaaaacttatgttccttttcttgcttattcagtaccaagccaccttttgttggatggaccaccaactgttaggtttgctgcagctcgtttttcttcaattttgtcaattgattctgctaggagggcatggttagcctcttgatcaaaggtcaatcttctgtggaatggaggttctaattttatggacaacatatcttcatagccataggccatagcaaatggagtctgtctagttggtattttttcagttgtgaagtatgaccatagtacttatggtagttcttcaggccaattccccttaccatcttcaagtcattttttcaaagtatctttaagtgtcttattgattgatttgacttgaccatttgcttgagggtgtgctactgcagaaaaactttttacgattccatggttcgcatagaaattggtgaataactagctgtcaaactgtgtgccattatatgagactatcttgtacgagagtccgaacttgcatattatgtttttcaccataaagtctagcactttcttagatgtaattgttgccaatggctcgacctctgtccatttagtgaaataatccactacaaccactgcatactgcactccccctttatctttcggcaattgtccgattagattaattccctaaatagaaaaaggccaaggactttgcatttgagtgagttcgttgggtggtgcatggggtatctttgaaaatctttggcatttatcacatttcttaacataggcttttgaatcttcaatcatagtcggccacaaatatccttcccttagtattttctttgataggctttgcccggctgcgtggttgccatagaatccatcatgtacttcagacaaaagtcgtgcagcttcttcttgtatgacacatctaagtagtggcatagacaaccctcttctatatatgactacttctacgatgatataccgtgcaacctttctcctcatcttctgagcttcatttctattatttgaaaggtccccagtattgaggtaggttgcttttggtgtcacccatttcagagctgcatcaattatttaaatttcttctgcacgggtgatgttgggttctttaaggaatttaattgggattagattagccttattagttatattgttgattgaaagtcaggctaaggcatcgttcttctcttggaattcgctttagaatatagctcttgaattgtggaagtagatcatgtattttgcttagataggctatcattttccccccaggcctcgtactctccaaacacgtgatttactcccaactgtgagtcactacagatctcgatgtgttaagcatgtagttatttagcaagttttagaccggcaatgagggcttcatactctccttcattattggaggctttgaacacaaatttgactgccccgtgcaggtgttggcccccaagtgtgacaagggcaatacctgcacctgacagttgatctgtagccgacccatcctcatgtaatttctaggtaggtttatcttcattgttttttggctgagtttcttgtactggctctaggttgctttttgaaacgctttcttctttgcccgtgcattcgactacaaagttcgctaaagcatgtcctttggttactgtttgggattgaaaattattttgtattgactcaattccactgcccatttgagtaatcgtctagaggcatcgagtttttgtaatatttggcgtagtggttggttagtgtataaccggacaggatgagctcgaaagtaaggccttaacttccttgttgttaatatttggcatttagtaagcttttctatcagcgaatatcatcctccagcttcaacaagtcttttaccgatgtaatagattggatgctggacattttatgcctgatagcacgaacactagcatgttctgtaacagctaggtatattcctaattcttctccgtccagaggttttgagagtacatgaggttttgcaagttgtctatttggttcttgaaaagcattatcgcattcctctgtccattcaaatttcttatttcctcgaaggatgttgaagaaaggaacacacttgtctgttgacttgaaaacaaacctactgagtgcgactatctgaccaattaagctttggacatctttagtttttgtaggtgatttc

SEQ ID NO: 58901 - DNA, 1124 bp, Cannabis sativa
  modified_base (423)..(432): a, c, t, g, unknown or other
tttatatttgtatatatattcggggagtatggtgagtctattgtttgaagacgttataattttattatctaaattttgagagtaattttatctaatgtcattcgtgttttagcagtccattttaacaaaatatatttttagattagacgatgagttattttggtttgagagaatttttgctctcgtcgtaaaatatatatatatatatttgtatatatttacaaatacaaatatttttatgtatatagaaagaggtcgtatataataaatatatatatatatatatatatatataaaatgcaggctccatacattaatattagttagttattaacaactttgctatatattgctcaggtcaaggttgggctgtctagcttcctatttaaggtcctgacactatttttatatatatatatatannnnnnnnnntatatatataaatataaatagacatagttaaaacacacgtaacaccatgatcaaaatatatatctataattctgtcgtatggtaaaagttgaaatgaaatgactcaaaatcttgatatggtgttaagcaaaaaaaaaataaaaataaataaataatcttgatatgatcaaatctctgtgtatatctattttatgtatttatatttatatatctgtgtgtgtttcatctggcaatattactcgatctatattataatattgtatatagcttagggtacatttaattgggaggagatagctagaaaatatcatactacaaaaagggtttttatatagttactgtttcattggccctatagcgtcgattttggagaaattcgtaaccataagcgttacagacgtagtcaactgaagacacatagaaaatttattatatgacttcggttattatgtaatgatgttgagacttagtgatgacattttagtctattgtgtaaaatttttaattgatgtaaattatacatgtatataatattacttaaaaacttaggcaggacgatggtcaccccacaatatatgtagtagttccgacaatcattaattatgttatttttcttattattaataggttacccttcatttaaaacatatgatgattagtaacttctggatgattctccaaaccaagtacaa

SEQ ID NO: 58902 - DNA, 967 bp, Cannabis sativa
ataatttatcatattattattgttattatgttattattattatcattattcataaaactaaacctaataggagtcacgatagatagctttcattcaaccctaaaattatatcgttctattcttcccatccatctgagcaagattaatcctaaaaattttcaagtcatctttccattacatccttacccaaatgtatagcactcttcactcgaatctttgatcaccatcatctcgtgtctattgatccaagtagcttaaagtatttgatgtaagaaactctatatttactcatttattgatcacaatatgagaatattcgtaggtctcctttttttattgttttttagaatgaaacatgtctcagtaaagctgtcatatctctttaaatactcattcgattctcgcaatcctagtgcctataaaaagcttattgaatttttcataattgttatgaagaaaggttttactgaatcgaaatttatctatgtcaaaaattagtatttctacgttgtttgttgtaaatcgttttttttcatatttttttatataagttgtctcagtaaaatctgaataatgatccgattctggcgatcttagtaccgttgaaaagacaattcaattttctaaatgttttatgaaggaactattcaccaattattgattattctaagtcaaaattattattttattgctgtagttcgaaatcaatttgtttcaggatttctaaaaaactgcttcaataaatatctatatctcttacgttataacttcgattttaaagattttagtgtcattagaaatggaaattgattttctaaaaattttacgaagagagtattctctaatttggaatatgtcagtatcaaaactttatatttctgatgtctcctgtgattcgttactccatattccttctcagaaatagttttactaaaactatcataatccctcagttttaatccatttt

SEQ ID NO: 58903 - DNA, 1496 bp, Cannabis sativa
  modified_base (379)..(383): a, c, t, g, unknown or other
gaggtttaactgcaagtgtcgaattaatcaattctaattgattagtcctccatgtgttggttcgtaattagttttggtgaaaatatcattttaatcttctaattacttctttatcctttagttctattaattcactagtggagatataattcaaatcccatctgaatttgcacgcaactttccagtaccaaaattaacacataagaggaaccaatattcgatccgttaagaaagtcgggattccataactatacatcatgtttccagctatccatgttattagattcccatagcagaagttcccatagcagaagttgtaagaagttgtaagaatcattaagaatcatcttctctaagaaactttaacgagtgaatcaannnnnctaataacatgaacaagagttcataattactcaggatttaggcgagctaatctactattgatcatcattatgatatgaattaggtctttacagtaaatggcatgttgataatgaaagcttcatttatataaaaccttcacttagatgtctcactatatcagtaatctgaaccaaaattacttacaccgtagaacgggcattagtgatccgtactagcaaccattgattaaagattctatatctttaatatgttactaactgtttcattcatagctaaatggtcttagttctctgtgtagccacaagccacaacctcatatatgaataagaaattttccgatatttaatataaatgatgcaataataaatattaataatttagtattcatgtatatatcaaaatgttcaactctttattaataatcagaaatatctttacaggcttttcaagacataaactccaacaccattctgctcttactaaaaaccgtgtttcagtctgactaataaatgagaaaaaaagactttatatcattcaaattgtgtctttattatatgatgtcttgcaaatgcttaggggttttctaatcactaatatcataacatacgtacaaaaagctccatccaagaataaaggctgaacaaactactatggtatactctggttaataattttgcaagtgatcaagattctaaagttttctcggtcacttggaggcacctacacctggtacgacgttggaaaatatcaaatgaaaataattaagcaaaatctaagaattaagcatgtacaagagaaggattttatcagatatatattaagttaaagattaaaagcttcccagtcaaccatatgtctgcatggagaaaataaaatcatgtttaaaagccacttggttagctaaatggtatcaaaagataaggccacaggccgaaatacgtacaacaaatgaaagatagaaaaaagtttatatgtccacggggatcggcaggttcaaatctttggcggctaggctgtttttgtcctgctcgtggaaagaaaagttagggtcgacaacttcattggtagcattgtcaagatgcttagcctcctcgtcggctttctctagagca

SEQ ID NO: 58904 - DNA, 1410 bp, Cannabis sativa
  modified_base (1354)..(1354): a, c, t, g, unknown or other
aatgaattacgatgagagtactcaggctacttaatcacttgaggctagctcaagtagccatagaaggtgcatgtgtatgtgttggaagttccgggttcaagtcccaaattatacaatataatatattcgcttaaatccaaaaaaaaaaaaaagagtactcaggctaccaaactttatgtccttcctccactaatgctagctcgactaaagagtgagtaacattattagccaacctagaacaatgaacaaattgaacgtaaaaaaaatcattaaaaatccaaatgatatctctaatattggaacctaaatgggagtcatcacaacgcttagcctttaaaacattaacaatagaaggacaattagattttaaaatcaaactcaaataacccaaacgcttacataattaaagctctttgagaattgaaatagcttcaacaacgtcaagtgccatcgtggagatagaagaccaaactacaaaaacaaagaccgcgccttcaagatcatgaaggacaaacccattttccatcttctttgtttcgttcttgcaagaaacgttcatattaagcttaaggtaccccacgacaagcggcctctagtcgggatgggaaccatcctgggtgactgaacaaatagacgaaccttgcttctcattagcactaccatatcgagcttgataattcatagcttattgcacaataaactcaactctcaatctagattgttcattaataaatttatttctaacaaaccaaatatgccacaaactaattgaaaaaatcgtattttttgcaaatgtcaataattttattatatttcagtaaaaacacaactgtaatagcctgcagcaacaaattgcattcttgtcactgcagaacatagatttgcagaatcaaatagaaccaaaaataaataaatacacaatttaaaaaacttgacacaagagaattatgcgtggtataagtgttctttcaaacactactagtccactaggccactcctagagaatgaaatcaattaataaagtatcaaatatcacaaaagcaattgacttaaacaagtttggactccctctagtgatttgtcacaaccctttgtaatctactatgctaatctgatctctgaaacacaccaagtagtgaactcccttaagatattgatgtgtgcttacttcctcccgaagtaagacttaaacaaatcttctctcgaagatatatgatcacttcctccaaaaatgagacttggaaaagtcttctcccgaagacccacacctattcaaagcttctcttcaaactattctataaatagtatgagatcaaaacaaatactaaaacctagttgaacactctaggttttncaaaagaaactctctcctcacaaagatgaaaatatgaaaaatgaagctagaagagg

SEQ ID NO: 58905 - DNA, 619 bp, Cannabis sativa
tcactgttagtttaattcaatgctcaacactgctattagtattataatgaactaacaacgtcttgaaacgatgagagcgagcattcctccattaatcaagaacgactcacgcggagaagacctcaccttgttattcctagaagatcatttttggcatttcatatagaccgtgacaccattaaagcctcctctgtaatatatgcacgatccctacttaacaacaccataaatcaagcatcaaatgcaacaacatacaaaaaactcagtcaacactcgacctattccaagacgaatgggcaaaaggacaagacaccaagatatgacacaatgattcctcatccctatgacaaagatgcaattcaactccataggaacacgcttagaacacaactgagtacgagttggcaaacaaccagaaagtgccttccaagcaaaatggagaaattttagagggacattgactttccacaacttactctagatatcagatttcgtagcagcagcagactaggcccttttttgtatgtcctcttaactgtataaaaatcaaaattctcatgcctccaaaaccaattatcaacaacaactgaagaagtaagggaaagactaagaataagat

SEQ ID NO: 58906 - DNA, 913 bp, Cannabis sativa
gagagagagagagagagagcatccctttaaaattgacttataatctttatataagtttacatcataaactaaggtttcttaacctagttatatctttttcttaaccaaggctaagttacatttaaaatatgaaaataataataaaataattatttaaaagatagatatctttctaacttattttttttttggctatattttcggagtagctccagtagcacgtgccctttattggtttttagggttcatataagagttgcagtagaaaagaataaaatcggattaaataaaaaaattattgaatccaatataaaccataaaccctggatctcaatagaataatacataatacaaaattaactattagcttagaagattttacctcttgttgtctatcatgatttccttgctatcttttcgtattaatgaaacgatatcatccaatccagtaagacttattaaagagttcacaccaaggtgttccaagtgagcctcaacatttcaggaatagagtggtctattagattcaattaaaataaatataattttatgatcaactcatgagacactgtgattgaaattgagaaaacacacaatcaccctctaaagagagtgatgcgtgagaaaggggtagagagagaaagagagagagagagagttggaaagttccattattaattttttaacctaaaactaatctctccaaaatctcgtcttctcttctctgatatatatcttatatatagcatattattattaatatatattaatcatatataatgatttaataataaataaaacctttatttaataaaataaaaaaaaaatatttattttaattcaaataatttgaaacaaatatcatatagccaaataaccataatcgattatattcttttattgtgttatatta

SEQ ID NO: 58907 - DNA, 1052 bp, Cannabis sativa
attatagtgtatgatgggaaaaaatagagtactgattatctatactaaaaatatgtgtatggtatatgcatatttatatttatatttgtttgagttttaagtgtttggaagatgtggattaaatgtgtgacaagctatacagtaaaggcaattgaatagcctaattagtgagctgtctgggctcgaaccaaatggtaaggaaaagaatcctttattgtcataatactagaaacatgtaaattctgctatgcaagatgtgattagacaacaaggggaagcagacccgagatctgagaggatgacaagttcatcttgtatctattcttgtactaccgacacatcctaatgtaccactggatatggtgaaatatatgaacctaatctacgagcagatcagtaagtggaaacttattgaaccactaattatgggatagaataaaaggttctaaggtgaccattatagtggtcaaagttaaaataagaaatggcaatcttattctgagtgttcaagatgaaaaaaggcaccatttgggctaatgtagagtcatatcttattattgtggtgtagtgggtcatctaaaaagaacctacccaaagttaagaaagattgatgttaaagaagaaaagtgtacgagtcctgcccaagtgacaattatgaatcaaggggacccgggtatcggtccttcggctaactcaagttagacttttatgggtaatattatagttgttgtttccattgatatcaatatcaaacattgtacactcaatgagaggatatcaaaatatctaaataagcagtgcgtgtatgttatttagtggtaacttatctgacagggtagacagattagaaaaatggcaatatgagttaaatttgctgatattcctaagtagaacataggatataagtaggtaatgggggtatccatctaattgatttagagaacaaaatcttttgatataaagtgatctagtgttagtataagtgggacaatttatgagtattgtcgaaaaccctaggtgaattaaaggcaactgtaacaccctaactaatt

SEQ ID NO: 58908 - DNA, 654 bp, Cannabis sativa
  modified_base (599)..(600): a, c, t, g, unknown or other
tagggacataaactcgggttttgtaaagtagtgttccattacttacactgtgaaatccttagcttgaccagctaaaacttcttctcgggtttttatcaactttgaatccactaacggagctattctaattctttccaacaagtccaattataacatcaaatgattgagtttaccaattaccaactcaatatttgatttgaccatgtatttgccaattgaggtgaaatcataatcatgttggatacctatctgggacccttcctactcagggtatctaccactacattggctttcccaagatggttaagaatttcataattataatttttaaccagctccaaccaccacccctgtctcatattcaaatctttatgagtaaagaaatatttgagactcttatgatcagtgtaaatctcacacttctccctatagagatagtgtcaccaaatctttaaagcaaaaactactgcagcaagctctaggttatcccctttcaccttatcaattccttctgtgtgcagaaggattctcagctttgataagagactatgaacgattgggaaagatttgggggtgcaaggttgctcgaggggctcctnngttatctcacatgttctttgttgatggttgttatgtgttctgtaaagcctctga

SEQ ID NO: 58909 - DNA, 657 bp, Cannabis sativa
agagaaatcctgggactcaacctaggagaagcgggttgccactgagacaccgtcaataattaaaaaaaactctccaatcatccctgttaacattggtgatagcaatgttaggtaaatatatatacatatatatatataaataaaaaaaatgagaaaaaaagatacactacatatgtgcatttgtaaattgctcataataatataaatatatataaattaaagatgaattttagacaaaaactatatcattttgcatttcttaataatgagacgtgaattaataaatatttattgagactaagaagtttcacaaactaactacatgttacactaaaaatgtaacattatgaaacttttatttttaaacatatacacacgtaatcaaaaagtcactgaataatatgaatcaaaatcggttactataatttatatatagaacataaacaaagagaagacttattagaaaccagtttcttacagatatagtgaaataaagacatataatttgcaaaataaacaaaaaaagtaatcggtttcctaataaatcataatttttaattatttatttacattattttataggaattgactcaataatgtgcgtggttcaataaggagggcaatggaaagaggaaaaaaaatatgaaaactccataa

SEQ ID NO: 58910 - DNA, 950 bp, Cannabis sativa
atgaacaaaatcaaacaacaaaagttaaaacaatactaaaaataattttgttaggccaataaacacgaaaccaatttttcatataatcaaaatggatatcttcatttgtgaatccatgtataaattttacattcttgtattctagttattgtatgaaataatgaacatatctaacacaataccaaaactaaaactaaaactaaaacaagttataaacttctcaaaagcttcaagactcaatcatcaacctatgacatagacaatcactatatatgaaaataatatattagcagcaaaataagtagaaaacaaaatgaaaatattcgttggagttgttatcgttgtcaaaaaaaaatattagaatggtcgtaggagttgtcgtcattaccgaaaagtcactagaattagacgttggagttgtcatccgtgttgatggaatgtaacacatgtaaaccgattacattaatcaactagttaaaactatgactaaaaaaccaattatttaaatcaaccaaattaaaaactataacttagaaccagttacgtaaaacaataaaaataataattaaacatgaaaacctaggtacaacctaaaataattaaaagataaattgaaacacaaaaactaatttcttaaaaaaaaaatacataatataggagaatttttaacaatacgacttacaaattaaattacagcgattacattaaataaaactagcagttaaatacagaaatcagttacctaattcaaccaactaaaaatttgaataaaaaatataagatacttaaaataatcaaaaagataaaataaaaaaaaaatagttacttttttttaaaaaaaaataataataataataatatagcaatttgctgcataaagacgtaaatttaactcatatactaaaagtaaattgactacataattaactatccaccattttgtttccaat

SEQ ID NO: 58911 - DNA, 920 bp, Cannabis sativa
tgtaaattatatataagaaaaagcatatgtatcctaatattatctaacacctaattgtgttaaaaagaagtaaaaattacacgttttattgggcatcatttttgccactaaccgtaagcatatttatgttttcggcacctataattttatatgacgctatgcattatagttataatagatattctgtttgtttttagaaaattcgaaataatttatggtgtcgaaaaaaaatttaaaaaattcaattacatgtgtataaaataaaataagtgataatttgaatgtaatttctataggtgacaaaaataaataaatactcttacaataaaggtaaaagtgatgttcctaataggcggacaagtttaatttttggcggtaataatatctaagttatatttttaaaactatgtaagtacctgactgttaaatgttaaatcattatccacatgtcattttcttattggtatatttaaactaattttttttaaaaataaaaatttaatgatgaggaccaattaaggattgctacatggctaacacttaatagtcatatacctacaaaagttcagaaatataacttaaagtataattatcgcaaaaaattaaacttaaatatttatttacaactgaaagttaaacttaagtatttatgtcgcaaattactaaaaaaaaaaaatcttatttatagggctagcaacttttaacattttcttgtggacaccattaaattaataataataataatagtaataataaaaaaaagaaatatgttaagggtcaaacgctacaagagatgatatgctattattggtgtaatttcatatagagttttatatattttaatttaacgccaatcactacaaaaaatcttacttttagtcacaacaaattttctcactaaaagtaaaaaaattgtgact

SEQ ID NO: 58912 - DNA, 3800 bp, Cannabis sativa
tctttaacaattttatttttgtcgggttaatttcaataatctttatttactgcaaaaaaagaaatacaatactattgttgagtttatagtttgtaatttttgttttagtgtaaaaaaaattttatataaaaattaaacatataattaagtatatgtacattgtacgtaactttaatctagtattaactaaatgcattccaagtggtagggtataattagatttcttttgcccctaactgtttatcttaatataaattttacatataatattgattttattatttttttaaaaagaaaaacagattttattttattaattgtcaaataaatgtaaaaaataaacaaagaactcatatattttagagatattttcaaaataccaaataaaaataataattaaaaaatacaaaaatatggatctccagtttgtttttgacatttatggaagacgttactttttatgttattttttcacaacaacattgtactatgtttgcatgttttttttttttatgttttatatttgtactaaaatgtttacattttagttcttagagtgtggaagagaaaatgagaaaagaattctctgtattgaatcgatcaatgaatgtacagagtatgagctatatatacaagctcaagaataaagagttacaattggtaacagttttgtaactaactagcacaacaatcaattaacttaacaacccttaaaagtcttgaaatattatgtatgctttcaatccaattttgtccttaaaagtcttgaaatgatttggaaatagggccttagtcgatatgttagcgagttactctttagaggatacatgagtttttttttttttttttttggaagaacacatatgagttcattgaagttaaaaattgagaatcacaatgggggatccctccctaatacaatggccaactgaataaccaccattagttctagccttcttggcaataaagtcagcagtagaattgtctagtctaggaatatagtaaaagtgacaaaaactaaaactattacaaacgttgagaagcgagagagccagaggtctaatttcccaaaccagtggacaacacctgatgctcagctggtggtgagggccttggaggatacatgaattgttttgatcaattttcttccacattttcacaaatcaagtagcagtcaatcttaatgtgttttgttctcttgtgaaacacaatatagtaaaagtgacaaaaactaaaactattacaaatgttgagaaccgagagagccagaggtctgatttcccaaaccggtggacaacacctgatgctcagctggtggtgagggccttggaggatacatgagttcttttgatcaattttcttccacattttcaccaatcaaatagcaatcaatcttaatgtgttttgttctcttgtgaaacacaacattgtctactgtatgatgagctcttttgttgtcacattacatcattactggaccctgtaaagtaaaacgatttgagagaaagactgaaaatgtttcattgaattgaaatgcactaaggcaagagtttatatgcaccagcataatgtataacagaacaagaagcagagaagataaaacagttacaatgtaacagaacaaactaacaactaacagaaagttagttggataaaaccaactgactttgtttctcttgacagcccccctcaaatgaagtgtcctctgaggaagagacactgagtttgcttctcaagattggaaaccggctgctggatatcggtttggtgagacaatctgctatctggtcttgtgcaggaacatgttgcacttgaacctccccattgatcaccttgtcacgcacaaaatagagatcaatctctatgtgtttagttctggcatgaagtataggattggcagctaacatgacagagcttatgttatcacaccaaatctgaggtggagtagtgacagggagatgcaattcagtaaggagagatttgatccaggtgatttcagagacaacagctgcaagactcctgaattcagcttcggttgaagatctagatatggttggttgctttttagattgccaggatattaagtttttgcccaaataaacacaataccctgttgtggatcttctatcatctggatcggatgcccaatctacatcacaatatgcttcaatctgaaaactagggactttttgtaaatgaacatagttgagagtaccagccaaataccgtaagatccttttcacagcaatccaatgtgactgaagaggattatgcataaattggcatactttgttgacactaaatgcaatgtcaggtctagtaatggtggcatattgaagagcaccaactatggatcggtatagactaggatcagccactggatcacttccatagttggaaagtttcaagccactattcataggagtgttatgagtctttgccccttgcatttcagctttacaaagtagatcttgaatgtactttttctgagtaagaagaagaccagtggcattgtgtaaagctttaatgcctagaaaattgttaagaataccaagatcctttagagcaaatgacttgttcaacctgtttatcaaaagagaaacttgatgatcattagagcccgtaatcaagatatcatcaacataaaccagaacatataggcaagatgttgaatcaatcttgacaaaaagggagtggtcagatttagccgaagcaaaaccaagagaaaggaggacagtggataatttgtcaaaccatgctcttggtgcttgctttaagccataaatggctttttgtaacttgcagactttgtgaggagctgtaggatcaacaaaaccaggtggttgaaccatgtagatttcttcttgaagatcaccattgagaaaagcattgttcacatctagttgtctcacattccagcctcttgtgagagcaatagtgagaacaattctaatagtaacaggtttgataacggggctgaatgtctcattaaaatcataaccagcttgttgatgatacccttttgccacaagacgggctttgaatagagtaacatttccttcttcatcttctttaactctgtagacccatttacaacctatgggttctctgccttcaggaagactcacaaggatccatgttttatttctcaagagagcaagatgctcaacatccatggcttttaaccatttttcattttgcatagcagcttttacagttctgggatagagggaagcaagtaaaactcgtggctttcttataccagatttagaccttgtacacataggatgttgattggtgagaggttggacagtaggtgagatagtactatcgggttggacagtagatgagacactaggattggtaatagccgttggagatggtgggacatgtggatgtacagtagggtgtgatagtgatgtttcactaaaaagtggagtagcatgccttggaacaggtggagtatgggaatgagtgggaagtgtgctggccgaggtaggtacattttgaggtattgtggcatttggtaatgctgaaggctgacagacagcaggtgaaatagtggaaagtatgggaccagtaggtaaaatcataggtgagggtaatgaaacagtagaatgacttgtaggttgttgagaggagagagatgtggattgagaaaaggcagcagaataagcaaatggaaatatgttttcatcaaacaatacatctcttgaaatgtatacacggccatctttggataaacacttgtaacctttgtgggacaagctatatcctaagaagacacaaggggtagatct

SEQ ID NO: 58913 - DNA, 733 bp, Cannabis sativa
gtaaagttagggatactactctttggattaggcctggaggccagagctttactgggcctactcgccccttgcctgcatctagaggtaagggcaagatggctatttaggactcagatgattcctcttttcttgcatttaatatttgtaacttgtattctaactttgctactttctttttgcggttatgtcttccaggttgaggggtcttgctagtggaccttcagaggagccttcaggtcgtttgagggccaaggtggctcaaaccacccatgccagagatgctggtgggtcatctattcctcctactcctcctcctccagggcctacaccaattgggcagcccatgatggatgaccttcttgcgaggagagaatgaccttctagcaggggcaccttgaggcctagtcggggagcaggctcagccacggggcagagagccatggaggctacctgtaggcttttggacaaagctttctttttgtggatgatgagcttcaggagcttggtgacaccgagccagagagcctctcttctactggccttcaggatttggtcgcggtgagttgcacacttaactttgctctttttttttggcattattataggctggttggccatagtgactgttgcattgagttgtttggccaatgatgtgtctttgaggggttggtcagccttggcagctatgtggaagggccggccagccagctttgtcttttgacactgattttga

SEQ ID NO: 58914 - DNA, 1412 bp, Cannabis sativa
ccgatgaagagagagggaatgacagctttgtacttaaagctcatgcgtttgaaacacaccatcaagatgtttaataaagagagaattggggatgttggtaagaagtatcaagaggccaaggagtattatatggagaccagattgcaagctcaagagcatgttcatgatatgtcctaccagcaggcagagaaagaggctgccatggaatttaatgcccaagaaaagatgtatcacagtttcttgagacaaaggagcaaggttacttggttgtgtaaaggagatgagaacaatgcttatttccatgctttttcgaaaaaaaaaagaaagatggaaaataacatagttacttatatagatgagcaaggagagatcatagatgactttaatgaagtggttaaacactttattcagcagcacttctaagagggtagtacatggggactagttctatcacaactcagagcctgaggtctgattgtatggagctgggaaatagactcaacctggagcaacaattgagtttgataaaacctttcacaagcaaggaaataaagaaggctttctttagtattcctgattcaaaatcccctaggccagatgggtatggagcaagttttttcaagactatgtggcctgaacttggagcggaattcattaaagcagtagagaacttcttcaagacaggtttcatgcctcgggaatttcatgctactatgatcactctcatacctaagactgaaacccctactaaggctgtggattttagacctatagcccattgcttaactgtgtacaaatgcatctcaaagttgttatgttctaggctctctcaagtgcttcttgggctgattaatcagaatcaaggagcttttgttcaagggagatcgatagcccataatgtcatgattcttcaagacctgctgaagaattataaaaggaaaaacatatccccaaggtgcactctcaaagtggacatcagtaaagcttatgatacagttagttgagaatttctagaagcgctgctgaatgactttaaattgccatccagatttatcatgtggataatgacttatttgaaagctaccgcttattcggtcttgatgaatggaagagtgtaagggagtttcaaaggcatgaagggattaagacagggagatcagttaactcctctcttgtttgtcatgataatggagtatttgaccaggagattattgctagcagccaaccaatccaagatcaggtatcatcctttatgcaagaatcttaagattatcaatctttgttttgcggatgacctgatgctattctgcaaaggatacttaagctcaattcaggagtcaaaggaggttctggatgaatttagtgcaacatcaggtctgaccatcaacactaacaagtctcacctctatttt

SEQ ID NO: 58915 - DNA, 606 bp, Cannabis sativa
aggttcacagctgaaagctaatatatggaattgtaagacagtgcgcaaatggaagttgatgttgtgctggaagataacgaagaccaaacaaaggttctggaagtactcagacagacaagtctagaaggttatcggttggtgcaattatatatttttactaataacaatttataatcttacataaactaaattaaaacaactaattaatttatttttacaataataaatgaaataaataaaccttttacctaaactaaaatcttttttagtttaaaatatttttttaaatattttttacacattaaattttttacaatattaactaactttaaaacacattaatttttttaacaatatcaattttttacacattaaatttaaatatataaattcaactaaaaaaatatgtatataaatatatatttagattatttaacaaaaaataataaatatatatacaaataaataaataattatatattaataaatatatatatacctagacggaggacggcgatgtcgcgatggaggaaggcagttgtggttacttgcggatgcgacagagacgaaggagacaacgagagagagagagagagagagagagag

SEQ ID NO: 58916 - DNA, 570 bp, Cannabis sativa
tcctacacattttaatttaataaagagcattgatgttgcacaggtggttcctagcactttccatagataacaccctacgattgcttaatgatatttcttaaaaattattttcttaaattatatgggacccgctacttaattatactaatagcgcggtataacaccaaggagggtgctagtcgaaactattaaccaattataaagtgccacatattaagtactttaagataccaaataacattgctctatactataatgctgctatctccaaccatgaacattaaatatagtagtttttatatatataacactggaattgtttttaggtactaataatttatttatatatataatttgtatatatattataattttctatatatatattgcattatctcagctggtctcctaagttattcctcttggtggttcggtactagtttttgttttagtttttcatttgacgaggaagaaagagtggatgagtttggtgtcgtcggagttttactgttcaaaaccttacgagggaacaatcacgaaggtggcagaggaagcagtgacggcagtggc

SEQ ID NO: 58917 - DNA, 1061 bp, Cannabis sativa
  modified_base (931)..(937): a, c, t, g, unknown or other
  modified_base (1013)..(1018): a, c, t, g, unknown or other
gggtgattgcatatccttgactaaaagcatgccacaacacaattcaagaatcgtaaagtaattatgggattcagttctccttatgcaatttttagttgtacaactaaaattattaatgaaactctaatttcaatattttctcatatttatgtgcaccttaatttcatctgagaaaattatcataagagaactagaataaaaataaggtttaggttttgttcgcttaagtacattgccacattaagtacattcttatataataaatatatcgtaatacatggaaaataatactcgacatataatgaggatctattactatgattcatatgtttattttatgtaatgaggaacgttgggttaagtggtaaattaatttaaatactgaaaagttggataatattagaataatttttatattatttgatttaatttataaaatataataaattatttactaattaattaaaatattctaattatggttggatttaattataccaaatatttcagttatctaatttaatttttagaattaattgttaaaatattttgacagttaattgtggcagagaccttgattgaaggtttcacttatataaatatagggtttcggtccccgaactcactactcattctatgaaaatagtaaatctatctaaaaagaatagagagagcttgaaagttcgattagccacactaattagtttttctttcttttgcaaatctaaagttcatgtgaaattgaaacttaaatatatagtatatatgttcgtttaattccgcatttcatatatcccttcatatgttttatatatctattcatataaaatgtctaactttaacacaactgtccaaacacaaattaagagaagctttccagtcaattggaaattgtatggatgagatttatatatatatactagatgagagnnnnnnngcgagccacgtaaatattagtttatataagttgtagtggtttttgtttaagaattcagtaactaagtaacggcaannnnnntggtagatagatctatttaagtttttcatatttgtaaagatta

SEQ ID NO: 58918 - DNA, 1000 bp, Cannabis sativa
  modified_base (968)..(975): a, c, t, g, unknown or other
tcttgaacttgtggagcaactctagaacattgatctcttaagagaaaggggatccacgtgctcagtccaactcgagatcattattcttctgaccggctaggccttggaacatgtttttttagttcatccaactgttcttgcatggatggattaacttgttcggtctcttggccgaccaaagttacatcaggatctctttgagctaaattttgagcactggctgagtggctggtgagacatagtgctcgtctaaccctctccttctttttagatcatccttgagatcatgagatgctcccagtctattgaacacaaatatacaaggttgtccaagtggttgattattttggccaagcacttgaccagaatcgcaatcttggcagagttattagttattacccctcttgacaaactaccggacaaggtctggctacctaccactggacccagaggtggaacctgtgaccagcgattgggcggttgactattcagagtttgagaagcattccaagctagatctttgtctgactcactcagcgggatgctgatcccaggttcctgattaatagcttgataggccattcgtatcaatacagtggcctgtcttgttcggttttcaatggctgcatgctgagccctcaacattttctcctctatatcaatccattcatcgaatagatgcctttgctcctcaaatgcaaggttcactgcaacacctagctcttcctggtcatgatgcagagtattagttggccttgcatgagtccaagagcatcacggaggttctggatctcagtgtcgtctccaacagttgttcagacattcgttgctggtggaactccagtgcaggggatgcccaggttggttgctaaatttgtatttccagtctcttgtagaccatgtgcgattctgtaatcccctaactagcataggcgtattacgggatttttaaacatactgtgcagctnnnnnnnnatcaacgaggtttatggaaatcatg

SEQ ID NO: 58919 - DNA, 1638 bp, Cannabis sativa
  modified_base (33)..(46): a, c, t, g, unknown or other
  modified_base (94)..(111): a, c, t, g, unknown or other
atacattatgtacatataataatgaaataaatnnnnnnnnnnnnnnaacattaaatgttatttctgatcgatattaataagtaaatctgattannnnnnnnnnnnnnnnnnttagggcataaaatccaacactacttgccagcagtatgcaaggaaggagaccggttcagcagagtattcttagagaaggggaattcctatcccaacagcaagttgattttctcttgagagactacaatcaagaggaagttaaagaggtaatttttgctattcctggtaacaaggctccatgacctgatggtttcgggagttctttttttcaaaaaacattggagcatcataggcactgaagtagctgaagcaatcattagcttacttaaaacagggaagctgctcagggaaataaacaacattgttttaacacttgtgcctaaattaaaatgtcctaacactgtgagagattacaggcctatcgcttgttgcaatgtgatatataaggcagccaccaaactaatatgctcgagactcaacagcatactaccacacttgatagcatgtaatcagggaggctttgttcaagggagattcatagcacacaatgtaatgatatgccaagatctagttcttcattatggaaggaagttgacaaagcctagttgtgttattaagcttgacttgcaaaaagcctatgacacgattgaatggaactttattgaagaaatgttgtttggattgcacttccctgctcaattcatccaacttgtaatgctatgcatccgaactcccaggttttcattgatgattaatggatccctacatggctactttgaggcaaaaaggggactaagacaaggtgatcctatgtcccctttgctttttgtgctgggtatggaatatttaacaaggatcatgaggaaacttgggcagaaaaccgatttcacttttcaccatagatgcaaggatctggctttgaatcatctcatgtttgcggatgatgtcctattattttgcaacggtgacttcaagagtatcatttacttgttgtagggtcttcaactgttctctcggacttcgggtttgcaacctaatccctccaaatcagctatatattgtcatggtatgactcactcagagatacaacgaattcttgatgcttctggctttcaaagaggtgaagttcctttcacctatctagggattccgatcagtccaaaaagattgtcaccaaaagattgttctagtttggttgaaaagatgactcagagaatcagagtttggagtactcggcacatttcttttgcgggcagagctgtccttgtaaactcagttttgctagcaattcatacatattagagtcaggtcatgctacttccaaagaacgtaatcaaagggatcgagagcatttgcaaagcttttctatggaaagggaaacatatgatgacaggtgctgggcaaattgcttgggaaaatgtttgtcaatccaaacaagctggaggtataggtttcaaaaaagttgttgattggaataaagcagcaatgttcaagtatatttgggcaattgcaaccaaagaagacaacctgtgggtcaagtggatacatagtgtatacatcaaaggcaaggattggtggagctatgag

SEQ ID NO: 58920 - DNA, 1108 bp, Cannabis sativa
aaaatattttgtacttgcatttgtccccctttcaatgtgtgcatccccacaagatacaaggtatatttttgtttatgtgattatgatgtataaaccaaatacattgcagattcccaagaatgaataagatagagtgaaatttttgtgtagcataaattcaatgtatgtacccagttttgcaattgaaacaaaattgttgcttatgatgcttttcacaccagtaccatcttttggtagtcatttacacaaagtatgtttccaaatctttatatacaatcaagttattttacactatttgcaactactttatgttatcaaatagaggatgaaacaaaactgctaagtttcatcgtccaagtctatgcccggaaaaacttatataaagacatttttgattattaataaagagttgagcattttgatatatacttaaaaattaaattattaatatttattattaaataatttatatataaatatcgaaaaaatacttattcatatatgaggttgtggcttgtagttgtacataaatctaagaccatttagctatgaataaaatagtgagtaatatacgaaagttatgaaatatttaatcagcgattgttagtactgttcactaatgcccgttcttcggtgcaagtaatattggttcagattacgaatgtagtatgacattaaagtgaaggtgttgtatataatagagaatatatatgacaatgaccaatattaatcaagttgtctttatctaacaagttgtttactataaagacctaattctgattaatagtagatcgacgtaaatcttgagttatcatgaactgttgttcatgctattagttgttttgattcactcgttaaagtttatcgaagaagatgattcttacaacttctgtttttgaaactaacaatgtggatgactgggaacatgatttataattatagaatcctgacttttctaatggatcgaatgctggttccctttaagtgttaattctagaactggaatgctgtgcacaaatttagatgagatttaaattatactctcactagtgaattaatggtactaaaggataaagtaattagaagggtaaaacggtattttgaccaa

SEQ ID NO: 58921 - DNA, 868 bp, Cannabis sativa
  modified_base (839)..(842): a, c, t, g, unknown or other
aaaacacaaaagcttgtccttctctctttgcactttggtccgccttctctttccttcatcttctgtactatctgcaattaattctcttcaaaaatggtagttgtcatcatcttcaaggaggcgtacttagtcttctttttagttgtggggtaaatatggtacaaaatgacaccctaaaaatagaagcccaatcatttccaatcttggcccactaggtttagtcttcttcctttcacagcagccagctggcgtactttgagtgactgatacataattgctgatgtggataagtgaaattaattttttagacttcttccacgtcactgcccaaacttcccagaatgccatagcattctggcagcatttccttctagatttcagcttttgttccaacttttcctttgcatcatttccttttttctagcaagttaattcttctttctcataacaaacaagcaacatttaattaaaaaacacaactaaaataatagtttttacaagacttaaaacttagcttactaaataaaaaatgaaactaaaactaatgaaaattaagcaaacaaacacattttcactactcttctcacaataatttcagtttaaaagtataacaaataactctataccatagagttatcacaccccaaggctggccagcctctttaagacacaacccatggcaagccagctttctacaacagcctctatggtcagtcatcttgcaataacacacaaaaaaagtgagcaaagttaagtgagcaacttacagaggccaactcctggagaccaatggaagatagcctctctggcttaccatcaacatgttgggttttatgccnnnnataaaactctttacaatctgattagt

SEQ ID NO: 58922 - DNA, 1089 bp, Cannabis sativa
tatgaaactaaaacaataattattttttaagtttattaaataataaatattacaaaaaaaaagtattattattgagtattctataatacttttaatgtattacgaaaataaaaataataattatagtttaaatttatgaatgagaaaatatattacacaaaaagtattattgtagagtatatttaataatactttcaatataaatgaaaaaataagttatagaaattaaaaaagataatacctatttaaacatgttaagttttaaaataatactaaataagtatttaaaagatttttcaataatactttagtataactcatacaatatattataaaaagtgaagaacttttaataacacaatatttataatactttttaggtattataaataccaagttttcttgtagtgagttgatttttgtttgtgtgtatttcagattcgtgagagaagaaactatcggtgtgttaattcgatctctactcataatttcgctgctattcttccaggagattcggtggctggacttgtggtggctaatggtttatcgaactttcttaatctctacaatacggttttaattgtgagacttgtcttgacttggttccctaatactcctcccgccattgttagccctctcaggtaaaaaccttctttttgtgcaagtgaaaccctatatgaagactattgttcgttcattccattgcttatcagtcctaatttaggattattggagccataatcttaagaaataactctgttaatacttgacactaatatcaagaacatggttcactccattgccaattatgtttatttgtttaatttttttttgacaaattaagtttaattttgagtagaaacaaaaaaaaaaagaagaacaaaatttgaatctttacatgttatttatcaagttctattacagtattattacataatcattcaacttattgttgattaatttagatttattggagccataatcttaaaaaatctctattctaatcaatctctgatattaatatgaagaccatgattaagtttaattttaagttgaaacgaaaaatgaatctttacatgttatttatca

SEQ ID NO: 58923 - DNA, 1078 bp, Cannabis sativa
ctttgtagaaaaaaatgctaagtacaaagatgtaatgtttctcgcggttctcttttatcacattggaaggtattaacgaggtggttacttcaacgtataaggagcgagatggataaatatagtcattctttctacatacaagtatgttatgaggaaaaaacagagtatagagagaagaagctttaacagcttttagagactttttattattgattttatgtaacaattacaaagaagataaagtatatatatagcggatatgagctgagttagttataactaacttagctcttaacaaaaataacagattcaagaaggttcaggtacagtgctttttgtttaagttgagttaggagctatgtctaagctggtgctaacttgactggcagtactttttgttttttcagacttctttttgtcgccatacccaggaggaaatccgtggataaagtagcacttatccacatagtggccaggcttgccacaattagtgcatgagggtcttggcttcttcgatcctggagggttgttggaaaaggaaggtcgaatagtagcagccagagatgaagagtcggataagccaagggttcgttgcctctcttcttgaacaatcatggcaaacactcttgagagattagggatgggttcgttgaggagaatctgggcacgaaccgaggcataagactcattcaaaccagtgagaaattgtaacacttggttctgattatagtattcaagaaagagtttcatggcaccacaagtgcaagtagtattgggttgaaactctttcaattcgtcccaaatggacttgagtttggtaaagtatgaggtgacagaatgatcacctcgttgtaatcgagttaattgagtttgtagctgaaagattcggggtccattaccctcattgaatctttcttgaagatcattccatatgtcgatggcaggatcgaaatacatgatgctttgtccaatctcagaagaaacggaattcacaagtcaagacatgaccatattattgcaacaaatccaagaatgaaggagagggttacttgtagctggtcgaggcagggagtcgtcg

SEQ ID NO: 58924 - DNA, 1187 bp, Cannabis sativa
agttcaatgcttatgttgagaggttcttccaaacaaaaattaaaagtgtgcaaaccgacttaggaaaagagtatgaacccctttacaaactattccaatctttaggcattgttcaaaggaactcttgccctcacactcaccaacaacaaggtaagttgaaagaaaacagcatgtagtcgatatagggctcactcttcttgctcaagcccaaatgcctttacaattttggtgggaagtctatacctcagcagcctatgtcattaatagacttcctaatcaaaccattgattttctttcaccttatgaaaagttgtttaaacaaaaaccagattacaatctgttcaaggtctttgggtgttcttgttttcctatgttaagaccctatgaatctcacaaagtgtcttttagatctgccaaatgtgtcttcattgggtattgcttgaactcaaaaggctataggtgtctccatcctagtggtcgaatctatgttgctagaagtgtcaccttcaatgaacttgaatttccctatccaaccatgttcaatcctaccacctctaactcaaatactcaacctactcacattgattacaacacctacagacttcctgaaattccagcaccacaaccaccaaatccaaccccacttccacctcccagtgagtctacgtcctcactgtctgcaactgacagcagtactgttgttcctagtattccccaaccctcttcaactacatcttcttcaagctcatcacacccaagtaaccctccccatccaccaactcagaatgctcacccaatgatgacccgagccaaaatgggaattcacaaaccaaaactatacttaaccactactgatcctgatacagaaccaacaaatgttaaagatgcccttgccaatcccaaatggagacatgctatggatactgaaaaccatgctttaaaaagaaacaacacttgggttcttgttcccaaacccgatgatgctcaagttatcagcaacaaatggatttttcgaattaaatacaatgctgacagttccatttccacctacaaagcaagacttgtggcaaaaggctttcaacaaactcctggaatagatttttttgacacctatagtcctgtggtgaaaccttgtacaatcaaaataatattcactttggctaccacttacaattgggaaatacaac

SEQ ID NO: 58925 - DNA, 1194 bp, Cannabis sativa
ttatttatgtatctagttgattatcatatagactttttggaatgtaataataaatatgaaataaaaaaaaatgataataataaatatgaaatttaaattacactttattatatatattatttatacatttaatatggattgattttagtaaatattaggatttttacttaaaatttttttatatgtaccaaatcatgtttttagagttttttggtcatttaaaatttttttttaactattaagattgttagatttaaaaaaaattatttaattttactaacaaaaatttgacgtggaaatattgaaagataattcggtagagacaatgctaccaaaaaaataacttaaattcggttacaactgtgcttgataattggcgaagaaagctcttgcagtatggattatcagctcaaagtaaaccacaactttttaatttaagatggatttgagttgatgttgttttattaggactaagtctttctaaattgtattgatttatcttaaaaatttcatttcaattgaaatatgattattcattataaacgagaaatttgaggattatcagttaagcatatttatatcggataaagtattcaataaacattagggcttctccaacaaaacactaaaatcttaaaaatagtgaagtttagacacaaaattgtttcaatggaactctagatgccatcttatatatgtgagaatctatagtgtcacactaaaaatagtggaacactatagactacactaatttttttcttaatttttaatattaaaataatgtgtttatgattaaatttttatatttatataaatattataatgtgagatagtttaataaaataatataataataaagaatattgtttagtataaattttagtattgtgtttagaataaaaagaaaaatagtactaaaattataatttttagtattattttgagactatatataaatttaagcattagagttgcccttagaacatcctaaattattattattataatctcaatgttttttttatttatatatagtattgtgaatattattattatttacaatatcttgcaaagttaagagacttagaataatttgtaatgcataaaatagagtttaagggcttgtttggtacgttgcattttaatgtattgtattgtattgtattggattgttgtattgtattgtattgtatt

SEQ ID NO: 58926 - DNA, 907 bp, Cannabis sativa
ttgacaatagggatcacttgggtgaagatgaatagggcagctgagtctgtttgatctccttcctgaagctggaaaaagaactcttgttgggtacgtggcccttgggaagcactatgtgtggcaatgttagcaacttgttggcttggcattttcatgagctggtttggttggggagttcctagtagccgtggctaattgtaataggggagtattacaaaaggtccttggtactttgttctggtggttcctctcagcacattcttgtaaggaagtggagggggtgtggggattcatcagtggccctcatgtagtcaatgcaccatgtgtaagtgtgaccaaggaatccataatagtagcaatggtctgggaggtcttcatacttcaatttcagccatgtagcaatggccatcctagggaagagaatagatatgcacctcaggagaggtttagtgacatcaaaaataaaacgaatccataagtatgaatcctaagttttgagtagggatggttggtgtatctctagcaagactccaacaatttggcccacaagtctagtgaaagagatagatcatcggaaaaaaaggaatgttatggagctggacccaaaaagggattttacgaatagcttcaggaacgagggtggagtcaggattaggtatttcaagaaggacagggcatttgtcagaaattcaaggttagtttatgatggctcgtcgcctatcaccttcataatggaaagcggttaggtacaaattagagtttggtgacctttctttggcactaatagggaaccgtcccttccaatatttttctaagaagttctttagagaattatgattaaaactttttgtagtgtagagggtggccatgaggtggaataagggtggagctggtggaagtcattcat

SEQ ID NO: 58927 - DNA, 773 bp, Cannabis sativa
gtaatcttaattattattttgtttttacatattctaaattactatgttaatgttaatatgatttgttttatacaactgtgcaggtgcattcattatggataatccaccatctgatgatgattatgacaaatggggggaggcggttggtttagacgatgatcacacaaatgcctttggtgacatggttgatggaccaaccgaggttggagcagggaagaaaaatgtcaggggcgcatgcgttaataaggtacttcaaaagtatcgggctgaaggtaaaaaaatggaggttgagtacaacatgtggggtcagcccattaatgagtcgggagacatacaagtgagcacgaatggtgcatatgtgcgtcgaaactccctttaaagtataatgattggcttaaagtgccaaaattctataaagacaggctatggaattacattgaggtaactttatgtgttaatcatatttacatacatacaattttcatatttaattagattttaattatcattgaaaatcttgcagagttcatttgatattgggggggaaactagagcttctgtcttaaaaacagctggagagttactcaagagttggagaacaaaattaaccagccaactcatctacaaatataaagatgaagcccctgaacttctcgaacatcctccaaagcattatcttagttgctatgacgagaagcaatggaagagttttgttgcttccagattaactcctgagtgggaaaagaagagagcaaaagcacaagccattagag

SEQ ID NO: 58928 - DNA, 1154 bp, Cannabis sativa
actcgaccaaatgggcacactaacacacacaggctgttctggtttgtaattattgagaaaaccagatctgaagggaaaatcttcttcgttaaatatgacatttctagagatgtacattctccccgtggagctaaggcatttgtagcctttatgagcatcactataccctaagttaacacacttagtggaatgaaattggaatttatgtgtttgatagggtcaaatacacggataacaagcaactccaaagactttgagaaacttgtaatccggtttcttaccatgaacaacctcaaagggggactgatttttcaaaaccggtgttggtaatctattgattagatacacagccgtttgaaatgagtcccaccaaaacttcaagggcatatgagcttgggcaagtaatgtcaatcccatttcgacgatgtgtcgatgctttctctcggctcgaccattttgagccgaggtatgaggacaagagtgttgaaactctattccattttgcacaacacactcagaaaaagattggaattcaccaccccaatcagttttgagagctttgatctttctctcaaactgattttcaaccaaagttttgaactgaatgaaggctgaaagagcctcatttttggttttaagtgggtatatccaagtatatcgagtatggtcatcaacaaagtgaatgtagaatttgtaatttgtgttggacatgattggtgcaggaccccaaaggtcggtatgtatcagttctaagggacttttagcatgactaggattagtattaaaaggtaaggcatgtgacttgccatattgacatgcttcacagaagttttctttttcattgataactggtttaacattgagtattttcagtacagaacccaatacacgactggaagggtggcccaatctcttgtgccacttatcctttagaatgacagacttagatgcagcaacacgctgatcttttgatttaaaaacaacaccagtaaatggcttaacagactcgaaatttaaagactcaagagaatttgtgtcaggatttccttgttgaccgacaagttggtacagcccatccctaagtgtcccttgaagaagaaccttctttgtgtccagatccttcacaaaacattgtttggcaaaaaattcaacaa

SEQ ID NO: 58929 - DNA, 628 bp, Cannabis sativa
tagtatactagagatagcaatatagatatacaaagatttatatttagatactaatatctagtgatgctagagggtattagatagtatgaattaatgataccaacatcagtacgactagagtactagaattatattagtataattgttaatcatactataggtaggaatatttggatcacagttagttgatttatagtaactaagtgtatgtgcacttagttataaatcagatatatgttatattatgcatgcttttcttactgatgagtttgttgactcacagtctctttataagtgcaggtaaggaaagactaaatctgaacatcaatgaatagaatgcttgggttaattgtgcatatctagcagtaaagactttggtctttattggcaagttttttttctagtgcatgtagtagtgttttattgccttgagtatttgggatgtataaaacaggtttggaagctttggttttatttggggttgatttgagggagttatgaaattttgaattttttctgcactgaatcggaattccggttcagtgggacctgtaggaaccggaagtccgattggtgcccaggtgtgacagtcagtagtcccgggatccgtaaggggaaacaccgggta

SEQ ID NO: 58930 - DNA, 4261 bp, Cannabis sativa
tgagagtgataaatagagaaaaaagaaaggctagagattttgttgaaaatggttttgaaaggatttgaatggagaatacctattgtgggtagttggtatttatagtacaagagtttttttatacaatataagcaaaaagtcaattaatgaaaatgtcaaggttgaaagtttgaataaggcttttttaatttatctatcgacgaagactgtttctcgttttggtgctctctctatctttctcttatacaaagtctataatctaaaccctctcaatttggctgcttaggaacccaaaatcttattcattgactttcaacagccataacgagtagtagaactccgaaagagacaaatagtaagttgagttctctaccatgttctgtaattagtttaattaatccagctttttttatatataaaaataaaatattatccaacatataattgagcatattatattagagaaaaattatgtagtacattttttatatgctatgttacgacattgttgacgcatgtatgtgaatatagtatattttctgtaatgaaaatatacatcttttgaggtaaacaacaccaacggccgtagaatattattatgaatatacagattcaacaaatctcatgttggtttgttcccctggtgttcagattttgttcttggattattaaaatttacgatattataaagttatatttaaataaagcttgtcgatccctggtcatatatcttagcattaaaaatttgaagaattcatttaaatattttcaaaatttatcacatgatcaactaaacttcacactcccaacaattttgtatagcttatttagccccccatcctggtcaacagggtagaaagagtcctgcaaagattgtttggtcaaagtacaatggttttttttttttttttggggtaacgatcaacctctaatccaaggcaagtgaagattgagagaacagagagaaacagagagagagagaattaacacaaaggattgctttgtaattcttacctcaataatgaggatttacactttatttatagaacacaagaatggtacaattacataacagatttctgttaagaaaacagaaaaggtaaagtgcagagaaaataaacaagttgctaacaactaactaactaatgtaacagtaccaaaactaacagaattaactgtcttggttatcatcccccctcaaacgaaagggggtagtaaccactttgagtttggattttaggtactgaaaccgatccttgggaagacttttagtaaaaatgtcagcaacttggtcaatagtaggcacatatctcacttccagttctttgtttaggagttgatcacgaacaaaatgttggtcaatctcaatgtgtttacatcgagcatggaaaataggattagcagctagggatgctgctccttgattgtcgacccagataatgggaatgtcaactggagtgatctgtagttcagtaaacaatgagcaaagccatttaatctcagctgctgtgtttgccaaagcacgaaattcagattcagttgacgaccgagcgacaacctgctgctttttagcagaccaagagaggagattagagcctagaaaaacagcataacccccagtagatttcctgtcatctatgcagctggcccaatctgcatccgagtatgctacaagggacattcgaggaactggtttgagcagaacaccatcagaaattgttcctttcaagtacctgagaagcgtttacatgcttcccagtgcacggtggtaggggcatgaataaactgggacaatttattaatgatgtatgctacatctggtcttgtgagtgttaagtattggagagaacctagagtgctgcgatagagagtaacatcttcaaatggagacccttcatgaagagatagtttctgagctgaagaagttggacttgcacagcttttggctccctcaagatgaactctagtgagtaaatcggtaatatacttggtttgagacaagtataaaccatcactgtttctgtagacttcaacacctaagaagtaatgcagaggccccaaatcttttaaagaaaatgcagagttgagatcagtgataagtttttgaaccaatgttggattaggacccgtgacaaggatgtcatccacatagaccaacaaaacaataaatgtggaaccagtaccatgaatgaagagagaagtatcagcttttgaagcactaaatccccaagcaaaaagggttgacttcagtttctcgttccatgcccgaggagcctgtttaaggccatacaatgccttattaagtttgcatacatgaagaggtttagaaggatcctcaaaaccgggtggttgatgcatatatacagtctcttgaagagctccatttaggaaagcatttgccacatcgagctgtcgaatttcccattgataagagactgccaaagtgagaactaatctcacagtaactggtttcacaacagggctaaaggtatcttcgaaatcaattcctggtttttgaagatacccttttgctacaagccttgactttaatctgtccaaggtgccattagcattaagcttgactctatggacccatttgttgcctatgagatgcatatgaggctcatagggaacaagtgtccaagtcccttgagaagtgagagctctaaattcattgttcatggatgcaaaccaacctggatgtttgagagcagatttaagggtctttggctctgtaggtagcagtgactcaggcaatctgtgtttggtggccaaataagctttcggtttataaattcctctttgagatcgtgtaaccattgaatgtgtccttacaggacctgttgtggtagggacaggcacaacagataagggagcatcactgattgctggtgtaggattctcagtaggaaatgatgccgatgctggtagagaaggtgaggaagaattctctgagtcatgaggtacagcagcaggtggagagttctcgatggactcagtggcatcatgattcgcaagggatgtggatggtgaggccgaatcaagaagaacagatgaattagttacaccagcagccatattagtagcaaaagtagcagtaggaaatgtagtaggttcagaaattacctgagatgaacattgatgttgaaatgcagggaagctatgttcattaaaaatgacattccttgctataaacattctcccagctttgttctcacagagataacctttgtgtttaggtgaataacctaggaaaatacattcctcagatctgtagtcaagtttatagtgattgtagggtcttaagtggggaaaacatgcacagccaaacactttgagaatattgtaatcaggggcttgctgaaataggcactcataaggactgagattattaagaactggagtaggcattctgttgatagaataggctgcacactgaaaagcatgccaccaataagacatgtcaagaccagatttggctaagagagtgagacctgtttcagtgatatgtctatgtttcctttctactcttccattttgctcatgagtatgagggcatgagtgttgaaaccagatcccttgatctcttaagaatctttcaaaagctcgatattcacccccaccatcagcctgaacctttttaatgggcaaattaaattttccactaagcttttgaagtgaatgaaaatctcaaaagattgagacttgacagacattggaaagacccaagaggaacctgctgaagtcatcaacaaaagacaatgtaatacttgtaattgtccttagatgcaaggtgagaaggcccccatacatcagtatggataagggcaagaggttgatttgctcgagtagtagacagagggaagggtaatctatggctttttccctgctgacaggcattgcaaaattgcaatcctttgagggaatgaggaacatttgcttgactcaagattttagtaaggacagagggtgagggatgacccagtttggagtgccacaaattaacatcagtagataaatttgaattatacacagcagcaggattttgaaagcaagaacaagaatcaggatctttattgatatgagaagaattacaaggatttagagaaccatatgtattacaatattgacagagacagtgtttagaatcaaaagagcaactagattctacaagctgacattgaatggaagtgcttgacaggttcgagccatcatctccaagaagataaagcccatctttaagtgtccctttgacaagaac

SEQ ID NO: 58931 - DNA, 1457 bp, Cannabis sativa
  modified_base (1333)..(1354): a, c, t, g, unknown or other
ggtctatgccacatagacatatacaggcatgtgagcataacatgcagatctttatcaaatagacgaatagtgcagtggcaccattaattatgtgttagacgtatatattgagttacgcgttctaagcataatcaggttggactcagtaactgaaattgagatatgaaccgttctaagaccttattgtatcgagacgagtgagtgtaacacgtgggtctacgtcacgtagacataaatggtcatgtgagcgtaacacgcgagtctatgttaaatagacaaatatgaatggcattattgtatttgtgatatgttaaatataattgctgatattatttattgccttcctgggctttcacaggtgctctacagtgaaggaaagggtaaatctgtttttgattagccataagtgcgagggcttggcaaagtatgtacatgtttgggcaacagtagatcaagtgggttggggtctaccagtgttgtacttttgtaatttgaatttgcggcttaggtcggctagtgaaaagacttgtaatactttgtaaaacattttagggatcccaaaatatgtagcttttgattgtaaagtttattacaagattttttttattcttttttcgattaaagtttaaattttccgcacttatctttgtagtattcccggtttagtggattaattagggtttcataatcagttatcgtgacgtgcctaattgttagggcgttacaaatagactttgtcaaaataccaacaaactcagaataaaatattttgaaagttagagatatatgatattaatatttttataaacttaagtagcaatagcctttattggcttcaaaatatcattgtataatagattaatatagttagttatgatcaaaattaggaaagtgttttcttcatcatattttttttttggtagtctcattcatcaagagatcatgtttttctatcaccaagattggttctattaaatattttagttttttctatcaaaaaaaaaatattttagttttttctatcatcaacatgggttctttcaggtatagtatattgtataataaactttaaccctaaattatagtaaaataaaaaataaagagtaaaattaatttaaaagataatttaattacttaaagagaggaataaaaaaaaaaatttattacaatgcatatttatttattattatttaattattgttgtagattttttttagaaaggttgttttaaatttttatataggttttttttttttttgaaagtttgttagtaaatttctatgttaaaattaaaaaaaaaatagaatggttttaattattattattattattnnnnnnnnnnnnnnnnnnnnnnttattattattattatttaatatggagtatattttttataacattttaaatttctaaaaaaaattaataattagccgtttatatatatatttaatttttgtga

SEQ ID NO: 58932 - DNA, 898 bp, Cannabis sativa
gtcaaaattagtgtaaccaacgtaattatatatttgacgtaacccttgagtagtcacctatttatatatatatatatataataaaacaatagaaatagtatatgtttttttttaattatcaaagacaacttatattaaaaactattgatggggtcacgtgaaattaaggaatgatgggtgtaaacccttaaacacgtttatcagcgtaaggtgttagatgttcttcctcatacaatattagatgcgtatacaatattttaatccttatgcaacgtgttatacttcatcagtcctcccgtatcctcctccgggtagacttcactcacaaagaggaaaagacaagaaatactcgttgtctagttggatcctcccagagatgattgatctatcattaatcctttgaaataataaactctggagtaatttaggtggcgtgccttataacttgggtcccattgccatctggtttgctcctgaactgcaatgtattttgggagattctaggcaacatttaccccaagtcctttcttataattttgcaagatgggagttgcgatgtacctcctggagcgtcgatgtcatgttgcgcgtgaccattttaaatgatgctcattatttctctcattttttatgaaaataattttatttcttattcaattttgatgccattaattgtagggtgttagaagggtatttgagtagtgtaactgttcttttgtgcccgttcatatgacaactgttctctagccatcagatcatgggggtttttaatttttgaataggaccgtgagatgctttaacaatccatgtttcttaggttggtgtataaaaacccctcattcttcttcttcatgacttttactctcgtattgtcaaaaacctaagctacattccacga

SEQ ID NO: 58933 - DNA, 1018 bp, Cannabis sativa
tcatatattattacaaatgatcataaaataaatatatttttataatctttgaggaatattttatatgaatttggtgaagcaaagcaagctatctagctagtttaaattaattaattagagtaattaattaatatcatgaggataggaggcttaaaattaaataataaaataaagaatatttctcaggtacgtcatttgcgaacccagtggcacaaaattaatgaatgtgtattaaaaatcacattaatagtttacgaaattgataatggaaagtccatcacaaaaccaattagatcttccctctttttctttaattaactaacaaactttaattataagataattaattaattaatgttgtcgtcaggtggaaaagaaaatcagtttagcattaattgtagcaaagaaaatatataaaattacatccaatcagatttgcattataataccttgcaaattatattatgtatcttaactattatattaaaattaacataaggtatataaacattatcttttactataaatataaatatattgaggactaccctttctatttttatgtagatccacccttaaaaataaggatatatcgtattgaattggagtacttttggagcttttctttaaaaaaaaaaagagtgataatatataatttttttttcacataatctatatatttatataatatatgatataaaaaaaacgtggcataaatatatacgatcattattttgagacgtgcatgcttctatctagttgtagctaggttaatttaaagtttgtattatttgtatggaagaattaattaaggaaaaatggtaaatcgtgaagacttgtaagtatgacactagcaaattaactaatatattgagaagtatgggtctctgagttgttctttttttttttttaaatgaagattcatttttgttaaacttgaatttcagccaccaaatatgatacttatgtgtaagagcttttgttagtgtaattacatgattggttttttttttttttt

SEQ ID NO: 58934 - DNA, 1039 bp, Cannabis sativa
aaatataataaatataagagtgtacttttaataggtcgttaacccaaacccatttattttgtgcgagtttcgagtcgtattatcatgtttgacccattttgacacactagttagatcccaacaatgtgttcaacttcttacgcacagagtcacaaaaacctacttcgcctcatttatcttacacatcctccaaccaaacaatgaagtgcaacatctaattaattatgaaactaccactcacgcatttaagtttctaattaattttagattttgatatgcctccaatacgcttcatgtatactaggcaacagaagaattagtggtggaaatacttaagtattctgtatagggcagtgatcctttgtccctggttggttttgtagccagcaaggtgaggtgtagtggcagttttgcattttgagattaaggaaaacatattctgctcttacttttgtggtgaggtaggcatttggtgtcatgattttaaggaagctttggttcaagtgaagagtcttgaagatctctcaaacaacatggcaaactttgtacgggtgaagagttttgaagttctctaaagcaacttggaaaactttgtactggtgctcaagtaaataacacagcctactgctatattacccagatatgtgttactgtttgatagaatgttgttctattgtttctgatctctcatttgctgtaaattggtatcagattccatgagaaaccacctgatctacccatgtcccaattaacttaaagctactctagaatcaatttttaaataattcaataaaattattgatgtgtataactcatgttaaaaccaaaaaaaaaaaaacaaagcaagtataattcatattaaggaatatttatagaaaatttcacaagcctaaagttgagatcgacatgcttgcaaagaataatcaatttcacagatattatataaaaactcgctttcaataaaatcctatagtgtgttgtaaattttgtgaaaatacgaaagcaacaaacaccaacaaatgcaagtactgataattca

SEQ ID NO: 58935 - DNA, 612 bp, Cannabis sativa
gtgtgggaagatcgtagaatcggtttggctagataattctaattggggctctccgtatggtcttcggggtcgtatcaatctttgtggggagtctcttaagggttggaacaaggataaaaaggcagatcttagagctagaaccaagagacttaaaaaggaactgaaaaacctctctaagtcatctatggaggccgattggaagactagaaggagaatagagagtgaactgaatgcggctgagatcaaagatgaaataatgtggaaacagagaagccgggctctttggcttgcccatggggatcgtaacactaagtattttcattataaggcctcccaacggaagaagaaaaacatgataaaggggttatttgatgatcaaagaagatggtgtacggaggacaacgacatagaggcaatcctagtgaattattactcggatctgttcacatcttcagagccgaccccccatatgagagacatcctctctcggtgtgttcccaaccgaatgtccttgcaagataatgaaagacttatggcagatttcacaatagaggaagtaaaagaggctatagctcagatccatccccttaaagctccggggaaagacggtct

SEQ ID NO: 58936 - DNA, 987 bp, Cannabis sativa
aaaaaataatgtgatctatagtgcttattaaatttggtgggacacatagataaacccatttataagtttagttatggtgtctcattgaattatatatatatatatatatagtattgtgaaactacactattttaagtgtttcagagaccgcattacaaaaaattgctacttttagtgataacttcttaatcacaacataaatttttgtgactaaatatgtcttttagtcacaacaaaaaactacttgtgactaaaatatagtatttacttagacacaagttgtcactaatttagttttagtacaataagtattgtgactaaaaacacatttaggcacaacaaattgtaatttttgtaactaatatttttagtcactgactttgtagtcacaacactaataataatttataattaaccacaatttttttatctttagtcacaagttttttgataaaagtaaaaaaaaattgtagtgcatcaagtagtatatataattggtttaaaaaaatagtatatataatttggaggtgaagatcccgaagaatatctaatatacgcactgttattaagggtcggctgtcaggtaaggcgagctaggcatccgtcttggattctaaacacttagatcgtctctaatggacggtgtatatttaaagttaaatttggcctaaaatataccataaaattataagtgacccttttttttttgtatttgtactccaatgcataaggtacaaattagttataaaagccaatattaccagtagagattgtaacttttcatgaatttgctaaagttaatgattccaactacttattgtcggtcccacaagtcgtgggacatgcactaagacagtcttttctctttaagagttggtgcaagaaagcctccgaacaaaggcattaatactaagagaggaagaaacccccaaaaattcgtgttgtattgtattagtggaggcagtagaagccttaatatataacgcg

SEQ ID NO: 58937 - DNA, 990 bp, Cannabis sativa
ttaatacattattaaataatatttcaaatataaatatttaattttttcaaacaaaaaatttgtaatctttaaaaataaaatacattcaaaattttcaaaagactaaaatctgaaatgaaactagcaatacgtggctcgacacgtacatccacctagtatatatatatatatatatatcctgaattatttctcttaaattcataattcacttaccttctttcttcttctctcatattagagtattcttttcttaccgatttgagtatccttttcttaccaacttaaacactaatatagataattggaacataaatttgataagtcttgatatgatttttattaatgaaaaggtgattattattttattcatattttctctattatgtttttttatcatttaccaattattaaatacgtctaccatttatcctacagaaaatctaatgcatgtaacaataagaaaaaaattagtttctaaatttaagaagctattgagtgaaggttattgaaaaagtatgaggtggtgacgtgacagtctaaaataactttattctactctaatagttttctcctttttttcatattttttaattgcattaaatattaattaattcaataactaataaaaacttttcaaaaaaaataaaaaaaatcaaccttctaccttatttattctattttattttaaaaattaaattttaattttgctcacttgattttttcttcttttttttttttaattaaattaaaattattgatattttatgaatatcacgtttttctttgctccattgattttttcttttttaaattaaaatcgatgatatttttttaataaatatctcattttgcttagtatacagttttgcttgggatctcattttgataaatggtaggtttgcctttttttcggctaattaagattttttttccccgaactttgacatgtaccaaatcatgtcttcttaacttttttagccattaaaaatt

SEQ ID NO: 58938 - DNA, 1423 bp, Cannabis sativa
tgaattatttaatgaattgagaggtgtatgggataaaggtataacattgggagtagtgtctaggttggcattttgtggtacaataggtgtgataggccgtggggtaagatgagtgggaggggcaggtggaatagtagtagtaggtggtccttgtgatgttgagttgtcattttcctcatttgccgtgtggtgataagatgagagagaggaaacattaccactattagcatatgaaccattactagccgtttgaaaagtaaaagtaggatattgaggcaaaggacatacctgattggatatttcctttggagagtgggataaagttgggaaatggccttcattgaaggtgacatttcgtgagatatataccctgccagatgggtgttcacatagataccctttgtggtgagatgaataacccaaaaatatgcactcttgagacctcaattgaagcttgtgattattatatggtcttaaatgaggaaagcaactacacccaaaagactttaaaatagtgtaatctggtttagtaccaaagagacactcataaggacttatattaccaataactggtgtgggaagtctattgatggtgaaaaccgcacatgccatggcataccaccaatattccatactcaaccctgcatgagctaacaatgtaagaccggtttcagtgatgtgtcggtgtttacgctcggcacgcccattttgttcactggttataggacaaggatgttgaaagtgaatcccttggtcagataagaaccgagcaaatggtctatattcaccaccccagtcagcttggacacttttaataggtagattaaattgtttttccacaagacttttaaactttataaagacatcaaaagcatgatttttttgagttaatggaaaaatccaacagtatctactataatcatcaagaaaatgaacatagtatttgaaaccatcttttgacacaacatgggaaggcccccacaaatcagtatgaataatagctagaggttgggtggccctactagtggataaagaaaaaggcagtttatggctcttgccttggtgacaagcattgcaaaattgtaatgctttaagagaccctgtatgagaaatattaggtaatattttggccaaggtggtttcagcagggtgtcccaactttacatgccaattatttacatcattaaatttggacagagagtaagcttgaggagaaacatcaaaggtatcttgtgtacttttattaatgtcttgagagttacaagaattagtttgtacattggaatgacacatacaagaacaagtacaacaagaattatctaccctagaatttgtggtgagatgacattgaatggctgaatgggaagactctccaagctagtataaaccatctttagcccttcctttaagaagcactgtccct

SEQ ID NO: 58939 - DNA, 1202 bp, Cannabis sativa
actggtgtttgattatgtgaattaaacttttacattaatcaaaatggaactcaaattaaaatcttttcataactattttaagttttaagatgcacctaaatgtgcttttcatgataaaagcagccttttctagaatttgttttggttaaaaccacatattttatttaggggttttctaaatttttttttatggttacgacctaaaattttgatttacaaaaatacgattttctcaacaaaaaaaaaaataaaataaagaaaaatcaattataaaacaacaaaaaaaatcaatttcatgacaactataaataaacaataaaacaactaaaaaaaatatctaacagtttactaaagtttgtattttgtaaataaaaatgtttaaactgtaaaaatgaacatttttccatgttaacatatttttttgtaattttttttaaatttttgatcaattatgtaaaaatttcttatatttcttctataggattttaactaagaatcttaaatgctaacagttcattatgatttgaaaataaaaataccttggttgaaactaatggagctctctcaccaggcactttaacatctggtaagtaactaaagtctgaagcgattaaagacatcttcggtaggacaccatgtaagacctcgagtagtttctgcgcattcaaatgtgagatcagtaccagaagaggaaatttatacaccgaacgaaaaagattcaatcaacatttgtctcaccaaacatccggttggaagccaacatcttcgaggtttcggaaatacttttgaccaaacgctttgtgcttttgaaatcaccctgttttgagtcttctgactgttgtcgaagtcaactatctcaaaacatcgcttaataagcgagtcttgcaatggcttatacagttcttcgagagttcccctattgattaaagaaatctcaatcagcagaatgaagacatagaaaagaaactagtaacatgttacgtgtgatacaagcgatcagaattcaagtgagatcccttttcagttaaattttaagccccaaaagcttgttcaatatcttacaatgatatgaaacatgaaactgagtttcatttgtacatattcttcataatttgagatgaccaattacttcatatgagctcattttggttaaattcttgctactcgcatcaggaagaataatatttaggctaattaagatt

SEQ ID NO: 58940 - DNA, 890 bp, Cannabis sativa
gtaccctcatgcccctaccattactattgctgatgtggatatttctgattttcctcaaggagggcaagttgctaacccgtacttcaactactcaatgggttatactccccttcttaactcccatatggcttcagtttcttgcttaagtgctcctaggagctctgtaagtgtgatgatccctacccctgttaatcccaatcagggtctggttggtggattttttaatcccatggtcaccacttccattgctactggtgcctctcttgcttcttctatgactagtggaggaatggtgtgctctgaagggtctggctctttgtcttccatattctctcagggacttagctcagtatctactgattctgtcctggtgagtgctaactcctcctcttctaaccctgatcttgttgctgctgcccgttccctggcagatgctctgccttctctggccctgagtagacctcccccagctgctcctgtttttacagcaggagtttctagactggatcctaaagtcaaggggaagggactcgcatgtgcttcaggggttaagcgaccctgttttcaaccagctcaagcaacagtgggaggctctctgcggtcaatgctaaagcgtgctagagctggggaggctgatcttgtggaaaatttgtctgtgaatgatgaggaacaggcgggtgctgctgtgcacacccgcccagaaaaatgaattttataagctggaatgctcgggggctagggaaccctcgagcattcaatcgtctttccctccttgttaagaaccataaacctgctttgctttttttgatggaaactagattgaagcccaattctgttgataagtttaaaagggctttaggctatgttaatggttttgaagtccctaggaa

SEQ ID NO: 58941 - DNA, 1904 bp, Cannabis sativa
tatttttagcttttatgtttttttatttgtgtttatctataggttcattctggttttgttgaagggaatgatgagggttttctgtttacttatgatcgtgttgatgtcgaccaatccattttggatttggttgacaacctcactcgggcatatgcgtcttgtataagttaaaaaatgatcaatgtgagttggtttcaattcctgaatctgcatcccctcctgttgatgatgttgaagtactggatgtagtacccttgcattctagggttgctgtcaacagacaagcaaaacctggagtgcattgtaaatctctgtttgtgaatgagtttggttcttctgaaccaaaagatcagaagaagaaggacacggagccatttggtgaagaagaagtcgatcataaggagatgtttccttttgtacgagagattgggatgaacatattgttttttttttttttaaattataaccggtttttttatgtttccttgattggccaaggttctttgaatatttgacaaaatgtcttttatatatactaagtggcttctttgaatcttttattgattttcatgcttgttgaagctagtatgatataattatttatattttgtaagaggagattaacatttttttttttttttttatctatttcattctattggtttagaattttacccaagtttaacttttcatttttattttatataaccggtttcattttagttaattttttttaataaccggtttcatttcaattaatattttctttttctaatgttgtttttttattttgaaccggttaatatttaagtggtcttttatgtattttgtttaagtttattaacttgtttttctttgtatctattataaagaatcagtttcatttttattgattatttttatatttacatctttaatataatcgattttatttttattgattatttttattggtgcatgtttaatataaccggttacatatttttgtaatttttttttctaaggcaaatatttttttagaaattttttattttattcaaaatcaatattgtttgaggatatagttcatgttaaaaaatattaaaattattattggaacatacaaaatctaatatagagtttttttttattgaaattgtatttttttattcaataatgctcttattgttgttgtttctttgctttcttgttccttggttattttggttgtttttgctttggtggtagagatggattagtgcatgtctttctgttgtggtctatctttttgcaacgtccacactttacttgtgtctttggctctccttttgatcttattctttttctcctaggtccccctgcttgctttttcgtgtctggtggtagaactatcatttccaagcactcaggcagtgtccattcacttttatttggtaatgagtttgctgttgtgtcatatgttgcttttatttcgtctattttgtagtagtctgcaacatagtcataaactagcagtcatcttttcaagaatacagctattgcataagcacatgagatttcatcttgctggaactggttatattcacatattttgtccaataaattgacaagaaatttccctttctctagcacattcacttggtggagtattgttgtaacttgtgtaacctgttattttaaacagaaaaaattagtttataaccggttattttatactgttattcaatctctctaatatatatttcctgtatatatatatatatatttattgtgttacctcatattttcttgcttgaataaagttttctctgagtattttttctgtcactgttgaaatttttatggatgttccatgtgctttattgccatttgtccaaacccatttttgtaccaaacttcgaagactctctatcattgtagtgatg

SEQ ID NO: 58942 - DNA, 1639 bp, Cannabis sativa
  modified_base (1593)..(1597): a, c, t, g, unknown or other
agggcataaaacccaacaaaactctcttataaactttgctcagggaaacttgagaacatacattttgtgtatttcttaatgcatttataagtgaaaaacttactgaataatattgactcgtgaactaaggctagttcatgccctaaccacattaaaaacttgttatcctgatttttgtcctcctgacatggcatgcttatgtggacaaaattagtaccatgtggcaatacaactcgccaattagaaggccaagtcagcacctaagcaaacggagacctcgacactcaaatgggcatcaagtgatagaccagctccctcacaagagctgtccggccagccttgggattgcaccattgccggctagcctgccctccatagaggcttggccggtaaggaggtgctttgtatggtttcctatgcactttaacacgtggaaaacaactaatgggctatgaattaggtcttaaaagccgaacaagatcgttgaataatatctaaattcaagggtaatttagtctttagtaattttctaacatactatgcaaatattagggttcaaaactgtaatctagggtttaggtctcctatataaaggccttaattctagctctaaaacctaagttaaatctaagactgaaacctggtcccaagctctaagcctaagtctgacaatctctctcttcctcacttcttctctcacgcctacactagcatcatctcaacacttgagttttgccattgatccatactttttttcctaagggtgctatagcagatcccacctatagtgatctggatagtattaaccctcggtactaatacaactaaaacgttacctgctatcttaatgaggccaaacctctataacaaatctattatttattgttttttattcttatttgtgcaaacacatggcaagatttagatctatacaaccccgctgtcggttgatcactttttgaggtcaacaatttggtgctttcactaagagcgtggatattgtatctgatcaaacgccatagtgaacacaagaagaactcttgttgcacaatctacatctttgggtctccctcaagacccacatatcgcagatccaggtactcatgttccagtcacaactggaattcccatggacattattgatgtggtgaatcttgtcaccacaacaggcgccacaagtttgaccactacaactgggcaaacggatataggcatcctaatggatccaagtggcaagcccttgcctccaagagaagacccaccattggcgcctcctactaaaggaaggacccaggggcgacaactccctgggacaacaactggatattgactccagttctacgttggagagacaggcccaggagttggcaagcctgcgattggcaagtcggctcatctagacttaggagaagaccttgagttggccagatttagggaagctttaggctgtgcaggcctaactaaagaaccatgcgctgttgattgtaatgtttttgcttagcagagacgcgaattcctgagatggatgaccaggaggacatccttctgttgggaatattttaccagggtctagatttactaacaagtatgttnnnnnacatcctaaatatgaatatctctacaacaatgaaattaaaca

SEQ ID NO: 58943 - DNA, 548 bp, Cannabis sativa
gttttgatgagcaaaatacttatttattattatattaatatttatctaaaatatcataggggattcggaaaaagaaaattaatatcagagggcagaggggccgaagggcgctatatttaatattgaaatcgctgtgtgtttgttagtcgacgatcgaggtctgagtcgtggctcctccttaaccttttccttctgatcatcctcttcctcaagtaaatctgctcaaaccctaatctctctctctttccacatatatacatatatttatgttctcctgtatactgttatgtttgcagacatttttacagtctttctctgaggtgtttatttattcttgtttcttctaaggttgagttgggtttttctttttcgttttgtttttgaatctatatttaaacctcattacccagatgtgattgttttctttttcattgattggtgtgtctgatatactgaatagtaaatactgtttcgaataaagaaagaagtctgcttggttgcccagcatgggttttctacactgactaatttccagaatttcacacatt

SEQ ID NO: 58944 - DNA, 850 bp, Cannabis sativa
ccttggatccctggtaactccattctcactcctgtattttttactggagatccaactaataccgttgctgactatatcacaccagaaaaagagtggaatgtgagcaaattgactgctgatttttcttcagttgatgtcgagagaattctttcattacctttgtctcatcatgctacttctgattattgggtttggcatgctactggtggacagtatgaggtaaaatctggttaccatgttgcttgtttgttagctgatgatactttcgcctctgtgtccagcccacatgtttcttggtggaagtctttttggcaactcaaactacctcctaaagtgaagatttttgcttggaaagctattcacaatgctttgccggttgcttcagagcttttcaagaggaaatcgctcacttttgcctcatgtagtttgtgcctcaatgcttgggaatctgtggggcatgcaatgttctcttgtaaacatgctagacacgtttggaaagttgttggtttttcattcaataacagagcggttgtttccatgaaaattgaagattatttgtttcagatatcagaaagctataccaaatctgagttggaaatgattttttgcactatgtagtctatttggtctgatcgtaacaatatcattcatggtaaacttcctcaacaaccactggttatctatgctaaagcacacacttttctaaataattaccaagcggctcagcaactatctctccatgctggtttggcaccagccgacactccaaacactagcaaaacttggactcctcctcctcctactttgctaaaattgaatgtagatacagcctttgatgaagctagaaaca

SEQ ID NO: 58945 - DNA, 987 bp, Cannabis sativa
ttagtattcttcaatttatgaaattatatgtacgctaatttttttaattcaaatcacaattttttatttttaatttgatttagaactaaattggaataatgttaattaggttttcactaaatcacattctacatgaaaatttacctaggaagaaaagtgattgggtggtatattttttttaataagatcggatggtcccatctcacttggaatcattctttattttatgggaccactgaatagtatcaaaaggtatgagaaactgagaaaaacagaaagaagcaagaagaagatgattctttttattatgcttattctgcagaaaaaatttacagtgccatgaatttataaaatgtaaaggaagagatcatggttagttagaaaaggtaactatggttctaacaacctaactatataagtcaaactaacttatccaagtaaaccaacttaactaaggttgagtctaatagtcctctcaagatggagtgtaaatattgataacacccatcttggatacaatggtagaaaattgagtgggaagtaaagctttagtaaatatgtcggctaagttgtgttgagatggaacatggacaagcttaagtgaaccttgttggactttctctctaataaagtggaaatcgatctcgacatgtttagtccgttcgtggtaggtaagattttcgctgatatgaatggcagcggtgttgtcacaatataggacgaatggagatgaatgagaaatgccaaaatctttgaggagagcaaggagccatgtcagttcggaggttgcattggccatggcatgatattcagcttctgcagaagaatgggaaacaacttgctgctttttttatttctaggaaacgagagaactaccaaggaacaagcaacagtgataactctagaaattagagttatttttcacattttttaaactaaaattggcttagttcttaagttttaaattattttagtaagtttttaatt

SEQ ID NO: 58946 - DNA, 860 bp, Cannabis sativa
  modified_base (279)..(279): a, c, t, g, unknown or other
ctcctcgtcctgaggcagccggtggaaggtcccggaggctgatggtttgatgcctgccaccaccacgatcttttcgagctgtgggcaaaagtcaatgtggagtggagctcatccgcctcccaaccgtttgcacgagacttgaaattctcctgggccacgagaccctgcatgacctcttccagggtggctagctgaactgctcccttcttggaagacttggaactagacgcggaagcagacattttggttctgaaaaaattgagaaaatccagcagttangccccaaaccaaaccctaatgttcaaaaaagggaatgggggtcccctaaccgttggaaagaggccccctccggacgcttgcctaagaagaaaaccccaagaggctttccttgacaagaatcaggtgcaaaaatccgaaaggcagtgacattgcaacaggaaagagaaaaaaaagggaaaaaaagggcaaagccgagaaagcaagatctactctaagccctaaaggcgttattacgtaagataaagacgatttctcaacagaaacatagtaaaaaaggagcaatcaagacaaaataaaaggggggaatttaacgcatcatacagtaaactcaggcaaactcattcccataagttcaacatctaacccagaaatcatgaaacatgctatataaacgaacagtaagcaagtataaggtatacgaagaacttacatgaagtttgaaggctgggggttggtgttgattgccggtagagtgaagactgacaacggtgaaggaagagaagcaagtaatctatggtgtctgaaatttcttttctctctgaaaactctaagaaaatttggtgaaatggtgaaagtaacca

SEQ ID NO: 58947 - DNA, 1800 bp, Cannabis sativa
tgattataaatttagcaacaatgagagaagttgcttgccccaatggataccttgccaagtgagagatggggagtgtccaagattggcttcaagaaaagagttttgagaatagtaatgacttttgagaagctttgcaaggagtgtatcaggataggcatggagtctccaagcttattttgcaagaagagcttgattgaagtgtacaaaagaacgaaaacccataccaccgctatccttcctttggcataaaagtttccatgagcgccaaagaattttggaaccattctcattcattccccaccaaaaatttgccatcatagacttaacttggttgcaaaaatacataggcaagcgaaaacaactcatagcatacgtaggaatggattggactaccgctttgagaagaacttcccgacctccagctgagaaaatcttctcattccatgtatgcataagcctccatattttttccttaataccgctgaacatctcctttttatctctgcccgagtatgatggtagccccaaatacttttcatggcattcacaaaggggcatagacaaagtcctatggaaaaaaacttgagcagcaagagtagtattgggtgagaaagacataactgatttctctgggttgaggacttgacctgaggcacgatggtaaagatctaagacacgcttgatagcaaggcaagaactttcagtagcttgacaaaaaagaaggctgtcatctgcgaaagaaaagtaggtgcgatagatattggtggagcttgcctggtgagtttaaaaccttggagatgtccctcggattgttcataatgaagtaagcgtgataacccttcacaaatgagaaagagatatggggacagcgggcatccttgccgaagaccccttgaaggagtaagagagcccgtgacttcaccgttcagcagaaacgtaaaagtgttagtggtaagacaacccataatcaaatcaatccatttggtagagaaacccatttttttcatgacctccttgatgaaacgccattctactcgatcaaaagccttactcttatcgagctttaaagtagcaacaccacaacgacctgctgttttatttttgatggcatggacaagttcaaaggccacaagaatgttgtccgtgatcaaccggttgggtaagaaagcactttgcatttcagatataacaatagggaggacattcttaaagcgaccaacaaggactttagttacaagctttgagatgacattgcaaagactgatcggtcgatagtcttgaaccctttgaggatttttaatctttgatatgagggttataattgtcttattcaaacttgttggatcagcaccatcattgaggacacttaggactgcatttgtgactgcttcacccacaacagaccaattttattcgtaaaacatggaggacattccatcaataccaggactcttatcaggtgccattgaatgtaaagcactttcaacttcagcagcacgaaacggcttggtgagctcatcattcatgtcatcagtgaccatgtttggaattgcattcaaagtttgagaaagggcttcttcatcaatggtatccgcactgaaaatggaggcaaaataatcatgtattgcggctgctatagcagttttggagtgaacccgatcccctgcttcagtaagaagggatttgatcttgttatttgactttcttgtagaggctttagcatgaaaaaattttgtgttgcgatcacccgaattaagccaatctactcttgaacgttgctgccagtaaatttcttcttgc

SEQ ID NO: 58948 - DNA, 2687 bp, Cannabis sativa
tgccatgtaccaaccaatgctaaacaaaagtatatatgatattaattttattttaagaaactgctcttcaaactcaggaatgaccagtgttaaacgaaatgacaatacaatagaaaaaagcataaaactaccttgtacgaggtagttggtggtacagcaagcatattccaataaatttcagatatcaatccttttgcactgttaaatttcagttgatattcagatatcaatccttttgcctgctccacacataaaaatcaaatttgtcatctaaaatataataagatagaagtcagtaaacatgaatacatgcttaagtactaattatttcttcgggtaatagaaaaacacatgaatacatatatgcaatagaaaccaacaaattaccagttgtcggctaacagaattttcaaaattctcagtgtccctccaaatttgtttaatgtgatgcaatagaaaccaacaaattaccagttgtttaatttgtttaattacaggcattccaaagctacacagtatcccatcagtccaatcaccaagcagaatttctttcaagcattcccatctacagtatagtgatctgtaagcataacatgtaacatgtataagactcaattatagaacatatttttaacatgcatgtttgacctgaaaatagtggcttgcttctcccatttcaagtctttttgaaaaaatatatatgcattaactatatcgatatatcatttatcatggtcaaaattaatgaataaatttatcactaattaactctaagaagaataatttaaacattttatttatctttggggccacatgcaattgtatatattaaatgtgttgaattatatttatacaggttaaaaaataaatgaaagggaaaaacaaaattacaagaaatataaatatataaaatatataaatatatatataataatttgaagacttataattatgatcctaaatgaataagaacgacagataatgaagctattaaattagaaatacaatttcaaagaagcatcagtttcatttgatcatttccaaccaaaatttcagatttaagaccacaaatttcacatatttaatccatatgcattttctattgcccaaatcaataaactatttaaactcaaaatcataatactaattaaacatatgcacttttgataggagagaaagatacagacaacataaaacaagaaggagagagacaaccttgaagtgttgtgttttgctgaagatgatgacgtggccttggtcgaaaggagaagagggagatgcgagagagggaaagtgagacgaagctttggttcgtcgggctgttggtttcaacgatctgcgactggatgtggatactccgacgatctattagttcgtcgggcagagggaggcgctggataataagaggcgatggaatttttttaaaggaaaatattcaactttaacataccctataagaactgcttaaagaagattgagacacttaatattactgtgaagactttgaaactaaaattctcaaaagttgctaaaatgtttgaaagcttaataataatacaaacaatgaaataactgtaactctttctgaacctaaaggtctgtatgtctagtctgtcactcttgatgatgatttgagttctggggttgaatcatttcttttctgtaagcattgaagagatcaactcctaaaaaaacattaagcaagttcattccggccatcccaaacagagctagtggcagttccacacccttttcaaatttgggagcatcccaaataagcttggttgtgatgagaatatgagcagcacacctagctgtaatgtaggtaacccaattcaaaagccattctatccttacaaacatgctcctcttagtaagtccgggggccatccggcggcggactttcctaacgtgcaagaagattgaatgcaactcacaaatgagtgtgagaataagatagttgatcgtgacattatttcgatacaatgcaagagtaaaacaacaaatgaggagtatcagatgatgcaccagaatccaaccatcattatataatcggtatttcagcatatctaattggtcatacgcaaagtaaccacatgagaagcacaaagcggagtatgcacaaggccaagttgaagtacctgcaaataactgagagtgatcaaacatgaacactcttccactcaaagaaccccttgttattaaccattgattcaccaaaatgaaaatgactgaagaggaaataatagttgagtggaggagagaaactgaggtgttaacgaaaagaggatcacgagagggagaggcgaaatagcggatgacccagttggccaattggaagaagaagcacccaacaacgacgcagattagctcggaccgcttgttgaatacgatttcaaacaaaattgagagcaaccatagtatcagagtagccatgaaaaacacccttgtgattctcccatcttgacttgtagttctacccatcactctgtatatatatcttacctaatatataaaatgtctattaaactgtgcacttagcagaatatacccaaaacaaaattaactttaacagacactcattcgttaagtaaacccattctatttaattattcatagaccaaaataactattcacacaagacacccgttcatagaagcccccatttcgcacaagtcataaatgag

SEQ ID NO: 58949 - DNA, 769 bp, Cannabis sativa
agacccttatgaagatagcttcgagcatgaagaatcgccttcttaagaagggagtctgaagatttagcttccaagtcaagaaaattctgatctttaatgtacttagcttccatgatatgtctccataggctatccttgtccgttagaattttccaagcccatttcatgagaaaagccttgttggtagcctccattgatctaaagcctagatctccatgaactttaggacaacacagtttctccaaagcaaccgagtgcaacatgtcaaaatgatagtaaataaatatatacttctcatatgttcaaatgattaccttgaaaaataaatcacaatgtgtatcattttcaaaccaaaataattagtagtgtaatgcgaattttttttttttttttgaaataatagaattgattgaaatagagagaaaaaaaattaataaaatattatagaaagttataaacccatatactttcttcacatgtggaaagagaaaaaaaataacaacgagaagaattgattaactgaacaagaaaaagaataaaagggagagattattttgatttagtggtataaaagtacgctatatagatcaattaaattgccttagttattttcaatattatttttaatattaaacataaaattaaatattcccttacattatatgggaaatttgattttttatacttacatttggtcaaatttttttcctaaacaaataataactaatatttgtaggatatgacaacttttatgatatccctaaaatgc

SEQ ID NO: 58950 - DNA, 688 bp, Cannabis sativa
ttctatctctatagattttaatgcttagaacatagcttgggtttctcaaatccctcatttggaattttttggctaacaacttatttacatttgataacctttctatattgtttccaatgagtagaatgtcatcaacataaagaactaggaataccaatagattacctttaatgtatttgtatgcacatgctctgtctttattttgttcaaaatcatactctttaatagttttgatgaaggtgatattctaagatctagaggcttatttcaatccataaattgatttaagaaacttgcataccttttgatcttcccctagtggcacatatccttgtggcttttccatataaatgatttcgtcaagaccgccatttacaaaggcagtcttgacgtccatttgtcatatctcataatcataagtggcaactatggaaaggagaatgcaaatggatttaagcattgccacaggagataaggtttcatcataatcaatgccttcttactgtgtgtagcctttgacgacaagcatttctcttcttcttgaaaatcaatttacacccagtgggtgtaatgtcctcaggtggagcttcatattcccagacattgtaagtgcacatggaaaccatttcttaatctatgacattgttccatttgtttgagtcatggtcttccattgcttctttctaag

SEQ ID NO: 58951 - DNA, 961 bp, Cannabis sativa
tttaaattatactttcgacaccttctcttaatttttctacgttttgacccttacagtgttattctacagcgagtaattgtacatttgatttctcctctttgatgtattgtaggcgaccccccatttatgcttatcacgtcactttgtttttttcgatactattttcttttagagatgtaccaaaagtcaggttgaatttgattcgatccaagtatctgatctagcgaggcaagacagaacatgatatatccttacatgatctggatcaggtcggatcagatctgactcgacccatttacactcaggcggtacacttttagtatatctctaaaaaaatagtatcgaagaaaataaagtgatgcgataaaactttaattttaaccaattatattcatctaaaccgtaacatattgttttaacaaatagtgttacattattaggtttactattttaatgcataaatatatatttatttatttatttattcttttaacaatgaacattctttcaaaataattacatcatagagataagatgagaaattatccatctaatctagtttgtcatccacgcgtgaatatacaaactgttaattcatgtgtaagacgaacatgataaatcataaatagttctaaatattggataacaaattagtaataccctttaagaaagatcataaatcattacaaaatggggatctcttagagaatgcaaaaatcaaagatatataattaaaaatatatgtatctataattagtaccaattaatttcaagtgtaaattttatggctaattatatactttttttttaatcttttggtcgtatacatggtacaccccaaacccataagcataagacaactcttacccatagattttttaattttctttatataataatgttaatatctgtaaacactcatattttgatttaaaagcactgaattaattaataattaccc

SEQ ID NO: 58952 - DNA, 826 bp, Cannabis sativa
gatgtcaagcatacttggccagcatagtagataactcaagagaaacccccctcaagccagagaatgtgcacatagtatgtgaatttcaggaagtttttctagaagacctacaaaggctacccccagatagagagatagaatttgtgattgagttagcaccaggaactgcgccatcctcgaggtctccaaaccgtattgctcctaatgaattgaaggaattgaaggctcaagtacaagattttctagacaaggggttcattagacaaagttactcaccttcgggtgcgccaatgttttttgtcaagaagaaggatggtagtatgcggatgtgtatagactgtcaggagttgaacaaagtgactataaagaacattagatatattctaatttttatgatttgcaattttttcggaaaaggtgaatacttaatctacatatttttctagattgttctggggcacggagtgccaaatatatttttgtaaaaatatttatgcaggttatgatttttgggttcattcaaaatacaaccgttatgttgcaagattttctagaaaataaaaaagaatatgttcttttgttattcttattatttgcttgcttcagttatattgatgagagccatgtttatgatgatttgtgcatattattatttcacaatccagtctttgtatcatcataggtagatcaggtgtgcactcacctgtaagtgaaagacttagaatctgtacagggagtgaattaaatgtgagccccaatattatgcttgttatcaggtacaagtactcggttcaggatgttgttttctatgattgatattgagtgc

SEQ ID NO: 58953 - DNA, 734 bp, Cannabis sativa
ctggcgccttagaccactcggccaccctgactcttgtgtcaattttcctacttctatttctcttagttaactgttagttaagatacaattgaaatatatattgtttatttatttgattattttaattgcttaatgagatgttcatgctcatataatgggatactacaagtgtacttaaagacttttatgaaactatagatcattttcttaattattaattaatttttagttttgtgattgtttgaaaatacataatttttatttattaatataaaattatacatgtggcgctatgtaataattgaataagtagtcgtgttatcattttatttgtcacgtgtgataaaatttgacaaaaaatcaagaaatagagattcacatgaccaaaaccaagaactctgagctttcagcgagcaacctgatcattttgagtaagaacatcaaagactaatgcatgttttgtggttgataagaggactttgcataattttttctctatattaaacaaaacaaaatttgtttgctacatttttttttctatataattatgataattttttgagtaggacatatgccattgatccatgatcattaacaacatgatttggctccgcccctgattacgaacctagctaatgataataaacacatatgcttagcttattttctcgtgattttttatttttcaagtaacgtcgaaaccatcgctgcacatacttagctgcaaaaggttt

SEQ ID NO: 58954 - DNA, 837 bp, Cannabis sativa
ataaaagttaataccatatataattttacataaaatacaatttaatataatactatacaatacaatacgatgtaatacgacttaccaaacgaacccataaaaaatagtgggtgaggatagtagtgtgttaggggttgctctccacaaactcttttgtataatttttttttacttattttttattgttattgtagagatttgcaactgatagaagattgagatgatcattggacgaacaatattaagtttaagaggtgtgtttttaatattgagttgaagaggtatctttttactaagtaatgccataaatataatatttaattttggatgatatgagtataattttgtgttaattattgttgataatatctctgcttaatagtaattttaactggccgaaatgaaaacaggatttagtatagtttaaaaatgtccaaataaattattgtcttaaacaatactatggctggttgattacatatacacgttttgcacatcgtttttaataatttatttcatccggcatgtgagttggcagaatgatgattttttctgtttggtgttatatatacaggaagcaaaaaaacacatttttcatatcaaaatttcaactactcacaccagccccttttttaaattaaagtaaatggttttaaaagaaagaaagaaaaaatatccctccattgaaaagaaaatatcactttcagtttttccacgaccgcagttccgtattaataaatttggtattttttttttgataaaataaatttggtatttatggttatattaaagattgtcaggacaaaattaaagattgtcaggacaaataaccaaaaa

SEQ ID NO: 58955 - DNA, 1316 bp, Cannabis sativa
  modified_base (672)..(672): a, c, t, g, unknown or other
ggcctagactccagcgatccaaattgcacagcttctgattcagctccacctaaccctgtataaaagtagacagtattttcattattagtattcaacattatggtatatacattattttcatattctatacagcccatggcctttttcttttagaacattacttatttccagtcccaaggccttcatgttcgtatctttagcctataggccctctatttttgaacactactattgtttggcctattgcttttttatcacacattatgtgaccgactaggcggtctttaatcctggcaatcttcttatggccttgacatgtaattatctggatttacttttctttatgtcaagccaaagtatgcttgtacctgacttaaaggtaggtttagtagcttattctaagtgttaaaatttctctgtataagttctctatgctagttcgatgcattgtacggtgtgggtgccccccaactgaacatgcagacttacggtctcttggtcacttacaatccaccaagattcatagaccttacatgggatttttcttagggtgcttcccgttatatgcatgtggagctaaaaaataataactttgagaagttaatcttgttatcaagtggtttagatacaataaattgaacataaatattgttttttattcattaattggtntttgttactgtgcaacttacataaattgaatctacaagcttacataacacagtttttcttctagatattaagtggctacccctgcttgacttgcatagtagatgccaccattgaagaacgttgggataccacgccaaaaaggtcgtcgttactagctcttttgtactccaatgttgagtaggtagaactgctactttggagtagtgttttgtaagctagctactgatagtatttacgaaggtgctctccattctagtatcttggaaggaaaacgagctccatgttctcattgtacctttccagcttgtaggctcccttactagttatttatgtaacttgataaaggccttcccagttgggtccaaacactcttgatgctggatctttagtgttcaaaaacacttttcagagcaccaagtctcctatgaaaaatttcttattcttgacttgcttgttgaagttccttgctaccttttgctggtaggtctgcagctttaggtttgattgatctcttctttcttgtatttcatcaagggattctgccagcaatatgttatttgtttgttggtcataggttgttctcttgtgagacggtggcaccagctctacgagcaacatcgccctatagccataagctagagcga

SEQ ID NO: 58956 - DNA, 3467 bp, Cannabis sativa
tctcccagactcactaattattcaactaataatcccttgagtcaattgagtggtttttactattcacaacacagaaaattaattaacttcttgcaagtaataataagtacactcattataatcaaaaacttataattattaaaggtgaataaaaataaagggaaaatgtagataaaaacaaaattaataagaaaaggagaggtggagtgaaattggtaagatattaatatagggaagggcagaagtgacctagctatattattaaaataaaaggtagaccaagctgaggaagctgtgacgcggatttcaccagcgctcactttcattgaatagagacaatgacgacaaattccaagcttcttggtgcagatgcacttgcaggaggagagccccattttacatatattatttaattaattaattcaaacttacttaaataattgagagtttaagatactgattattaggagtacagtacagctttaatgttaggtccttccttatatataaatataaatatatatattattgatttaataatataagaaaagcaaaagtaaaatacccaactaaagctggcattttctatgctgtatttacactttagggctttgttcccatttgaacgatttattgcataaaaaatgccacttggctagttgaagtacttaattattagatgtatatgttacaataatactgggttatactatttaaggaaattggtccaatgaatttgccttgcattgtatttaatggagcatagtaaagaatactgcttcgtgatcaatttcctactaagtgtaaagttacttgatagggccttgtaaggaaaaatagtactcgttagctattaatacttcttatttattattatgtttttttttttgacagagaatagcttaattattttatagcaagcaatttgcttataattattgctaaaaaaaatgcctattattattattgttgttgttattatgttttgcatgtagttatccacgtaaatcgaaaaaacaggtcaagagttttataatttatgtcgaccaattaagtaccaaaaaagagtaacaaatatattttttttttgacaaaaatataatctaaattaattagtactgacgtgtatttaagcaatatgataattgatatattagtccactcagaatataaaatgtattatttctaaaattcaataattgcttccaaaattaatattttagtaccaaagacatttatcatgctaataatacagggacggatggaggtagagccattttttcaggatgattaaacaatgaagatataataatatatgtatatatacattagaaatatctatttgattataatacatttaaattttttaaaaaataatattatttaattaaatgctaattattaaagaaaatttacatgatttattaattttttctattttattctaaaaatattgtcgcacgcgaatttttacttttatactgtgtattaattttttattatacggcagtatactgttattattggttcaaagttcattatcactttgtggcttacacatgtcttcagggagttttgctacttcattttttgaaatttttttctttaataaagctttgatttgacgtggggtatcactgtttgtgacagtttgcttcccttttgggttttaacttattttaaaattatttctaaatatttttaaatgttaaataattattactaaaattccactccctcatgttccctgttcatcatcttcttctaatatccattttttgcagttatacaattgtgggtggtttattttttatttcaaaatttttcagttattacatcttcatcttaattttccctctatatttccccccattttcgttcttattcttctaaaaatactacttcacctcattcataatggttgttatccgatcatcatcctcccctgttgttaaaaagcctccaaaacaaccccagaaaaataaatctcggatgccagagtatagtatccattactaattgcttcatgatttgctgttgagagaggttcaacagccgaatgagttggaattttgggtttgttttgtaaggcaaatatcttaggtttagtggttgaggagttttctttaattaccggtttggattgtcatattgattctgacatttttcagttcaagcaagatgataatatgcttgtaaaacaatgtttaaagggctacaaaaaaataaccaagagtgctctacaaactgtttttattgctgacaatcttaagggtaatgatgatcttgcagtcaagttggctgtgttatattttgttcagtgttatttgttgggtggtccccatggtaaagtttttttgattgaggaattatatgttattaatagtgatcgtgtgttttgatatgataattcaatctttgaatgataagattgattctggtcttaggaaggttatacagagtgatgaagatggtgtgtactataggttattgagttttccatttgcgttgcgattctggtttttcgagtgttgtccatatgttattgggaaattgtctttgtattcaaatattgacactccaaggcttctgaattggcctaaattaccaaaggaaaaggatcctcagatgaagatggatatcatgaatagcctcgtattcaatcggtcattgaaagaggtacttgtttggttttttacactttttctattgttgttttacagttattttcctatatgtatgttttattatatgttttcatttttattttaattcatttttcagatgtttgtatataatttgttggttcttattgttgcagtttaaactaagaaacatctctccaacatatgttgagagagtgagtttgaatcttgatgactacttttctggtgacactactccggacgttattaaatttaaagttaaaggtgtctccaagtcttttggtcaacctgattttatgagtgcttcttcatcaaatgctcatgagcatgtcacccgtcttgagtatgaggaattgaaaaaaaaagacatgtttgttgttgtcagccagcaacagattcttataaaatcttttgctgaaatgaataagaagctggacattcttattgaggtgtttcttttatttttctttgtggttttttattgttttaatagttttttaatattctcttaagtccgttatgaattttaactttggtattttttcagtcctctcattctgctcatactcacaatagaacttagtctgatgatgctctccgcacttctgaaaatgatgatgatgaagagtctattttaaaggaagatgatgatgctaaagatgaggatgacaaatgagatgatattgttgatgatgattatagggatggtagtgatgatgatgatgatctcgatgaagctggagttggtattcggcagggtgaggctacaattggagatgtgagtgttggaatttattttac

SEQ ID NO: 58957 - DNA, 783 bp, Cannabis sativa
gaattaatttttataagtacgactttttttcttaaataataaatttctcaaccagctttcaaattaaaactattttgctgtgatgaaatagatcttacattttttaaaatggtacaaataggaccttgagtttaatttttaacaatttttttttttaaataaaaccaacttgaagataattcttaacacgcacaaatatagaaaatttaactatttttgtcataatttttattttgataaaaaattagtttaggcacctaatttgtacaattttagaaaatactagatttattttgtcatttaacaaaacaggtaatccagtatgtaactggatctaaaataatatttacctttatacaaagatttgcatgtgaacaattttgcctttatccaagtgaaggtatttttaaaattactttacattttatgtatataattaaaaaaatcactatcataaattattatgacaattaattatttataaatacataattattttacttataatatcttaaaatctaattatttatcgaaactacataaaaatattaattagttcgattgaatatcggatgtatttaattttggattatttcatccaacatccgatctcatccaattagatatttgaaaaataacatctccaacccgatccaatgacgtttagatatccaatatttgatggttgattgtaattagattagtaagttatcattaaatttgatcgatttacacacaccactaattatgcaaagcgttcattttttttttttttttgacaaa

SEQ ID NO: 58958 - DNA, 1619 bp, Cannabis sativa
  modified_base (994)..(998): a, c, t, g, unknown or other
gttgacaatctgattcgacctccattgttgaagccaagatgctaacatagaagtaatttatatgttaatttcactatttttagtatttgtcacaaataatatcactatctttaactatatatttttaaaatagcaaattacgtttctaattttaatactattattttatttataatacgcatacatcaaaatattatattttagattatatataactcaataagtacaaaaagaaactataagaagattacaaaagttaaacaacaccacaccaatttagttccctagttaatatatattcatatattattatatgttgtaatccctttagagcccatctcggctggatcatagcatccgaaaagacctgttgtgtgcacaaaatcgaaaaactgcaaagaaaaaattaaattaatttttttttttttggaaggaggaattaaactaaattaaagatcacaatacacccataaaattgcaaatattactctattttatacatgctttctcgggaaaattaaggaatcatattttgggcaacaaaatatagcttaccaaaaaaaaaaaaaaaaactatagcttattaaaataataccacccatattggagttcccactatataatcaatagacttatattattattgagattaattatgacaaacatgactgatatagattgatcagatgatcatatatgtatgtatcctaattaatttaatgattacatattgttacaaaacttacaatttagacttttattgagggagacgtataacttatccataagtgtactctacagttggttggatatggtccaagtgagagaaaaaagaaaaaaaaaaaccatttttgggtcctaatacttatctcaaagcacactataaatattagagaaatcttaaagggcacaagtggtggcctaacactctcttatgtgtcaatatcattattggtcaaactaagtatctggtctcatataatttaatataatnnnnnttaaggagtatcgctaaccaattacaacgcaacatgtcgagaaagtgctagacacatggtgcctactagcaatgctcaaatcatcattaggaaagaaaaaaaggaatcttggagttaggtaaggggtaaaattgttcctcacacaaaaaatataaaaaacataaaaaagagggttaatgcggtttggttggcttatctttaatttcaacgcgtccgggcatcaccaccgtagctatcattttccaaagtggacaacacattttttttcttcttactcgtgatgatggccacgacatgcattatatattgttcatgtatctatatttcgtaccacactaataggcaataataagcacagcatatataccacatacatacatacatacacataatatatacatatgttttagtatatatattcacattttcagcgagggttttagcagcttaaaccttgtaaagagagaaagaaaagaattaataaaaatgaaggttgaagtaacctctaaagatattatcaaaccttcttctccaactcctgacaacctgcgccactatcaactctctttccttgaccaaatatcacctagagcctataatcctttcatctactactactca

SEQ ID NO: 58959 - DNA, 1371 bp, Cannabis sativa
aagtaaacataaatcaaaattaacgatacaaatcaaatattataaaactcctaatattatttaaaggaagaatagaatatattattatttttttaataataacctttatcatataaataattgttttcaatcaatattattgaaaaatttaaaaagtatcatgatagccttttctagtaacaatctcattaagtaatagcattaaatagcttaatttataaatattcttttattatcttgatttgtattagagccttgcgtattgtgtttgtctcgtattttatatatattttttgcactttatgatactctcactttatcttaaattttaacatggtatcaaaataaataataataataaaaaaattccactatctctgcctttgatctttatttaagacccttcgaccaatgtgtgccaacttctatttttgaggtctttgatcaatttcaaaaaaattcacaattttctcgacatatacactcataaattttccaatttaaccttgtggaattttttcaaatgtcacattcgaagttgtggtcccttaacggttgtttattatacccacacttttttaggcccaaatataaagaggatctattattaatagttccacattaataatgtgtggaaatataataccatatataagatgtatgaatatatactctttgcatgttattatactctcactttatcttatattttaacatggtatcaaaataaatagtaataaaaaaattccgctatctctgcctttgacctttatttaagacctttcggccaatgtgtgccaatttctactattggggtctttgatcaatttcaaaaaaattcacaaatttctcgacgtatacactcataaattttccaatttagccttatgggattctttcaaatgtcacattcgaagttgtagtcccttcaagattgttcattatacccatactttctaagtccaagtgaggagggtgtattgataatagtctcacattgctattgtagaaatacataagatgtataagctacttctgttactgtcagctagttttgagatagaattctatataccttaattaccattcacacatttgggacctatcgactaattgtgtcagttactgctcaggtctttcattatttctaaaaaatttacaaatttcttaatttgaccttgttgatttttttcaaaaatcaggttcgaccttttattcagttaaaggtagtttattatacctaaatataaaaaaagtttattagaaataatcataattattaatgtgtgagattatagtaccatataaaatgtatatactatttccctcaagtttgagatataaccccatgttacttcattttaaattcta

SEQ ID NO: 58960 - DNA, 939 bp, Cannabis sativa
aatttaattttaaatataattaaaattttattattattaagttacaagttatttatttatttatttattttaatttttaaattaattataagatccaaaatatgtaatattacagaagactctttatattttctagtcacttgtagtaaatccatgattcatagatcatgtgttaacataacaagtgggtggtccttacatagctttgtctgaaagtttttattttattttaattacgaaatgcttagcaagcaaataagcatttgaatattaaagaaataataaaaaaaaaagaagagagaaattataaaaattgatatctatcttcctttgagaaattttctgcaaatcttcaccaagcacttcctatctggctcagttctttctaacatattttttgcattttcagccaaatcctcctgtaatcaataatcaaccatttaaatatatattaacaaattttgtattactaattctcaattgatgactagataaaagagatatatgaatcagtttattatttattgatagtaaattatatgaacatgtgagatataaagtaatttaattttatattcaaggaccactttttcatcagaaaatgaagatatttatatgagaaaaaatattttaaaattttcaatcactttaagttagatttattctttaataatacataactttttatcttatgaattcaatgtatatatcatactttctagaaaaaacaaaaacaatcaaaagttatttttcttttttttttttcaaaaaaaagaaaatacaaatattagattttcaaaaataagattcttaatttttttttcaaacatataccaaatgtatactatacaacaaattgatacttatttcttttaaaataggagtgtcacactactgtgtgtatcatttggtactccaataataataataataatacta

SEQ ID NO: 58961 - DNA, 563 bp, Cannabis sativa
aaaaaaaaaaaaaaaccacacccaaaaagtaaaatatacttaaatatcacccaaaataaaatcacattacaaaacctcaaaattaagagagaccctcgatttgtatgactgtaatttatccattattgtctgaattgttgaatcagcctcgagaaccaaacgctgcccacgaattatgaaataatacttgttgggttgctccggtagcgaaatccccataaaatctcgagggaactcaggaagtaaagactggtctaacccaaaaagaaaaaggtgttaattttaaagaatactcaccatttatatcgaaatacacaagtataattcgatcagatcattaaaatgtagaagttatacctcgaagcataggcttgtaaaaagtaagagtagctttccacctgccatctttgacgccattcatgctttcgacgcattgtgttacttcattcacgatttgaccactcgctgttgtccctacattgggttgccaatgcaaaaccctaaaagcaccaccaatccccggattgattaagtaaattttcaaattgaaacacaataacaga

SEQ ID NO: 58962 - DNA, 790 bp, Cannabis sativa
aagtctcccctgaattacaccacagttttaaaaattttacatgtgtgacggccatttaataatgctagacagtgaatataatagttttgtacttgagtttttaccttataaaccgcaccaaaaccaccttgtccgagcttattatcctccgaaaattgatccgttgcaactttaatggtttcgaaattgtactgcaaggactccgcactttcgatttcatcaactggttcgtatatttttagatcttcagcatcacaaacattaattagttatatgcttcaagagaatatatcataaacttcctcacaactttaataaattaattagctctgtcattctttttattagctataacaataggtgttacgaaatcttagatctattgttgataagttggcatggctatggagtttttaaaaaattaagtaattgtgttccaaaacagaggacgacatataggtgaagacttttccgaactaagaagagaaattgataatgtctcaaccaaccttgaacttttttctttgatttccttaagcttaaacacactgcgaagaagatgattagtaccacgccggcaacggtggccacgacagcaataataataattctagtcttgtcactactcttttgtcctgcaaacagcaaaatttgctctatttcatgttatttgttcaatctcataactgtataagtagttatggtgttatttgttctttatttcaagctttattaccttctgtagcattgttaatggtgttattaatcggccccgtcgttacttctgggg

SEQ ID NO: 58963 - DNA, 1557 bp, Cannabis sativa
  modified_base (322)..(323): a, c, t, g, unknown or other
catgtactaaattatgtcccctgagctttaaggccgttaaaaattctccagaactattgaaattgttagatttaaggacttttgtctaattttactaaagaaagtctgacatggatcaaaatttaggggcacaatttggtacatcttaaagttcagagggtatgatttagtcaatattaaagttcgggaggcataatttagtacatggacaattgccacattagcaaaattgaataaaaatgaacataaatttttaaatctaacaatttcaatagttcagagagatttttaacgacttgaaaagttcagggggcatgatttnntacatgtcaaagttcagagagcaaaaatcataattggtctttctgatattccaagactatagtatagcagagaaagcatgcatactaacataaaagactcaacaacaacatcattatcctcaagaaaatctaaatttaggatcctctcaaccaaccaattcacaaccaagggcctccaaaccgaacttgtctaaccaaagagcattggaaaaagagttctcattagctttgcaaatgctggcttctaaatttatatatcaatatgatgtataaacatgtaactgatatacttatgcaaagcaagtcaacacacctagaaaaatttttctctctctggaactttctagtgggttgtatcccgttgcagtttctcctggttcccttccagcttgatctctccctcgtggtgttttacctgttttgcttaatcttctcttttgtaatttctttctcttccttcatttattgtgatttaacttcttctttaagcttttctgtccattagccctctaattaattactctgcagtcatcctttcgcatcccttcttctctcttcatttactttcaaatgaaaatcttcagggaatcatattccaggagtttttctccttggattttctactctctctcttctcatatcccatctccattaatagaagtcgtcattttggctctttcaaggaggaggacgatgattgcacctaaggatcttggatttggtctaggatttctgcagaataggatgatgatcactgaagttttcttctctcataagacttcaacatgcatgtatttctcccattctagctatttaagggtgtgggttctttggcgttctttactcctctacttgattttattttctttgtctgagtattattaggaactttacttgtctttcttcttctgggaaatggagggtattactgaaaatatggctcatgtgttatctcttactgaaaaagaagttgtggttcatgagcacttggatgatgtgggaggggatgtacaaattgggaaaactttctgtcttgtctttcgagtctttactacccgaaccattaaaatcgagtggtttgaagaggctacgagaaatgcttggatcactcgtgctcccattactttctctaaatatggtaatgggatgtttatggttgagtttggttgtgaaggtgatatgaggagagtgattaaaggccagccgtggaattttgaccattgtttggtcacta

SEQ ID NO: 58964 - DNA, 544 bp, Cannabis sativa
cttaaataaaactatcaatacgtggctcggcacgtacattcacctagtataaataaaaatatcaaaagtaagtgattacattaatgagcgttaaaagagtaaataaaaaagtaatatttattgtggtgtagaatttaacatatgatacattttacgctaaattcaaatttaaaccacattagaccatctctattgggatatgcggaaattgtgttatatttggcacaaaaaaaaaaaattgggatatatttgtatcaatttttaatattgtgttcgaatatacaattgtaaaatttaatatttttattaaaagtataagaaaataataaccttaacattaatattattatttttttattatgtaaaacaataaaaacaatataaatagtggatcattaatactaataaatacataaaagtatcataagagttaataataaaattgtgtagcgatataaattttgaatcatagaaaatattgtgcccaaaaatttggtatgatgtaaatttgctaaaatatactattaatattggagtttaattt

SEQ ID NO: 58965 - DNA, 2689 bp, Cannabis sativa
atccaataaaaaacctaaactatgagtgtaatataaatgttataaatcactaggaacaatatggaacaataccgacaaaaatttgtcactataataaatttcaatcacacatatgatagttatctaattaccaaatcacaatcacagggttaaaagttggtagtccactttaatatttttattttgcataaaagaataaaatatttaatttatacttgcttcatttaatttgttttcaaccttcttttaattaacatgcatgcattaacattcatttatttatttttgttatgaataaatctaataatattaactctgttaaaaaaactggtgataaattgacaatgattaggagaggggaaggattatgatgaaattcgcagacttaattgagcaaaacttggaggaactagccacactagaaagccttgattgcggaaaattgtttaactataacaagtcgatcgacataccaggggtggccgccactctccggtactacgccggcgcagccgacaaaatccatgggcaagttttgaaaatgtcacgtgagtttcaaggttacactttgcttgaacctattggggttgtaggccacatcattccatggaatttcccttccactatgttctttgccaaggtcagccctgccttggctgcaggctgcaccatcgtactcaaacccgccgagcaaactcctctcacagctctgttttatgcccatcttgctaagcaggtaaggtattcatattatataatatatgatttgggcatatttttaaatgttttttagtgagcttaactgaagcttactattaattaggctggtatacctgatggagtgcttaatgtagttactgggtttggaccaacagctggtgctgctattagctctcacatggacattaacatggtattattgattatatatatgtatatgctataatatgcagtactaagtaactttatattgtattagttgaattattggtttgctcatgttttgttgtaggtgtgttttactggctccacagaaacaggtagagaggtaatgaaggcagcagcaatgagcaacttgaaaccagtttcattagaattaggaggcaagtcacccctcatcatttttgatgatgctgatattgaaatggctactgatcttgcccttactggaatcctttttaacaaggtaataataataattatgtagcttctttcactgatgggtaattatgtgtaaattttaggattttggattgtataattagctaattaataattttaagtttttatcacttatttgtattatgacccagggagaaatatgtgttgcaagttctcgtgtttatgtccaagaagggatttatgatgaatttgtaaacacgttagtagagaaggcaaaagcttgggttgttggagacccttttgatcctcaagtttgtcaaggacctcaggtaattaactagaccaaaattagcattaaataaagaaattaacattttgagttgggataaatatatatatatatatatatgctaatgcattgtaggttgacaaggctcaatttgataaaatcctaagctacattgagcatggtaagagagaaggaggaactttgttaactgggggaaagagtgtagggaacaagggatattacattgagccaaccatattcactgatgttaatgaggacatgcttattttcaaggatgaaatatttgggcctgttatggcactcatgaagtttaagtaagtcaataattaacttaatgcttcactaaaatcattatttgacttattaatttgttttcattcaaaaaataaaattagaggttctggttttttaatttatagttataggaggttatttttttctctaaccatgacctgtcgattttctttgggtatagatgcggcttagtcggatttgtgttaatttgctattgtaatttgatttttgttactgcgattaatcttttctctgtaatatgattttgaatgttttagtcttgtttataacatagttttgagtattttagtcttgtttatgtggtatggttttgttttattgtgtttcgttggtggttcttctttgctttccgatggctcgtcatgaaattgttgttagtgattgggaataacaagtttcttgcaactgaagtggttgttagtagtacagttatacttatattgcacagtaattgaggctcaagctacgatatggaatgaacctggtgcaataatttttactgttgtattttttgagtagtagataaaaactaaatataggtgctcttaaagttaactatgatgctgcaataatttttatcttattttaatttatagtttgtttgtcaatcgatctcaaaattaggcagctggtcattattttgctcgtttttttaattttaatcgtgctcgtgtctccaacaaaaaaaaaaaaaattattatttgacttttgtattgaattaatattgtgtaagtgagatgaattaatttttgtgaattgttaggacaatggaagagggaatagctaaagccaacaacacaaaatatgggctagcagcagggattgtgacaaaggacttgaacgtggctaacacagtttcaagatcaatccgagctgggattatttggattaactgttaccttgttttcgatcgagattgtccttacggtggatacaagatg

SEQ ID NO: 58966 - DNA, 510 bp, Cannabis sativa
agggagccacccattgcacaacctccaagtgaaatttctaactttaggaggcgcctcaatcttccaaattcctgtccaccagttctttgttgttggctctgaagaagggcctgcaattaaaatgtttgcttcagctattttataaccactactcaccgtatacaatccatccgaggtgaaatgccacacaaggtcatcattgaggtttctagcacaaggggtcattcctagtataatggggatatcatcatggtggaaacaatcttcaataagtttctggttccaatctcccttatcatcttttagtttatccgccgtggttccgttagggacctttgctggagtacgcaatttaaaggttcaaggacggggaagccatttgtcttcattaatacggatctcttttcctgagagaaccctccatcttgttccttttccaatgattttcctaccccacaacatgcttctccaaacaaaagatccgtaacctccaattttagcctctaagaa

SEQ ID NO: 58967 - DNA, 1664 bp, Cannabis sativa
aagttctgtttcactcaaaaaccacaagagcgaattgtctttctcaattctgtttgaatcaaaacatgaaagcaacaagagtagtcacgacgattaaataaattgtaattctcttatgcacggtgtagaagtaattatagagttaaatgagttgatgtttacatcatcaagggcttgagacttctgatccaactcttcagaatgcttttttaattctctttctgcatttggaattgtctccttgcccattttaatatattcttcataagccaaccgaagcttatccaactgctgaaaaagagagtcagcatttgatgactcaaccgccagcactttcatatgctcagctgaagtagaagccttcactctttgctgcaactcagaaaaaaacagagccagttaagaatgaaatataaaaaaaatcatggattatacatggctaaatgctattttcacatgagttaagcgtatttattgcaacccttaaaactggaaagaaagtaaactattacatgtgcagaaagcccttaaagtttaaaatatcaaaaaatgccaacctttttaacaaactcgtcttcttcctctgcagagaatgaacgctcgcagcaagggcaaacatgatgagcgcgtgcaactctctcaaaaggatcaaacatttgccgcataccatcagcaatgttgtatttgctacaatgagaaagatatcatgttaacacctttatatcagaagtacagagatgtgtacatcttcgtaaagattctcacaagttatcagcctaagttaaaatagaaccttttctggacatcccttttctccttagctgtctccaaggctttgagataagaatcaatggtagaatattgtcgatccaaggccttgattttggattcgatgtatcttttcctagctgcagaaaaatcgtataatgtattaagtatattattagcaagcacaaaataggaaaaaagccaataaaaacagtttgttacaagactagttagtggtgaaaatttatacacgagtagagaactaattttccatagttcttcctagtccaaacaaaggtcactaattttccatattgaaacagatcagtatcagattcctatagaacaaggagaagagccattgttaggatcattgctttaatatataagtagcggctccaaaaatttgataacttgaactacaactctttctcccaggtttatagaaacacctccgccatatattcacatatgtagaggacatacaaagatgttgctatatatatagttcgtgcaattagattgttagtcgcaacagactagaaacaaagataaaactttttacagcatcaacaaacttacattccatatctttacgaagtttggagatattattattatcttcttgtattttcgtctgcaacattttcacctcttgttctgcctcatgagatttattcttcaaatcatcaaactccatggtaacagccctgtggaaaaaacagtatcagccaacccgagagaagtttgccaaaagtggaataaaataaagcacaacctataatccaccacacaacttgatgcaaataataacaaaattagcattgttaatctggacttgggatattataataaaccaatatacaaatagatacaatatataaggagttgacatg

SEQ ID NO: 58968 - DNA, 890 bp, Cannabis sativa
atatatatatatggctttaaaattagtatatgattttcaactcatgcatggtttgagacaccaggactacaggaaaactcaaacttatatgcattggcaaaagtgagtaatgtaaatatatatattaggggtgctgatcatcagggtgtacgtatattatatgtatgcgttattacaacacaccactcatgtaaaaaggcatatacaagtaatattgcttagggtttactgaataattttattctttccaatatcatatatataattttatataagaatataaatatatatatatatatataagattaaaattaggtgcaatccgcatatatttagatttattcttatttttttattttgatttatatatttttaattatataatattttcctgtgtggatcaacaaaattattttttattaaaaaatatttaatttcagcgttatatttataaataaaaaacataataatatttaaaatttattattaatcataatttttgtttaattacagaaatatttttaattttataatacttttgaggtttttgaaatattatacactttttttatttattttttaatataataataatattaatagatatatattttattttggtaaacaatataatagaaatatatatattttttaaaatatgtgcaatagatttaaatttgaaatgcaatattaacaaaaactttatattatatagacacatttaatataagaaaaacaaaaagaaatcgatatgtgtagtgactttaaatttaaattgtaatagtttaaaataagaaaaatacttttgttatatagctacatttaatatatactaggtgaatgtacgtgccgagccacgtattgttagtttcatttaagattttggtctt

SEQ ID NO: 58969 - DNA, 1246 bp, Cannabis sativa
taaaatataatatttcaatacaaattaacacaattagttacaaaaaattatgaatttcgttattaatatttttatttatggatgataaacaatttttataattaattagttacaacttgtttactttaacgtacttaagattttttatagtattatacactcacaattataattgattataagattttttttaattatgttgtgattatgatttatatatatagaatttgcattcaatgggagcaagaagaattggagtggcttcattggcacctctagggtgtttgcctggagccataacattatttggagttggaaataataatcaatgtgtggatagactcaattatgatgctatctattttaacagaagattaaattccacctcacaattgttaaggaacaggttacctgacctgaatttgcttgtgttggatatataccaacccttgtacaaccttatcaacaatcctatcgaaaatggtacgtacgtaataataaatttataatttttttattttattttattttatatataattgatacataatcattatattttgtagggttttatgagacgagaaagggttgttgtggattagggatagtagaaacatcaatactgtgtaattcattatcaattggaacatgttcgaatgcatcagatcatattttttgggatgcttttcatccatctcaggcagccaatcatttactttctacttatatgattggtgctggttactcccttgtctactaattgtatttattaattaatatgttcatttattatgtaataattagttatatttattaatatatatcaattttaatatagctaattattgatgatgatgtcttgtgaattattatatatttattttaattttttaagaaaatgttattaactatagtctatatatgataattaatggatgttgtttatgatcattattatatatatatattgctaataatactacaaaaatagattttattgaagcactttgaaataatattataaattttattgaaccatgataatactaaaatctattaaaatctcccaatgcacgttattataacattttagagacccaaatctcaccagttaaaatcatgatcatctatcttcttcaatgttctaattctctctctctctagaatttgatcatatggccaaagaaaggtatgcaaattacatattgaaaaacataggaataatgacttttaatttcctatatat

SEQ ID NO: 58970 - DNA, 844 bp, Cannabis sativa
attgagtgagttcttaacaagagctcaagggtttataaatctggaagatgcttatgctcgagcatatggagtactcccaacaccttccactgaaataataaatgcctaaccttcgtagatccaataagtatttgaatgtttcggatcagaggcgatctgtcgagtcagagctccaacccgctccaactaaatggatctttttgacatgcctagtcatctgcgaaggttgggcatttaccctccgccaactgcttttactactcccacgttatatggaataagtacttccatgcagccagctacagaagttagttttatcgggtttggagctgtacaaaccggatacagtgccgctcccaaacaaacagactaaaaagtgaaagttccaaagtccaatataacccactcacggagtaagaggattttgaagggttcaaatcggagtgagtctgtgaagaagggaaaaacccaagagccaagatacaccaagtacataagtctcatagatactcgagaaaatgtatacaaggcaacttgtaagatggtacactacaagaagcctctgccaatgtataaaggcaaaaagtaaagaaaagattcgaacaaaaagtgtgaatatcatggtgatattggtcacaccacaaatgaatgtgactatataaaagatgaaatcaagggattagtgcggaatacacttaaccgattgggtaaggatcctagtcatatatctaggacacgcagtcgcacacagacaatttttcattctaggaaaacatggagccataaatcctcctcagagagtaggtcatccacaagttcctaaaatacaagccccgaatgcaca

SEQ ID NO: 58971 - DNA, 951 bp, Cannabis sativa
ccttccccaggcggtgtgggattgtacagcttacccggtgtttccccttacgaatcacgggactactaactgtcacactcgatgtcgaggagttggttacgacagagcactgtcggaaggccaagttgatcttggggcaccagtcggtggatgactacaatctctccaaagtcatctgcccgaacgtgagagctccggtcgcagagaaggtgtttcgggatgacatcattgccatggcgaaggacaagtaccagaagtacctcttcaagagggaacaggagctggcttacaccaaggcccaggcggccgccgaaagggcccttcgtattggagccctgttggagcggaggacccctagacccaagttcgtggtcccagtaccaaatactggggctcccgatgccagcacttcaggtttcggtaagtcccctttcacaatacattatgttcctcacgttcgtgagtattcccgtcttaggcccatagggttcgatgagcatctctgtaggtttagaatgccttctacccggtggggagatcatgccaaggagtactacttttcccacttaggccattatttaggtcgatcccggatgggttccggaccttcggtgcctattcctttggatcatttagcctacgtatcttccaactggtttcttccctcggacagttatctcggggatgatgaggccagccccatgattcgagactttgttagggtcgaattagagagtcggggtaggactagtttattgcttttctgctaagtgtatgctgtctcgtgaatgtgctaacactttacttattttctttgttgcagcaaccaggtccatggacgaactcttggcaactcttgctggagcctacagtcctgatgcttccccacctcctgcttcttctcagttggtcactaccgggaggtcttcctccagtgccccttcgggcact

SEQ ID NO: 58972 - DNA, 1150 bp, Cannabis sativa
agctttgtccactataatcaagctttggttgcgaaacaagcgtggcgcatcttagataatccttcctctctccttagccaattattgaagcaacaatacttcaaagatggatcttttctgaatgcgtgaatggggtcttatccttctatgagatggaggggaatagtttggggtaaagagcttcttcaacgaggtcttagatggaaagttggtaatggtctgcagatcaagtgtgctactgatccctggctgcctagccatacagcctttcagccaattcttttcaaagggatagattacactttaacggtcagtgagcttatcaatgatgatcgacaatggcatattccggctctcaagtctatgtttctggacattgatattgagaagattcttgatattcctttgtctttttttcctcatgatgataagatcatttggcaccatgaatcaactgggatttattctgtaaaatctgggtataaattggctacagacataggagatcaagagacttcttctggttcctctcacgctatccatttatggaaacaattttggaagctcaatctcccttcaaaggtaagaattttcttatggaaagctatccatgattgtcttccagtggcttcgatcttgcaaaagcgtcatattgcaagttcttcaacatgttctctctgccgtgataataatgaaaccatttgtcatgctcttttcttttgtaaaagagccaagagagtatggagaagatcctccttttctttggatagattacttgttgaatcttctaatttcaaggatctattctttaaagcttcggagacatggacgcaacatgatctggaacaatttgcttgtattctatggtgtatatggactgaaaggaataaagagaaccatggatcaaaagcaaagccgcatgatgtactgcttctttgtgccattacatatttaggagagtaccaatcagctcgattagcttccctagcaatcacagtcacgaggctcacaataacatagtacctactgtcgttcctgggtggctcaatcccctttctggtcggctgaaattgaatacagatgcagctgtggatgctgtgaatcgtacttcaggtttcggggcaatattacgggactctaatggtcaagt

SEQ ID NO: 58973 - DNA, 655 bp, Cannabis sativa
ggctcccatcgaatgcaaattctatacaaatcataatctataattaataatggtttacacataattataatgagtgtatgtgtatgtatatttaaatgtacctcaataaattgttcataatttctgagaagagtgttaaaatattggtgaatatttggataggtagcttgtagaatgggactaatataataattttgtatcaagtcactagtccctacgctgattatgtaaagtgcattggaaaatattgacgaagcttttgcttgccctatcattccgacaactctcgattgatattcgccataatattgcttcgataatgatatagcaagctacaaattacaacacacatcattagtattcaatgttaggtattaaatttttactcaaaaaattattttgaccaaacatatttgtgactaataccttttaattagttacaatttttttttacgtttagtcacaatttttgttgtcactaaaagtaaaaatttttgtattatcttttaaaatatgagatccagaaaatgcatgttcaaaaaaattaaaatgtaaaagaaatgtgaaatagataatttacatataagttagctgtggaatcatcatatccagaagcagctgaagcaaaatttgctccaattaaaagttcattgct

SEQ ID NO: 58974 - DNA, 1821 bp, Cannabis sativa
ttagatcataatagcttttatgtaagttactacgccaacaaaaacattatgatcaatgaatgaataaagatgtctatttaaattctgattgtgtcagttctattagcaagttataaatttactattaaatgcatacaaaggtcttctcgaatccaaagaaccgaacagataaaaatcatacttgtgaaatataagtgaccaagagtcaaaagtctgctcgatcacttggggccacctatacccgtacaaagcattggtaaaagtaacaagctaaaaaaaaacacagttgcatagatgattatcaaaacaaaggacaatattcattaaaaaagatagcaaagcacgataaacctagaattaaaagctgcctggttagccagttatctaaaaatgagaaaacataacccaagtttaaaaattgcttggccagtcatctttgtctctaaaaaaggcccatgggtcgaatagatacaaaaaaaataaaagataaggaaaagtgtttaaacagcaggggtctcgggctctctgtatggattggtctggtttataggggcctggtctatgggggccggaggttcaaaattctgagcaacaggggtttcgttgctctggtcggctagaactatagaagtggttgccttgaggtttcctttggctgcctgacttgcacagtaatcaagatacatcctcttggattcaccaaggtaatcaaaatttccttcgggattagccttccaaaattcataaaaaaacctcgagggcagctgtttccaggctttccacctccttcacgagctcttcctctctggtctgcttaatccggatgtccccctctaactttgtgagaagagtgcagagactctccctctcatctttaagctcattgacctccttagacaaagcatcattatttgcctccagctgctcgaaactaggtcgggcagaggtggtggtagtccgcaatcctcttgaagcacggaagtaaaggaagcattgcaccctactttgtatgagcacccgactaggcacaaaatccctatcttggactagttgcccagtgatttggagaagggaagaagcatttaacattccccatgtagccatccttctccaaattcttcctcttggactgggttactatagatagaggagaaacccatcgagctcctaaggcaccttgccttctttgaggaacaacctcagtgtattcctcggtaacatagtcttcaccctctaccaacacttcaccagcctcgaacacgagttccccttcctcattgtaacccctaaagggaaatcttagagcaactccctccttctcaactttagatggagaatcaggacgaacctcaccctgatcctccacctcctagacttcgacgtccccctcgtaatcttcctcctcagcagcaggccgggcctgctcagcactcggcattgtggtaagacaagccacgtgaggattagttaaagtggatctctgcactgtttgtttggtgtaggccatcattctattcctggacggagattgattagtgtgactagcaaccgtcacagttaaagtggctataggcgtacctacagcagcagacttgggtggcctacgggtatagtgtcaactatattctgtcggatgatgtatctccaactggacgacaaatatgtctcccaccccttcttgagttcccagatgaaacgtccgtagcctttaccggcgatctagttgggataaaaatggtgttgcacctcaggttctgaagaaggtgtatgtttgctgcttatcttccagtcctcaaagcttgagttggaaagaccgtcact

SEQ ID NO: 58975 - DNA, 715 bp, Cannabis sativa
tagggtttaattatgaaacttgcaaattaattatgaattatcattttacgaagatttatttgaattcaaaatgcattttatatgtcatatgtggagtttcatatttttgtacgttatgtgcccgggaacattagaacgcggtgtttggctatttgaatcacatcttagtatttttagtatagtggggcaatatagttagacattgggaatgtcaggaatagtcgagattttataaatgaccaaattacccctatgtgattttatgactttttggctatgtgaggggcaaaatggtctttttgcccaattaaagttttgtctttagtggattgattttagatatgaaatctgatttttattttatgctgaatatattagataaagccttagttttatttcatttttattaaaaatcaaaattacaaagaaaaaaaaaaagaaacactctctctcagttctctctctctttcgaacaccatagaacccagctagggttggtgttttttctacctaatttagaggatttactttaagttcttagtgatgtcaagtcaaggtaagttcctagaaactccctctttagttttcttaagctttaagttgagaatttttcatgaattgtgagtttagggttctgtagttgctgttgttgtttgtggatgtgttctgaagtttgattatgattatttatgttgtattgagctagttttggtgg

SEQ ID NO: 58976 - DNA, 1379 bp, Cannabis sativa
gttctcgaccggaaggatctatttctgaatcttatccagttaatgaagccttaaccttttgttcaatgtacttttggaaagtagaaactcgatttaatcgtcaagatcgaaatagtgatgtcctcccaaataagcctgaaagggaattctctgcatttaagcatgttggacgaccaattggtcataggaccattgttgctttaccaatgcaagataaattgaaggtagagtggtacattctcaacaattataatgaagtggagaaatatatcacgtaagatacttttttcatattcaatttagttctctttattgacgacattatctaacattttccccatttttcatgtagtgagcataagaacgagcgacagcttaggggtcatcaaaatctttattaaatgtcaaaggcacattttagaggattgcacttcattcgatattcttgcatgatgttgaagaactcatctatgtctttgatgtggtcttcagatttttttgacataaccagcatgtcttcgacgtagacttccatattattttcgatcaagtcatgaaacatatggttgactagtctcttgtatgtacacttgcattcttgagtcacggaaagctctactcgtgtttggatcgagtgttggagagagagcaagagtgagaaagagatagatagagagggaagtttttttttagcttccaatgaggaaggtctagctttttgggtcgagtgttgaagagagagagcgagaaagaaagagagagagggaaaattaaatgaggagggtattttgggtaatcaaggagaatactagtatttttttgtataaattagcctaatggtggttgtccattggagtaatttttccatatatgcaatgtggtctaatttttaagaccaattttatgtgaagttttgctcaatatagacaaaggccacatgccattttttttttgttctatttttattttttttaaaaaaaaagttatttatcacctaataaaatcattaatttaatgtgatgtgggatcatagtgggagacttttaaagttgtcattccatgagaatataaattttgtaacaatattttctctcgatacatgctgagaaatgtagtggaacgtttgtaactactgacatcgacggtggtgatgcacgtccccttctcatgtacgttttggcaggcttactcttctgtacggtgaggaaacggtgcctcatgcctggaaaaggttttccttttaaaccttgctagggtttgtcttatattcttaccccttttgtcctatcatattaccctatctagctctctttgtgagttatccattcaaaataataaaagagtcatcctcaagcaatcacacggccttgcttgctgtt

SEQ ID NO: 58977 - DNA, 775 bp, Cannabis sativa
gaaagatatcctaaacaaaggaatttggttgaacatgctttccttggaaaagatatagcaagagtgtctcataggcaaaaatgtgatgattcggaatccaattttgaggactaggagccctgtgctaggaacgcacttgaagccaaactccccaaaaacttcaaaatgccagaaatggtataatatacgagagacactaacccaagcaatcatctgtcacggtttaatacgaccatgacagtattgagggctagcaatgacgccaagtgtttgtgcttcccattgactttgggaggatttgtggaagagtgcttcaagaaactagaacatgggtccacgagttgctggaataaattacatacttgctgtttctgaagataatttgtcacaggaaggaagatgaaccttgaagttagtgccttaactaatatcaaacaactgtccctcgagacccttaataattttatcaagagatttaaggaagaagcttccaaaataaataaggttggcgatgggcaacgattagaattgttacagactgagatccaaactagaactcctttctagaattagttccaacaggaaggtgcagccagcctgcaagattttcaaaaaaggatcaaaaatacattaaattggaataggcccaaatcatagcttttggtggatattatctaaccaaagggcctagatatacgtctgagatacaatatctcaaaagatcgcatcatgcagctaccgaaaccaacatgattctcagtatacaattccaggc

SEQ ID NO: 58978 - DNA, 753 bp, Cannabis sativa
aaaaaaaaaatcatatttttgtaagttttgcaaaaaaaaaaaaaaaatcatgaaaatgaaaatccaccctaaggtggatctacaaaaacatgaaaaagaattagcataacttacaaaaatatggtagaaaaaagtaatgtcacaaaatatgataattttagaagaaaaagaaaaagagaacccgaaaaaaatactatcaacaaaacttaataagatttccattaataattatcgctgaaaaatttaatctgcacgatccaatcatatttaatccgcaaagtgtggatatgcgcactcttgcggattgaattagattggattggaaaattcaaaatccgtacttgtgcagattgggtgttgactgaaccgatccaatccaatccacatttatttataaaaaaatttaaaaaataatatatacaattaacattttaatgtaaagaaaatagttatttaaaagtctaatacatatagtgcaattatatttcaaaatttaataaatcaaatgtatatttcactcttatctataatttttttttttctgaatacaatttaaaacaaaattaaacatttctttatacatacatataataaaatatacggtacattatatacaatataatacaaaattaaaatacataattctctaaacctaatttgagccacccatatttttttctagaaaaggttgtgatttcccttatctcagctcatagtgtctcactagttgagtacacactgtgatagaaaatt

SEQ ID NO: 58979 - DNA, 1046 bp, Cannabis sativa
taaaactgtctaaacattttagatatcttctgttaaccccaatactcagttaatcccaatactttggaaggttgaaacgtttgggtaatgataatgttaaaaatcaaagtaattatgttttatttctatatgtagtaccaactcaagctatataactatgtgttattattaattatatatatgtaaacacagaattactcacttataagcattagcaaggtaggttttagtcgtagtcgcaaatatggaaatttgaatgagaaaaagtcaaaagcattaagaataaatcctcaatctttttaaaagaaaaaaatctaaataattagtactactggagttaagcaaatgataaaaaagagtaaatataaggttttttaaatgatggtattttggttaagagtggtgatatatataaaaatatcaccacaaaaacataagtttgtttgttatgtggtgatatttttgtatatatttaaatgtgctttcgatattgggcggtgtcacaccaaggctattcaccagaattttgttttcatcactcatgctcatctcgatcatatggtgagctccaattatttctttatatggatacccaacttcaatttataatttatgaatgaaaaaaatgtagttattgcatatttctatgtgttcgagttttatgtatcgaattaatatagcttgaagaactctcgtgaagcttcatacttatcaaatttatatgtttttggaagaaaaaaagttactattgtcagtttgtgtcattttgtgaagatgatatatataaaaatatcaccacaaaaatataagtttgtttgttatatgatgatatttttgtatatatttatacaagtttagaggatatatatatatatatatatatatgtctctatctattttgaaatgatgtagatttttgttggtgcttatatatagagaaaataacacccaatctaaaaatatgagattttaattaaatattttttttacaggaagttggtggtgtaaattttgggagtgggatgaccctccgatgtgtgagcgtg

SEQ ID NO: 58980 - DNA, 654 bp, Cannabis sativa
aacacagggtccaatctgtaacttttgcaaaacacagggtctaaaatggtatattaccctaaaattatataacttaaagatgggttacttaactttgaggaaaattactctttattatttctcctactacttgtaactgtttgtcactaaatctctacacacagagagcatgtataaggtgcagccattcttgtgcattcctataaagtgaagtggaatatattatatattagtgctcctaacaaattggttaaacttagaacaacacttgaaataattaggtgcatctacccaccccaatcactatggaagaagagcttgtggttggttgatatagtgttaatgcaaaaaagaaacaatatggtcaccaagaaattatgcaaatttagtcctcatcatttgtgtctaaataaataaaataaaataaaaatcatattttatataataaactccgaaaacttttttactataattaaaagttggcagtaactagtaagaatactaaaataataacaataagagaaatttacaactcatgattaaagtgtaaagtattttacatttttatttgtgctcggtatttttttcttttgtgaagttcattattttcatcattaccttttaactttacattaattacatttttacgatttg

SEQ ID NO: 58981 - DNA, 678 bp, Cannabis sativa
ataattcgtttggtgtattgaaagacgcctctcttctaaatggataattgcaactcattatcttggaaaattagagtgctcaataaatgggagaagccgttgaaagttaatgaaatgttggaagaaaataatgtgggcattggagctattttggaaactaagattcgtggtaaaaaagttgttcagatgacgaactctagctttcttggctaggagtttcattctagtgctgctatataaggaaaaaattattttgctttagccaaaatcctttgtttctatggatattttagaggagtctaatcagtttattcactgtgtaattagaatgacttgtctaaataaatctttttgcataacaattgtttatggcagtaatatgatagttgaaaggtaaattttattgagtaagcttgctggtttgttaaaacaagtgaaaccacatctaatttgtggtgattttaactcattcttgagttatggagataggttgggaggcaaaccggttcgtgcctttaagattgttaatgctaatgcttggttagcattgggtctagcagatgaaatgaagagttcaggttcccatttcacttgaagcaaaagatgatggggaacgaatctattctaaaatttattgggtctttaagaataaggactggatggatattcatccaaata

SEQ ID NO: 58982 - DNA, 865 bp, Cannabis sativa
tgaaatgagttttatttacggcataaaatccaacaataactgccatccttgtttggcaagcatggcaagattaaagtcatggagatgcctaaatctcattccaccttcttctttaggagttgctagacagtcctatgacatccagataatacctcgcccattacttgattttgtcttccaccagaagctagccattaatttctcaatctcattacaagtaccaatcgggagaagaaatacactcatagcataagtgggcatggattgaaccactgtcttgagtaaaatttctttccctgcacgagacaaaaatttaccatctcagctgttgatacgagagatgactttgttttttataaaaccaagcacaacatttttattacggccgataatatttagaaggcctaaataaaagctgccttcaagagcttctgacatgtgaagtatagagcagatatgtgcacgggtagtagtagtagtattaggactgaaaaatattgatgacttggagtaattaaccttctgaccggatgcattttcaaagagttgaagaaggttggtgatgctatcagcagccccttgtgtggcttgactaaacaaataactgtcgttagcgaagaacatatgagttatcggaggcgcacgttgagcaaccttgcatccttgaatgagtctattagcttcaaatttttgaattagagcagagaggccttcagcacctataatgaacaggtaagtggagaggggatcactttgacgaattcctctagacggagagataggatcaagaacatggccattataaacaactctgtaccgaaccgtagagacacacgccatgatgagatcaatccatttgctagca

SEQ ID NO: 58983 - DNA, 617 bp, Cannabis sativa
  modified_base (180)..(185): a, c, t, g, unknown or other
tgatacaacattcttcagaaggcactgattaataaaacaaaatatatgaacaaatctcatttaaaatgtggctatgtaatataattattaatttaacgttgtttttcggttttctatataaattttaacagaatatactattacttaacagaatgttctttattaattttataatattannnnnnatatttaaaaataaaaattacatagatattttatataagaaaatttaaatttaaaaattttaaatattgtaaatatttttagtcacattttaattttattggttgaactttgaattaaaataataaaagacaattaacctcaatcggtcacacaacaacaattcactacgacgatatctcacttgttgggttttattgtacatataaaatacgtatttatacataatcacatctaaaaggcacactaatatataaccgcaataactaaaagaaatccttaaagatcaaaatttcaatcccatttcaaaatttttaaaataaatacattacttaattaaaaaaaaattaaacatacatgtattgtacttaacataacctgattagatctaattaaaattatatcaacctagtatatctattctatataaaatg

SEQ ID NO: 58984 - DNA, 565 bp, Cannabis sativa
tgtgtttatatttttgagacaaatttatcatatctcattaaattatgataaaagtgtaccttatttttataatttttattatgaaattctcatactattttactattaattttaataatttttattacttacatttatcatcaaattatttattaatagagatatgataaatgagaaattattttccaacccatcaaattattccaaataaaagagaaaaagaccatttcggataggttggaaaataattcttccataaacattaattgtaacgagagaaataatagcccacaaaagtgttctctaaaaaaaagcattttgacttttcaaacatggtaaaaagaaatagtaatgattttttgtaaaagagagacatgtaatagtaatggtcgtgtaagtttgatatacagatataataaattcttgaagtgatatgtctccattattgtaatttatggcgctaattgtttactctaaataattgaatattcattgtttgtattttttttaattaaatatatatattacttaaaaaaattaatatcaatcaatcaatatcaatcaa

SEQ ID NO: 58985 - DNA, 1346 bp, Cannabis sativa
ttacatcaaaacttatgtttgtcctattagagcattcctaatattcacttctcagatttcatattaggatcataaatcacattcaagatggccagtcaaaatagagtcaggctacattcgtcaaaatagagacggactccttggttgctgctacagcctttgacatgctcaattaccatttggttgggatacttaccctctgttttgtgaatgcttgaacatgtgtaagtcttttgacaaggttattgtgtgtcatgtgaatcgagagaacaatataatggctgatgtgctagcctgctgggcgagagtgcacaaggcagaggccactggcctcttaagggttgtagccccctcatgtggttactagttttctttgctttcaataaaagttttttacccattaaaaaaaaagatggccaatctaaaatatgtaattaaaacaaataagaataaatcacacaatatagggaagacaaactaataatcacattacctgaattaaagaaacatcatctaacattcttcatatccctaaattgggaatttagttcaaaaagctcatgttcacatccataaaaattgaaacagaaattaacataaagacataaaaaggagaagaaagaactagttggtgatcttcctccgggtcgccacaattgcttcctttgcctcctccttcatctctagggtttaatttttgcctccctttacctctaaaacacgcaacccttatatagacattagggttgctatctttgaatggtgaaagtcaaaaactgccaaaaattctcgtgtttcgcccatagtcgcgactacaaagcctagtcgcaaccataggctaatttcgaaaaacaagctctctgcctgctccatagtcgcgaccatgaaaaagggtcgtgaccatgaaaaatggtggtcgcgactactaaagcaaatttgacagcttcagcatctttcagtaaaatatgcataactttcacatttgattcaagatgtgttggaaagaagaaaaagaaatctaaagcttctatgttttgactttttccaaaatttgatcagaacatagtcaaatttaggcttgaagtttcagctttattttcttacagaattttctctattctatagattattgttttctaaaatttgatcgattgatgtattccaagtgtaaaatctgaaacaaaaaaaaaaaataataataagcataattctatttaaaaaaaataacaaagaagaaaaacaactataaaaattgacccaaaaatgtaggctaaaaatagcctaacatctacacaagtgaagatattcttactttgaggatttaataatgcaaatttaattagata

SEQ ID NO: 58986 - DNA, 596 bp, Cannabis sativa
aaagcaactacaaaacacatatataccaattcagtaatatatgtatttataaaaagctaaacatatacttatttttctctcagtcaaataacttaataacaacgaataaaaaatacgataataatttcattttaataaaaataaaaaaataatactgattcccagttctgttatatagtatcgtgaaagttaatagatatagattttaaaaaaaattaacagtaataaaaaaaatttgttaaatcaagaattgacattacatagtcacttttaatatataagatattttagttgaacaactaacaaataactaaataataactgcaatatcaaaatttaaaatatataccatgtaaataacataaaaataacacagtatcaaccctgatattgaaacattacaatatgaaacaacaaacagataactcaaaaaccacatgacattaatctcatttgcgccaacctaaaataacttacaaatcaacaaaaaatggacaaagtctttaagtatgtatatataggaactgttatagaactcgaacccacagcattatgtaatgtgccatataccctaaccaactaaactaaaaatattt

SEQ ID NO: 58987 - DNA, 1335 bp, Cannabis sativa
  modified_base (308)..(319): a, c, t, g, unknown or other
gtggtatatgtgtaataaaatataaagaaaaggtaaaaaagttgctttaaccgtgtgtaggtttatatgtaataaagtgtgtaatttgtatttttggtgtaaaaatttcaaaaaattaacatttcctaaaacattaattttgtatttatttttaacttgcttggtctcttttagtattttaaaatatattctaggttaattaacaattttttccttgaactttaatatgtattaaatcatgtccctgaatcttttttgcagttaaaaattcctcctgaactaataagattgttagatttaaagacttnnnnnnnnnnnnagtaaaaaaattctaacatggataaaagttcagcggcatgatttagtacatataaaattttgaggaacatgatttgatagatatcaaagtctagaaagtatggtttactggtttagtacataaacaatcactgaaacagtaaaattgaatgaaattagacaaaagtcctaaaatctaacaatctcaatagttcaggggaaatttttaacagcaaaaaaagttccgaaaacatgatttgatatatgtcaaagttccagatgaaaaattgtaatttttttataaccgtatgtaattatgattctcgtttacataaaaaaaattccctatatatgtcttatttgtggggctggccgctggctccgccgattttagtaagaaaatatatgggttggtaaagaacaaaaacagaatattttgtagggagtcttgtatttctatgatctttgcttgttttattcagtgttaatatctatatatatggatgttctgtcttaactatgctgtacagatacaacaatcaagcaacatgcttaaatattaatttccgaacacaatcctatattctaatcacgttagtaaaaatagtttcatgtaaaactaaattatatttaaatagattcttcgcaaaataaaaaaattggatcaacataagatagtatacttgaagctattaatggaatgggcaaaaaaaaaaaaaaattggatcttcctatatataatacatattttctgtgagagattcgttttcttttatagagaaaattgaatagtagaaaacataacgtaagtgtgttatcgttaatcttttattataattttttaattaattttcgtgcgtgaaattacataccgagattgttaagtaaaaattttacatttagtatatgaaaaataaatgtgttgacctcatttttagccaacggcaacgagtcgattttaataagcgataagtgatttataacaatagatatataataaagcaatgtaaagacacaggaattttatagaggtttagc

SEQ ID NO: 58988 - DNA, 741 bp, Cannabis sativa
ttttttatttttttattgaacggattcaggcccggccatgggcataggcgggctaggcctgtgcctagggcccacctagcccaggggcccaaaagaaacttccctttaaaaattatactattttttttttctaattttaaaaaatactacatttttttctaaataagggcccaaaataattttttttctatggcccactaaatttcagggcccgccctgaacataaatatttataatttgaagttagtagaaacttaaaatacactatacctgatcacactgatcaaaccaaccgatacctcccttacatccaatactaagttactgttagagaaagagagaatgtcctagcgttttatttggggagataaattgtgtttattcgaatgtgatattgatttttttttttttttttgtaaagattagtttttttagtagcattaataataattgttacaactcatttcagccaaaaaaaaaaaaaaaaactattattacaactcattatatgaattggaaaaacatatcatcaatcaaatcaagcatttaaaggacaaaaacattatccaagattagaatctcaacaagcatttaactaagtcttgtgttgttctgactttaggaaacatatgatatatacgatactctcttaatttcaactcattgacttctattctctaattacttattattcttcttattagttatcctttacccgactcctttttttttttttttttt

SEQ ID NO: 58989 - DNA, 556 bp, Cannabis sativa
aaatgataaagttatatcatcttttaaaagcactcgaaacttattaaaaaacacaatacatttgttgatagttgttatcacaaaaaaaataaatctaaataaatctctcttttatgtatatatatttaaaaaaaaaaaaaaattggtaaagtaaccttgccaattctttaacaaaaatatatttaaactaattttttgatgactttattttgatatatttgattatgcaatgtcatctctaattagatgcatgcgggaataatatttccatgccttaataggacctgtttaatattttaattattttttattaatattttatattttaaaatagatttaatatttttttttaagacctagtattttttggattggatttgatccctttaatattttaggtctagtatgtattggattgaattggatccatccagttaaaaaaaaagagtaaaatttaatgttagtttttaaatatacatatatattttacgtataactatataacatctaattactaatccaaactaaatgaaaatactaataagttcgattggat

SEQ ID NO: 58990 - DNA, 537 bp, Cannabis sativa
atagcattctttaactggctggtcctgctcaatttggagcttggctttagttcgtaacagttctccatgatcccatttcccagtttgttctatagcagcattgataacagtttcagcatcactaaaacgtttttgggctgataatattcgagccaaaagactgtagcctttaacattagaccccgcctcgagttttagtagctgctttgcataataaagcgcgctatctaactttctttgctcagcattttcaagacaaagatgaaacacaacataaggattattttcactcattgttctctcagcagtttccaatgcctgaagtgctttcgattgcaacatagccctgtctgtatctgaaacaaccgaacgagatttagctgacactaaaacaccaagtaagcaatttgacatacttacaacctgactgcattttccttccaaaatcgaaagtgctttgcaagcataatcgattccttcctcgatgaaaactgaattctcgccacatatctttgaagccattaataactccagtag

SEQ ID NO: 58991 - DNA, 1402 bp, Cannabis sativa
ccttgtcgagaagctcagtcttctccttcttcgataattctttaggaagattcttctctctcaaaagagcatcttgcaaaccatgttgaaccatgagagctctcatcttgactcaccacaatctgaagttgttctttcttgtaaaaaaatttctagatcgaactttccattttccatcttcttggatcgctcacctgaatcttaaaatcttctgatgacaatcactatctcatacaccaggatggttcaaggaacatccaagaacaatcctcaaagctcaaacaaactccaataccgattgaacacacacgaagaacttaattaactaaaatgaacagaccttttatttctgtgaatttaatctgaattaaaattgaagagattaagttgctagttacaataatagaggtatttattgattaatacctcgtaggggaaacataacaactaacagataacatactaattgtcaagttaatttgtcttaatttttgttgaggtggtacattacacagtcacactaaaataacaatatacatgccacaacaacaattacatgtaaatttaaccgaataaaattagttaaaaaaacatttttttcttttttcattcagctatagtttctagttccatagttgtcattaatctctttggcatcttggtattttgtttggatggatttgtagatgaaaacggatttggtggcatacttaactcttcatttccttccaacatttgaactacgactttcatggtcggacgatctattgggtgccattgaatacattgaagtcctactattgctagtttttttgcaattttaccatctcctccttcatcgatatagattcgaagatcttctccttcttctaaaagattgaaaatccattctggatagtaaatttcattcgtattattacttcttctgcctcctacaatttcgagtaatagcataccaaaactataaacatctgacttgtaggagacattaccaaagtttctagagaatacttcaggtgcaatgtaccctatggttcctctagctgtactcattgacactatgctttgatcctttgaacataacttggcaagaccaaaatcagcaatctttggtttaaaattatggtctaacaagatgttttggggcttaatatcaaaatgaagtattcgtttatcacaaccttggtgaagatactcgattcccttagctgtgcctgtaactatatctaataatttctcccaactaagagaacatatattaatatcatcagttgaccctcttactgatatgtacttatctagagaatcatttggtaagaattcatatactagagctcttctaaatccatcagcacaataaccgaccaaacgaaccacattaatatggtgaatttgacctatt

SEQ ID NO: 58992 - DNA, 1284 bp, Cannabis sativa
cctcgattctgctcccagtaacctcttactaacatagtaaacaggttgttggtgctttccctcttctcgcactattacagcactaattgcatatttcgagacaaccaagtagaggagtaatgtctctcctgttattggttttgccaaaactggaggtgtcgataaatgcctttttatgctcttaaaggcatcctcgcactcttatgtccattcaaatttcttgttgcctcgcaatacgttgaaaaatggtaggcacttatcacttctaatcttctattgataacaaataaggttatgttgaaatgggttttatttagggcataaaatcccaacacttagagacttagagaagttaggattgggttaatgctctttatataggagagcttacataagaataataacctaatatccctaaaaataggaactataaagtatttgttacataactaaataatagatattaaataggttaattatcccccaagaataggagaataattgatacttctcccctatttttgttggctgctaaagccgaaatcgtagcttggcttgttgttccggatgaaggctacacaccaagtgcctgccaggatctgacaggtcaagtgcctactagtttggcaagtgttggctaacatttgcatgtgttggccagccttattaggtgttggccagcctttgtacaactttccttgcaaaggtcaggcttccttagtcgaacaggccctctttggtctgacaatcaccctttggtcggccagcttgtgctcaaaccctggtcggccatacacgcttctcctgcccagcctatgtacttcttttgggaggccagacatggatgtgcagcttcttgacggcttacttaactcattttgcttgttgcttgatggttttgtcataccttgtaaggagactttgtcctgctattgacaaggttgtattccacgtgtccttagtcaggttacgtggacatgccacgtcaggtggacaaaatttaggataacacttataaaataatgcaacgtgacacttaagagcactcacaataactcttctactctatccttcaaaatatatcataaaaactcaaaattatatattttacatcaaaattttaagtacacagtgcttctttattttgttttctctaaataatttaattataatattttgattaattaaaataataaaaaataaatcatcaaaaagagaaaataaaaataaaacatattttatttggagagagaaagaaagaaaaataattaaaaaaatatctag

SEQ ID NO: 58993 - DNA, 982 bp, Cannabis sativa
ttgcatgttctccaatggtgtgcaaaaatgatgtaaatttagcacagcaaattttgtgctaagtttgatacaatatttactatgatgtaaaatttacatcacaataaatgaccactttttttatttatatttataccatttgtattgttctattagtatatttaacaataggctataacattaaattataaagtatttatataaattttttattgtcttgcatattaaaataataataaaattaataatgaaattattagtgtttatgtttttaataaaaatattaattagatattaaattttacattaaagttgtgcaattatgcattggagcgcaatgccacaatttgatgtaaaccatgggcgactattatggggtgcaagctgggctattgcatagggcccaaaaaataaaggaccaaaaaaataaagggcataatattttttttaaggctcttcaagtttttttaatgaacccaactttttaaagggctaaaaattggagccaaattacctgtccttatttgctgtcccatttcctgtcccaaccagttatattttgtcaactcaattaacattccacctgtacatttaatagatttttctacaagctaactctgtttgtttttatttaatattttctttttaaaagacacagagctaaatgcggtccagtattctttccaaaactaactatgtttcttttttttttttttatttaatgttttcttttttattctttattttttatttaaaaatttctatcacttcatctctctcacgatctgtagctctaatggattattaagcatcctaattgccattgtcatttatataataaaagatatatataataaaattcttattataactagattaatgaagaaaaccgataaaaacagttttgttatattcatttgaaagaattataagtaaagagaaaataagtaagtgagggcaaaactgttggaatttattttac

SEQ ID NO: 58994 - DNA, 1243 bp, Cannabis sativa
  modified_base (589)..(592): a, c, t, g, unknown or other
  modified_base (1072)..(1077): a, c, t, g, unknown or other
agacacagccaatctaaaacaactcctggcaactcaacacacaggctggtggggtcaatatatacattgcaggagaagaccgacatctcatggctgttctaactttgccttgcccttacctgcacaacaaagcacccgtgagtcacatgactcaacaagaaaagtgataaagaatgatacattaaatagctaattatacatttcattatcacaaaatgattaaacataacattcaataataggtaatataacgagtcatatgcatagaaatagatatgctcatataattgcattgcctaattaggcaagcccgtgtcataatgcaatatcatatataatatcactgcaccacctaatctggtgagcccgtgccacagcttgtcactaatatatcacatcgtctaatcagacgatcccgtagttacacccggtacttatcatatgtcactgatgcccgtacctacgcgcgatacgtcgctaggaagaaacccaataatagtttcaatctatgccataaccaagcaatttcatatcactgacgtacctacgcccgatacgtcgccaggaatattgcatcacctaatcaggnnnncccatatattatgtccatagtatcattacattatcattacctaatcaaacgatcaataattttagaacctgtcatgccatgaggtacattatacttttcttacctcaagtttcgaatcaggtatgttggccaaccttcttggagaaagatcgataacctcgggccctatgtcataacaataataaatcaataagtgtttatcccgaaatattacttaacactcgcgtaagacaatttaggattttctatcaaaccctgtggtataaatacactaaaataaaacttataatttggctcttaaacatacaccatattgtagagctcgtttcaagcttcgaaacagtatacagaacgtccaaaacagacacccgagtgaaaatttatgataaaaacacaatttttgatctcctctgaatttctaaaaattatgaaatacgaaaaatctcaatttttgaactcaccgaaacactaccaaaactnnnnnnaatcactccaaacttcacagggcacatatataccatgaatactaccatccttacttaacataaattaaaattgggcccttaaacggaaaacgccattaacgctcggactaagctttaaaaagtttcaaactcgatttctaacccaaaatcacctcaatttcagcaa

SEQ ID NO: 58995 - DNA, 1549 bp, Cannabis sativa
  modified_base (163)..(167): a, c, t, g, unknown or other
  modified_base (375)..(375): a, c, t, g, unknown or other
  modified_base (486)..(503): a, c, t, g, unknown or other
  modified_base (541)..(545): a, c, t, g, unknown or other
agtcaactcatctaaaatagataccattctagcaaccttttattcgatcaagactagaatccggtgttatcccgtttaggcgagagtcaaggtcattctatcttatgagctttgcaagtcttacttctaccagccactttagggtggacgttactaagaatannnnncttacaataatacttatctttcgaaattctacgacgttaaattgctaatgaacgttcatccattagggataattactcactaaaacaagaactgtgcagaaccaacaatggggatcgaatatccttataactaaagctcattattttaaagagttgtattttcttttgatgcttattttaatttatttatttaattaaaaattactantttagataattccaaatataaattttaatttaatatttaaaaaattatactttaggaagatctgaaaaattaaaatttatttttcttccttagtattaattttccaataannnnnnnnnnnnnnnnnnaatttaagttggtccaaaattagacaaaagtccttaannnnnacaatctcaatagttcggggggaagttttaacggccaaaaaagttcagggggcacgatttactacatgtcaaagttcagggagaaatattactaattagccaaaaaaacaattatggttagaatatctataaaaaaaatatctaggttaattttaaatttattaattattaaattcatcatataaggtaattttaatataatatttcaaattaaaaagatattgctatctttaatttaaaatatacccaatattaaaatatctaacattataattaaataatatatgaaatattaaaaaaattaacaaatttttaaaatctggccataatttaaaaataaaataattaatttttaaatttaaacctcaaaatatcataaaattaataataatttattaaaagttaaatatattaatttaaaattgatatttaagtttaaatatattaaaaatagtattttattttgaaactgggttttgaaaatagaaaaaaaaattgaaatttgtggaaaaaatcacaaaaattgcacttttggggaaatctcccagctgcccacgaaacaggctacaagcagcccattccgcgctcgggagagtgatgctgcagcctgggatgtgcgggattctttggccattgcagcctcagcgtgccacttcgtgtctaaacaagggctatccgcgtgcatcagacaaaaaattgtctgaatttgtgcgggcggatcaccttgtccgaaggtgtgcgcgcatggtgctcgaccatatgcacccaaaattttaaaccttcataacttcttcatttttcattggaatcgagttccgtaaaaaacaaagttgcttaatttttcacaaggaatccaaataaattattttcagaaagaaataaaattattttgatggaaatttttttaattcacatacaatcatcaattaacacataaaccaacatgaacacatccaaatcaacacacaaacaatattcactattttaaatccatatttcatgaa

SEQ ID NO: 58996 - DNA, 3654 bp, Cannabis sativa
tcatttaggtttgttctgaaatttagggtcaaatttagggctttgttttgtttctatttagatttagtttttttttttttttctgttaatttatttttagaatcttgattgattggggtcttgatttagggctttgttttatttttttgttaatttgggcatgtattgatttttgatatttgtggtctttgaagtcatattctcaaaattttaatttggggttcttgctttagctccattgatctttagtgttatggtgttttttttttgtttgaactttaattgattggttctctttgtgattatcagctggacaggttcatcccaaatagatccgcaatggatttcgattatgcccactacatgctgactgagggaagaaaatgtaaggaaagcccgattagtttatcccctgcaagagaagcctacaagaagcttctggcagaaaccttcaacatgaaccggggtcggatcttagctttcaagaacaagcctcctgctccagttgagaaattcccttgtgagtttgcttctgcaccggtggagagagcagaaaaacccaagcgtcacattcctcaggtgtgttcttgtttccaattcaatcataaactgatgctaagttttgagcaaaccaaaatattaacatatgctatgcttactgtaacttggttgtgtgtgcagtcttctgagcggacactggatgctcctgaacttgtagataacttctacttgaatctcttggattgggggtgttcaaatgttttagcaatagctttaggaaacacagtttttctgtgggacgctacagaaggctctacttcggagcttgttacaatcgatgaagaaagtggccctgttacaagtgttagctgggctcctgatggaaggcacattgccattggtctaaacaattctgaagtacagttatgggattcagcttctaacaaacaggtacatcttctgaaactctttttattttctactattgtacttgtttcgattatcgaaattatgctgattgttttgctgtggaatggtatttcagctgagaactcttaaaggcggacacagagctctcgttggttcactagcatggaacaatcacattctaaccacaggtggaatggatggtcgaattatcaacaacgatgtaagaattcgatcacacatcgttggaacctacaaaggacatgaacaagaggtgtgcgggcttaaatggtcaggttcaggccagcaattagctagcggcgggaatgataacctcgtccacatttgggacagttcaactgcttctacaaattcagtcactaggtggcttcacaggttgtcaaaccacacatctgcagttaaagcgcttgcctggtgtcctttccagagcaatttgctggctaccggtggaggtggcagtgatcgtaccattaaattctggaacacacacaacggtgcttgcctcaacactatcgacactggctcacaagtctgtgctttgctgtggaacaagaacgagcgagagctgcttagctctcacggttttacacagaatcagctcaccctatggaagtatccgtcaatggttaagatggcagaacttactggccatacctctagagttctttacatggcccaggtaaatcaattattcacatgatttttacacaaaaaaattgaactttttttaaccttggtaaacaagattctaaacctctctcatttgtatatgtgttttcagagcccagatggttgcacagttgcttcagcagcaggagacgaaacacttcggttttggaatgtttttggggtccctgaagcagctaaacctgctgcaaaagccaacccagagcctttctccggtcatttgatccacattcgatgaggagttgctaggagccaacatcatctattctttttgacagttcaactttgtttactgcagtgcagcataaaccagaagaagagtaacaatacaatgtgtatttatacataaaagaacaacagttcgttgtgtttcatttttcctctctaacaatacaatttatcatacatatacataaaagaacaacatgtcgttgtgtttcattttttctctctaacaatacaacgtgtactcttttctaattgtatcatatatgtacataaaagaacaacagttcgttgtgcttcattttgtctccgattctatttatattctatgctataaatgtgtcgtgtgaggatcttggaaatattattataatgtggtttgatgatatttttgctctgaacttcaatatatactgtttctcaatttattcaatctcatccaatgatatgagtttccaaaattgatagcttttgttttattatcatcacaataatcatgacaagcacaaaaaacaataaaactttattatcatcattattaagtctactttatattattatagtcacaaaaatcataataaaatcaccaactttgctcaaaacatttgtaacaaaatctcccccccaaaaaataaataaataaataaattgtgctcataaatgtaatgaagagaaatgccatttgtttcttcatttttttgggggtcattttcttggtgcattgctattttttttaggagtattttggatgttttcataaccaaaatcttgaacttaccgttcctttaacttggcatatatttggagaagaatccaatgttatttagtgataattctttacttaataaacaagttagaaaagtgaggagaaaggaagtaaagatatgaatgctcataaagcagtaccggtagcatttagaacgccacaacacccatctctagggacaaacaattggggtggcgcttctcccttgttggcaagagacatttcgaaggaatcacttgagcaaagatatgttaggctcaactcaactcgaactcgagatgagatctttcctgtgttcgaggatgatctagattgggcaccctcggagaataaggctaagcaagatgttcattatggctcaaaaacagcgagcatgatcagaggactcttaccgaaatttgttatgtttcgaaggaaggaaaaagagagttcaaagaaaaagagatggtttcttcctagattagatcctcacaataggtggcctcagggctggtgttagttttttacttgagttttgacaaagcaaaagttgtgaaactaaggcatgtttggcatgaattttttcattcttaagagaaaaaaatgagtatgaaaagagattagaatgatggtcaaggtcatttttccaatgttcatttttttgcaatataagtatgtttttttttaagtagtaatacttcaacttcttgtaagtttttcctctgttctttctttcttcaaatatattgctttttattccttttgtatctataagcaaaatccatgaaaaaagtaaatccttaaaaacaaagaagctaggtagaataatatgcatgaagatatgagaaataaatgataaatttctgagttattactaaatactagattataatttcaaactcaatgaattaaaggttagaacaactcatggtacaaaactgtattactagtttgtggcatgacaaattgtatagttaaagtaattttgattttactaacataaaaaaatataggctaattagtaatttttcccctgaactttaacatgt

SEQ ID NO: 58997 - DNA, 1465 bp, Cannabis sativa
acatgtatcatcaaagtagtaaatatacagttgttaaaaaaatgtgctacaattattttaatatattataaattatattaatatcatcaataaactctgtataatatcattaatcatagtattaatacccaccatagtatttctataacttacaacctaacatacctaattattaatgtattatgtaaaaatgaaacatataaatataaagtagttattattttgagaaaagaatatatattatcaataataaataaagaaaaaaaattggggtaaaaaaatctagttttctctcatccaaatttaattgtacatgttaggttttttttggcaatttagttgtcacaatattttttaattaatgtgcatttttattgagcatttaaattatttttattacattgattttgtgcatttaattattcttttcttctaaggaaagattcattctcagctgatctctttttggtttagcaaacttcttgtaagagaaggaattctcttatgaaaaattgtctaactttggaaaacttgactttccctttttctaatggatgatttcggttttgcctttattagaacaaatcaaacaagctttatttggcaggtttgaagtccaaattcgtaattttagttcaatttgaaaagtttcctttctggtcctgctctgctgttgtaaaacccgattctgatgctgcaaattaggattttttttaagaaagttttgtacagctgggaaatcatttttgtggatgtctctatggttgctatgttctataaataggacctagagagcagccaaacactctttatctcttatagtctcatgttttcatatctttcattatgagaagagcgtttcatttgtaaagacctagagtgttcaactaggttttcttattatgatcgcatactattcatagaatagattgaaaagaagctttgaacaagtgtgggtcttcgggagaagacttttccaagtctcatttcgggagaaagtgagcatatatcttcgggagaagatttatttaagccttactttgggaggaagtaagaacacatcaatagctaaagagagttcactacttggtgtgtttcagagatcagaatagcaaggtgggttacaaagggttgtggcaaatcactagagggaatctaaatttgtttaagtcaattgcttttgtaaactttgatactttactaattgattttattctctgggtgtgcacccgtggactagtagtgtttgaaaaaacactaataccacgtacaattctcttgtgtcaagtttttaaattctgcactatttatttttggtttgtttttacaaaattgtgttctacagtgacagaataaaattatgctgcgacaaactatcacaaccgtgtttttactaaaatttagtattattagtagcatttgcaaaaactcattttttcaattggtatcagagcgggacactaaa

SEQ ID NO: 58998 - DNA, 766 bp, Cannabis sativa
aaacaacaatctatagaatagagaaaattttgcaagaaaataaagctgaaacttcaagccttaatttgactgttttctgaacatattttggaaaaagtcaaaacagagaagttttttatttctttttattctttccaacgcatctagaatcaactcatttggagtttgtatgtgaaagttatgcatattttactgaaagatattgaagctgtcaatttgctttagtagtcgtgaccaccattttccatggtcacgaccctttttcatggtcgcgactaggtgtttcacagagagcccgaaaattaaatatgcatagtggtcacaactaggctttatgtagtcgcgactatgggcaaaacaagggaattttgggcagtatttgactttcaccattcagaggtagcaaccctaatttctatttaaggggatcatgttttagaatgaagggaggcataaattggacccaaaagggaaaaaaggaggtagaggaagcaattgtggagattcggagcggaatcgccaactcgttcttccttaaactcttaatttctgttttagatttgattatggatgttattatggatattatgaactaaactcctatttggggagatggttaatgctgattgattttatgccatgagttaatgttaatttctattccttatttcttgattgtgtatttattcatgtttgtgcttagttccatgtttgagattgatcaccttaggcatgctttatgatctcaatacaaaatttgaaaagt

SEQ ID NO: 58999 - DNA, 1423 bp, Cannabis sativa
  modified_base (423)..(426): a, c, t, g, unknown or other
  modified_base (940)..(941): a, c, t, g, unknown or other
ttttgtgttaaaagttttattttaccgaaattagtttaaatttccaattcaccccccctcttgaaaacatatcttgggctaacatagatatttggggatcacaatcatcatatgtaatataatgacttcttaacatttttattgattattatgaataataaagttaacaacacctcttaaattagccatgaataaagtatgtaagataaaatgaataaatttaaaactattttatggttttaaatgatactaattaaaataaaaaaataaaataaaaatttaaattaatgaaaaaaatcaaaaaataaaagaaaaaattggaaaagaatgacatgcatgtaaaaaaactctaacattctttgaaatatatttgtttttgctaatatatataaaaatagtctcatataaatatatatatatatnnnnatatatatatatatatatctattcaagtcttgtatatacattaagaactaggattgattttgtaatatcaacatcaccatctacacgcaagagttcaacatttccatcttcagttcatcttcacattcattttgagaaatataatacataatagactgataatgtaataaatttcttaatacaataattataacattattataaaaatatgatttattaaaaaaaaaataacaatttaataatattaagatagagagaaaaaatatacttattgtggattgaatatggctaaatacacttattataaaaaagaagaggacccatcaaactccattttagtagaaaaataatgaatcttttatttagatatatataagtggagtaaaataccatgctatatatatgcaaaaatttaagggattgtaacttaatttttatcaatgttagaagttacaaaattataatttaatgcacattacaaactttataattaatattataatatatatatatnnatatatatatatatatgagagttataaaatgaaaagacacactcttttctctttgaattaaatagttagggtttttgttttcaatgttataatattagtaaattgaaaaatatgagagagcaagaaaattagaagaaaattcatatagaatgccatgtcattgtacctagcaagattattatataaaacactaggcaacgataccgcgtctcgcgcggttgtttaaaaatcatttatttatgttgtaaaaaataaattttaaatttaatatattacaagaaaaaaatattaattaattaatatattaatattttatgaaaaaattaaaatttataattttaatatgttaaaatgttaaaatatgtgaaagatttactttattttttaaacaaaattactttaaactaaataaaccacaaaataaataatttcaaattgacaaattttagagagtcaactcatcatctttgtaatttgcattt

SEQ ID NO: 59000 - DNA, 633 bp, Cannabis sativa
  modified_base (607)..(607): a, c, t, g, unknown or other
tatagatgatcaatcaataattacaatattaaataagtttgcatagaattaaagtaagagaagaaaatgaaattgaataactatttcaatccataaaataaattcaagtggttcacatgataatccttaaaaaaaaaactagttcgtacaagtcattctaaacacaacaaagattcaattaaaaacataaaagataaagataaatgagaaagaatattatttggaatcttctaatggtgtattctactcttagccttcctcctatgctcaaaattggtctctaagttcaaatggcaaaagaaacttagctccaactcatttaatagacaaaatttaggaagttttccatttttttcgaaagactcgtggcattggatagagagtcgtgattctcatttttttttcctgctgcaacaaccgatagttttttgccataactctattgatataactcggaattagacgattcaagatgtttaagaaagcttaaagatagatctagaaattttatttagaaagtttttcctagaaatgaatgcatcatttttacgctttaaatttttttatttacaaaggtggtacttggtaatatttttttaatcagttntctatttttaaaattaaaaaagtaaa

SEQ ID NO: 59001 - DNA, 1163 bp, Cannabis sativa
gcaaaagctaccttgagaggttttttttttacctttcatggccgctcaccaccaccaccctccccctccttctcaatgctgcagatgctcttctagcgatggctgtagctctaattgcgactgtaacaccactcacttcaaccaaccccaccattgttaccctccatcgccatgttacatagattgcatccccttcttcaagttattggttcacatgttctatagtctgagtctatagcttctgctcaacagcaacaactctattctcactacccaaaatcacgaaccagaaaatccatcatcatccatcatcagtctcgacacttaaagcagtgactcgtcaggggtcatttactttgggttttttttaatatatatattttgaaacaatacatatatatattatattataataataataaaagacttaaagtaaaaaaattgaacttaaaaaaaaactaaaattcggcttaaatcgatttgatcggtttaattgggcagattgggtctattttcaacccgctcaatgaactgattgggcagttttgaattttttcaggttattttggtttgtattttttatctgtttttcagtttgatttgggcgaattactcgggttgggcggtttataaaaattgatgtacaaccctaataaaaagatcgtattttatgtaaataaaattaaaaaaatcataaaaaatgtttaaaatttcgtgaaactatatttttgtaatttttagttgtttttgggtatttgtgaaataatccctttttaaattgatctcatcttgtgaatctgcaaaggaagcatgggaaatccttcaaactcagtttgaaggtactagtgatataaaaagatcacgttttactaggttgcaaactagatttgatgattgagaatgtcaaaaactgaaattttatctgatttttatgaaagattatctgatattactaatgagttttttgctttggaaaaagataaaaaaatttgtactggttcaaaaaattgttcgtgtacttcctgatagatttgatatgtaaatactagcaatggaagaggcaaaaaatttcggaaaaatgaagtttgaagagctagaacatttgagttaaatcaacaaatcaagaaaaagggtaagttagattctttaaatgagaaaagcaa

SEQ ID NO: 59002 - DNA, 1935 bp, Cannabis sativa
  modified_base (386)..(391): a, c, t, g, unknown or other
  modified_base (471)..(471): a, c, t, g, unknown or other
actcagtaagaaaagcataaaacataaatatataatcgacctatgactaagtgcccatacacctatcaacaattcataaatcatgcaaacatgtataactgagtctcgaacgttcttgaccatagtataattgaccataataccacatgcactcaatactctagtcgtactagtattggtagcatcaatccatactataagtacaactagccataataccacatgcacttagtactctggtgtaatagtgttggtagcactagttcatgctttcaaaagtataaccaaccataatgccacatgcactctgtaatctggcgtactagtgttagtagcattggttcatactttctgaattgccaaacacatacattcacgatatcaannnnnnatcatatatacaccaactatcgttctaacagatatctcatacatctagaaaacataaacataaatatgtacatatgtatntgtgttatactagtcttacctcaattttgatttcaagtgtaccggtcaaccttagtggaaatagctgctggtaatcgaaggcccaaagtcacatttccagaaaaaaaataataagtgttgcactaacactttcggggacttaaattgacaactaaaagtttccctattgatagatattatggaaataacctaagtattgagaaaacactcaatcagggtcctgggaaaagtcttaagatggacccccaaattctgcctaaattggatggcccgaaactccactatcccattttaaaacttgcataactcctgaaattctaagaagaaccttacaaaattttgcatggtatctaaaaacatcacaacgaacatttttcatgaagaaacctcaatcaaattctcaatagatggctcgaaacctccctgtttgagttcggaaatcccataactcatccaatcttgatccaaacattaccaaatttcgtagagaacctaaaaaattataatgaacatatttcatgaagaaaccttaacccagttcgtaacaaaattcatgttatcacaaccaagttaagtttgagttctcaaacttgcataacttttgctacaaccatccaaaacaattcaaaccatttccaaacaatactaaatgaccttaataatcatttcataaccttcctaaacttattcaacatgttctactataaacagccactgaaaactaacaaaaatactagaaaaccaataaatttcaggttaggttttaccttagaagtttggaggagctaggggttgaattccttaatgaattccaataggaagaggcttgaaaattgtggaaaatactgagttttggccctggttcagaagccacaaagtagagggagaaggataaggtgatttggtattttttgactttcatttttgcttttgactttgctttttctttttggttcctttttattttacttttccttttagtttgcttcctaagaagctggtcatcctcaaaaggatgagccacaaccacctatcccttccaaaaagagtgactaagctcttagggtaaaaagactaaaatgccttatttccccataaagttatctcgtaaccctaggggtaaaatggtctaattctattatttcgttaaaccccaatattctaagatatccaataatattgccccgtaaaatacttgatgcaaatttgtatccatgtgattaaaatttccattcaatccatttccactttttaccgggcataaaaatgtaaaaatataaaaatgcacatatagcatgtatatcacacatataattcaataaaatcttcggaattgagaaatagtaatcacaacacatattttcatgaaaatagggtctataaagcataaaatacataaataatcacatagtcatattaattagtgctaaatgtcccacaaatcccaggtctaagtataacggt

SEQ ID NO: 59003 - DNA, 550 bp, Cannabis sativa
gtaacagttttaggtgattccatcgtcctagacttgactttgcacattggggtgcgagatggcaactaggtcatcatgagtactcttgttttatataaatgtgaaattggatgtgtaaaacctatttttgattaggaaaaatctgaaaatgtattaagctttcagttttggaagcctgatttcaatgggtagactcaagtgtcatacattatggaggaattatattcgtaagccattaaaaaaattgaatatgctctcttaaaaagcaattacagtgtagtgtattctgattaaaaataaaataaaattacagtgtagtgtaacaaaaggatcatcttagcggtgggtagtgtttggttggacttggaggtagggctgcacatgggtcgggtggtcgggtttgggttttcgggttttgggtcttgtaaatgcacaactgaacccggtttttgggtgttcaggtgcgtcggtatcgggttgggttttttcgggttgggcgtagtcgggttcgagtcttactgggctgagcccgaatgtgtaatttatgagc

SEQ ID NO: 59004 - DNA, 1719 bp, Cannabis sativa
  modified_base (1675)..(1680): a, c, t, g, unknown or other
taataattaattattctattagtcttaaactagtttataaaatcacacacgtgtcgtccctatagattagggcgttacaacttggtatcagagcaaccatagtttaaaggtctcgaagactggtcaaatatgtacatttgctacgaggacaggtcgattcatagtatagtaagtgtttatattatttgctattaaaatacctgcctaaactattataaagtatgttgaaaaagtagcatagtagtaagtttgataagaatgtgtatggtgtatgcatattaatattggtatccgtctgagctttaaatagttagaagatgtggactaaatgtgtgataagatattttagtgtattgtgacaattaaagtgcactacatttaatgaagaaccccatgttcaataaaaggtctaaacccatagacattaagcttcactttatcagagatgtaattgcaaatggtgaagttcaagtgatgaagattggaacaaaagaaaacccaacagacatgctaaccaagtatgatcctttagcaaagttcagactttgtctgaacttgctaagcatacttgactgttgagttttcccaagaccagaacaactccttctctgacagggtttatacaactcgaatgtaaagaaaaaggtggatgaattgttattattttttggcctcacattatttgaattgtccatattcactgaatcttgcaaaataccaagctcggacatgtcataactgtcataactaacattctgttatgatagttatgacatcaactcactttgtccaagttctataaaagatatcctctccaatcgagctcaacatctagaaacttagtttgtgctattgagagagattcctagaaagaaagagagaaactagaattgagagtgagagagatgtgtgcctcctataattgaagcatagtttcattcgagtgtttatgaactattcttgacagttcttggtgtaacgttctggtatatctatcaataaagattaatgcacaaagggttatttctggctctggagtaggcagaataacaagttgttattcctgttccaaccacgtaaaatctatctcccaatttattgtttttattttgttcaattcattttaattgctatagcatttgtgccacaattctgtgctcattcctatactctatttttgtgtttatcattgtgttattgtgttcttgatcgagttttcttcaacaataataatgttctatttataaaaatacatactataagtttaacactatttaaagatgtgctatagggttatttaatagctatttcaaaatatcacttatagaacaaaaacaaaagacaccttaaataataataataataataataataattgctatagcatttgtacgtaaaatctatctcccatttattgtttttattttgttcaattcattttaattgctatagcatcatgtgccacaattctgtgttcattcctatactctatttttgtgtttatcattatgttcttgatcgagttttcttcaacaataataatgctctatttataaaaatacatactataagtttaacactatttaaagatgtgataaagggttatttaatagctattttaaaatatcacttatagaacaaaaacaaaaggcaccataataataataataataannnnnntaataataataataataaatgcaagtaagtaatatatat

SEQ ID NO: 59005 - DNA, 1081 bp, Cannabis sativa
  modified_base (680)..(681): a, c, t, g, unknown or other
ctccttctttgattgtgttcatcacagtcttccacaaaggcttgagtatcaacttgaatagtgtgagctgataccaaaatcacctttagaacatattttgagagagtttttctttgtgaattttgaaaataaagagaagaagaagaagtgatattagcttttttttttttttaattttcttctccttctttatatagacattcacttagggttaggtttagaatgagatgggctaaaatagaagacttgggcttaaatcaactatagggacgaattatacaatgggccttagagttggttttttactttatttcatttaaatgaaacagtgtgtcttttcatattttgccacttatctcatctaattaatttgaataccaattttattttaataattatcaaataaaataaaacttaaatatatttattaattagatccacaaagagcactaattaacaaataagcccatatttctcttttattctcaaaattacttgaacttagtgaaaattcttaaataaaacatagtatatttttgaattctaattgacttatataatcaattaattgagtctacaatatgatattatctcaaataatgtggggaccatgagcctatgtaatcaagcttctaataagtagatctaaaatttttcgagtaaatttcctaacttattanntcttcctaactccactatagatttagaattgcactcctgatcaatagaacattatatgtaccaaatatagatatgctatggattatctattatttcaatcacaacaatcattgatcctctatagacgatttacattaagtagggataaaattatcattttaacattcaacttatttagtccttaaaacacttagctacttgtaaatgatattttggaaaactaatataattactgaaatgagcactctatcatttatcgcgttaagccaagctctaagaaaactatcatttcacttctaataaacatagaagttataaatgtctatatctataattagcactctcactcaattgcactatcgggttcctaagattaagtaagagtgttaatcatatatat

SEQ ID NO: 59006 - DNA, 929 bp, Cannabis sativa
ggcaggtaaagcttgtaaaattctggtgttgaatctttgattttgttctttttatattcaagcttaaatcaagataaaatcaatctaaatatggaaaagataggtaagacatgaacttggggcttgcaaattagcaagtgaagcaaaaaactttatgtcaaattgtaactgacgcaaatttgttatttgcgtcagttacagtttggcgcatacaagtacgtaaaaacaatttttttttatctttttgtgttgattataaaacaacgcatagttgtaggtaagtgaaaattacaaatttctttacaattttctcgacctacattttcaaattttagaattgttttgtataacaatatttttatgcactaacattaataacatttgtaacataataatgataacatttttcatgtaactaaaaatttgatataactataaagacactaaaactaatataaccaaaaagtaacgatcataaaagttgtatcctttacgtcataataaaaaattgatatgactataaagtatatcaataaaactataagtaacaacattaatataaaatgtgtatattataatgtgtatgaggcaaattagttttttgctttggttatgaaccgaagcaaaagaataattttttttaaaaaaatataaaccttcagaccaccaaaatccttcagaccaccacaacaatccaacaataacaacaacaacaatagatattgccaccacaacaacccatcgtaccaccaaaagcacatcggaccaccaccaatggctacaaaagaaaatcagagagagagagaaagattgaaggagaaagagagagaccagaggaataggagctgggcacgtgagagggggatcgagaaaaaaaaatgaatctcacctttgaaaactccattttctcgagagagagagagagagag

SEQ ID NO: 59007 - DNA, 787 bp, Cannabis sativa
  modified_base (293)..(296): a, c, t, g, unknown or other
gtacatcagagcaagttcctcctccaatttttcttgacgccaatgttcctcatcccgaggtgacccccgctgcttcttcatccagttaggccatcgagactctttcggtcgcagctagggaagttaaatcttaatttgcccaggcatatagggtcgactgttggcgcaaacttcaaactctccttcccccagattaggattttctcaatcagaggagcctaaaggagatgctttcaaggaccttgggaactcactttatggtatgtttgctttgttaatataattatattatnnnnttatacctcttttatactcatctgtttgcaattctccaggcctcttttgcatcttttgcttctaatcgactactctttgagcggctcgagtatttggagggcaagactcacaaattaatatcccaatgcaaggatgtgtgtgagcaacaagagaatgcctaactggagattatctgcctcaagcaagaagccgagaaagcgaaggaagaagtagggaaagtaaagcaggaagccgagaaggcaaaagaggaggccaagaaggccctcaaagtccaagacgatgagtttgaggagaagcttgctgaaaaacttgctgagaaagaaatcgagactgtagaacggtgtgatgaatttggttttcgcgctgtataccaagcttggctttggaaccctaacatggataccagcttcttataggagaaggaagaggaaattttagctctttgcgagaagaccaagaggaaagaagaagacgacaaggtccaggagga

SEQ ID NO: 59008 - DNA, 685 bp, Cannabis sativa
tgggtattttggtcattcctaaaaccttgactattccctacattcccagcgtctaactatattgctccgctactactaaatactaaaatgtgattctattagccaaacgtcgcgtttcaatgttgtcagacataaaacatataaaaacgtaaaatttcatatatggcatatataatacaccctaaatttaaataaatctccataaaacgacaaatcataactaatattctagtttcataattaaaccctaattatctgctaattcccatgttaaaattaagcggtctttacattgcatttggttctaaggccccatggtgtaatcattgggctatctcttatggcattggacaagaaatacacgcacaaaaagatgatctctaccaagtaaggtggcgtttggttagaggtaatgaaatggaaatgaaataattttcatttcattcctttatttggttgtattttaaagtattgaaatgttattttaatagaatgtcctttccatcattttggtagaatgactattccattttgaaatagaaggaaagactatttcaacgtaacatgagaaaaaatttaataatttttttatcaattttgttatacattttaaattttattccatttctattcctattttcattcctatttttattcctacattttcattcctctcaaccaaacg

SEQ ID NO: 59009 - DNA, 808 bp, Cannabis sativa
gtgatgagataatatgtatttataaagttatggaggagactaagctacataatcctagttggactggacctgctcatcaaaggcttcagtcaactaaaaaagtccacccttctacttcacctagactttacacaaggatgctaagtctattaactagtgatcaccaacaatatgggttaacacaatatagaactattcaattaaccaaaatttaatataagctcaaataaaaagtaacaaaaaaaaaaaatactaaagatataaaggatgacactatacacactttcacaataaactaaagcattattgaaaattaattacaaataagaaaatcttagagagaattaataatttgagaatgttggtacatatatatatatacatatatctgagaatgttggtaattatatatatatacatatataattatccacattatatctgagaatgttttaaaaaaatgtaataaaataaattcattttacatttaatttttttgaaagaaaaaaaaatcatttaaggtataaattaaatcaagtacttgttatatatatatttttttctttaaataaaaatttattatattacagatctacatgtaaattattacaactccaaacacaatcaaataacctatcataaaatatacctagatattttatcaaaaagaaaagactatccaacctcgtccatatatataaataaaattttaaaaaatattgtgtttttttttttctgtcaaaattaaaacattgattgacttgagtttttatcaactttataaatatgcatttatatatatatatat

SEQ ID NO: 59010 - DNA, 1575 bp, Cannabis sativa
agtggtcttgtagactctatgactcatttcctcgatcaagcagatggtttcatcaagctcaaagaagccattcaacaggcagatttcgagcctagaccgggcgaaccgcaggctccctcagcaggaacatccgcccaaaacccccagtaccctagtagttgaaatctaggcgacaaaagatccaagagcaacggcagacaaggcaatgggaaaaagggaaagtttgtaggcaaagccgaacagacccctagagataatccttccaagttcactgctttctttatcttaattgatgacctagagacaattgacatggctactcagtcgatagtcctgttcaagcaacctactcccatgaaaaaggacataagcaaacgggacatgtccaaattttactattttcatggagattatggtcatgacactaatgagcgcaacaatctgaagtgggaaattggatccctgataaaaaaaataacttgtatgttaaaaagtatgtccaggccgactagaactaaagggccacccatgcagacaataaccaagacatgttcctacctccaccagtggacgggcatttacaagttatcaccgaaggcccacaaattgctggagattcaggcaaagctcgggagaggtatgcccgaactttacaacacgaacaaaaagaagtggttttggttgtagaggaaaggaagcctaaaatgccacgggtaggggaacaaaacatatagtaaacaaaacagtggcctgaattattatagataatggagccttatcaaatatcttgtttaaaacaccgtacgagaaaatggggctccaactcaaagatctaatcccctacctccagccagtctacggtttctccaacgagagtgttgcacctttagggaaaatttgcctaccctcactattggacaagctccaaaaagcataactgtaaaggcacaattcttggtacttgatattcaattagcctttaacgtcatgttaggacgaccagccttatatgacttaaaagttgttacatcgattttccattcgtgcatcaagttccaaacaaagaatggaatagggtgcctaaagggaaaccaacaagttgcacgagaatgttacaaccttgccctaaccgaggccaaaaaggaagaatccttaggtcagagttcggaccaggggaacagcattgccaaatagggaaccgcataaggcagggacgaggatgtggatccctgacttggggaaccaaacacaaatgttgggccagtgaaagaattagaagagatagaaattaacacaagtgtttcgactaggaaactcaaaatcaaaaaaggtttgttgcttgaagtaaaatcagctttgataaaatttctaagagaaaacctagacatttttcctggtcacatgaggacatggtcaatatcaatccttttataatttcacatgccctaaacattgatccaaactttaagcccattcaacaaaaaagaagattgctggataaagaacgggctcaagcattaaaagaagacgtagaaaagttgtgcaacaacaacttcatcattgaggctttctacc

SEQ ID NO: 59011 - DNA, 1314 bp, Cannabis sativa
atgccacaaataaaacaaaaggtaggacacctctcatatttgaaattaatccaaaaccgattcccgtcttcttttgtgatcttcatcctccttcgtaatggcttatcgatattcaaagtaattctcatcctaagatagtccctccatacgccaatgaagtttttaggatcggattccaagtacgtccccattgtattccccactttgcggatcgttgattccgacatacacccgggttccacatcatgaagttgaacccaaatatcaagcgtattcagagctagaagcttcgggtctccaccaaccttcaatctcttgataatcaattgcattctatcatatgtccaagggctaccattcatcatctaatactttattaaaaacatatactaataataatataaaagtaaatataaaatttaataataaaataataataattaaaaaagtcttttaatgtaaattagcatgctaacttaactttaataataaaatattaaaaatagcataataataaatataaaagtatagtatttattgtgatgcaaattttatatcatgttatattgtgatccaaatttgaaacactttttgttatgtgagatatttgcatcacaatttggcacaccattagagtagaattttgacaaaataagttatattttgtatttgtatttccattggagatgctctaagatagctcactttgttaaaagtgtgccaaattatgatgcaaaatttgaattacaatataactacaaaatttaaattactataaatactatgtttttatattttttattaatatgttcttttaattaaagaacttgcattattgttattaaattttatatttaattttgtattattattattcttattgttttatattttttaataaattattaaatgagcattaaatgatattaagtattgcataagatttacaattatataatagaacacaataataaaagttaatataaaaatattatataactcaatttttaataatctaatagtatgtatcaaatttaacacacaataaatttaatttttttaattataatttcgttattgatcattaatgataaattttaatacacattttttaattacaatattatcaatattaattttttctacatttaatttaatgataatcattaatatattttactttgtcatcataagtgcaaatattgtcgcaaacttttcagtttgtgataaagttagcacaatacttaagccaattttcatgtcataactatttttctgaggttatccgtctccagactgactattattctttat

SEQ ID NO: 59012 - DNA, 1262 bp, Cannabis sativa
cactgatgttggccacgtagacatgacatgttagataggccaaaattgggataacattcgcccccaagtccctatgtagacgtctctatagatagggactttctaccttagccaggagatatgtagccttaactggataaatctttcagcatatattgcctttgaaataactactcttgactgtttgatctcacttgttgcagtaagttaagtacattgctccttagttgaacacttgcatgataagtacaaaggtggtcccacagaagctatataagattatggagggaaacctctcttcactttctacttttcatgctctctctaaaaaaaatcaacttttaaatgttcctcctactctctagaggccaaagccccatattgcttcaactcctgggatttttgcgtcatttttacaatccaagcttcccactctcttcaccaaaggtttcttgtagtgggtaagctttctattcctgctatttacttgatttagttgattttgccatggttgcatgaatattttctttctttgaatgttcttttattcccacattagattgtaatctttttagtattttgatttgaatgatagtcttcagatgtataatgtgtgatttcttgatgaaaaagatctaattttgaccttcgttgttattcttggctctttgagtcacgaagaacacgaagaacgtgtttgagttcttgaaaaacacacgttcagatctgacatgcaccctagatgtccatagaggtcttgttcaagacctggctagaattgggtcttcatcatggggtctagtcggccatagggggtaccccaaaagctggccggcccatgcctagggataaaggccctggccgacccttggttgggtcattggacctagctggccttctcttagcttgggaaccctggctggccaaggccaaagttctaagcaggtagccaattttttgtcctcttttgacctcggcgaagggttcgtgatggccttgtaggcatgtacaactataatctgttatgtcgttcccttgggaactctgcataagacttcatagtaagttcattacagtcaagtgcacaatttaggactcaccatttatctaagtagatacacttgagacagtacttcgttgattacaaaccttgtacaatgttatttctgcaagtacccttaggtacgattggccagaactttttttgtatcttgtagctttgttgggttgctcatcttcccttgtctcttctatgcaggtga

SEQ ID NO: 59013 - DNA, 609 bp, Cannabis sativa
gtggttgtgttgtgatggtagtgatattgataatggatggttttatagaattaacatgttggaatttattttaccaagattttaatttattaataacaaatatatttgtttatattcattataatttaatatcctaaaatatataaaattcataaaacaataattaaacacataaaatgaatagaatcctcacattggttgcagcagaaattaatgactctttccattcaaggagtgttcattaactgaatttggacccaaccgatccaatccaattatttattagattttagattttgttatctgatccaatccaatcgaattgagtcatgtgatctgatccgatcaaattgatgtattgaattggatcagtttcaaccattggatgcattaactggttttctattgaattcgattagatccattcaatattccatttttattagctaccattcaagttgattttattaaaaagaaaactatataaaaaacataatttaaaacctaataatctaacatacataataaacattaatttagtccaacttaattctcatgattctataataaaactaccaaaaactaaaacttattcaatacacattaata

SEQ ID NO: 59014 - DNA, 1016 bp, Cannabis sativa
tgggaagttgtaaaatattaatttgtacaaattagtagaggatataaagtttgatatggggtattttattgagggcaaatagtgaaatttccctaagaaaattcctattgacaccacttatccttttattgtgtatacaatgaaataacgtttcattgtttagtgtcttgtgggttttcaaggagttgttgggttgcagttgggttgaatttggtaggccgtgagtttcattctttttctggctaggtgcggtaatgagcatggtagatgaggataagttggggagagttgtgatactttgttgggtcatttggaaatctcgtaatgatatagtgtggaatcaaaaaagacggcgaccagaggatgtggtgttgttttcttcatgaactcttaatcaatggagtagtgctcaaggtgtagggaatatccattcacttaacacgttactatcgtatgatgggacatagagctggactaaacttgtggtgaatacaatgaagattattgtaaatgcgactggctatttttgagaaagatagacagttttgttctgcttttgtggttcaaaatggtggagggatttgctagtagctgctgtaaggggttgtgtctcctttagcagaagcgttggtggttaagaatgttcttagttggttgaaatctctaaattcttttagagtagagattgaatcaaatagactaattattattcaagctattcgtagtttttttagaatgtttttttggttttagtttagtggctgaacattgtaaaggttcattgcgatttttaagtattgttgctttatgttttgttaaatggttaactaatcttgctggacatttttttgcgagacagtctcgatattatgttggttgtatgtttatgagaaatagagagaaaaagcagaggaaaatcagagcttattattgatatgtttgaactgattttacagaatggaaaagagggctttatatagccaaatacaattaagaaatggttagttgaaactaac

SEQ ID NO: 59015 - DNA, 684 bp, Cannabis sativa
gtacaccgaactcacaaactcttaagaacgtttatattttgccacttggcagaatatgcattactggaagcctccccctttgtataaggatagctcctagagggaccccaacaaaaggtgtgactatcacaatgatattggtcataccacaaacgaatgcaaaaatctaaaagacgaaattgaaagcttaattcgattgggccacttgtatgagtggataaaaaataggctgccacatttgaatccagctcaaaccgaaggcccagtgcctcagggaggaaacgggattacgcctgagggttaggcacctcccggaagagtgcccattcagtagacgcccggactaccacctcggcctaatagaagagtcgccatgatctccggaggtcctcatattggaggaaccaccaggaatgagctaaagtgcaaagctggggccctaaaacatgacgaggaggtatgggaagttactcaacttccagcgcaaaggcccaggctcatggatctacccatcaccttcacggaggaagatgcgaggacagtgcatttcccgcatcatgaccccctggtcatagagactcccattgtcaataaggttgttgtcagggtactggtggataatggaagctccataaacttgctattcaggagtcctcttgtcccctcccccacttttactcggcc

SEQ ID NO: 59016 - DNA, 837 bp, Cannabis sativa
tataatcaccacaaccactacctctaccttcgatttaccctaaaaaatgaagaaaaatatgttcttttcaggtgtatagttttaggtatgaaaaatagaagatttagaaacaaaaatgagctaaaatggtgaaaaaatggtgaaatggggtgatttttcgtggtggttggcagatggggtttgggatttttcaggtatatagtaattcagtttcttaatttatttctttactttttttgggaaagcaaactgatgtaattatttcttataaatagtagagtcattctactattcagggatccaagatcattcattccatagagcacttaagatactaccattgtaagagctttcaaggaagatcaagaatttcttgaatcttttctcacaagtcaatacaagaaaaagggtagtatgctattactaccatcacggggtcaaacttctacaacaatttctatgttctatttgcttaatcatcattattaaatgtttctaatcgctttaattcactcattattgctggctaaaagcgaggtcaacattttggtactttcattgagagcaaaagaacattattgttgttctgaatcttttcaagacacacaaaagatggttgtataaacacgaaggggtaattccaacgacacgactaatctgatggtcacatatcctaatgtgtaaactcctacaaattgacgagatctagtgaggacggatcctgatccaaccatccctcaacctccaataggtccccaatcagtaggacaaatattgacaaccgctctggctaattcactttgatcatgtaagaaacttttgggttttgtgccctaa

SEQ ID NO: 59017 - DNA, 638 bp, Cannabis sativa
aaaaggagggaggcacttgtaacttgacttgtgggctaaagaaatttagtccttattttgtttcataagtatcaacatttgctctaattggtttattatgatgagtttctttttaaaatttgatatttattcattgtattttgtttatcatgaatgattttttctatctcatttggtctatttttggaaagaatcttggtttattcttgtttcgcttttaaaaaaatatataataaaaagagtgggacggttttctctttgttagagggcatgtcaatttattttttgtttactgttcaaattggtttcctttttgctcctcatcacatctttatttaaaccaattcttttgtcatttaatctcaccatcttctcttcgacccaatccctcttctcattggtatcttgtctctttgtctttctttttctttctcaaaaattcatggctaagacaaaaaacttagggcatccaagcaagatggttgaaacagaaactgctccctcaaatgcttcacctgtgccttcaaaatcgcctcctactgttgcaactgcttcaactccaagtgattcatcacctcctcggtgtgaatcaaagaatgtggctgtctagaaaacttcttcttccattcccacttcca

SEQ ID NO: 59018 - DNA, 790 bp, Cannabis sativa
gaaaccttctgccatagaaagggattccatggtctcccttctttcgtgtaatgaagctctgagaagttgcagagattgaatgtctcagtggaatggactccatagctcaaacaaacaaaccgaattcccatgttttttttttaattaaaaaacaaaaataatataataaattaaaaaatagcgttttttaaattatgaatagaaaaatgttcaacaaagcgtctgtagtccaacggttaggataattgccttccaagcaatagacccgggttcgactcccggcagacgcattttcacgttttaataatttacttttttgttttatttattttttttccttaaaatactaattgatttttttattttttctttaaagaagtaaacaaattcattaaaaataatgttatacatgtcaaacaaataatatagatgatcacaataatactatacaatttataaaaaatgtgaatagtcatctaatcaaacatgttttaactgtatataaacaaattatacattagtaaaattataaataaaaataataaataaatattgtcacaaatttttatcaaaatgccaatcaaataattcttcgttcatatcataaaaattgtgactaatttcactacaaatttcatcactctatataataagttgttatcagggttaattttgaattttagtgggtataagaaaaaaaatatatagtatttttaaaaggaaaaaatatttttttgggtgagcctaataaacagaggcctaactcgtctatgttcaaacttaaatgtga

SEQ ID NO: 59019 - DNA, 3025 bp, Cannabis sativa
taggtttgttaaaaaagttttaaacaaacaatttaaataattaaacaaaacatgtaacaatatgggaagtttagatatttattaattatataattaaattatcatttaaataaccaacttatttagaaaaattaaggttgttgaaataatcttaaatatcattttcaaaatttcaaattcaaactaattttaaaatatttaggtttatttaatttattttatcaagttaaattaaatatctaataagataaatgatatgaaataaccaactagatattttggatatcattttttgaacttataatttaataaaattaaaataatcaaaataaaccaattttaaaatagatatggttaagcaattattattttaagaataaaataataaacaaatgataattttaaaattgggtaactacttaatggttatttttttactgtaaccatgatggttacatttgttttaacctataatagcaggttaccaataggtaaaatttccttttttagaattacattagttataattaattattttcttaaaataattaattttaatttaaatattaaagaaaaatcttttttaggaattaatatttataaatagtttaatttttatgtttaaatcccaattataatttttttaatagtgaaaccatttaatgataatatttacaataaaactttaatttttttaacaaatattagacttccaccccttctaagataaatttttgaataataaattagttgtaaaatgacatttaactttttttttccagaaccgcttgatccatctttctcccttataaaaaaaatctctaatttcaaaaattagggtttcaatttgtcccaacctaacatcatagaattttctacattgatgcaatctcctacatctttaccacaaacccattcctccaatcgaccaaatatatcatgttttttccctttccctctggttctcagtcgtcttgtcgcatggccataccaatgaagttgtatgtcgttcataaatcaattgacaataacaacaaaacgttatttttttcttatctactttcttcaaattcttttccacatactttagttttttcattcacatgatgtcatttttaggtcaactttttttaaatgacatttttagcataatcattttgtcattcatatataatacttgtattctcttttttcgtttttgcttatgtgaaaatttcatacaaaaaaaaaaaaactaaaacacaaaattcatgatggagagtttggagacaagaggctccatcctgaatcaatattattttttggtgatcgtttcactatgtaactttgtcctgcttgtttcaaatattattttgaacatgatgaggaaggataatctggaataaaaattaacttatttttaattttataattggtattagattttaaactatttgttaatttaatttttaaattaaaaaaataactaaatgacttgaattaatttggaactgacatactaattttgcacttgtattgaaaataagattgagtgtagaattacctctaattagaggttattcttactattttttagtaattaaagttatatgtgtaataatttaaattataaaaagttttgttacaattatttcaataagtgcaataaaaaaatttctaagagatccttacttaataacaaaatgcaataagttaattaataatttttagtaatttataactaattttaattaatattttataagaaaataaaatatcaagttatgatcaggttacaagttaaatattatttatttatttttaatttttaaattaatcacaaccatttaatagtaatctaccggctaaaaataaatgtaactttggtggttacatatttaatgttaccattgaaactccctccttttcaaattatatgccaaaatatctaacattaagcattttttaaatttctacaaaaatatctatattatttgaatatttataatattatttataaatttttaataagtaaaatgatataatatagccataaatatcatttttctaacttataatttttaaataataaaatattttacaaaataaccaatttaagaatttgaaaatattgtggttaggatatctataaaaatatctaggtcaattttcaaatttagtattatttaatttatcatataaaataattttaatataacattccaaagtaaaaggttaatgtcatctttcaatttaaaatatacccaatattaaaatatctaaccttataattatgtaatctgtacatttaaagaaattaacaaaatttttaaatctaaccataatttcaaatataaaaaccaatttttaaattcaaatttcaaaatattagaaattaataataatctattaaaaaattaaatattattcatttaaaaatttgatatttaagtttaaatattaaaaatttgagtcagcgaataacgacaacacatcctagtttcctatttgtcacattgcaattatagaattactttagtttcctatttcattcattataaacaataggaaaaccatccctcatgtattaagttcttataaatagtgacctagcctcattatgagagagatcgagagaattgctacaaaaatatactctagaaagaaaagagtgatctaagagagtaagttactcaaagatcaattataagagctttcaagagaaagaacattttgttccttctctcaagtcaataaaatacatggggagtaggctactgctacacttacggggccgaacctctttaaaatctagcgttcgctttatattacaattttttctttcttttatttatcttacttaatcgctttatttttgactccctcccgttggctagaagcgaggtcaacatttttgctgctttcattgagagaaaaaatagaagcatttgtcttatgttttgataggtaaacaggacggttgtacaaactcgtaggggaggctttgccgatcaagatgactgagcaggttgatggggtagatgtc

SEQ ID NO: 59020 - DNA, 550 bp, Cannabis sativa
cccgaagcactaatgtacaggattagcaagaaatgcaggaattggaaaggaaacaaaatgtttggcttgataaagaggagaagttttggaagcaatggagtagagcgctatggctgaaagaaggggacaagaatacaaagtttttcaacaggaaggaaagtaataggaaagcaaagaacaccattcacagattgatagatgaccgatttcaatggatcacgggaaatcgaaacatgggtcgggtggcgtgtgactatttccaacaattattcacttccaatccagccactatggagcagttgcaagagttccaaagaattatcccacaccgaatatcctgagctacaaatgactacttgttggaacctttcaccgaggaggaggtgttcaaggcaatgcgtgatatccatccccaaaaagctcctggcggcgacggattacctgggctttttttacagaaaatattgttcattgattggtcccgaggtctccaaagtgtgcttaggtattctcaatgaagggatgcaagtagaagacattaatgacacac

SEQ ID NO: 59021 - DNA, 829 bp, Cannabis sativa
tataaatcatagtagactcatttttttagctctcaaatttagttcaaaatgtaccccactcattagagatggtataatatcacaagtcatataagaaatttaaaagcccttacacgatggcactaactcattgacgttctaaatataaaaatgataaacaaggtgatcatcatcatcattgatcaaagagatcacaagactaccatttaattggcaaaataataaaggatttttttagacgataagaaggaatcctcatatttctatgttatagtagttatatatataattgtgtttctatagttatatatataaatatttatgtaaattaatatcaatatgtaatatcatgtttaatagtaatatatagattttaaatgtctttaaaatgtgatattattagcgaagaacgtctttttgtgaaaaaaattgtagtatgtatatataaatgaaaaaaaacttaaagtgtcgtaaaaatgattaaaagaattttcatatacgtattaatgaaaacatcccaaaaaaaatcaaagcagccattttttttcgacgaagctttttgaaacaaaaattcaacaacaatttaatgaaaaattcacaaaaaaactcacctattcgaatattcaggttgacaaaaacaagaaacaaacatcaacagaggtcaattcatcaacaaaaaattctcaaagaacaaatatgcttacaaacaggtatcaaacatttgaaacacaaatctcagattgaactgagtaagatctacactctttattcaaaattctcatttgaatgttgtagatcatacatttcacaccctaactagcataggcgt

SEQ ID NO: 59022 - DNA, 2234 bp, Cannabis sativa
  modified_base (59)..(72): a, c, t, g, unknown or other
gtactcaactatttatctctattatgccaagcttgaaagaaatcatcatttcacttctnnnnnnnnnnnnnngctatagattttgtatctatgattagcactttcactcaattaatctaccatgtccttaatctgtatgtcacgagaagatccatcggtcaaatttaacgaaaaaattgaagaacataaataatacaattgaactagaacctaaccattgcaggattgagatcatttgacctaagatcaacttggtgatattgaattagatagatattagggtaaatttattatatcttatccaagtttaatatcaattccttcctatgcatactccatacatccaatccaagcttactttaccaatgccttagaaaggacatagcacttatctaaggtgcaagtaaactacattgtagattatcatatcagttaaatcctgtgtactgataatctaggaatataaatttaatcatataattttgattactttctactgtgttgacatcagattaaataataattttaatgtgataaggatttggatgaatttataaatcaaactacattgtagattatccaagcttactttaccaatgccctggaaaggacataacacttatctaaggtgcaagtaaactacattgtagattatcatatcagttaaatcctgtgtactgataaatcataagaattcatgtaatcacataattttgattaatttctactttgttgatataagaataaacaagaatttcaatgtgaaaaggatttggatgaatgaatttataaattaaacaaatgatcatgaaataaacatgtgaaccaagtaatacattaaacaagtaatgaaattaaatctgtttctttattgataaatgaatgtaaaagattatattgaaatagacttttatttagggcacaaaacctaacaaactcccacttgcactaacaaaaaataatcagtacatttcaattaatcctagattctctctatgcttttcaaatgcaatgactgtcaaaattttggtgaatgaatcaattaagttgtctttagtatcaaggttttccaccagtacgtctcctcttgccacatattctctgatgatgtggtatttcctcttaatgtgtttactcctcttgtggcttcgagactctttactgttggctatagcaccagtgttatcacaaagtaaaactagtggattttccatttcaggaacaacaccaagttctctgaaaaactttctaagccagatcagttccttagcagcctcaacgatagctatgtgttcgacctccatggtagagtcaaatattgcagattgcttgacgcttttccaaataactacttcaccccaagagtaaataccatcccagatgtagccttcctgtcatcaagacaagcctggaaatctgagtcagtatagcctacaagatttaaagcaccacccttgtagactaacacatgatgctttgtactttttaaatattttagaatatgcttaactgcagtccaatgttcctctcctaggttcgtctgatacctgctcacaattcctaattcctactacatagcaaatgtctggtctagtgcatagcatagcatacgtttccaactgctgaagcataaagaacattactcatgtcttctatctcttggggatcagtgggacactattctttagatggacacacaccaggcctagaaggcatatctgcccctttggtgttgctcattgagaatcgctttagcaccttgtcaatataagctgctagcgagagagcaagtaatatgttcctccgatttataatgatttgaataccaagaacataactagcttcaccaaaatctttcatctcaaattgagtgttaagccatagattaatgctgaacattaaaaacctacagggttgttgcagccactgatacttcctgagtggaagtggaaagatgtcacaatagattttgtggttgggttacctagaaccatggggatgtatgattctatttgggttgtggtagattgatttactaagtctgcacattttctaccgatgaaaacaatctttatagtagatcagtatgcatagttatacgtgaaagaaacagtgaggttacatggggctcgaaagtccattatatcagatagagatctgaagtttacataaaagtttggcaaagtcttcagcgatccatgggtaccaagctaaagtttagtacaactttccat

SEQ ID NO: 59023 - DNA, 1296 bp, Cannabis sativa
ctactttgtttttcttagagacaacttgatcagctagtctgtcaagaaacaacatgtagttgcacgttctagcactgaaagtgagttcagagcactcgcaaatactgctgttgaactcaaataggttaggtctctattgtaggaacttcaagtctcaattgattaagttcctgtcatttgggttgacaatcagagtgcctctgcacttgctacaaatccagtttttcacgctcgatcaaaatacatcgagatagatcttccctttgtcagggatcaaattctggataaacaactctccatttgatatttcccttcaatagataaagatgcagatgtgctaactaaagccctatcagctgaacaatttctatacttaaagtccaaggtaaaaatggttccaacaccattttgtttgagggggatgttaatatagttgaataggttctattcagccagttaatacagttagttttgtagctattttttcaactatattctggcttttatttctttggaactaattatgttacttgtgtccttgttgtatataaatatgtttgttcattcattaataaagtagttctggtttttctccttgcttatgctttgtttttctttctctcctacctttgctctgctctttcttaaacttcatattttgaggttctacttaaggtaatgcctccaacctttcttgagttcccagatgaaatgatcgtatctttcacctcgaatttggtcgagatagaaatgatgttgcaccttgggctctggggaaagtgtatgtttgctacttatttcccaatcttcgaagctagaatttagaagatcgtcactagatgaagatgggctagcacagggacaagggtgatccccgtataaaagttggagcaaatcctgtttgatatgatgtttgtctccccaaaactcaccaaggttcatctacaaaaggtaggagacaagaaagtgagagttggtcggagtaacgaatgaaaaacaggttgtataaaccgactaggttcgactgagaaatcaaaagcaaaggtttcacccagaaatagaattttcaatcccataagttcaaaacttcgaattggaatctggttttcattaaaactctatggacgagtggaaatgaacgtcgtaaggttaaactcaaagcgcagtcagataatcagataaacataaatgacattttcaagtcctaaacctaggtattccatggttaacctagaacagttcaagagcaggcgagattcatagcaaaaaatatagaaatcaggcatgcatttcatt

SEQ ID NO: 59024 - DNA, 1312 bp, Cannabis sativa
  modified_base (51)..(67): a, c, t, g, unknown or other
aaacaagtcaaattgttttcaaaaaacaattttttgtttttaaaaacaaannnnnnnnnnnnnnnnntgatgccaaacatgcacttagtttgtggattctcgtcgtgatttcccattgattgggacgtgagcgtaatcctctgtttttacgtactaatctatgctaatatgttacttgttaaatattggaactacgaatagcgtgtgtactgtgtatgcatgtcaattctttgggcttgttagttagtccttgatattattgagggaatctattatttataaaaacatcgtttaatcgaattatttattaaaaccagaaaagaaatatcttggtgacaaatcattataacattttctttgagaacaaatagttttgtaataattagtaacacataaactcttcttcaacctttaacatgcaatacagggccagaaatcaagtgagcctggaaaacagtattcatattcatatgccttttgtcctatgctacgccttaatattatagaaaataatataaaatatattataatattggccaagaaatgcaattagcgggaaaagaaaaaaaaatactcatgagtcatgaactggcacaaatattatacttcaagtgattcaacaaccaagaaattttcgttagcaagcttattgattcaaccaaatattgtacttgacttttatttcttaagcagaaccatggacagcctcctaaatttccaagaaagaagtgactgtcttgaagccatgattctctgggagaggtccattccctggtcggatagaaattatcacctccaatcctgaaacaagaggattattactattattatattttttaagaatatcaacacgaaatagaccagtgttttcatagcagccaatttctactactaagaaatgaagaataaaccatactggcttctctaaacattatggaacataattctcgaaaacatgtctttggaagatatcattcttccgtaagagtcatttatttatttattttgctcttaagagaaaagaaatagtagatcattcttccctaagttcatattctcatactaataaatacagaaaccgaggttcaagtagggaaaaactacccctattctccgtagttcagtctatcaaccgtcaagtagaaaagggggaaaaagaagtagaaattcattacctgcagcctttgctgccactgcttcttgtaagacgtctgttacgaataaaatctctgatggcttatcgacccctagagattgtgtaatttcaacataacttcgggtctctcttttgttcctgagagagcagaagggc

SEQ ID NO: 59025 - DNA, 873 bp, Cannabis sativa
taaacacataagagtttagaaaacgttacattgatcgcaacagaatataatgactccttccgttcaagatctatagtcctttattccattatgtagcagagcattatcaagatctgaacttgcatctctttctctccttcgagtttggttactaccgtcttgctcactatgattgagtacttgatttgctatgtgtgggcatgacactctttcactcaaggttcaaatatggaagaacaatgaacgaggctgaaatcactatggaaaggactctctcatcaaggttgaaggcaatagtcaaattatcaaaattggatgagtgagaccatcatgttccttttatagtgtttcaactagggcttagggctggattatatggattaaaaaagaataaaatattaagcaaaaatacacactagggctggccactataggaccaatctctagttataatttttcaactttttcaactacttattcttttttcaataataccatattttccaattcaatcttgtaaatgccaaaactatttatttcataattataattaattactaaataaaattgtcatttatattattttttaattagaccatacaaagaatcttaattaacaaatttaccccaaatcctcttgtcttcacaataaagccattggttagtgaaaattcctaaataagacatagtctaattgtagaattaataattgattaattaaaatcaattaattgagtctgcaagcagtattatctaaaccagtgaggggaccatgggcctatataatgctttcaataagtagatctaaaattcaaaacgtaaattctctaacttattaattccggcttgcaccactatagatttagaattgaa

SEQ ID NO: 59026 - DNA, 2132 bp, Cannabis sativa
  modified_base (2083)..(2106): a, c, t, g, unknown or other
gaaaatttgaaaagtgccattggcacattatcattctagtatatattttgacgcaccttcatgaaaattgcatctgcctcaggaatcgacttgaacatgtcaccgccaacgtgaataatccctgaaaattaaaacatactaaataatcaataataataaatattgaatttttgttttagaaaattataaacattattaaattatttatttatttatttagacatctctactgaaattgctataaattattcatgtcacatattcaatttgaacattactataagacactcatagtacatagagaagtgttattatataattagttaccactttcttataatatttacatgatgaacctttatcatttctttatttatttaggttcaatattcaataaaagtaagagtccctattgaacaacatctataacagcatttttttcattattattattttgttactttacataaaaaaatattaagttgatgaaaagtaaaataaataaatatttttttaatagtttgagtacttttatcacctgtgcaccaccaacggagatagagatgctcttatatataacctcgatttatttatatagattggtaataaatgttaaaatatgattagtttcttcatactctaaatgctaaagtttttaccaccattattattaatggtttttaggtcaatgtatttatttttaataacattaatttgttattataagtaaatacctcaataattaatatggaactatagtttttatttgtttacatatatgacataaaacattcatgctgtttagagtatttttaataaagatgcaaatattagtgatttattactaaaatataaaataaaatgtaaaaaatttactttagtgtgatgtgctaaaaatttatcaaaatttgtcacacagtaaaattttatattttcttcggatcgcaatgaatacattacttttatatttacttagttattatgaagaggtttgtataatataaagggttaatgtatatgaagataatgaaatattatgatataatattatggtattcagccattcaaggtagagagaaaagtaaccttttgctttaatgataaaattcagctcaaaagcatgctgaggtataggccatccatttatagaaatgttcagagtacaaagaagaaagaagaggacacttgtcactctattacagaccaatggaccacaaggataacagaaaagttcactgaggacacgattacatattgatgggaccatacaatacaatagcagagtaattaaacaataacagagtaattaacaacaaagaggatgattactgattaaccagtttcttaacaccacccctcaagcgagagggtgatagagttacaccaagcttgtctataaggaactggaaccttgaatgagacaatcctttagtaaagcaatctgcaatttggtctgatgatggcacgtactgaatgtttagctttttctgtaggactctatctcgaacaaaatggaggtcaaattcaacatgctttgtttgagcatggtaaactgggtttgttgcaagagcacttgaagtcatattatcacaccataccactgaagatgtaggcagaggaaacttaatctcattgagcaaagactcaatccaaataatctcagctgtaacatgtgcaagcgccctgtactcggactcagtgcttcaccttgagacaacagattgttttttagatgaccaggacacaagtgtgtctccaaggtacacgaagtatcctcctactgacttcctgtcatctggacaacatgcccagtcagcatcggagtacccagttatattcaggttgttgctatgttgtatgtgtaggccatgatgttgtgtccctttcagataccttaggatcctctttgcagcattgtagtgtgttgttgtgggacacttcaagaactggcttagcttatttacagcataagctatatctagtctggtgtggacaaggtactgcagccctccaattagacttctgtagtgagctggattttccagagcagtacctgttggaatttattttactaggatcttannnnnnnnnnnnnnnnnnnnnnnnaacatcctaaatatgaactttttaaa

SEQ ID NO: 59027 - DNA, 1335 bp, Cannabis sativa
tcattccaagcccgaggggcttgttttaacccataaatggccttgtgtagcttgcatacatgatgaggttggttgggatcaacaaacccgggaggttgttgcatatagaccgtctcttcaagagtgccatttaaaaaggcatttgagacatcaagttgtttcacatcccagttgcaagagacagcaagagtcaaaactatacgaacagtagcaggccgaactacaggactgaaggtttcttgaaagtcaatcccaggtgtttgatgataacccttggccaccaacctcgatttgcatctgtccaaactaccatcagcatttaatttgaccctgtgaacccatttgtttcccactaatgtcatgtgaggttgatatggcacaagtgtccaagtgccattctttttgagtgcatagaactcagctgtcatggaagcattccactttgggtcggctaaggcttgttttagtgttttgggttcagttggaaggagagattcaggtagagggtattttgtggctagataggctttgggtttataaattccatctttagatcttgttatcatggagtgagtgttttgggatgaggatgtatgagtggtggtagagggtaaagatggagatgaggacaagaggggctgtatatctggggcagtaattgggtgagtgacagcagtgagttcagcagggtgtatggccgtggtagtggctggtgcagcaggaattgttgctggtgcaactgcagcagctggcaagggagcaacattatcaattgctgctgcggtgtggacaggtgtagaatgagagcagctggcgtaatttcctgaagacacaggaggtataacctcagttgcaccagatggattgtgattagcattgacaaatagaggaggtgtctgaaatatagtacaaggaaaaatagtaggaacaagtgatgatacctgattggtggcaggtgttgattgagcaggaaattcattctcattgaacactacattgcgtgtaatatacacacggccagatgaactttcacacatatatcctttgtggtgcagtgagtagccaataaaaatacacttctctgatttgacagtcatcttataggtgtggtaaggcctcaagtagggaaagcatgtacatccaaaggtctttagaaaagcatagtcgggctttctttgaaaaagacactgatatggagttaaatcattcaagactggggttggtagccgatttataacataggtagcatgttgaaaagcatgccaccaataggatagatcaagaccagattgagccaaaagtgtcatgcccgtttcattgatatgtctatgtttg

SEQ ID NO: 59028 - DNA, 886 bp, Cannabis sativa
aaaaaaagactattgtttcttaatctccattagtcatctcttttcatctctatttacatacaaatcaaaccaatatacatatatctcagtatatatgtattcatctcagatgaagaaaaaaaataaaatgatcattacaatatatatttagatttacactagtatatatttgtatccattattaaaataaataaactagtgtatatatacatatatatttatgtgtatgtgtctatgtgaataaaaattatttttcttcgtgtctttcatcataaaacagataaaatgcactaatttaatatattactaaaaaggattttaacaagtttaaaaataagatgtttgtatttttttttttaatattattagaaaattaatatatattatatattataattttttaaaatatatataattaattgtaaattggattgaatcgcttactttttaaagtcaaacaacatctaatccgtacaagtacaaattttaaatttttcaatccgtgcaagtgtaaatatccacattttgcatattagattgaattagatcatgcacattagattagatcagatactttgtgaacagccctactagttttctccccggtcccctttacttcgaaaaagatgtacaagatactattagacacctaacttgtaagggtaacaaccgaattgcaagacctttgccaacatagtaataatacagtaaatttttcaaaagaaggaatgttttgaaaatcaaaaagttcaaagaaagcaatgtcagattctggagacaagcctacaagacaaggcttttgttttcatacaacaacacacaaagatgcatgatttggttttagatagttttaccacaaacaaacaagccattaaaaattgaattt

SEQ ID NO: 59029 - DNA, 639 bp, Cannabis sativa
  modified_base (227)..(252): a, c, t, g, unknown or other
  modified_base (375)..(385): a, c, t, g, unknown or other
  modified_base (466)..(469): a, c, t, g, unknown or other
tttccaggtcattatcaaagtatgctatcggattggaccgatattgaagttagataagatatcataaatttaccgttatatctatctaagtcaatataagttagttgatcttaggtcaatagatcttaatcatgacatggttatgtttgatttcaacagtattatttataatctgagagttgttcgttgaagctgactaatgaatcggcccaatacttacatcttgnnnnnnnnnnnnnnnnnnnnnnnnnnagcgctaatcatagatatagaatatatagcttccatgagtatttagaagcgaaatgatactttcctttgagcttgggttaatagagataaataattgaggcctcatttcagtaattatattannnnnnnnnnntatcatttataggtagctaagtatattaaagataaaatacatgaaaaggtagaacggtaattttgtccttattcgatgtannnnatctatagaggatccttgactatttggattgaaataatgggtaattaaaatcgcatctatttttagtaatcgtgtgttctatgtaattaagagttcagtttcaaactatagtggcgcaaggaggaattaataagttaagaaatttgcttagtaaattttgaatctactta

SEQ ID NO: 59030 - DNA, 1187 bp, Cannabis sativa
attttgatttgtgtttgattaattaagatgttaactgtaatcatgtttgtttaccttaaaattagatgagttttatagtttgggctgatttcaaacataattgcatggtcattcccaagaaatttgtaaaagatttcaaaaaaagaatgaccaaggacatcattatcccgacattagaggaaaatgatttgcaacggttggcggacgtccctaaaagcatcctaaaattggcaaaaatgactggttgaaatttgataaaagtcgtctaactcttgaattttaggtattaattatatttgtactaagataaacttttaaatataagtactgataggtaacatatttttttttttttttttgcatggtaggaactgaataaaatacaaagggaacaatcggtgaaaaaccaatccacgcatcaaagtggtcggagcagaatggtgtgcataagagaagatgtggtaagtaattaatataaagaatttctagcaatgtggatcaaaatatattaatagtactcatttaatatttttttaaacaatgaaaaaggaccttaaggtttaggatctcccacgccagcgtgtttggatcaaatctcagactaagaaaataaaacttgtcactgattacgacaagaaaattgctgataagatagtaagtatatactaatcaatgattaggtactaatgagttaatatagataaatcatatactaattgcttgaatatgtgtactaggctcaactagaggagcaagttcaggtccatggctaaaataatattctaatacaagcgctcaggacaccagagcttcctggatgtgtaagggctattgggtatgttagtacttaaaaaatattatttcattcgttagacaaaataaatattccttaactttatttattaagttgtaggttccttgccaaggcgtgtgaactgtttgacaggaaaaaaaggaaagtttctgatgttgtcgctcagaaatagagggagaatgagaaattaaaagcagagttctaatcccttaaacagaagaaaatattgtcaaacaagagcagaatgaggatgaagatgatgaagaagtacaagtaactcatcaggcgtatgttctgcaagaatatgcttaggaggatgaggttctacaaaattctgaaggaggcaaaacagatcatatcttttgagcaacca

SEQ ID NO: 59031 - DNA, 1648 bp, Cannabis sativa
tttaatttttatctttatttttataatattttttaagatatacttacttttatagatgatgtcctcatatatcccttatgttaatgctagacttaagtgaagaacgagcgtatattaggcaattcactcaaaaaaaaaaaataagtatattttaataaaatataatatgaggatatttttattaatagatataaaaaaagaggatttctcaactcaacttcaatttcttgagtaaactgcattgtatatttattttacattatttattttaattattacctttattttcatattctttaatgttcccattataccccttaggttaatgtaaaatatgtgatagacttaagtagagagtgagggtatattgggcaattcactcaaaatattaggtatattttaatgaaatataatataaaggtatttttgattaatagataaaaacaaaaaatatatattcctcaacttatcctcaatttttttaagaattatttcataaaataaaatatacaaaggcaaaaaattaagtaaaaaaaaagttttacaaaaatatttaattttaagtaaagatttacatatttatattgtcacatggcaaaaattacatttttactgccctagtcttttttcttttcttctatactgtaaacaccgaaaataaaaaatgaagcctccatctttcacactcacggacagaccaccacagcaacactagaacagtcataaaataaccattaattctaacgagataaaacacaaacattaaaactattaatattggggttgtcgtgatttttttaatattatttttgggttgttgcactgttgtttcgtatgtttaataaatgttggtttcaaattacacaggttaacccaactactgaatatttatttaatgtagtcagaatgaaagaatcatagacattaatagtcttacctcctattgaaagggtgaaatttgaaagccaaaaaaaaaaagatggaagttggttgggaaaaaaaacaacataacaaatgcagcaaaatgtggggagctggggcacaataaaaaaacatacacgataaggtatcaaaaatgaaaagaagtagaacatatattggagcataggatactgaagaaaataacttccatataaattttattataagttgaagaaaatgataagttgaagaaaaatatgataaagaaataaaagaaaacaaccttaaaataataataaaataaaaatgataagttgaagaaagatggtggactttgaagtacgatagagatggagttaacactttgagaccaaagaaactgaagaacatgaacttagtgggagtttctgaaagatttatataagaagcttatcatagagcaagctctccatctctctcacacacacaattacactcttatctttcctatttcttctcctccttcacatactctttttttatttgttgcctactacaaaaagagagggttaacttttatttgggtaatgttgtagacttagaaaaaaaaataaaaaaaaaataaaaagaaagaagaagacgaaatgggagataaagctcaaatacaatgaaaaataaataatgtgtttagtggtttgctcaataggaatatacatatacgagtgcactcttaatgagtattacccat

SEQ ID NO: 59032 - DNA, 975 bp, Cannabis sativa
gggcataaaacccaacaatggccacccttttcttggttgtggatccgcccctgatcatgttcccagccatccacattattagattctcaaaacaggagttgtaagaattatcttctgagaaactctaacgagtgaatcaaagaaactaataacatgaacatgagttcatgataactctagatttaggccgatctactattgattattattatgatatgaattaggtctttatgacaaaagacatattaataagacacatttattcatattggtccttgtcatatataatctctattatatacagtacatttactttgatgtcatactacatctataattcgaaccaagattatttacactgtagaatgggcatcagtaaactgtactagcaactgttgattaaagattccataactttaatatgttgctaactatttaatttatagctaagtggtcttagttctgtgtatagctacaagccataatctcatatatgaataagggattttttttttatattcaatataaattattcaataataatataaataacttaacatttatacatatatcaaatattcaactctttatttaataatcacaaaatgtctttacaggtatttagggcataaaccctaacaatctcccacttgacctaaaagaaaactggacatctccctttgtcccatattagcaatatgaccataaaaaatttcgttggtagcgtctttgtgaatggatctactaggctatgttttgatgcaatcttcaagaccgtcacatcacctctctctactatattccttagtagatagtatttcctctcaatatgcttatctctcttgtggtttcttggttccttggagttggccaccgttgcactattatcatagtagatcactaatggtttttatacttctggaactacttctaaagtggtgtagaatttcatcaactaaaccgcttccttagctg

SEQ ID NO: 59033 - DNA, 1302 bp, Cannabis sativa
tgaggacatttactaacatagtcttatgatttagggccatttgctatatttttttgaaatgaggacataaactaacatactcctatgatttggggccatttactataatttccagctttatatatatcatgtgtatatacattaatggacttatttttttctgctttaagttaacgaactttcttattttaatatttttcttttgttgtttaaaaaaatatatataatttttaaaataataaacaaaaatagaatgtgtcataaaaattatattatgttcataaaaatgtgttagcatgtgcaatttatgatatttagctaaactaaaatttgtgtataaataagaaaaaatatatgaatccaaattgtatagatagtagcattaaagctaagagcctcaaaagtaggtttaatcttgtacatgaaaggaagttgtatagcatagataaaattattcttaaaaatgtaaaagagttgtaagtttctcttttaatagacttggtttgattaatataaattatctttcttggtataaaaaattaataaagcaaattaacttaaaagataattgtagtagaactatgtatgtaaataaattagtggcaaaagtacttaaacaatcaattttgtatagttaactactattattagtataagaaaattaatcgcaaaatttgtaaataaaattatttttttaaaaaaataaataactatataaaagaaatgtaaactaacttaaaaaaaataataaatcaaattaaaaattaatttttttaattattaatattattattttattttttaaaataaaatataattaaatattattataatatgtataatattttaattgtatataattcgtcttatcgtaaaattatacaccttacattataataactatatgatttaaaattaatgctcaccggtaagaaacttttgttagatcctactataatataatattgcgggaatatcaacagtaggacaccctatattaattatacatgcagtactgatctgtggaattaatacatgaaaaagatggcagatacatgccactgtgccacatgcaatgcatttgaaatttatttcactctgtctttcaaaattataagaagaaaaaatgtgtaaatattccacagcagaaactgctataaatgcattaattaacgagcttttgtttttctaatacaaatttgatcattatcgatcaaatgaattttgtttttccctttcttttttaattcgaacatgatctccgagaattatgagattacatctcaaaattaattggtgatg

SEQ ID NO: 59034 - DNA, 1605 bp, Cannabis sativa
caatcagcaagagggcatcgattatacagatacttttactccagtaactaagctggttattgtcaaacttattctagctcttgcaaccataaatggatggcaccttcatcaacttgatgtcaacaatgcttttttgcatggtgacttacatgaagagacgtatatgggtatattcctaagggagagcttccacccaatgcagtgtgcaaacttaacaaatcattgtatggcttgaaacaagcctcaagataatggtttgaaaagttttcaagtgctctagttgaagaaggtttccatcactcaaccacatatcattctttgtttatgaggtaagatggggagagtttcatcacccttttcatatatgtggatgatgtcataatgacaagcaataacttggctcaattagaagatctgaaggtcaaattgaataggagattccagctcaaagacctaggaaaattgaaatatttcttaggtttggaagtggcaagatcagaaaaagggattttcatatcccaaagaccatatgctttgcagtttcttgaagatcttagttacttaggctgcaaacctttcaatactcctatggaagccaatctgaaattgagccaagataagaaagacaaattggttgatcctaagttgtacagaaggattgttgataagctccaatacttgactattactagacctgacatatcattcttttaacaaattaagtcagttcctttctatacctcaagccaagcaccttaaggctgcacaaagagtgttacaatatgtgaaacactgccctggacaagggttatttttccatgcaaaatctgaagtaaagctcaaagcatacacaaatgcagattaggctgcatcccctgacaccagaatatccaccacaggtttctgcattttccttggagactctctaatatcttggaaaagcaagaaacaacagaccatttccatgtcttctgcagaggctgaatacggggccatgacaaatacaacatgtgagcttgtttagttgttgtctattctcaaggagctcaacattgaacaccaaggacctgccatgctatattgtgataacaaagcagcacaacatatagttgctaacctttttttatgaaagaaccaagcacattgaaatagattgtcacttggtttgggaaaaggtgcagtagggagttataaagacttgtcatgtttcatccgaagatcatttacctgatgtttttactaaagcactcttccctactcagttaaataatttcaaagacaagataggattgatgagcactagctctccatcttgagggggagtatcaagagttagttggtagttagggaagtttattttagttacttgtgctaactggtttagctcagttagttggtcagaccagtaattgttttcagctactaatcatgtactggagcttgagctatataaggctcactcacttgtaattataattcattcaatacaatcatttcattgcctcaatttctggtttagtgtttactgttctatgtagtaataatgacctcaagagaaggatcatgtatggacgaatcaccaaaaataagagaaggcttagaagt

SEQ ID NO: 59035 - DNA, 1365 bp, Cannabis sativa
aaaaaggttcttttaaaatatacacatttcttcaataatttttaaaaaaataccatatgttagtaccaaaagtggtatgttttacatttatcaactcgcaaacgcacgaatctttactacagtgtagagattgtgaagaataaggtcgaacccatagaaattgcgtgtgggattgaagaaaatactcttttttaatttaaattattaaaattctaacctagttttcaaaaatagtgagattttcggtaataaaataaaataaaatgtttaacagtaaaaatgagaagtaacatatatttttaatggtatttagagaaattattaagatttcagaaatcacctaagtgtaactaaaaatatttataattttattgattatcatattttacttagtaattaaaccaattattttctaataaaaatagattttccttcgctttaaaattataatttctaagcattaaatataaaataaattaatataaatacataaaatcaaagaatattattttcaataaaatatagaatcaaacattaataatttttaactatcgagaatacataatattaaagatgatataaattattttgagaagagaaaatcataagcatttatactgagaatcaacataaaaataaataatcaattaaatacactagattttttcgtccacctcaatatataataagggagctagaaatccataagaaaattaactaaaaaaaaaagcagtaaactaatactgaatgcttagagtattttcttcggatttctttgtgtgaaattgtactgaattctaaaatcctaagcttatatttataggaaggtaaaaaaactaatgtacaattaaaacttattataaattgcatggtgtcaaaaatacaattacacaactttaaaattaggatgccacgtgccacatttggattgagtgcctttgatgagttggtgccacgtgtcaccgtgtggttggctaaaaggtgtggcattggacacgtgtcgggtgcagaacaaatgagaggaattactttttggtggcttgaggaccatgaaagaaggagagggtcaggcgcaggggcacgcacacatggccccgaagtggccatggatcccacttgcacgcactccacgtggctttaatgtcggctgaggagtttgggccggttgggcctttgtcttttgtgctctctttttggttgcaaaaatgccaagttttatgactttgggccatatttttatcatttttttcctttcattcttttcttttcataaatgctatttttctcaatcaatcacaaatacaattaaatccaaacaaaatattttcaacatacaatatgtcacattaaatcaatgaaaatatt

SEQ ID NO: 59036 - DNA, 1138 bp, Cannabis sativa
cggcttgcaaagacttgcgggcgatagcgggtatagtgttgaaggaggcagacggaagtttctccgctgctcttacggtacagctggctgtttcaaatcctcttgaggcgaaaactttagccttgtaccatgctgtcctgtggtgtgtttcccaaaactggcgccaagttgttttcgtctccgattgccaatcgctgatgaagggaatccacagtcgtgcagcccctaattggcgtctggcgtcgtctttttggctgctgctacatgctatggacatgctccctctggccgaatttgtttggctcccacgtactctgaatcaggtggctcataatgtatgccaatgggcttttaattttcctttttctggtgtgctttctgctgaggacttggcccctcttgtggccatgtaactgctggtttttgctctggtttagagccttttatatatgagttccttcagcaaaaaaaaattataaaaaaaaaaatagattactgaaataaatgtagggatgtaacatatttttcgatatagtattgatataaatgaaaaaaccaaatttatgaatggtactgaggccatgtgttgtactttgtgttcatgtgttggccaatcacgcaggcttttaaaatttttgaatttgggctttccttccttatttttgaaacaatatcaaaatgagaaatttagtaatattttttaatcaatattttgttttctaaattaaaaagatgaaaatattttctaaacttatgctctataaagcggtttttgctttttaattttttaattgagaattaaaatttaaaataaaaaaaataactttcaaaatttttttaatattttttttttcttaattaatattttagactcgaaactccaacctagactttggaacttggaccccgaccccaatccagacaaacccgaacctagatcgaaacccgaactagaccccgaccttggactaagacctgaatcgaacccggacccgagatgttggtgccggtatcggacctggactaggcgtcggtctcagattggaccctgaacctaaattaaataaaattaacaaataaaaatgaaatttacacaacacacttttgtttttaaaattgaaaaataaaagtggttgta

SEQ ID NO: 59037 - DNA, 756 bp, Cannabis sativa
ttgttcaatcttgctggaattaattgttattttcaaggtattttcatgttgttgtggtgattctgtgcatgggtgtggaagattgaggcgtagttattgatattcggtgtctacagtatatatatatatataaaaaaagtctaagatagtataaaagtaatttttgccgtgtgaaagtaaattgtaaatatttacctaaaattcagtatttttgtaaattttcaatattttagtcagcttattgggccaaaataactctctgatattgggcatgtaggcccaatttggcctatcattccttaaaaaagagttgtgatgtttattttgtgattaaagtgggtgtggctatggtgttgagagtggtatcaagagcagtggtcattacactctcctccatgtgtacagatcaaaaggtttattaaatcagcaatggttcatagatcttgaagaatcaacctcaaaatttaaatgaggtatgtttactaattgtaaagttttaatctaaaattaaatatttaatcttcattaatatgagcataaaatttattgttaatagcatgctttgtgtaattatttttaacaaaatattcagaatatattttttaattgtttttttttattataatatttatatatatatatatatatatattttgcttgaagtgatagacttggggcgccacgtgatgaactttttttttctttttttttaataataagatggcattgatattttgttatataaattaacaatta

SEQ ID NO: 59038 - DNA, 819 bp, Cannabis sativa
  modified_base (89)..(97): a, c, t, g, unknown or other
atcaacaagaaggagaatcaggcacaagaaggagagaaagagatccaagttcagatcttggtgacgctctgctacagaaaagaatcaannnnnnnnnatctgaacggaaggagtcatttttctgtttttgaaaattaagcaattttcttttttacggaactcaattctgataaaaattgaaaaagttatgaatttttgtaatttcggtgccatggctgtcgagtgggtgcatcgattgcaccaggcactcggacaacatagcacacgcgcgcagacaaaggggttgatgcctgctgaaggcgtgtcacgcccgtgtcttcagacacgggatcctgcgtgtacgccgagagagaggctgcacacgctgaagattctcggcgcgcaccctgctgcacaccctatccgcgcgtgcgcaagccctttttgcagcctcctgggctgcacgtgcagccttgctgccagccaaaactgaatttccaatttttatgggactttttcccaatttcggatttttttaaattttcaaacccaaaatcaaaatgaaatattatttttaatatatttgaacttaaatatcatattttaaattaataatatttattttttaatcgattattattaattccctgatattttgaggtttaaatttcaaaaattgattattttacttttaaaattatggtgagatttaaaatttggtaatttctttaaaatttatgtactatttatttttaaggttagatattttaatattatatatattttaaattaaagataactttatctttttaatttgaaatattatattaaaattacctt

SEQ ID NO: 59039 - DNA, 876 bp, Cannabis sativa
ttgcgtaatgtttctttttattttgtaaaacgattagcccggctcattcctttgcaaggatctctatatctcaccctaatcgccttttcaatttggacactgttacggttgagctgttaccgagtggtaatggaattattcgtttaataaatgatgacttaaaaatgttttttttttttttttttttgaatatatgcgttgcaatatatgtagaaaatcgaatactgtatacttcaattatcctatgaggagaaattgatgagttgcaccacttttagattttaagtttactaatagtatacaattaaatatgacgagttattatatacttttaagaggtggaatcgaaacttagagcaacatgaccaacctagcatcaaatttgatgcagctctttcacttctcatctccaaccgtggcaccatttacacgttatattagctacatttcacactatagtgtcaactaaaacatattattattcatttttattttatattattttttaataatgtttaaatttataatatattaggaaaattttatggtgcacctacaaaaaaacatgcatcaatatttaagatatcttataaaattttgacaaattaaaaaataatagtaataaaataacacacaaaaattatggtttaaataatctgttgtgcgcatgccttttttattttatataaatatgaaataaattgttttaacattctttttatatagtaaattattttaaaattttcaaattaaattttgtagaaaatttataatatatacgactgtaaaaaaaaaatagacaaaatgttggatgtcgacacggttggggcatcaatgtaactttcttttaggtgatgtattgttccttatatatta

SEQ ID NO: 59040 - DNA, 803 bp, Cannabis sativa
atacaaatttccatgtgcgaaatgagttaaagaatggtcttgatctaattaatttgaaaactatataaatataggctagtctttgtcctgggccctaacaccagtacacatttattaccctaaataataaatgagtttgggtgatatatttcatttctgtaataaaattgagttgacattcgtacacatttatttaaagtcatttatagctagagcattgctattggacattactcgtgtcttttagcatttctcttttagctattataacttatttcaaattttaaaaaaaaaatcgatctctacatttagtttaatgaatagtgaataggtaaaatatattttatattttattttctttactctttcatttctttaattaattttttcattattctttttcctcatttttgtatattttttttttgttaattaataaaaaaaatatataaaaagatataaaattcaaataatatagagaagttgatgtatgatatgtaatataaatatataaggtaaaatataaaaaaaaaaaaaaaaaagaaaaaaaaaagtaaattctggtgagatattttaaaaaataaagtaagaaaattattgagagtgctcttaacccaaaaatgacacaattatatatggttttactttgcattaacgccagtattgtaagtggtaatacttaggggtccgattaatgtgacttttttgagaaaattgtctaattttgggaaacttcactttccctttttctaattgatgatttcgatttttcgtttattagaacaaatcaaattatctttatt

SEQ ID NO: 59041 - DNA, 876 bp, Cannabis sativa
ttttttaatttgaaagagaatatatataatatataagatcataccatggcagcaagaggtgatccatacataatgatattgaggccagcacccaaaaatcccattgcattaatacgtgcatcttcttccatagctaactgagttactaaaatcactactccaaaaaaacccacgtcgaatattcccaccaaaatgcctgtctttgcctgtaaacataaaatgaatttaattaattaatacaactctataataataacaatttaattatatatatatgtttaattacatttataccctgatgtttgggtgagcataaataagaaacaaggaaatatagatggtctccacaagggtcccaaaaccattgacaatggccacaacagcttctcctgacttagtcaaaccgtagtaagtccaaagcaatgaacttaacattgtacaaatgtatggaagactctcaaactcttctgtcgaaccatgttttacaattctccaaaatgttcttctgcaaaccacatataattacatatatattgtgtgtgtgtgtgtgttgtaattgaatttataatataatatatggtatataaaacatacgctggagaaagaaacattagcactgaaataatggtccctgcaaatgaaaaagaaaaagaaaaagagtaaaagagaaattagctctaggaattgatcagcttgatcatgattcatacatctatatatatatatatattatatttatataaactgatctgagatctgttacctatgacttcaacagagaatatcaaagcttccatgtttatgggatgtgtttgatgaggtaagactggttgaaagtggtagctagatttttgttgaaacagaataaatagagag

SEQ ID NO: 59042 - DNA, 1314 bp, Cannabis sativa
ttactcattctcacaggtactctactactaattccaatatatatataattatatatatgatcatctaaatctaatcagtatacgttacttttttaacgttttcaataagccatgttatgatggatttatatatatgtttcttattttaatcagaacataacttttgttattagatcatttttagtcacaataagaactagtttatactagaaaaatattaataagatacaagttgtcctaaatttcgtttttaatggtaatagtacttattgttaggactaaaacatatttagtgtcaaatctttttagtaaaaacacaataaatatataataatgagtttgtttggtatgcagccgtattgtatagtatagtattatattaaattatattttatgtaatatttttatgtaaaagtatatgtaattatggacattcaataaataatattttagtataaattaaaatttaatatagtattatataaaagtatgatatataatccaattcaatataatacaatacaatgcaataccacctaatacgacgctagctccaaacgatcccatatgttttaatcacactttttttatatataactatgtatgcttgttcagaacatgaaaaggaccctctaaggatcccaacaagaagaaatatgctactggctttgaggtggctggtggaaggcagccgtgccggagactcgttggtgttcttctactccggccacggctcaaggcagcaagacaaggaccacgacgaggctgacggagtcgacgaaaccttgtgccccactgattacgaaactgccggaaaaattgtggatgatgagattaatgccaccattgttagaccactcccttatggtgcaactcttcatgccattattgatgcttgttatagtggaacagtccttgatcttccctttgtttgtaggatgaacaggtataaattactatataaatatattttaatgaattcaaaatggaatttacttaaattattaaaaagtatgtgtgatgatctatatatcactaaatataattttgtattgtatgaatgtcttagttaaaaatgtaattgaacatatttttcatattttgacctctttattttatatcctggccttagatatattttttatccttgcttgtcccttaggctggttttgtgcattttaatattataccatatattttaattgaattaataaagtaataccattttaactaatccaccgcttctaaattttgattttgataattattatatatacatttgttcggtctggatgtgtattccaattgttaaat

SEQ ID NO: 59043 - DNA, 2948 bp, Cannabis sativa
gttctaacgaaacccaacaagtgttaagtcatatattatgagtataattttagtgttgcaaattgtaaatagttaatgtttaatttaatgttacgattctatatgttatataaatatataaaatataaatttaattacattttcaaaacataatcctataattaaattttaagtatatctagaaagtagttaaggtactaggatatattatgagtataattttcttcttacaccaatgtgtacatagagccttgaataaagtaagcatgctttactaataatatacccaaatgataaaactatacccttgttattatatccctagaatatgcattatatgtacgtaattacctatattttgaaatgtgatcgctgcatgtagagcagttcttcccattgggccaccaaccgccggggaggaacatgtagctagtatttcaagagccaaatatgtgtacctgttctcgatggctatgtaaagtggagtctcgccacctttattaggtcgatatgagaaatcagggtcttctctcgtcaatatccttacaacctcaagatggccaaatcgcgcagcctcatgcaacgcggtgtcctcttcttcattcttcatccttatcatattttggacgacagagatgtccacttcaaggtcgtatacttgtcggggtaataatacttttgcacatttaataagagactcaacaatgtggtaatgaccgtaccttgcagccataagtaagggagtctctcctcttacattggtttgcgtcaacagtgctggacacatgttcaaaatcccttctatgaagggaattgttcgagggtccagtactagttgaggtaataataacttttcacgtttattaataagagacttaacgtacctcatcgtcgtccatccttctcttgcatttggttgcatcattagcatcatttttgaagtgatgatatggatatggagcactgtgtttctttctggggtcaataactgctcaagttggagtgattggcggctcttgaatacttcaatttcgccattaatcgcagcatagtacagcttgggatccatcctcatgcgagtatgatcgctactacttaaagaagaagaagaagaagtagccattaatattgtatactagctctttaaatttgtatatctttgtgttatataataatatctcttcttagttgcatgcaatgcattggctctagctcatacgtaatatttatataaatagtgaattattataatattcatttcttcacgaatgaaaaagtaaaatattctttgccattctttacattttcatagaattattctatacattttaactaattatagaaatatgtacgtatcatcattttcctaatttaatttatatattattggcagattattgtaatatgaaaaattaattaatacagtccactatatataattatatattatttatgacatggggtactaatataatgcatgtgctgtttatatgtatttaatatatgcatataaatatatatatatatatatatatttattcacatattcattaattagcaagatgaatacaacaagcttactcttcaagtttttgcaaaaataaaatattcatttcttcgtgaaagaaaaaaaaaagtatgcataattaattaagcttctttacgtttgtttgtttttttgtctttatctttttcctttattttattctacagttggctattttgaataattaatcaatgtattctaattttagctcaaacgttaattgccaattcgaatgatttccaagattcgttttccttttttgattttgatcaataaaacaacggtatattaattttttcatttttttggcatgacgatatagtcatcctatttttaatatccatatgaataacatatattatatatatttttcacaatttacattctcacaaaactaagttctgattcttttggatgcgatacacagtggctgcaatggcagcccaaaaacttgcttccggaatggagatactcaaactcaatttcagtatcctcccgcttaagatgatggctattttttgctcatcaatcttgaaccgtatcacttgcccgcaaaggatatggctctgataccatgttgagaattatggggttccatctcaaaaccaattggcaatgagtggagtagtccatattcttatatatagctatattctctaccgtttattctatgtgggacaatgtccacaatatcctccaacccaaccaatcttaatttgatggcttgaaagcatctgctgatgacaagtgaaaaacaattgttcaatagttacacccacatttccacacattagacatatatacttgatcttgacacactttgaactgagaaagtctgttggaactttttatgaaattatgtaaaaatagagtgaagtgttccaatttcattgtttttaatttcggtataacaaagtctttctctagtttgcaatcggtccaacatagccaaccaaagaatgactcgatatttgggtacattatatcgaccccatacctatccaaactagctgactttctcccccatgttattcagtacatcataactgaatcagatagtgtatcaacattgttgcaactgatattctgtcatgattctcttcatcttctctttcactttgaaaatttattgctaataccaacttccttgacttgtgaattcatacatccaccaattattgctttgtatatagacattgtgtgcttattttacccaaagattatcttgcttctgagccaccgcccaaatatatttccctaaggccacttgattccattgaatcaatttttgtttttgaaaattcaaaaaagttaattgaactcaacaacaacacttacaaaataaagctacttacaaagcttttgttaaagcttccacccactcactatttattttactcaa

SEQ ID NO: 59044 - DNA, 966 bp, Cannabis sativa
tggattgtcctttgcgggactttggtggggttaatcctaagtttgatagtgggaggtatggttcgtggatgtgtgctccgagttctccgccacgtgatcggactaggtaccaaaaaaagagagagacttccccctccaataggccgattatgactatgggagaagcctcaaagatagtttcggctgttcagagaagccgagttcgttactctggccccacacctgaggagttagctcctacctcagttttagaggctcgggaacgtgatgaggaaatggcgtccatggccaatacgaaagcaaaggatcccatggttgctgggggtcaatcggaggtgaccgagactgagttgggtaagctgaatggtgatcccatggtgcctgaggaggtgctcttgccttcttttgcaccttcggttagtgtgccagctgtgggtgaggtgatggcggagaaggttagtgggacggagcaagtgggaaaggtgttttcgtcggatgtggctgggggttcaactagtggtaaggtagatggtgtgggagatgtgagtgaccaccgagtgccaaagggcactaaagaccataagggaaagggtgtgattgttcattcggatcatgatgagctctcgtttcgtcaagcactccaacaaacatttgagccgataattcaagcacaaaaatctaagacttggaagcgtcttaattctgtaaagggccgtggccctcatggggtatctaaggtggccacttttcctattagtcccaagttgtctcatgtcattgttgcaaatgctaaatgcaaggtgagtccgaaggttggtgggggtgggaagcgtaagatggagatggatgttaattctgtaagtgtgaaaaagggacgtttggaggagcaatctgacatggttcctgagcatgagaatattgtattggcgaggcctgcggagcaggctcgcccagagcaatgagtct

SEQ ID NO: 59045 - DNA, 1159 bp, Cannabis sativa
gttatattttaaagtatttgaatatcatttcaatgtaatgctctttccactattttgaaagaatgattattccattttaaaagaaaaaaaaattattaatttttttatcaattttttttatacattttaaattttgttctattctattcatattcccattcttattcttatattttcattcattccaatcaaatgtcacattaatcttttataaaaagtactaaaaaaataacaatacaccgctacttatttagcactccattataaatgtttagaatttgaacttttcgacttccaccgtttaattaacttattttactggaaaaacaaattatttcgacatactttattctatttctttattcttgattatttttatttttattctttactatatatatttgggttttatgagaaaaaaaaataataacatttgtccacaagtaattggaaatatatattttttttctttttaaatttttttagaggaaaataattggaaatcaagcctctctgttatgaaaactttagaagtttttaaggatttagactgtgaataaatgacacattacaatgttggtgacttcttacccaaacatatttttttaatcttttccttttatttctatcaccatttatatttatatatacgataaaataattgaataaaaatatatttaaaatataatatataaattacgttgaaaaaataaaattaatttatagcataatataaaattttgaaaaaagaaattgttttgtgtgtgatttcaactttaaaataggtaaataaaatattatttggtggactcaagagtaagagagtggtcttctttgaagccatcacaaatggtagttagattaagtgaaatattaaagggtataattatgtagtattattatattgttattttgaaaatttacacaatccacataaaattaaatttctttttactattttatgattttttttttctttttatatatttttgcaagtttttcactagttttttttttttaaaaatatatttttagcaatgtgaaaaaaaccaactctgtatttctataaaaaaaaagtttaaatctataaaaataaaaatgttgatctgtaaaggtatttatgaaataattctattttgttgtataaagtatggagttt

SEQ ID NO: 59046 - DNA, 2116 bp, Cannabis sativa
gacaccaaatttggtgtgctccttggagatctcttagtaggagtgttcatccaatcaaatccgcactatttttctcatagtgaacattttggatccaatccaatatacaaaagtgcggatttgatcggttattttgaattaattacttgttaatattaaatcatttaatatttattaaaaaatatatttttttacataactaacaacaaaataaaaaaaatattgtaaatttatgtttccaacaacaaattcaaaagatgaagaaaaaaaaattacttcttgggagaaagtttgccttccgaaagcctatggtagccttggctttaaagatagtgtcaaatgaaatcagtctattcttgccaagtatgtttgggcgatttcaacaaagcaagaccttctttgggttagatggatagataacatctatctaaagtcggtgagcttcttgacttatgatcttaaatcagattcaagctggtattggcctaaattatgtcatctgaggaagaaatttttggaatctgagatccttaaagcatgtacagttggcaggtttaagactaactggttatacaagaacattttggtctaaaaccaggtcaattatcacaaagctgtttggagttcgttacttgtgcctaaacacagatttattttatggcaagtgatgaactctcaccttctcactagggacaagttgaatcgatttcacattgagatgagatcttctttatgcccggtgtgtgaggctgatgtagagactcatgagcacaattttttcaattgtgttaagtctcataaagtcctagatctggtttttagttggatgggatacagaggctgacctcttgagttttctggttggtcaggttgggttgcagcaaaagagcaggatccaatccagaagttcaacaccaccatcttggcagttgtgatatacaatctttgactcaatagaaatagatgtatttttaatggttactcaaagtcaattttttggggttgtaaatgatgtaaagaacattataaagtatagattacaaattgtaaacaatagaaagatgtatattcaggagagtaactatttgcttaggcttagattacaaagcagataactttgcttgttagggtcttttgctgctagttggagatcggggtgaggttgttagtgttttattggtgtttgtatttactttgtcaattaccgaagtccttttttataagaaaaaaagaaaaaacaattgtgtatcaagaaattaattttattttaaattatattttcttataaataagaatggaatatatatttaatttattaagttttgaaatatatttttgttatatgtattagcttttaaaattattattttttatatttaaatattaattgtatatatatttttaaaatatatgtaaatttgtttaatgtattaaatcgattacttttacttgtcaattaatatctaatccgcacaaatacaaatattctcattttgtagatgaaattagatcatgctcattgaattgaattacatattttataaacacccctctaatctcattctcatttattattcttattcttttacttttcattccccaacaaaagttagagcatctccaatggagagctataaatatagtgtattgctattttttaaaatattttgctaaaatttaattacaatgatgatgtaaaatgtatcctaaatttggtctaagctaaaaattgaaccaactttggcacaaaagatagtatgggccaaattttaggccacaataaatactacattttttaattacttctttgtcacttattaatactattcattgactttgaataagatatatttataggatattaaaataatataaataaaattaattattttgtatatttgaatgagtattaatggtaatattgacttttatagctaatttgcaccttgtgcattggagcactaatataaaaaatgggccaaatataactttatgatatattttagaccaaatttaatccaaaatatagagaaaattactctacattctttttttaacttgatgtctttaatttttaccctcccttttaaaaaattttatgtttaccttttttttt

SEQ ID NO: 59047 - DNA, 760 bp, Cannabis sativa
aagctttgaaactgacctttattgaggccatgcgtgcaccaagcaggtggtcaattcaccttctacattgagttatctcgctcttgctctcactcttctctggcccttgcttttctcccacatcttgagtgatttggggagatatgcttgtatattcaaccataaagtttgtgagagcttcgcctttgatggccatgctaggttgataagaggccttatattggccgagcttaatggcccacttgagtggtcggccaggtgcttcaggttttggtgcacctgttgccatggccggtttgaatgtattgctttgggagttttggtaggagagtgaagcatgttcacttctcttccttctcccttagacttcatgacataagggaatagttgaatttcccttttttgcctttattttggccagagccattattgttgcgcttgcctccaatattctcattgttggagaattggtggagattgtctacgctggccagcatgtcggacaacactttgggcagtatgatgccttgtgtttgttcaacattgacctgccctcttgtctgggcttgccgactaacttcttccaactttatgaagccatcagctccctcaaggaactctttcatgtttcttattgagatcgttctgatatttttctagaattcattcaatgtccctccaagtatggtcgtatattgaccttcttctatcaagcctttaaccttggtggcctcggccatgaatctttgaatgtaatctt

SEQ ID NO: 59048 - DNA, 668 bp, Cannabis sativa
aatgctccatgacacacaccatggatataagaacatcaattaggaagcaaaatatgaataagttgaattagtggaactgaaatagcacttttaccttattttgtatcaaaaaccctttgtatcaaaaatgtagaagcaatattgaactcactgatatatatatatataattctttcatacagtaatatataatcaatacataatattttatgtcctaaactaatatgtgttttgaactctaatacaacacatactcatacactccaatcgaatgtgctgtgaaatcccaaaaaatttgaattcaaatcaaacaaagttaactttaacacacccaaaacaagtggatggacattatcatagaaccaaagaaaagccattctcttttttttttaccctttcgttatattgtaaaaaaccaagaagaaaaggtttaaaaaagaaaagccaatattccatgtgtgcttatcaattctataagaagccttcgaacatcaaaagaaattcaagctgagatttttcacagatcccaaataatttatttttgatcacaataatttaataactaaaagaactcattaataaaatcacaaaagcccgaaaaaggaaaagaaataaggaagacctaacagaccatatatatatactagaagaaagttacgtgcaagaca

SEQ ID NO: 59049 - DNA, 1601 bp, Cannabis sativa
ccttatccttcacattcccatgtagattcttcttcatccaatgaccattttcatctttcctacaatccatcataccatgtccaaaacttatgaaattcttacacttaataggcaacaattcatactctatgtaatgccctgatccacgagggcatcacgtgtgtgcttttattaattagtttataataataaactaacgggttaagaaaagtgtggtttaattaaaacttttttagaaaaaaaatttatttaaatcataacttaaactttgttacaaaacaccactggattcggggatccccttagttacaaacttttgctaattattacaaaatgttattacatattcaaatcataacaaaggaaagatgcagtccatagagaaccaaaacatggcgggctgacatgtacattgccgggagacctctgactcatggctggtcaacttttcccttttccctacctacaccacagagcacccgtgagtcacaaagacttagccagaaaagtatgtaaaacacaaacatcgcatttagcacaacattttagtatcacagaacatacattgcagcatatagtctaagcagttaatcaatgtgttatcaaatgataataaacaactatttgccttataagacaaaccaaacctgatactttataaagcatcattaaccctcgttaccaacaaatttctaatgtcactatcgttgcttaattaaacaaccaataagtaagaaatttaacagtagtttcaaaagaaagtaatagctctttcttaataacggtaattatcgtatcttatttcaacatgctaagcagtgcaattgacttttcttacctcaagtccaaagtcaggtgtgtgggtcgacctaagtggaatggtgctcaacgatctcgggccctatgtcacgacaacgatacttgataaataacttaatcaaacccaaaataggccctaaactcaaaatttaacaagccttaatcaatactagcttagaaatagcctaaacatcgataaaacacataaaactaagttctagaaaaacacccaaaacggctaaccagtttcaaaaaatagggttccccattgggtcaaccggtttaccggttccacagtgcccggtagaaccggttaaacagtttctactacagaaacaagtaacctggtttttgcaccaaaaccaacccaaaactcctccaaacctattgaaatctttcagaacagtttaacaacataaaatcaacataagaaaacactcaaaacttagaattacactaaaattgcaaattcaccatagttgagtgagtttttgagttcttgaactcaactcactccaatcaaacgtaacagccttagaaacatcaaattcacacttatacaaccttgaaacaaacttaaaatcatgctctaaactcaatcaaacctacagatccgaattcatacaaaatccctaacaaaactcaacctaaaaccctagaaatcaatcaagaatagctaaagaacttacctcaaagcttgcacaacccttagaattggttaattcggctaggaaaaggtcgatttgtgaataaatttggtttctgctaattcttagggtttt

SEQ ID NO: 59050 - DNA, 1126 bp, Cannabis sativa
tagccaatcgcaaggcgacatatttagaagtgctagacactattggtgcccaataacaatgctcataattaaaatatcacaagtctattttcaaacagaacattatcattgagcattagtagtgcctaacaccatctagaagtgacaccttgtgatcgattattgatattctctaaaaattatttgattaatttatatgagtaactatatttaattgtactaataacaatataagacttaagatgcattagatactattattgctttttagtattaatcttttaaaataacactaggctaatagaggtagagaaaatttcaataagttaaaatttaaaataccatacttaagttgtcaagttccacaacaggctacacattattattattaatacatttcattattaaatttcacatatttatataataaataatttgaaaaacttctaatggagtgtgaccttcaaaagctaaataacaaaaaatacaagaaaaaaaaaactttgttgttgacatgttcgaaaaagatttaaagcatacataaaaaagaaaatgatgatttttaactaaagagtcgtttcattaagtgatcctcatgataacttcaaattaattgatcaactggtattattttcctatgtaattactaactattttgccaaacaggatattagaaattcatatgtaattacttagagatcctgcacctttttctttctccctaggatggaagtagtgatcttggacttgtgcttctgagtgcttggagaggactcttctggcgtttcctcaagtcatgttgggatggccttagggtgtatatggatccctgctgcctccatagctttttgcatgacgaccattatctcttgcatctttttattttgttctttttgggctgcgatctcagcttcatgatcatcagccttctgccttaaaagcagcagctctgtgtaactgccttcgttgtaggcgtcatattcgtcaaaattttcctcgtactcgtcatcgttggcctcctctcgctcctcataatccatgttaactctagaggccacttcctcgtcctccagattttaagcatcttgaggaggacggagctgacgtgtgttgcgagtttccacca

SEQ ID NO: 59051 - DNA, 947 bp, Cannabis sativa
gctgagatggctgaggctttttgagctatgtcacctacgcagacccaaggaggtgggggaaatatttttcctggggacgctgatgctgtgaatactgaagaagtcgttgaggaggctgcgagtaaagtcgcagatgaatccactactcaaactgcccctactgctcccaatgattagtttacgtactttatgaagattttattttgccaaacttttttaagtggtacacgggtactcgcgatttgtacttagacaaatttatctttattgtcgttaatatttcgaacaacatatatcccttcgaggatatttatttatgttatcatattcgcagtacacgggtactcacatctttttctatttcaattgcggttttatttacagcttggtgtaaaaaacgctaaggtaaaatgattttttttgtaaactcgagaaaaatttaacttttataaagaacaagttaatcaatagtacaaagtgggctatataccccctatacttagaacatttatggataaattgactaagtataaatacataacgagtacatattatacactgcgaatactattgataataaaacttgaagctttcgccattccaggctctttggattgcagtaccatcgagttctggaagtcgatatgctgcgttaccaatcttctcaacgatgaggtatggtccttcccagttgtctccgaaaaccccatgcgttgagttttttgtgtttggcatcacttttcgaagaaccaaatcccctactcgcagaattctctccttaaccttagagttgaaatatcgcgcagtttgctgctgataagcagcattttttaggtgagcatggtcgcgcttttcttcttaaaggtcaaggtggaggaattgtttttcttcgttctggacaatgttgaaaacatctctttgtagggaactgttggaattattttacc

SEQ ID NO: 59052 - DNA, 609 bp, Cannabis sativa
tgtttttgaacttttgattgtatgtaggttgagctttagttgagattgttggagcatttttctagcttgaatcaatgtatttttgatgttgtggttgcttgaaaataaggttaaatcatgcttggaagttcaaggtttcaaatgagaagttttgttgaattgtgttcttgaatggagcttgatgttcattgatttgtaatctgaatttaggtgtgttttattgggggatttgatgcatgaagtatgaatttcaaatctctaatgtttgttagcaactctactttgtgatttgagagtttggttgtgaattgagatgaaatggttgggttttcttgctgaaatttgtgttttagcttgctggtttttgggtttgaaacccaggtgtcgcgacatggcttttagcatgccgcggtccgcccctatggatgagagctgggaattggtcccacgtgccgcggcatggcttttgcatgccgcggcccgccctcgagtttcttggcagatttgagtaccaacttttaaaatgcataactttgtgatctgaactctgttttgggagttctatgtatcgttggaaattttattctgagctctatgtgattatctgta

SEQ ID NO: 59053 - DNA, 651 bp, Cannabis sativa
tttcaagaaaaaaagtacaccccctcaactttaattttgaatccgccattagctcatattaaccatgtaccatgcaaaaccacttgaggctagctcaagtggccataagtgggtgtgtgtgttttggaggtcttatgttcgaatcctaaataaaacatggttgtaatatataaatgcttaaataaggaaaaaaaaaaagccatgtaccatgcaaaatgaggcaacacttaatatttaccacctctaaggagttggactcctaaacataattgtgaaggcttaggctatgtttcccacactaccctgcacaatgacagccgcaacagcatgcaattctctaaccattgcatcaacaaaaagagtatgagagtttcttctagttgtaattaatgccactaagagaataaagagagagcattgccttcctttatatagaaaaaatgaaaaagagaatctttggaaaagcaaattgttgtatatatgttaatagctaattattttcttgtgcagtttctttgcataaaaataaaggctcccatatgagagtttgctaattgtggcaaatattcagtaacagttttttttttttttttttttaaaaaataaaactcttctaaaatggggtttggtaattctagtaaaattactttg

SEQ ID NO: 59054 - DNA, 3080 bp, Cannabis sativa
ttgtaaaggatattcactgaacttctattatccaccaacaccctttttatccttttgttggcaagctggattgtaatcacgagtgggttgacatgtgggtacctcaagtgttttgtgtcttcccctaaaaacacaatcgggggttctttagttttggctttcttagacgatcctgcagcaaaggctgactgctcgttcttaacttccttgacatatctcttttgggcattgttactttctccaacgagatgtggccctctcgagataacaaaaatgtcctctccttcaacaagaggaggttgtaatctttggttgcctgagttattgggcgaatttggctggttttgtccattgccttgtcacttcacatactattgaaatgtaaccacgtgagataagactctctatctcgtctttcaattaacaacattcatctgtcgtatgcctgatgtccttgtgaaatctatagaattctgttgcatcctgtttgtgccttgcatgtctcatgggctttggcttgcgaaatgcaaccctgtgctcatgtgcgagaaagatattttctcgagtttcattaagctcagtataaatagtgtaaattggcgcgtagttatcgtgttttttctatttttttcttctctttggttgattccttgaagtcatcttttctcttcgtgctagagcctcctcgattttcagccttcgtcgagacggtgcttgcttggtcagtgctgtgtttacttcttgagccagtctttatcaatttcatctcgttccttgcttcttcttttcgcacgaacacctgagctctttcattgaattcactgatgtttttatagggcaaccctgtaagtcatcccacagcttgcatccaactgtcgagagatcagtcataatccttgcttgaagagcagtaagcattatactgtcgttcaagtttctaactctggcagcagctgtacaaaatcgactcaagtatgccttgagtgacttgcttggctgttgctttacgttagtgagggaagatgcttcaggtcgcctatctcttgctgcctgaaatcatttcttgaaatctttagacagttgttcctaagaggtaattgagtgatggatgaatttattgaaccagctgcttgctgccccagtcagcgaggtggggaataaaatacaacataagttattcatgacattgcttgcttgcattattgtattaaagttgttgaggtgagtgaccggatctataggcctattgtatgacgagacgtgagggtttttaaatccctgggggcagcactcataatatttggatggaaaggtttgagctcctcatcagagtcgtaatcaggcagtttcccatcttgatatttgttgaatttgttttccaactgctgatttgcaattggatttgatcctcttgcttttggttagaattgatgttgcttgcgtaaattcggcttcttctaattcaattgctcatgaagatctggccgtcttcgatcatagttacttgttgacattgcgcctgagtaactctcagattggctactccttgtataactcatgctttctcgatcatcactaagtcaaggcctatcccctcctcgcgtagatcgattgtgatttcgagatctagtatgtcctaagctagaactttcctcgtcatgtacggtccttctcctttatggaaaggttcgatacatgtcccttgctagggtttgtatacacctcctccctatcagtgagagaaggacgttgacggtgtcttgatggcaacccacttgtcctaggttaagttcaaggatttctcttgttaccacgagggatttcctgttccctagtcctgggttatcttatgctcgcatttttacgagaagattttggtaaatcattattttcattcccctaggttatggatccccagggtctttgaggcacttcttgacgaggtcccttgtcattttgttgttcatcttcaagagcatccccagtttccccaggtttctcctccttactgttctgggggttttcctgagttgtctcctgcctcctcgttcttgagtcccgaggtctacctcacaaccttctaactccaagatcatgttggttttgtgtgttattttcttgtgtcgccctggctgcagctacctccctccctttccaacttagcgtttcgttggtttgcctcagccgaacgctgtcggagttgacgattttccaactcgaccaaccgtacgtatctaatggggtcataggcaccctcactcataggcgtagaaccgccagcatttgtgtcgggttcctcattcccaatttctaggttttgatcatcaccacattggcttcttcttgaacgtgttgatcgttttgaacgcgttgttcatgaattgggtggcctccgtgagcccattggctcttttctaggacgacgagtagtctcttcaagatgagtgttgttgttttccccattctcatccacggacaagaaattccttctttagttaggaaggatttttctgagtttttatcacgtaggctttcaatgaaagcaccaaactgttaacgcaaattttcgtaaataattatgagcctattttcgtaatagatttggcacagaaattataagaaatttaagaagaataaaaataatcacaccaggttttttttacgttgttttgcagttaactctgcatagtccatgagtttatcttattttgatatttctgataaaaaaattagggtatacaatcagtctactcccttttctctctggtcttttccatttttgtataatctgcccctatttgtagtaatataggttggcagttaattgcatttaagttcaaatctcaaaacaatatttcccaaaattgtgggctttaattacgctccatgcaaataaatatagttaatatttaaaaatcacaccgctgtgatttaaaccgttttttaaagaggtcaaccctgacatggattaggacacgctaccaaatgtatctcggtgaggtgtctcgcctagtacatgaacaacttggtttattcacaagtcttccagcaatggcatgagcaccagtgtactgagcaaa

SEQ ID NO: 59055 - DNA, 821 bp, Cannabis sativa
catcttcctttaactttgtctagtattttctttaaagacgctaccaatgtcttgtttatcgattttgcttgtccattcgattgtggatatttgggtgttgagaatgagagttgtactccccattcattacaaaaaatttgaaagtctaagcttatgagctgcgggccaatgtcaatcactatttcttttggcacaccgaatttgcatatgacattgttccaaataaagcttttgacttctcaatccctaacatgtgcgtaggcttctgcttctacccatttggtgaagtagtcgatttttgccaacatgaagactctttatgctagagatgtaggcatcttcccgataatgtccattccctattttatgaaaggccaaggagttagtgttgaatggagcttttctcgtggcaagtgtgatacttgagtgaacatttggcatttgtcgcatcttttgacgaattcatacaaatttgtcctcattgtcagccagtagtattcggttgtaaaagccttgttgcataagcttcttggtccagagtggtttccacattcaccttcgtgtaattgttcttattcaaactgattattcaaccaacctaaacctagtttttattctctgacagagagacaccttctatagagatttcgaatctccttcattgttcttcaaactcgagccatagtgatagagtgccatgcccacacatagtaagcaagtattcaatcatattgcagaagacggtggtaaccaaacccgaaggagagaaggagatctaggctcagatcttgttattactctgcgacagaaaagaacaaggg

SEQ ID NO: 59056 - DNA, 991 bp, Cannabis sativa
tgtgcagtggttagcatctctctaacatgagagatagttactcctgagaaaaaagataaaagataacttatatcagtaattaaatcattaaagctagagagattccttgatgcagaattgagggccgtagaaacacgcaaagcatctgtctcaatatgcgtaattaaaagttgtaattgcaacgcccaattgagactatgaaaaagagatttagcctccatttcatcagatctaaagcatccttggactgatttggagatagcagctatgacattaccacaacaatccctcacaagcgcaccacaccccagaattttcaaatctgtattaatagcagcatcaacatttaatttaagtcattgattggtaggtggtgtccatggaatagacctgggaggttgctgatctatcacagtcgaatttacaagcctggagcaatactgatctgctgcaacagcagatgaaacaccagcactggaaatgttttgctggttttttaattggtgccgaacaaatttttccaggtgtgattgagcaaaagttgcaatggttaggcttgttcttgaaactcctccatgaatcactttattgcgctcatgccagatagcccacatcgtacacataatcaattcaaaatctggtttcgagtggactgaagataaatgaattaagtaatctccactgtgcatattctgagcatgtgcatggtctatactaaactttgtttctctccaaactgctttagcttttgtgcaattaaacatggcatgacctatagactcccaagcattgtgacacaaagaacaagtggctgagttaatgacttttcttcggcatagtgcagtagccacgggcaaggcattttgcattactctccaagcaaaaatttttacttttgatggtaaatttagaccccaaaaagttttccaccaatctttgtgtgcatttgaaccactagattgacgattttcagctaaattttcagccaaat

SEQ ID NO: 59057 - DNA, 1101 bp, Cannabis sativa
  modified_base (285)..(290): a, c, t, g, unknown or other
gcgtataaagtcattgacttataacttgtccaattcctgttttagtgccccttgtctctcggaatccaagggtctccttttctgcctcttagttgagtagtttggattgacatttaaatgatggcagataatgttagggtcaatccctatcatatctccatggctccaggcgaactgatcctggttcacccttaagaaacttattagctgctattttaactgctcgtctaggttcttccctatgtaaacacattttgcgagatttcctgggtcgagaacaacttnnnnnnattcttcaattggttttaataagtttctttcatcttgaacccgagggtcaagatcctcgtccttcttttctctttcatctgccaaaaccgccattaactagtgaccgacttttctatgctgcaactctatgcgatagcaatcatgagccaataacatttgatcacctcacaccactcctacaccttctggtgtttggaacttcagtgataggtgcttgatcgaactaactacccctagtccgatcaatgctgggggtcccaacaatatattgtaagccgatggcaggtcaacaactagaaagtcttgcataactgtggcggatagggggcctcgcctaaggttaatgcgagctcgattattccttgactggcaatactgtcgccggtgaagccacaaagatttaccaagcaaggcttcaatttagcttttttaagccccatcttcttcaacgtttccttataaaggatgtttaccgagctctcattatctattaacaccctctttatccttttattggcgagttgaatagtgatcaccatgggtcgacgtgaggatatctcacgttcttctcatcctcctccaaaaatattattggaagttcctcagtttttaccttcttggaaggttatggggcaaatgtcgacgcccgttctttatctctttcacatatctcttttgagcgttattgctctcccctgtgatatgtgactctcctaaaataatcaggatgtcctctccttcaacaggaagaggttgtaacccctagttgtttgggttattgggcagactgggctggttgtgtccattgcc

SEQ ID NO: 59058 - DNA, 1217 bp, Cannabis sativa
aaagacttctaaagaatatttccgtcgatacagttacaaatttttcaaacagagaaaaacaggccatataaataccatcagccatccacatataactgactccactaatattgtagtgacttgcatatacaattgacatatagtgtcaccgagccaatttgttttcaatggaggctatgattataattataatctagcctcacaatattccattcaaaatcctttgatagtaatcatactgtcatgttcgccatgcattcaagctgctgctaatcagtaaaagcaccaagaacacgcattgctcttctattaaactacgatggaactgcttccttaggttctgtattgtttgtggaccacctttaaagaatgggaatccagaatcctttaatgtctgccatgcattgttcaatcctatatatatgtcatacatatgtatctttgttcaatcctatatatataacgtctatttttgtataaccatttattatcatttatgtctttgtcaatcctatatatattaaccctattttttgtataaccatctattatcatatatgtctttgttcaatcctatatatatcgatgtttttgtaagtctctagcccaacagctttcgcttctctgtttctaggggttcgtactctttgcagccagagaatggagttcttatgagtaagttagtaggatttttggagacttattatgagtttgatgatattagagaaattgttaagtattacattaatgctaattctaatagttaaaaatagaaaaactaacaaaattactcaatttctgtgtgtccagcatgatttgatttcatttatgaagatgagatttgtttttgtagcttgaatttgggtgaaggtcaaaagatcagaggttggttatttgactttttatagtcaaaagatgagagatttatatatatatggctttactctgtttatattaatgtccattagtttgtattgaattgtttatcaaagttaaattattgatcaacagtttcaataatcataacaaaatttgttgaattgatttgatttgatgacttagtatggttgtttgttctattatactaattagaataaagattaacaagagtatttatacttattatgtatagtacggtgaattaattaagtatttttttactatttcacaattttattgttaagtccatagaaaattaaaaactccttcaataataa

SEQ ID NO: 59059 - DNA, 817 bp, Cannabis sativa
  modified_base (265)..(276): a, c, t, g, unknown or other
cattttaaagtattggaatgtcatgattttttcattattttggtagtggaaataaagaccattccaatgcaagatgaaaaaaaaataataattattttatcaatttctttgatgcattttaaatttgattctatttcaatcctattactatttctatattctaattcttattcatacgttttcattctttccaaccaaatgccaccaaaggtatttaatttcaatggaatgatttttccgttattttggtggaatgactattccnnnnnnnnnnnnaaggaaagaccattccaatgcaagattaaaaaaaattaataatttttttttatcaatttctttgctgcattttaaatttgattctattccattcctattactatacctatattttcattccttccaacaaaaccccacctatggtatttaatttcaaacagtcttcattttgtgatgagtaattatcgaaaaactaaaagatatcagtaattcaaaatgaacttacacattaacctcaagaagacggaagctactatcagctccggcaatgcaaagcaccaacggatcatttttatcagttcgcaaaggtaaccaatcaagttccagaacaagagttccaggaaactgaggctgtaaaactgaatttgccaatggatctggtgaatcctgccaaaataaaaagacattaaaaacaggaaaaggatagaccacaagaagagagtttgaataaattaaaagagagaaagtgagagaagatagaaagaatcatatggggtgcaaccaaagcatccatatgagttgaagagagagagagagagag

SEQ ID NO: 59060 - DNA, 1737 bp, Cannabis sativa
gaaaaactttattaagcaacactaggtttatctgctattaaattagcagcagcacacataggtaaacaatcagtccacatatcggacttttgggccaaacggctccacttagctaaactattagctaccttattacaatctctaggaacaaataaaaaatctaaggactgaaaatattcccgaagctgtattatttgttgaaccaaaggaccccactctgcataatttgtattctgcatccgtatagcatttatgatggttttgctatcagaagcaacttgaacctgccttaaagaacgactgatagcaagcttcaaacccagcacgatggcttccccttctgccagtagaaccgtgctgcagccaagcaaaaatttagattttgctataactaaagaaccctccgagtcacgaattactgcacttaagctatacccggactgtccttcaattatagaagcatcattatttattagcaagcagttcggttgaggaggttgccaatgaagtttcggctttaaagctctgatctggggaggtttctggtttgtgcccaattgcagctctagaaaatcttgagcccaagtgatccacaattgatcattcatggttgtattctgcaaaataaacttgtttctcctctgccatagcagccaagaataaccaataaaccaaagcaaatcatcattttttttcaagttatcttttatccaccaaagaaagtcagcagcatgattaataagagggggaaagaattgagaaaaaccaagtatcttccagatttttaaagacttcgggcacctccaaagggcatgacaaacatcttcttcctgctgtttacacaaatcgcagcaagtatttaaggccatacctctctttgtaagctcagttttagttggaagccaatgatggaacacccgccaaacgaagtttttcatctttggagtaagagtggatccccaaataaatttccaccaagctttgagtttggaattattggaacattcagccactaaaggattgttgaagcgaatcttatatccactagcaaccgagtaatttccattagtagtagaatgccaagttatccaatccggttgatgtattgttggtttgattcctatgacccaagggatgtcgtcttggtggaaccaactaaacacttcattaattttccattctccatttggttcgagcaaagaactaatagtgacatctttaggaatttgaattttggtgcggagtttgaaaggcgggcttcttgggatccacatgtcttcattgattcttatagtgcaaccatctccaatacaccatcttacacctttaaggaggagatctcttccccaaagaataccactccaaattgaggacccataatgacccaacttggcttcaaggaaactcaccgaaggaaagtaaagagcttttaaaattttggacagcaagcattctgaattggttaaaattttccatccttgtttggccaaaagggcttgattgaagtcttcaaggtcacgaaaacccattcctccttgctctttcaaccggcaaagctttctccaattaccccaatgaagcttgtgtttatttttggttgatccccaccaaaaccgcgctatcaaactttctatgtcgtgaagaattcctttagtgattctaaagcaactcattacatagcaagggagcgcttgaataaccgccttaatgagaatttcttttccggcttgagaaaat

SEQ ID NO: 59061 - DNA, 844 bp, Cannabis sativa
tgttctaacagagattggaaatgacgagttttctgtgattgaataagttgttagtagtacagttatttatcttgtataataatttagtgctcaaactacgagattggatgaacctgatgaaactgaatataagtatttttaaagttaactccaatattatagtttgagaattaaactgctgattatttgactttttttttattttaatcttgattgtatttttaatgtgaaaatattctaattaaattacatgctataattttaatcgattgatattaataaaattgaatgatttattgataaaataaaaaatatatacttatgtttgttaatgataaaaaaataatatttgttgttttacatcactcctttatatagtaacataattttcatgattttaaaatatataattttatttatgtttcatatgttttatgaaaataataatacgtggggacctcaaatcataaagttttctttaataactcttgttgtatttaattattattcccaattttttttaataaataaatattttttttccttatgtgtaagagatcgattaatttaaaatttaataaataaccctactttaggggaatattcttttcttgtcaaaactttttttttttttttgtttccttttagatgttaatattgtttttatttaattttttttcttgaaagaaatggaatgaagaaatacaaaattttcatccaaaaaacaattaagaaaaatgtaaattaagttattggacactttacaagaaaagcaaccatcaaaaatgcaagaactatctccccttttttttttatttttttcccacaaaattatctccaaaaa

SEQ ID NO: 59062 - DNA, 1132 bp, Cannabis sativa
aaaatctttatatcaaatttacgaatccagtctatataaacacactcaaatttgattatgtgagttttggttacgaatatagtaaattaaaaaatatatatatgcattatcaaatacgttacctaattaagaaaattttaaatatttaaaaaatacatatatgtatataatcatatccaaatgacactccattatagcaatagttaaatttttttgttaaagatcaaaatctcaaaccccatttaaaaattaaaaaaatacattgcctaattaagaaaaaattaaacatacatgtattgcacttaacatcacctaattgaacttaattaaaaaaaaaaactaattataagtgcattgcacgtaacatcaacctatgtatcttttacaatgtgtttcattaaaatatatatatatatatatatttctttttgatagaaatacatatttatatattatgtaggttgatcccgaagttccggtctattccgtagcattagtctctatttattcaccccaagaatgaactatcttttgtttcacgggatggattaattacggatagacccgaaaaggtctttgcaagcataccacaatctattcaagaatcggtagcaattttaaggaagactaccgagctccacgataggtaagcgcctatcatctctatgtgtttctttttagacagaacatttaagatattactacattagagtaaatattttattacttggcaaataacataatatgtatgcattagaagatacatttttataaagaatgatagaatattattcatcgaagaattaattatttacatgtattgaatatacataaaaataacttcacaaaataattatattattttttattgtcttaatcactttatattaaaaaaatttaattaaaacataataataaattaattatatataattattttttatattatttataattaaattatatagcacctaatataaaactaagcatctgtgccttgcacgtagcttttttcaagtatctattctatataaagtgtgcctatataacagaattcttagtttatgagaaatttatgggtgattatttatttatattaaaaataaaatagtttattattaaaattaaaatg

SEQ ID NO: 59063 - DNA, 1436 bp, Cannabis sativa
gaagcttgtattcttccgatctagcggatgtatcttaatttggttgtaacctgaatacgtgtccatgaaacttagaatttcatggccagctgtggcatccactagctggtcaatccttgggagaaggaaacagtcctttggacatgctttgttcaggtttgtgaagtcaatgcacactctccaattattctttattttgggcaccaacacagggttggatacccaaagtggatagaatgcttcagttatgaagtcatgggctcgtagcctctcgacttcatctttaagcacttaggcacattctttgtccatcaactcctcttctattgtataggtcagaagtttggatcgatattgagggcatgggtcatcacggtggggtcgattctgaccatgtatccatgtgaccatgcaaagaggtccaagtttgctcttagaaattttatcagtactaattttatttccaacgctgaactttttccaatcttaagtcttttagctggagaagtgggatcaacctccactttctcgaccaggatcaacctttactttctcgagctcttctaaaggtcccaagctgttcgcaggattcttaaagcgaggatctatgtctgcgtccccactttgggctagacttcattgccctttattgggctcttcttttgagctcttggcaagcatcttctctttcttggctttggacagggccaagttgtaacaatggcgggcagacaattggtgtccccttaaacatcctaccctatgacttgttgggaacattaggtagaggtggtagatggatgtgatcgccttcaagtcgtataaggctggttgacctatcatggcattgaaagctgagggaacgttgaatatgacaaactatgccatcagagttcttgtagttggactttcttcaatagtgaggggaaatctgatgtaccccatgggtgcaattccttgtccaaagaagccatacatcacttggctacagggtgccaaatcatttagttggcaccccatctttttatatgttgatttgaaaagaatattggaagaggctccattgtccaccatacatcttgccacaatcatattcccaatttgtgcaataatgaccagagggtcgttgtgtgggaagctaacttgagcagcatctccttctgtgaaagagatagtgggctctccaagctttagttgcttggagcccctttctttgacagtcaggatgtttcttttgggctcgtgacagagtgtcagagtgtagcgctccctacccttgctggtcttacctagaatatggggtccgtcaataatgacccctaagtgacccaccactggaggtggcatagggtctccattttaggcaccttgtacctaagtctggtcattttacacacaatgacgcagatggagattattcttcctaataaggaatt

SEQ ID NO: 59064 - DNA, 1119 bp, Cannabis sativa
aagccatgaaattaattgaagacaacaagaagaaacttgagattgaagccaaagcacatagtgccatcttcctcagtcttagtgatgaggttttgagggaaattgcggatgaagacaaagccttgggtctctggaacaaattggcatcaatctacatgaagaaatctcttgcaaacaagttgtatctcaagaagaaattgtacacacttcgaatggatgagtcaaaagaattgagaaagcatctagatgattataatagaatcattcttgatctgaataatcttgggatcaaaattgatgatgaagaccaagctataatcctattgagttcactttccaagatgtatgagcactttgttgatacgatcttgtatggcaaagaaactctcactatgatagaggttaaggctgcattaaattctaaagaaatttagaagaagggagatgagaaagatgagaccaatggggaaggattactcattattaaggaaaaattccccaagagagaatatagtgaaatcagaactcaaatggctacaaaggtaaccattcaagatcaaattcaagaaactccacaggagagccaagctctaatggagctggaggaaatcaatgttattattgcaagaaggagggccactttagagatgattatttggctttgaaagctaaattgaagatagaaaatcatcacaagtctaggaagcatggagttgctgatgtagttgatggctatgagtcatctgatgcacttgtagtgtcatctgatgcacttgtgatgtctagatcaaattcaggtggagattggattctagatttaggatgttcattttatatgacaccaaacaaaggactgtttaagactctttcagagagtcatgggggcatagttcttcttgggaacaaaaaagtgtgtgagatcaatggtgtgggaacactcttgttaaagaatcgtgatgaagtcatgttgaccgtgtagcatgtcaggtatgttctagctcttaaaataaatcttctatatattggtatgtttgataaattggggtatgttgtcaaagttaaggaaggtgtaatgaaaaatgcacaaggcacagaaactgtgttgagaggaaggttgag

SEQ ID NO: 59065 - DNA, 887 bp, Cannabis sativa
  modified_base (26)..(34): a, c, t, g, unknown or other
tgattttgaggatgaagtgcatgatnnnnnnnnnaagcctaaagttaaatccaaggtattattaacttgatttgtatcattttattgagtttatttttacaacaactatttatttatttttttcaatgatttattcgtttatcatgacggttttatgttttgtgtcatttttttgtatttcatttatgtatttttgttgatgttatttttgtgttgttattgagttattttttggttgtttttatattacacagttcaaagcgttattggttttgcaagaatttacagcattgttataaacggttgtttatctgtttatttttagtttttttttttttggttgtttattataatttctggattgacaaataatttttaaatttcattttttttttgaagttgtcagtgatgataattatttctgtgttatcgacttcttcttcttcttcctggttgttttcacgttgttgtacaatttttgcagccacaagctttgcgtagtcggtgaattcaaaatattcatctactgctgtagttttttctctgttgttttctggttattgtatggttgattctgatgtcacggtccctgtttctagaaaaaatgtatcatcttgatgaattgatccaattgtgtgcgcagatagttgttgcttggaagttgttgccgggtttttttcaagttgctgcaaatctgtctgtgctgagttgttgtcatatgatgccatcatcatattgttgcacaccattgtttggttaggtagtgttgtgttgctgattttgtttacacacaatgggtaccttatgaaatcaacctctttggctaatagctttatgtagaacaacagacttttgtcatccttgatttgtagtggttggcctccttc

SEQ ID NO: 59066 - DNA, 1199 bp, Cannabis sativa
ctatagttgttctagagtcgttcttatttaattacaggaaatttaatagaaaatatggaaatacatataatgtggacactcaaatgatagctggaacactgaaataacaaatacattgtcaatagttgttttagtgttgttttacgattgtcgtctgtttgtgaaaatgttgaattgttgaaatactgtcaaaaaaattcaggttatggaatctatacccgttctgttgaagagcaatgggcaatgggaagaaggaaaaaattatgtcaattatgaggctagtggagaattcataccaaaggattgcaaatatgaacagctcgtacagattctactctcttcattgcaatgcaacccaacaacaacaaccatgcaaatccagtaccaagtaaaagaaagaatacccccgataaaaatattcaatgatccgagcctatttttttacttgcaattgaagatcaaagaaactgatttcactacatatccattatgtgtcaacccgcagaacaacagcacaacaaccgctgtacttatgatcacatcaaaaagaacacaagaacgagaaaatgtcaaaatgcttcagaacaatgcacgaacaacataatcaaacacactggaacaataagtagaggaagaagaagaaacagaaacagatgaagcaaacaacaaccaatttgacataattgactacgcaaatcttgttgctaaagaaatggtagaaaaattagaaatgactgtaaaaaaaaaacatgtccaaagattaacatcaacaatgcaaagctcataacaaataaattctacccaaaagatgaaaagaacatgcatacaaagataaagaaacactccagagggtcctcggatactatgcaatcaaaaacaatttccaattcaaggtatggaagtcgtgctctcaagaatataacttgaagtgtgtttatcaaaactgtaattggtcactaagagcatcgaaaaatggaccaacgaatacattcataatcaggaggttctcaaacatccacacctgcccaataaatattagacatgaagaccaaaggcaagcaactacaaaattcataatagaatgcatcaaactaaattttttgaacatcaagacaaaagcaacaccacaagatataaaaggagaatttaaatacaggtatggtatcaagatgaactacatgaaagcttggaggagtaaa

SEQ ID NO: 59067 - DNA, 581 bp, Cannabis sativa
tcctagctggtctactgcttgttccttttctaagatgctccgcacgattgaaggcatgggagcttctctggcttggatcccttggtctgagaattcaagggcgcacactttggctaagtgggctctccataatgattgcaatggttttgtgaacttttgggaaattactcctagtgtttttaatgttatcttttctttttaatgttttgggaagatgcttcctcctatgagcatcgctttctttgtttaatgaagtttgaagtttagcacaaaaaaaaaattaaatcgattattttcacaaatatataataataataataattaaaaagaacattattatgaggtactaaggtccttagtcaaggccgagcttgaaatttagttggtaaaaaaaatatttttgagccttatgatattttttcaaaattagtaataaaatatgtatttttaaaagaataatattcttttaggcctataaactaggtaaactctaaatacagatttagtttgcttatgcccaggaccgagtctgttcctacatcttataattagttattggttctctataatttttattacaa

SEQ ID NO: 59068 - DNA, 748 bp, Cannabis sativa
aaaataaaaaaaaaaaagatatattttttttcaaccatatcatattttttgaaaaaaaaatatttaattttctctaatatttttctttttttcttcttcttcagcattatcaccaccaccaccattcaaagtcgccataaacactaccacccaacactaccgaaaccaccatcatttgtagccaccgtaaacaccaccactcaccactactgaaaccaccaccatccataactactgtaaataccatcacccaccactaccgaaactactaccataacttatttttcaaaggattctttctcttcaattataggctcaatctcttctatatgttcatctaatggtgcttctactatattcaaagaactctcataactttcgttatttgagttattatccttaaaactctctaaatcatgcgccattaaattatcacatatagcttttaccatgtctgccaagcgattaatttcttttggaaatgatagtatattctcctcttcttcaattagttgggtgagtttggacaataaggagggaattggtgactccaaccctgaagtgatggatcccaataccaatcgtaatcaaaatctaccatatgattcaacaaatttattgcttcacggcctctccttaacaaaggctccccagttaccactgctccataatccacccaactttttgtttcatcatcaagtccattgtaagagaatagaataaaacacccacttgagaaattgggata

SEQ ID NO: 59069 - DNA, 1316 bp, Cannabis sativa
  modified_base (1274)..(1289): a, c, t, g, unknown or other
ataatgtgcaatcaaaataataataaaatattgaatgtttttacaatgtactcctttaaaaggagtccaccaatacattttatatatgtttcggtattggagaaaatttttaatttattttttatgatcatctatgttgtagttatttaagacaacctccaaaattgtgagagattcagaataatttaacacgtcggaaacaatgttcaaacactttgttgcatattttattttatgcgtgtgtgaaataaactgtttgaatcctatttttgtcatgttaaatttttttgaatttttcaaaattttacaggatgttgtaaataactacaatgaagacaaccatgaaaaaaattagactaaaaaactctcccaaatgacaaaataaatagggatgcatcggtggaccccttttagaggtgtattgtagaaattttttaaaatattaagagtacatttaaaaatatatatatatatatattttagggtgcttcctcattgtaccctctaaaatagatatacaaatacatttcttatctgtttcggcatttaagataatttttttgtctaatattttttcattgttaagtacgttataattatttcagacatcttgtaaaagtttaaaatatttggaataatttacatatagaaagttatgttcaaacagtgtattttacacactataaaataaaagagtcgcatgcaaacaatatattttaaccctattgatcattgtgttaaatttttctaaatttttcacaattttatatgatgtcttaaataattacaacatacgcaactataaaaaaattggactatatttttttttttcaaatgctaaaacatattatagtgcatcgatgcaaccctttgagtagggtgcattattatcgaattttagtagtttttattaatattagggtgtttatataatttcttgatgtgtaagtataatgctcttcactcaaggaagaaaagcaaaacgaaattagaaaatagttagagtaattccttatttatttcaatatttatgaaattttttaattctatttatttttcaaggtatttttacaatgtacatccagtaaaattttaaaaaattcggaataagttataatatagaaagtaatgtctaaactatctatttcacaaatgtataaaataaaataaaaatcacccatgcaaaacactttttaattgtaagctcaattctaaagttgaaattatttttggagtaagttggaaaatagcacttttattaatcaattaatcannnnnnnnnnnnnnnntatatttaattgaaacatacctctttt

SEQ ID NO: 59070 - DNA, 785 bp, Cannabis sativa
aatggcgagatttgaattggagaagtttgatagaataggggactttgcgctatggatagaaagtttaaaagggatcctagtgcaccaaaaagtctccaaagttcgtggagatgagaagttactggtgttatacccatattttgaacaacaatatggtgctgacctgtgtaacatagctagaatatgaaccagctcaaattatgcatcaataaatacattcagatgactcgcctcgagaaatacaattgatagaattatttgaactcaccatcatacaagcaatggcgagatacgagtaacaactaccgactgatgagactagtgagataaataagtctatctcaggataaacagaatacattatagaattttttagaacaagtagaaaatgagttttgcagctcattgacccatatacccgtgtatgttaaaagtataaagacaacaacttcaacatgattcacctcgctcttggcacgttgtaacaagcatctcacatatacttcacttaatattaatggaagagtgtgagatgtactacaacaatatacttagacgttgttccatagagatgtttaagaaaagtattggttgaattacgagaactatgaagcactaacaacataactgttgggattttatgtcgtaaaataaaactcattttacaataattagatttactaatcaataaaagatcaaaattattttatatatgttgcatggtcacatgattgctttcatgattatatgtttaatgtctaaattctattaaatttagaatatat

SEQ ID NO: 59071 - DNA, 715 bp, Cannabis sativa
tttagggagaatttttaacggccaaaaaagttcaagggacatgatttggtacatgtcaaagtgcgagaaaaaaattactaattagcattattattatttgtaaacaatggtgtgttgtgaacttgtgagtggaataaagtcttgagtgctccatttttatgagactgattaactaataaatattaattaatcaccgcttaattttggtggttgtggatatgggttcgaaccacttctcgtgaaccgcctttaaatacttaaacttgggtcccaaccacctagcaggaaagctgcaccatcatccattacaatatactttctttatggtattaattattaatttggataattcttaattataataataatgaacttggttaatttgcctgttgtcttctattctcagttcaatgttttacaaataggtatagatatatttatttatttatacatattatgcagatgctctcaacaacaccaatcatttgatttactccaaaactttatttcatgtccctacttagattcttcttttatagtctaaaaattcaatcaagaaaaggataaagctacttaaactgacaattattattgggatttgggtcttctaagatctctttctctttttcttttctattttctttatgttttttttaacaaaaaaatggttattatcattaaagtaacactaatcataaaaaagaaagaaaaaaaa

SEQ ID NO: 59072 - DNA, 1331 bp, Cannabis sativa
gtaaaacttttgttaggtcctaccataatcttaccctataaatatatattatctttccattcactaactaaaatttatctacacattttctacattattttatcatttataaatggaattatttttgttggattttaaactaatactatatcaatgtttgtgtattatttcagtaatatttaacataaataataataataataataaaaaaaaatctttccttaaatttttgtttcttcatttttgttttgacccattcttgcataaataattttattaaaaattcttaaaatctaattaattgtattaatatgttattatatgtaaaagtattttagtatttcctttcaaaagaaaatagtaatgaaaaaatcattttctattttatgctttaaaatcaaactataaaaaggatcaacaaaaacattggaataaaaatttttgtttgggctaatttgtagtaaatatttaccccatctgaaatagtcttctaacttgggtgtactcttcgagttatttggaggtttgtgtatttacgtgcagttttttcttttttcttttttcttttttcatgatgaaagaaaattcaacgaataaaagtcagttttggttggatgaggactgagagaaggatggtcatctttctcaatttagtctcatatttcaacatcactctcttatatatttttgctctatgcttaactaacaattaacatacgtgttcccttggattatgagaataaattaagaaaagatgaccaaatatatctctctaaaaataaatgtgttttcttttcagcagcttaaaaaaaaaaataaagaaaaatatataagaatagatgttgcttataaacattttttttaaaaaaaaaaaaaaataaatattggtattgagccatgtcgcaacttttgtataacacttttttgcttcttgaattttttgtcgtttaatttattattattttctcatttgcaactttgaaaattggaaaaagaaatgtttgaaaagaatttagaaagcaaacaaaaattggtgattacatggcatgttttctttaaaaatatttaattgcaatgactatttgttaatttattgtctatcctgttctaaaaaaaaaaaatctattatctatataaaaaaaaattaatctattatcatttaccaaaaaaaagaaatactgcatctgttacctattattaaagaaacactttacatgtttgatagagttatttgtaggggtgttcaacaaaatttacaaatcatccaacttgaataaacagtctaaaacaaaccgagtaaaccaataaaaaaatacaacctgaaataatac

SEQ ID NO: 59073 - DNA, 1285 bp, Cannabis sativa
ttgggataaaagaaagacctcctgctaacataattaataggtttttttatttctcttaaaacttaattaattaattaataaaattaaatatagctttctttctcttattatctaacacaaccctatatcaaactaacaaaaccctaatactaacttctcctctctcctttctatcggtagcacctcctttcttttaaaaaaaaaattacagagcctctttcttcctctctctcgttattgcagctgcccagttaagatggcaaaactcgacctctgatggtctaacctgacaataaaatgaagacccccactcccttaaaaccttacatccatctttctctctctctaaatcgtattgcaaggttggtatttccctcattttctctctgaatggtatggcgttggttgtttggtggcactgagacaaacttaggtatggcttttctatctctctctcactgtaatgatatctatttccttctctgttgataatgtttaccctctttgtctctcttctctgtagataatcgacagagaggcttgctttggggtttgcagagttggccggagtctggattgcagaggcgatgggtgaggagatcaggatttactgggcttcagtttggtttcttttgatgtcgcttttagccaacaacaatgagtcaattaataagcaataagaaatgtaattaagataaggtaagaaccagtaaacagtaaagaacacatgattttaaagaggtttggcccctttagttcggtaatagcctactttccttagattgtattaacttgagaataaagaatacagtattttctctcaaagctctcacaatgaaatctttatgtgttttctcttagatcactctgaagtaattctttcgaccccttttacagtgaggatggatcactatttatagggctaaatgcgtgagggaaggtttcccttttgcttacaatatctataattggtaagaacatacattacatatttagaatacatagattgagggattcagacagctttccatatccctttgatacgatcccaggattgtagggattgtatgtgtgcttcatgacgtcaatcttaaaatagctaagtctttatacattgttcagagaaatgacctcgtttgttgtccggattatctacccttgccctgctcggtcaggtagactttgtttgtacagaggtatactgagtcctatttggaatatccttttagccagatgtagaaaaaaacagccacgtgtaactagtgtgtgtttccacgtcatagta

SEQ ID NO: 59074 - DNA, 552 bp, Cannabis sativa
atatttaagtgtataaaaaatgaaacattaagttttatgccgtaatttacccaaattaaaataattgttttgaagcttatatttttcataccataaattattcataattctatatagtttattattcccatcttaattaaccctgttttttctttgctttctacaagttcgaaaagtaaattcatgcaccaactttattactggatgatgaagattcctacacgtattaaattaataaattatttccagtggtctctatttatatgtgtagacataattccaaattagaggcacaattatatttttagggacacgattttgtctattgtattttcacgaaatgtatccgtgatgtacggcagccattaaatgggggatttatttgatttgagtgttgcggttgatctaggagaaattaaagttaaaaaataataacgcaccttgagacccattattacgtactctgagacgcatctaatgtattccgtacatcacggaatacattctgtgaaagtacaataataagattaaatcgtatccctatatttttat

SEQ ID NO: 59075 - DNA, 655 bp, Cannabis sativa
atgttatgaccaaaaaggtagtagctccaaaaccttttattatgtgctttgtaaaaaaaaattaagcaattttttattaaaataatattgtatacttaattaaattatatttgatattttttttaattcaaaaatttaaatacaacaattaaaataaaaattaaatataaaattaagtatacgggcattgcacgtaatttctgcctagtatatatatatatatatatatatatattaaaaaaattcttttgtttcttgaaaatctctagatgcatgcttcaatttaactttgttagacatgatgatttcaatttaatttgtatatttatgagaataatttacatatttttgatttccatgactgcactcgttatatcttgagttggttacgactttagaatctgtgtctcccactatatgaaagagataaatgatttttaatgtcttctcaaatatataagtcgctaaatctttttttttctgtgtagtgagcgatactattttttaaattctaatttattattattactattttactttattaacgcttatggttttatttcatcaatgagtttggtataccgtacactctaaagaattatttacatatcagtttcaaaatgtggtatactaactttcctaaatcctacttagt

SEQ ID NO: 59076 - DNA, 1773 bp, Cannabis sativa
  modified_base (73)..(77): a, c, t, g, unknown or other
  modified_base (717)..(724): a, c, t, g, unknown or other
  modified_base (1132)..(1138): a, c, t, g, unknown or other
  modified_base (1232)..(1232): a, c, t, g, unknown or other
gagatgcatggattaggcacgaagtgagtttttctagagggggatatttttggattctgcccctagtaacctnnnnnttacatagtaaataggttgctggtgcttaccctcttctcgcactatgactgcgctaatcgcatcttccgagatggccaaatagagaaacaacgtctctccagttattggtttcgccaaaactagaggcgtcgctagatgcctttttatgttctgaaaggcctcttcgcactctttcgtccactcaaactttttgttgcctcgcaatatattgaagaacgacacacacttttcagttaacttcgaaataaatctgttaagttcaactattcttcctgtcagggcctgtacttcctcaagctttgtcagagatggcatgtttattaatgccttaatttttttagaattttctttgatacccctcgcgttaactatgaagcccaaacattttccagaggaaactccaaaggaacatttttttgggtttagcttcatgttatacttctttaatatcttgaagcatttcgcgaggttagtggtatgatccctactttttattaattttactaacatgtcattaacataaacctccatgttccgcccaatttggtttgcgaacatttcgtttaccaatcgttgatacgttgccccagcattctttagtgcaaacgacatgaatttataacaatagagtcccatgtnnnnnnnnaagcttgtatgttcttgatctgggacatacatttttatctagttatatccagaatacgcgtccataaatgacataggttcatgcccagcagttgcatccactaattggtcgatcttgggtagtggaaaacaatcttttgggcacgccttattcagatcagaaaaatcaatacaagttctccaagttccgttaggcttcgggatgagaacaagattggctatccatgagggataaaacacctcctgtgtaaagtcattgaccaacaacttatccacttcctgttttagtgccccttgtctctcgaaatccaagggtctccttttctgcctcttcgctgggtagtttggatcaatatttaaatgatgacagataatagaagggtcgatccctatcatatctccatggctnnnnnnnaattgatcctggttcaccttcaaaaaacttattagctattatttgagtcgctcgtccaggttcttcccaatgtatacacactttgtgggatttnctggattgaggataacctcttccaattccttaactggttttaataggtttctctcatcttgaactcgggggtcaaaatcttcgtctttcgtttcgatttcttttgccaagatcgccatcaacttatgaccaaccttcctatgctgcaactctatgcgatagcaatcgcgagctagcatctggtcaccacgcaccactcccacaccttctggtgtttggaacttcaaggataggtgtttgatcgaactgactgccctagtccgatcagtgctggacgacccagcaatatgttgtaagctgatggtagaagtcttgcttaacagtggcagatagaggtaccttgcccaaagttaatgcgagctcgaatatgccaagactggtaatgctgtctcaggtgaatccacaaagattcaccatacaaggcctcaatttggccttttcgagccctatcttccttagagtttccttataaaggatatttgtctattaacactcttttgatcctttattggcaagttggatggtaataaccaatggatcga

SEQ ID NO: 59077 - DNA, 1240 bp, Cannabis sativa
cggctcattcaggataatgccatactggggttcgaaagtctccattgtatgaaaaaaggtcgttttggaaatgggaaaaagatggcgcttaaaatagacatgtccaaagcttatgatagagtcgggtggtagtttttagaagcaatgatgctttgtttgggttatgacaagcgatgggtggataaaattatgaattgtatcacaacggtctccttctctatccttgtgaatggggaagttagtggccttattcaaccccaccattgccttcgtcaaggcgatcccctctctccatatatgtttctcctctgctcgaaaggcttctcttgcctcattcaagaggctgaaacagcgactaaaatccacggtataaagtttggaagagagggtatcaaattatctcacctcttcttcgccgatgacagctttgtgttccttgaagcaactccaaccgaatgtagatgtatgaagtctatattagaagaatactcgtttctgtctggtcaacaaataaatctcctgaaatcggagctgtgtgttggaaggaagatcaagcaaacagatggaattatgattgcggctgatcttgaagttaaattggttgactgccacaccaaatatcttgggctgctggctacaattgggagaaggaaaaaagaagtctttgagtccattcgtaccaggattcgggataaacttcaaggttggaaagtcagcttattctcccaagcgggtagggaagtactcatcaaagccgtaattcaggccattccaacttatgtaatgagttgttttcatcttccaaaggagctaattaaggacatccatgcaatgatggcaagattgtggtgggggttcttcggagtctaagaataaaattcattgggggaaatgggaaaaactttgcaaaccaaaggataaaggaggaatggggttcaaaaacttagaaaaattcaaccaatccttattagcgaagcaagggtggaagattataaaccatcctaattcattgctggcccgtgttctcaaggcatgttacttcaccaactctacattcttagaagctaaacttggaggatttagctcctttatgtggtgaagcatcttatggggtaggaaaataattgaaaagggtgttcgtcggagggttcaatcggtcagagaggtgcacactaatgaagacaaatggctgccccgtccctccactttcgctcttcgcactccagctaaagttaatcat

SEQ ID NO: 59078 - DNA, 1727 bp, Cannabis sativa
tttgattaattaatcaaaaaccatgaagaaactacaagattttgttaagtaaaatttagaaaaaaaaaacaaaaaataaaatcattcccgaacaggcccttagttgtttgaattttttggttatgatttttttttgttatacctactttcaggttcctcctaagatttcagtgaagtttgaagactttgatattcctaaaaaaaaaatcctcctgaggtgtgtatttttgtttctgttttttttctaatacatttctgtttttgttacttatgtagtatattgtattttagctttatattttttttattgtttttgtgatatttttattggaactgttgcaggaatgggattacatatatgacctaaagaatctctttcttgcaaaagccgtctccactgcttcatacaaggttataaataatattaacaattgtctttcttctaagcagcttgaaatgttttaaaaaacttgctttggccatttcattaagcttcttgatttcaaagtgcaaccgcaagtttttcatgggttgttgttccgggaggttcagcagctaatgatgctgaattctgggttatgattcgtggtgttaggattaggtttagcattgaggaatttgcattgaaaactggtttagattgtgaaggtgattgtagtgtgttggattttaagcaagatgttaacagtctttgtatgaaatattggccgacctcaacctctattactaaagaatctattagggaatgttttaccacaaagaggtggggtgattctgatgaggatgctattaagtttgcagttctttattttgttggatggattttcttagtggtactaagtataaaaatgtttttcgtttcattttggattgtagacatggtgtatgatgaatttgcttggggacggagttcttttgcattgagtatttcgtcgttgaagggtaagcttgacaattgggttgaaagtgttataaaggcaaagagtttaggaaaggtgccgagtgtattttatactttgattggttgtcctcatgtattgagagtttggttttatgagtgttgtaaatacatgaatggtaagtactaccaaaaggaaatttttggtattccaacgattattcagtggacttgtagcagccagccgactttcaaaattttaaagactacaattttttatgtctccaaagacaaggtattgtagtttgttgtttttttttttttggtttattgttagttgttttgttgttgttttattttttaaagagtagctcttattgatatttttctttttatgttttttctcagttgcaactatctaatatgaaacacacttctgctgagttcaaatcattaaaattgagtagtttcaagtttgacactgattataattcttacaagagtatgcctgttccaaaacaaccttctgtggttgagagtgacatatctgtcaagcttaacggtttttctgaaagagtgacatatttgatttggttgagttgaaagagtttgtttctgcacagtttgtttcttttgctgctcaaatggctacaatgcaaacacaattttcttctatttttactgattttgttgctaaggtatgctagtttttttatggttgttttcttgtttatttttagttgtgttcatctgatatttgcttaaatttttgttacaggacaaagggagtgactcttctaatgatgatggtggaagtaataatgaagaa

SEQ ID NO: 59079 - DNA, 805 bp, Cannabis sativa
acgtaccaatgaaagcttatattagtgtcgttacaagtataactaaaaatattgtaaagtcttttgtttaaatcaaattggaatcccaagtcttattatgtaaagctaaaattttatcatgttttctcttattattacaactttttcttatgatgaatattttatttttttataatctgtctcgttaagcaagatttatattatttaagaaaacgcatgtagtgatcgtgtgaaaaaattatcctaaatgtgatatttactgtggtgcaaatcaactttcaatggggaaggagatcaagtgcatctgcaacttggttttttggggtggtttttacacttattatgagtgtagctcttgctttgctaaaaaatgtattttggtatatttctatctcttttagtatatttaaaagagttttcttaatataattattttttttttcacgattacatataaattgtaattatttaagatggtatgtaaatttttaaaaatttaaaatagtttatagtatggaaaaatattttattatgccagttaatattttttattttatgcattgtaagttgagttgtattttcagtattaaaaattattcatatattttaataaatttataagttgtccaaaataaaaataatgtgctatacgattatatattaatttttttttttttaatttaagcatttatatattacaacatgttttacttgtgattcgaacccagaactttcaacactcatacacccacttatagccacttgagctagtttcaagtggttaaaaaaaaaacaaaaacgcccc

SEQ ID NO: 59080 - DNA, 1268 bp, Cannabis sativa
ctgctgtggacagaacagtatttgcaacatggacagacattggttgtttgttgcggatgtccatggagtgattgagaggaggataagtagcaaaggtatttggaggagcagaagcaacattaggcatgaatatggatgacaaatctgagtaattagcatgagggtcatcagtggccgaagcattcaattcaatgtttgctgaaggtgccagtgcagttgatgaagaaattgccttagtattcataacagtaggattaaaaacaacaggtgggggttttgaagccgtggccttgactcccaaatcgcctactgttgcattgtaatggggactaatgcgtgaatcctctgcattattcttgttagatgactccccagcatatagagtaggaggttgtggcagacaacgtttgttaagttgaggaatagcagaagtgagactcttcttagcaagccttgtgattaatggccaagcatctcccttagcgaagtctgtacgatatcgatcatatcccgaagatggtaaggcagatcccttgataaaaggttgatattccaataatggttcttctccattatccaatttttcaaggaaaatggaacatttgttataaggatggccaataaccccacattccatacaatattccggaagtcgctcatagcgaaaatcaacccaaaaatgatccatcacatgacttagagaaatcattctgccttgtttgagtggtttggaaacatctataagaactcgaacacgcaagaatggtccctaaccttcatttaaagagtcttcaaaaacatccttatactcccctatgatgttcccaagagcaatagccaaagatcgagtcttacttagaaatggaagtctataaatttgcacccaaaagggagtaaattttaaatcatctgaagtaaaagttttccccacctctggtgtgtacagaacgatatggtgattttgaaaatgataaggctctcgatcaagaacacgaatcttgtcaccttcacagccaaaagtaagcataaacatatccattgcttcagaaattttgacagggaatcttccatcccaatgctcagccatctgattttgtaatgttgacaaccacactttctttttggtaagtattttcgcatataacacagtgtcaaccgagagagtaggtgaagaggcttctgaatcatgaaactcaaaaatcgattcttcatcttcggttaaattgatttttgctttcattttgttgagtaaaggatccattgaagca

SEQ ID NO: 59081 - DNA, 1805 bp, Cannabis sativa
aaataaaaatgtgtgggagtttgtttagcatggaactatttactcagtgcttgcattattctccccctgctctaaaaaatacaactacgttgtatgcactctaaaaagaatctaacctggcataacaaactttccagcagcatcaatcacagtgacatcatcaccaacctgcatatggcataaacaaattaggtcaaacattaaatcataaagattaaaaaaaaaagccatataaataggaatcccaaggaaaacaaaatattacaaacttttaagttttaacattctacagatggctacgcagacaaacaaagtttatctcagtttagctattgtgataaatttaacgcacatggtaaaaaaagaaaaatagaatcaatttagaagtactgaaaaacaaaactatattaacagtttgacatatacagaaattggatacataaatatcatgctgaattgaaaagaaaaaaactgtgtaagcattccaggaaaaaagttgcacctaatgtatgatgtaacaataaagtcgaaattaatgagcaaagttataaactttaataaacatacatcattcatagtcacttagtttaatattaatttaccaattaatagacaatgaataataataataataaaggcatagtcccattcaaaaaaaaaaaggcatagttaaaaaccgccgttgcaaagtcaacaaccagagctagcacaaaaaactatgatattcaatttcaaaatcattcaggaaaagagaaaagaaagaatgaatcaaacatcgaatgctcaaaacataagttaatatgaggctttacggccacaaatgatgccatcctcaacataaacatcagcaacctcctcgtgatgagcgttcacaacggtacctcccttgatcagaattttcgacaaagatttagtcgaaaacccacaggtggagtgaccatctccaattccagcatcacataactgaaagaaataataaattcaattcagtcaaaacaaatctgccacaaacaaagcatgcaatttttttctttcttgttttttctatcttgttttctcgtgaaccaaacagaagagtgacctagtttgattctgatacggaaggataggagaggagaaaagaaagatcaggagtgaaagattgaaggtgaggagtttgtaaccggagtccatgggagcaagctattctatttctaactcagatcgatgaattggcgtttgttttgtcctgtcttttatagttgtgagaaatgctaaaagcacactcattctcactttctgcttatcttttcaaatacatcactacaattttcctttttatatttaaggaaaatgatgtaagacctcgtatacctttttgaggaattgcttaccataacacatcttagccgtttgattccaaaaaaatgaatttttgctaagatctaagggatatgtgatgttaaccaaaaataagggcaatataacaatagaaattggtgatctattttcttttgtgccattatactttatttttatttgtaaactcatgttcttcttcccttcaataaataccttttggcaattggacatatttttaactttacttatatgtatgtagaaatttaatcaaataatgttaaaataattttagaaaatttattaatatcaacatttgtctttagaatattaaatttattattttgaacatcattattatcatttgggataattgcggcaaaagtctccaaaaacttaaggttgatgcaggttagtcctcaacctcgaaaattggcgataatagtccctaaggtcgcaatatttgt

SEQ ID NO: 59082 - DNA, 672 bp, Cannabis sativa
ggcaagaactgggaaaggacacagattagactccaagcaaatgattgagaatttaagaccaaaattcccagctcatttggggggtatgatacaaggtatgcccgattgatgttagctgtaacctcttgtgtccgtttgccaaaattggtcacatgcaaccaaaagcaggaaacattttcaactaagtctttccgagggaaacgtgcttgaattctttcctcaaaagctaaatgtaggcgtgaatccagagataggatccgctttggccaaaattcttgaaaaaaagaaaaatacgcctaaattccttcttacaaatctctgagaatttcctatgagtttagtcgatcgagttgcatggttggctaaaacattaggctgagatagactaagacaagaaaaatgcttaggagtttaaagcagtcatgggcaagctcccagaatcagccttgtaaaaaaactaaagcctaaagaagatgcgtgaaatcgcgaagactcctttttgtgaaaggaaatcatctctgggttaactctaagcgagtgattttttccaagtaaaagtttgaatgatgggaagaagcatcacaacttcgggaatgaaagggtagaatcaaggagccatccctaggtcgattgagaaatcattgagactagtgagaaagatcgaaacactgg

SEQ ID NO: 59083 - DNA, 1124 bp, Cannabis sativa
aattttttatttaattttttttaagttgttcaaattttttaattttttttttagtttttagtttttattgttttgagtcaattttcttattatgagtcaatttgaaagcaggaagataacatgatttgaaaagttcatttattttttcgaaaaattcgtgtgcttggtgatattacattcttgactaattttaattttgtgatttaaaagaacatggaatcatattaggtaacttttggtttatgtatgctaaattggacatatggaaagttgtttaaataattctagatcttgcttgcttgctatttgaggcgaaataataaataatgcatggctagaaaagtgatttaggcatttttttttggaacgattgtccctttcaagccatccctgtaattttatcctagttactctttttgagccttaacctattctttatttctacacattttgagtctaaataagataaattcatgaatatccaaaaatataaccctaattataccatgagtagatctttagtttggaggaatttggatgggaagtttgttatgtgtgtgtgggaaaaagtatgaaaattgaaagaatatgaaaaaaatttagattgacagcaacttgaaaaaaaaaagagaaaagaaagaaaaatatgacaaccagtgtcacattcggaaaaaaaaataaatataaagttgttgcaatcttgttgaaaaaaaaaatctcatgtaattaaaaaggggtattgggattgtatgtgaaatatatatatatatatatataggtgacatgattggagaagcttatggtataggcaagcctaaataaccatttcaactacccttacctaagcctaacactacaagcctaaaacgaccttttgattcttggtagtgcattggtttatattaggggagaataataagtattgctagtatatagaattttgggttagcggattgatggttgtaattggtatgcataacgtggttcaattgttagttaattgcattctatagtttcatgagcttaatgaaatcagaattgaagtgtgtcaagggtgtaattgaactgaaattctagattgttatgcataagtaaaatttttcataatcatgttattgagtcta

SEQ ID NO: 59084 - DNA, 984 bp, Cannabis sativa
tatataaatatattgaacaagcatatattattattcatatgaaagtatctattgggggatacacatcttatatttccacattatatatatataacatggtttgacatatatcctagtactttcttattacaatgcaagcacaaaccacacacacaacatatatactatatatataattattcatcaacaagagctagtgacaatattgatgatggtgtagaagtagaagtagtagtagtggtagtggtagaagatggggccaaacatgttgaaccgtgtgtagtaccactacaatgatttgggtaacaacaagcgtagttaagagcacaaggttgaccaagtccacgacaattacttactttcacacatctgttatcaacactcagagttccttcacagtaaaacccttcacaacaaaatttcagttgccaaggtaaggcactgcaatactcaccttctatataacaacgatcattactacttgggataatagtaacactatgtgctactctactcccatagcaccaccccatattattaaccattgttattatcacaacaaatagaactattgacctcttcatcattgtgattttctagctattatgtaggtttctatgttttttttcttgatgatatatgtatttagacaagtgtatttataggagaagttaagctagtaaagatatagctatgtataaaaatattattagatgcaatccattattggttcacctcaattatttcattatatgataattcatattaatgaaaatgtcaactaattactaataacaataatttaattaatattacgtacattcttacttttttttccctctctcttttctcttatggaccacatgaaataaacaaatagtaataaaaaatattaatattgcttttgttgatataagacaaaaagttcaattatgacactaataaaagtattttaaaaaataataataggtggtttctctcact

SEQ ID NO: 59085 - DNA, 780 bp, Cannabis sativa
cctacggattccaggcttagaccagaccaacgacatttggagaatggagaatatgagaaggcaaatgctgagaaacaacgtttagagaaaaagcaaagaatggtatgtatggggcatttttgcaaaatggcattgtaaatagcctttctcacatacttgacattttctctataaggaaaatgtctatattcacgttttttttttttcattcttcttatctctaatggtatgatctggtgtatgggaaatgcagtcaaggaaattacaagaaagtggatggaaaccaaaatagttcgaaagaggaagtgaagatggacctttctgctacatgggtcggtagtccttactatgtcgtcccagaagtgttacggaagcattatggtccagaatgtgatgtttggagcgctggggtaatcatttatattttacatagtggagtgcccccattttgggatggtaaggatcttatgtttcatatcttgttgttttacaaattcattaatcatccatagttgtggacttatatcgattgtacctgctttttaatggatcaatcagaattggagcaaggaatatttgagcaggttttaaggggagaactcgattttatctctgaaccatggcctagcatatctgaaagtgcaaaggatcttgttcgaagaatgcttgtaagggaccctaagaagcggcttacggcccatgaagttcttagtaagttaatggtcttgattgattattatgtcaggtgacttaatttgtttagcatccatagtcatacat

SEQ ID NO: 59086 - DNA, 948 bp, Cannabis sativa
ttttgggttataatagaattttttttttttttttgtgtgtatatatatgtgcatgtatataaagacacatatatgtgtttgataaaatgttcaaaagaattgagttttcactagcctaaagaaataagacatattcagttgtacttttccttggttaataactttatgtaaaacactagacttttgtcatccttaagttggagtggttagcaatcttccttcaattgatatttcaattgtatttaagttgttttagggttgcattgtagctcctccatcattatttgcacaattcaacaaaattgcaatctcttcatattaattctctacttgatttgtaatcaacatagtgcttgttgtcatcccaatgaccgttgctctgtaccaaaatttgcagaagttccatacctgaaactagtgtatcgatttttcaatattgttaagcaactattttaatacatgagaacaacgcataaataactattctatgataataatcagtaaataacgcataaataactattatgataataatcagtaaatgaccttagatgtatcataattttttcaatttacaccaatttattcagatcaaccaattttcagtataaatttgctttgatctactacagaaatactaaataataacctaattatgaagaaaaatatttaatgtattagcacaactagaaaaagggcatttgtcttcagtttttaggccaatttatcttcagtttttattaaaattcgctaccgaagtcatttgaggcgatgacatgtgttttaaaatacgtcttcggttatcatataaaaattgaagataaaagagttacttttctcttcggtttttatatatgctgaacatctttggttattttttttaaatattttaaatatatatttttttttatttaatgattaattatatattattatttttttttttga

SEQ ID NO: 59087 - DNA, 1314 bp, Cannabis sativa
aaatattatttatatatataataaaataataaaataaaaataaacaaattccatttgaactgatatttggcgctgatgtggcgggctaaaaacactacaaactattatttcttctttctcattttttttttctattttttttattaaaattaattattttaaataaataaaattccacaaaataaggaatatatacggtgatacttaaatttctttttcaataaaatctaattcctaaattttctctacttttatcttattttgaatttaattaaaaataaataaaattccggtttaattatatacatatgatataaaatttcttattcaataaaatctaatttctaaattttctctattcttatcttattttaaatattaaaaataaaatactcttacctattctcattttttttaatatcaattttctatacatatatttatagaaaaaaaaaaagttgaagataaaaaaaaatagtgaagaaaccaaagaatttcatgaagaagcttcaaacacatactttaaagaaaaaggtatcatttataatttcatgtgtaactaatttatttatttatttggatgattttagtctatatatctcaaattatacctattaatttttataattctctccttcaattctttccattaatttcacaattctctctactacttcaattcttgatcatgagtattctttttaatcaagtttatagaattagtaagttatgattttattgatgagaaagttgtgataattttatattatgtcatataatttttttttcagttattattttttctatttttttttatttgtcaatcatgccattctaatgtaccgtataatttatatatttccagaacctattgagtaaagattttgtgtacaaaatttaaagattgttgcaatcacaggatttagattgagtatagattatttttaaattactataaagttttatttttgactacaacttcaataaagagactaaaataaagaaaaaaaatagtaaatattccaattaataaattttataggtgtgttttttattccggttattaattatggtgaagatgaaaaattaaaaggtgagaaaaaaataaattacacgttaatattctatattaaacatctatatattcaaatgctatttttcaattctattttcatatattcaaaattctcattccataaactttctactaatatttttcaaccaataaaatagaaaggcaaattttaattcccgtatgaaaattaaactttcaatcccaataattaatacaaacaacatcaaatttcaaattct

SEQ ID NO: 59088 - DNA, 1179 bp, Cannabis sativa
agatgacaaaggtatcttccacaccagttcttggtcctttaccgtgagcacatcccttagaacatcctcatcccattcacgcacatcgactttcattagggagttgaccattctatccacaaggcacatttgttgagactcaacaaaagggttaacatcatccataagccacgggtcattgaggatgctaacatttgagccattacccactaatcttcttgctccatcccgaaccaacccttgagcctccaagacactcctccaaatataacttgagttatttcctagtgttgtcgtaataaggaaattaccattggcaaaataccttgctttgaagattttcccaaccaaactatgttcacaagtaagcaacttccaaccttgtttagcaagtaaagcaatattaaaatcacgaaaaatcaagaaagcccattccacacgtgctcttatgtttcgagagcttatcctaactcatccaatgtatgcctttattgttgttggaacaccacgagaacttggttatcgatcgttcaatatcttggcaaataccaacaggaatcaagaagacattcatagtataagcaggaagagcttgaaccactgatttaataagaacttctttgcctgctcttgaaagaaacttgttatcccaactttgaactctcatttgaactttatcagtcaagtaactgaaaatcgccttcttatttcttccaatagtacttgggagacccaagtacttgctacgctcttcagcctcatgaatacccaaacgttgacaaatcgcttgtctcattgtagatgtagtattgctgctataaaaaatagtggatttgtcaaaattcacctgttgctccgatgccttagcaaaactctccaaaagattaatgatgtgggagacttcctcatttgttactttacagtacaaaaaactatcatctgcgaaaagcatatgggaaaccgccggagcaccattcgccactctacacccatgaatccatttcctttcttcatatcttctcataagagctgagagtccttcagcaaagaccaaaaacagataaggtgagattggatcgccttgccgaagccctctactaggaacaatagggccaagagtgtagccactgctcacaacattgtattgcacagtgcaaagacaaccatatatgagacgaa

SEQ ID NO: 59089 - DNA, 2474 bp, Cannabis sativa
tatatatatagttgtatgtgtttgatggtctaatttcaatgccattagtttggtggggtggtgagttttctagtgaaaaatcattcttttctttaggcattaaaactagtacttactatatatactactgatccattttcagaagctgtaaaaggaagagtttgctgaaaatgttggctgaaaaagaggactcatatccatgtgataatagcatgagacttcccataaccattttctttaaggatgccaggtactgctaactgttttatatcaaaatgttatttttctgtttttttataagtgattatatgataaaaatctcttttgatatgagcagattagtgtttaaattagatgaacttgctgaggaaatagcttcaattgcattaccagcagctctggctttgacagctgatccaattgcttctttagtggacacagcattcataggccaaattggtttgtccttaaaacctcttttgttataagattttaatgtttttgtatgtagcttagtttgttaccatttcttggatcaatatagggtcagtggagctagctgctgtaggagtttctattgctttgttcaatcaagtatcccgaattgcgatattccctcttgttagtgtcacaacctcttttgttgctgaagaagataccattggaagagggaaacctcaaactcaaccacaggaggagactgagaatcttgaacaagaacaactcataacacaaaatagtatgttttctctctttaatacttccttattttaccaaatatcttcacctggaaatagaacaagaaaactaagaaacagactgaacaataaacaaatcagttaaaacaaactatatggggagaaaaagacacttacatttttacaatgaatccaacttaaaatcagatcatggaagctttgatatagaggcagttgacaatggaaaaaggcatattccatcagcttcatcagctatggttattggtggcatcctaggcctcattcaagccatattccttatatctgcagctaaaccattactcaacttcatgggagttggttctgtatgttatgttcttcttcttgcctttttcatgtgacataagttacttctgattattattctactgatacaaaactaagtgtgtttgtctttttttgaaggattcacctatgctaaagcctgcactgaagtacttgacactgaggtcccttggtgctcctgcagttcttctttctctagcaatgcaaggtgtatttcgtggatttaaggacacgaaaacacccttatatgcaattggtatattttgatggactttagtactttaaactcatgattttgatttttttcaatgttagtaataagacattttttggattcaaattcagttgttggagatgcgacaaatataatcttggatccgatttttatctttgtttttcgccttggtgttggcggtgcagccattgcccatgtcatttctcagtaagtttttcttggtcatgttacaaaaaatatagtgcttttgggaaacttgtctgctcacattggcctaatgtagtgctttttaggtacttgatttcaatcatactattgtcgagattgatgagtaaagttgatttgttacctccaagtattaaacaccttcaatttggtaaatttctcagaaatggtaagaaccaaacagccatcaacaaaatttcagtacataatttccttagaaaatcaaaacctcataaaccctttactctgaaggttttctgctattaatgagggtggtggctgtgacattctgtgtaactctggctgcatcattggctgcgcgccagggtccaacatccatggctgcttttcaaatctgccttcaagtttggctggcaacatctcttcttgcagatgggctagcagtagctgggcaggttcgaaaaaatttatcatctcaaagctcaaacaacaatttcattctctctgaattgacatattttttatctatgctaagctttctgttttgcttcacatttctttcaggcaatacttgcaagttcatttgcaaaccaagactatgacaaggcaactgccactgcatccagagtattgcaggttaccaaaacatgacattttataacactacaaaacatctcatacttaatgatatcatatcaccttaacaatccattgaattttgcagttgggattgactctggggttggttcttgcaatatttcttggagtgggaatgccatatggagccaagttattcacaaccgatgtgaatgttctccatctcatcggcataggcattccggtacttcttttctctttttctttcaaattgggttcccgcttaatcctacaatatttaactctatgttcggtaaggtggaaaaatggaaggaaagaaaatttaagagagaaaagtggagtgttgagaattatgagattttatcttaaaatccatgttttttttttttttt

SEQ ID NO: 59090 - DNA, 841 bp, Cannabis sativa
ttgagatcaaccttctaagttgattgttcatctcaccaatcttatcaatccgtacttttatttttcatagctcgcccttatctttaaaagggtgagtttgaatatttctacaacatgtatttttttaggcgagtttattgaatgcattaattgctttataacacaagctcattttttatacgtgtcaacactatatttttgctcaaaatatgggtataacagagacataaaataacaataatttatttcattttgttgttagttatgtgaaaaagaattaaaatttataagtaattaaatataaaagaataactaatctaaaataaacgattcaatatgcacttttgcaaattggattgaatttaagttattataaagattgattgaatctaaaaatataaaaataaaattaattaatataatatgatagaattttgaatttattaaaatgatttaaatcttagattaaatataagtaaataaaagaaaagaaaataatacttctaaagtattgaactcatgacattttaattattttaagagtcattattataaaattattataagttgaatatgttataatttctacgagtataattattgttttaaaattaatttaattaaaatattttttatgtaaatttaaaattaaaaagatatataattagaactaaattttaaacagacataagttaaaaaaataggtttggagtttgttaattgaatttataattaataatatttaagattaattataaataaaaaaaataaattaattatagtgtgttataaaataatataaaatagatgagaagaaagaagaagatgaagagagaaagag

SEQ ID NO: 59091 - DNA, 1456 bp, Cannabis sativa
tactgggttttctggaaaagatgatcttatttggtctagagatggctcaggtcttttcactgttaagtcagcctatcatttggctctctcttatcaggatatcccatctacttcgtctgtcattaattcaaggaaattttggaataaagtttggcattctaaagtccctccgaaaattaaacacttcatttggagagtcgtgtctcacacccttctagtagcttcttctctctttactcgtcatattattgattctccactttgttctttttgtaaaagtaattctgagacggttcatcatgctctgttagggtgttccagattgaaaaaggcttggaaatcctctaggtttgttgatctttatcttaaatttaaacatcttgatattactgatattttgttgacctcttttgaagtgttagataaggaatatattggcattttgttttgctttctttgggcattatggaataacagaaataattacatacatcataagcatgttatccctgttactgatatttttgattggagtataaactacttttttcagtatatggatgctcagcaaaaaattcagcagaatcgtgtgttggatcaggtttcaaatagggattcggcgggtgcttctgattcttatttacaggtttttactgatgctgccattgatgttcgtggtcaaaagcatagttatggtattgtggtggctgatgagtctggtgttgtcaaagctggtgtggctaaaccctgtattggaagtatccctgctgttatggcagaagctaaggccatttatcatgctcttttttgggtacagctacttcatcttccagtggatactttaaagacagattgtaaaactattgtagataaacttaattcttgtaattggaatgctagtcctctggatgatgtcttagtaggtattaaaaacttgttatctttcagtcctaccctgcgaattgaacatgtgtatcgagagtctaatcaattggctcattgggttgcaaaatttgggttaggactagataataagattgtgtggaatggttctttgtcgtccatttaacttgtatgctttgtactgtctagttttatttattgaagcacaagttattttcaaaaaaaaaaaaaaaaattttgctcttgaaggttcaaattttctcctaaaaaatataatataagaaacagaaaatagttcaatacacccgtatcataaatatatgtatcattaatttagtcattttctacaggggaactttagtcaaattttggggttatgatttgttgtttttctatttaggggaatgagatatcattaaggcgatgaattacaattatgagtatggaaattaattaattaataattaattcagatggagaatagaagaaaggaaaattgagtggctaatggctaatatagagcttgtgtgggcgagtatagttcaatacttac

SEQ ID NO: 59092 - DNA, 956 bp, Cannabis sativa
acactagaatatatactttttacgtacaaacatatataaagcacgaaggtataattaagcactaaaacaggttgtcagcccaaagacaaaaacagtacaataacaataaaataaataaagagtaacaaagccacaagaataatatatagagcaaaagcatacaaaacccagatatcaagacttcaaccaatatgttagaaactaaatgccatcaaatatggttataaccagataaattaaaaaactgccgttactttataactaagccatatttgaaaaggggctggataacttgagacattaagacaaataacctaataaatccattaaagagtgccagtaaaaaaaaaaaaaaaacatatgctaaaaaacaaacaaagaaaagttctatacactaatagatggattagttaactgcttaacaaatctaagtattcaacgaaattgtttatacatgaaattgcgaatacaaacacaaataagtaacatgccggttacacaacagaagcaacaaattcgatatttcctaataccaatctcataagaggcattttaacaaacatattatgtgcaaacaaggcaagaagaatctgacacaataaaacaccaaaatatctctaaacatgggcaaatcaaagatacagaaccttaaacgagatttacaaacaaaatgtaacaaaaatttcatttgaaacgaaaatgtgttaatgaactaaaaaacaactttgtacctgtgagaatggtgggtaatttccatgcgatggttattatgacgaagggtgggtgttgctagtcgcgccgaggaggaaagtgaccgcgggtgaggtgagagagttagtggtcggagttggccaggaacgacgaacgagaccgaatctgagaggaagagggggccagaacttggctagggatttggagcgagagagagactgttataccgtttatttcaaaaaaaa

SEQ ID NO: 59093 - DNA, 1264 bp, Cannabis sativa
cccacagcaatctctctctcacgataccctctcaagcagaccgtatttccccagttgacgtcggtgcagcagacagagacggtgcgaggtccaggcggagaccggtgctcctccttaggcgcagcagacggcatctcaggtaagggttattgatcattttcgtttttttttttaattttttttttgcatttcagattttttttagagaactttgagaaatgatttatatatgactgttgggttttttttttttttatttcagattattttttcatttttgttgttttttaaatttgaaaatgtgattattttgtatatgattatttatgattttgtatataattttagattatatatgattttgaaaataaataatgttcttctttcctctgcccctatatatactattatatgtttatttatgaatgaatgtattgttaaatctatatttatactcgtgattagtgcatctgctgtaaatatttattatttatagttattttggaaaaaatagattttaagaagaggactgcctattagctaaattatgaggataattaaggtcatatatattagctaaattatgaggaatggggatgataactattggggctgggtttgacctgggagaaaggtcgacggaaaggtgatggagatctatgccatggttattaataagtaagcattggctaaaggtgaataagacttttatgaattagaaattctagctgattgtgacttttacagggatatatatatattgttttagctaaaagtacacagttgtgattaaaaaattgatctagttaatatatatattgataagcttgatattattcaccatgtgtgaattttaaagagattcaaatattattgttctggattattattaaattttgaggcatgtactcaaagaattggattactcatggtattttgacgagttgtatatcaagtttttagtgaaatgcctcagtgatttattttgagttatattattttgagttatttattaagttgtataaaatgtgtaataattttgtttaaaataaagaaaagcataccatttattcactactaatcattgatagtagtctaaaattctctgtatagttttttaaaaagaacaaatgaatgcattgtcttaatttttgattagaaaattttatcaagaacgagatttatttgttcaaaaaaatatgtgccagttattaataaaaaaataaattttttgatttttactttttaaaacagtttttttttt

SEQ ID NO: 59094 - DNA, 1116 bp, Cannabis sativa
gaaagaggaagaagaaattaaagaggatgaacacgaagaagaaggataagaacttaaagaggtataaatctttgctcattccatttccaaaaaaaaaaaaaaaaaaaattactcactctatcggggccgaccttaggcataggtgggctaggcccgcgcctatgacccactcattttaggagtccaaataagaaaaaatatctttttaaaaaatatacatatttttttataatttttaaaaatattatttatccttattaacaatttgtttttgtctgtagcccggggcgaccttgtctatcaggtatgtcattcttttacaatagatgttgtgacattggccgatcatttgaatttgtggagttttgtttttggttttttagtcgtggaaacaattgggttactttctcacagatctcctctcaaatttctctctgtctttcgtaaatgtctcaaatatcaacgaagctataatttttttaatctagaatttttacatatatattttgattgatttattggtttgattctgattcctaatgaactgcatttcagaattttggtgggtgattgagaatttgaggctttaattgtgtgtggaggatatgctgggaggtcaatgaatatttggaattcaatggatctttgttgattgaatctttgctgattgtggtttgattaattgcattgtggctatatttatgttttggtttaatattgttacagatttcactatctagtagagctgaacattgaacataaaacataagtgggatttttttttttctttttcttttttgtctttatctcaattatttttaaattttcttcaggattcaaaattggaggtttattatcctttgaagattaaatttgattggagaatgtcattatgaaattcttatttttaattcttgtctgcaaccttttcatgcttcagcttccatgctcattcttctagcagtagttgtggtctcgaattatctaacattactagcagaataaagctcaaagagaagaagcaaatgtgtttttggcaattttgacaaagaacatgtataattttctctatttgatgaaattatggtgtaagtagattttagaatgataatataa

SEQ ID NO: 59095 - DNA, 643 bp, Cannabis sativa
aatacaatacgacctaatacgtcgttccaaacgagcccatattgattaaattaatgtatataggtaatgttatgtgaaatactgttatgtgaaatacatatatgttaaagttttttatttaattttttttttaatttttgaaatacgatttgagattttgatctttaaggatattattttttaattattgcggctatatttgtatgctcttcgaatgtaattatatatatgtattttatatataataaaaattcaaatacgatatcgtgataaatcgttgcatgtccaataaaacaaaattgtctcttatttaatttaaagttttttttttttgagaaatatatttaatttaaagttaaaccaacaaaattaataaaaaatattttattaaatagtagtatattttgttaaactttttacatagaaaacaaaaaattaccattaaattaaaaactttattacataatcacattttatataaaataaatatttatatttatatatatatatatatatgaagaattttattttagctgtcggctagttgtttttttccaagaaaaaaaattatgtgacttattataagtatgtgtttcatttgtctattttagctttttgtaaattttgtctttttttttttttt

SEQ ID NO: 59096 - DNA, 1392 bp, Cannabis sativa
ctacaaaacaaagttagccacaccaaacaaaaatccccctaagaaacacatcattaaatcaaaatataatgctaacttgaaaccaaagtttaacacaagtaccaacctcaactccctttagaaaaagggtccagagtttagaaaacaaagcaagaaattaaaaatcattactccctcttttcgtttatctaagggccaaagacgaatagaaataaaaataagtccaacaaatatttaaaagaagaaaaaaaaagttatgccccgtaaagcttgatcagactggacaattggttggacatctcttgctgaacctcctccatggcagctaaacaattgttcaccagaatgacttcttgcttgacatcttatacatctgcagacgcaaaactcgaacttacagtagcagcagcaggatttacaccaacaaaaaccttaggatcttggaaaaagctccatcaaagtagtctgagggttgaaagatggttccagtgaggggaggctcgagtgtctcataagaataagccacatccttctgagaggaaataacattatagattaagttaagaaaaataagcttgcgacagtattttttacctcttcaaaaggaaacaattttgtccaagataagagaagccaaattcatggttgcccctaaggttattcaaaaaagaagatgagccaagtcttgggacaccatagtcttgttggagtttggaagccaattgctaagagtaaaccgcatgagtgaggcacatccataagtgagatgattgatacgaagactttgactagcttgccattcacttcgtatactattgagatcagtaataatgaggtgacgatccatagtcactgaagcatttgtcacacctttgggcagattcaaagctttgactaaatcattctcagtaaaggaaaactaatggccacgaacataaacattaccaaagaactcatatttcttatcaagcaaatcatcagtcaagttagcataaaattctttgacaatgccatcaatatacccttcaaagctagttaaagtatcttcacaatgatgatattgaacaaacttcacaatgtcatagactctatgagcatgtaaatcaaaatttctttcactctcaaacttatgggtagcatataagttccagtcacgctggttatcattataaaaaaaatctagaattcgtagcttgagaggaagagagatagacaaacatggtgctcttcatgggctattcacccttggctactacagaagctttagctgctgaagcagaatgaggagttgctgctataaattttggcaaggatggctcaggctccaaatcagtttcctcactgtcaaaggagataacaacatcttcttgaattgcttttttagaggaaaaa

SEQ ID NO: 59097 - DNA, 1272 bp, Cannabis sativa
aaaaaaaaaaaaaacttggttgtggatagggaacccatgatatgaaaattttaggtagtgtgggaagggcttcagaaacaagtgaccattaaacttacatacttttttcaagttagtactttaacttaaggttatgtttagaagttcaaattctgcggggaatgaaaaaagtgtgccaaaaaaaacatgtttggtaaaaaagaaaaattgtatgaaaaaataaattgataattaagcttacttataattttatttttcttgtttggttttttttgataattttgaaaggtgagaaaataaattcaatataaaataaataattacattctagatatttttatttttcaatttaatatcaatattaattcatttctaaagtaataattaaaattaacatattattaatatagggtaagtctataatacaactcctttcggtagaccttctatatgttttcgacatttaagaaagatttttagtctaatttttttcataaccgtatacgttatagttatttatgatcacttgtaaatttttaaaaaattctgaatatacctaaaataatgtttagatattttgttgcacacgctactgttttttcttatatacgtgataaataactgtttaaactttatttttggtactgtaaaatattcagaattttaaaaaaaattacaagtgactctaaataattacaacttacgcgattacaaaaaaaaaattaaactaattttttttttttgaataccaaaacaaacaagagttctaccaaaatatctttttaagagtgaagatgaacttaccaacctttaccaaaacatcttcaattataccccgatgatgagttaaataacgatctgccatttataaagttactgtcgtgggcttagcttctcctaatttcaatcttttacacatagataggggcattaagttgatacttactcccagatcacataaaatttttgtttgtatcgaaccccctatcgagcatagaatgttgaaactacccagatcttttagcttgggtggtagtttcttttgcaggactacgctgcactcttcagtaagtgctaccatctcaaatttttccaacttcctcttcttggatagaatgtctttcatgaacttcagataagttggtatctattccaaagcctatatgagtggaatgttgatgtgcaacttcttgaatatttcaaggaattttaaaaactacttatccatcttgttcttgtgaagtctttgaggataaggaattttgatgtgat

SEQ ID NO: 59098 - DNA, 1476 bp, Cannabis sativa
  modified_base (79)..(98): a, c, t, g, unknown or other
gcctataattcgccgagcagttgttccactcaggttgaccggcacagctgaattcgaaattgaggtaagattagtatannnnnnnnnnnnnnnnnnnncatgtttagcgtacatgttggttatgttagttagattacattaatagcagtaatagtatacatagagttgtgctagttaaagattaatgtatgttggctaaatactgatcgatgctgttacatcaatatggctcgagtagtttattttctatagtatgatttaagaaaagcctgttaggaagcatgttagtagcctaatagtagaataggcacatgtttttaatttcttaataagcggcattagtaagttccctttgatcacaatctgaccagactacgtcttggttacgcaggctgtttagattagtatggacgtcaggcgaaataccaggagccagggcaattcggttggatctaatgaaggtcagggagctcaaatttccccaaatgtctgtggcagaggtagaattttcaggggcaacgctcgtggtcggggtgatgttaaccagccacaggttgcccaagctgcccaagctgctcaggatgcccaaaattggggaaataggtttgcagcaatgcaagcccggatcaatgaacaagataatgaaattcgacagttgagacagcagggtgctcctgcagtgcctgctccagaaattccagtggcacctgcccctgctgtctaggccgaaccagtggtggtagtaaatcggatggaacccctgtatgaaaggttccgcaaacaagcacctccagtttttctgggaggtccggatgtcatgaaagtcgagcaatggctaacaatgattactagaatcttgaattttatgggtgtcactggtaatgacagggtggtttgtgccaccttccagtttcaagaagatgcactggtctggtgggacatggtgtctacgattcatgatgttacgacaatgttacgacaatgacctgggaaaagttctaggaacttttcaatgctaagtattacaatgaagcagtcagaagtgataagagaagaattcactcatttgactcagaaagaaaatatgagtgttactgagtacacaacggaatttgaccatttggaaaggttggcctcgggaattgtgccaatcgactacagtaagaaagaaaaatacatggacgggttaaaggctaagatcaggcacgatctactgattactactgacgacaataccacctatgctgaaatggtggataaggcactacgagctgagggcgcagtgggatgcatggttgagtttggtgggactccggttgttggcgaggctcctacccctcctgcatcaggttttagcaggggaggtagtggttcggccatacatcagaaaagtaaggcatccattgcaaccagtggctcaggtcagaacaggaggtttcgggggaactagggtcgaggcaatcgccagagtggcac

SEQ ID NO: 59099 - DNA, 906 bp, Cannabis sativa
tcagcaagtaattctataatttgttagaaattttcattgttattctcatataatttttcaccatctccctcgaaatgctaaattattttgtccaagtcttttcacaatagcaattattctctctaatacatatttctatcttgatagacttgttcttctagacttgcatcaattgttaacttcattttcaatcacttttctaattccacccaactagcaattgactcactgtgttgtttacttcgttcatgactttttcgtctattaaaaatattatgtcaatcattcaaacctccctcagctaaaaagttcacaagatgattctttgttgcaaataatttacaacaaaaataaaatactttatttaaagaattgaatatactaaccactttctatcttgtttctctccatttagtaattctctaatataatgcacattagaaaaatacctaccaaaatcatccctagtacatctttaaggactctttttgaacctatttcaactataaagtcactcatattaatatggcaatcctatccctatttcctagatcattaatatcaaaaggaaaattgaatatattacttgaagttttttcattctcattcattgtttgatttccttcttcatttttattcctcacttgaagttttttcattctcattacttgtaatatcatattgattctcaatctcaatatcattcacacaattctttatattaagtgtattaaaatacttattaagagaaccaatctgattttttgctatggcttcctttttcaatttctcttttcttttttgggctcctgatttatatttgtaatttttaataagtccttataaaaatcataataaacaaaatcgataaataatttatatgtcactaattttttcttttaaatt

SEQ ID NO: 59100 - DNA, 1421 bp, Cannabis sativa
  modified_base (245)..(260): a, c, t, g, unknown or other
ataatttaatatatgtcaaaattcaagaagaaaaaatcttaattatccaataataaatatataaaaaaaatacaaaaaaaaaaaattacaaaactacaattgtaagaaattttatatatttttatagtttttaaaattttatttacataaattatagttttttgatgtatttttatgttgtactcttgttattttgttattgtttttggtgtttgtagattattttttatgttattttgttgttnnnnnnnnnnnnnnnntaattttttttgttgttttcttgtgtctttatagaatattgtaaaaacttaaaaaaaattccaactttgaatgttaaagtgtaaaatttttattaaaattagcaatatatgtaattttctcaaaataaaatttgtttttgatattagaaattttgaattttaccaaatgccaatttcacagaatttgatttttcatgcttatttgagagtaaaattaattaggtaaactagtattgggtgaaattggtaatgtgtatccacttttctctctttccctctcgctcactcttcccctttctctagttctcaccaaactccatcaccgaaaccaccgttgaacttcggtgaccaccacccacgaccctccctctctttctagttctctctattgtgtgaccgagacccacaaccctcctttctctggttctatctggtgcgtggtcgatggcccacgactcacgaccaccactatcgaacggactaacaaacgatatgtaatttctttgtattttttatttattctttggtaaaagattaagttttagggaaatctacattttttgtgatttttttttatgtatggtacaacagtggtccgatggtgggtacaatagtagtgtaatttggaggttagggatgaaggtccaatgatggtctgatgtaggtccaatgccattctgttgttgaaatgagcaaagattgaagacgtaagtccgatagtgatccgatgctatccataaatgtaggatatggtctgatgcagtcaggagcggagctaggattaagttttcggggggcgaattattgtaagataagtatctataaaataaaaaattaacatttgtttcaataataaaagttgatactttataaaagatatattcacataaataacaaagaattttgaaagcagtataatcaacacatgaccaaaattataggaaagaactaaaaaaaattaaggtcaaagtttttattaggaatattctacttaattactttcttaggacacttaattaattaattaaaataatagaataaatttataatacgtacacctctttaaaggggtgttttgacaccttcctgtttgatttgatatttaggagaatttttagtctatttttttttatatccatttacgttatagttatttaaaat

SEQ ID NO: 59101 - DNA, 3514 bp, Cannabis sativa
  modified_base (2850)..(2850): a, c, t, g, unknown or other
aggggcttaatgcatgagggatggttttccttttgcttacaatgcataaaataaaaattacaatgattacataattacaattcatgaaatgggaaaaggaaataggttgctatatttctctaactcaatcacacgattataggaattgtctttgtgtctgaacattacaagatcattttgaagtaattaacgcttgtaactagctcggcccaacagaattctacctggtcagatgttctatctgccaccctactcgggtaatcaacaattgtagatgctcatgaattatgcattggctgttagggatatttacctctgcctaggtatcaaaaatgtgagacacgtgtcctcgatcctcttgccatgtcggtgtgcaaaaaaaattgataacattatcctagacaaaataaatcgattaacaaaggatggtcatttgagataactaaaagttggcactcttccgatatgcgaatcttctctaaaaggcaagatggctaaaagacctttttctacgaaaagcaatagacccaaagaaaaaattgagcttatacacactaatgtgtgcggacctataaatattcaagatcgaggtggttataaatgcttcgtcaattttactgatgattattgttaatatggtcatacttactgaatggccaagaactctgaaactttcaggaaacttaaagactttaaaagctatggctgaaaagcagttaggtaactcattaaagacacttcaatatttagatcgtggtggcaagtatttggattctgaattcaaatactatttgatggtagaagggatcttatcccaacttacagcacctagacaactcagcagaccggtgttgcagagagaagaaagtggaccttgttagacatggctagataaatgatgtgttactcatcaatgccactgaacttctgaggatatgcatttctagcagctacttacattttgaatttagtaccctcgaagagcatcaacaatactccaaaggaattattgaatgggataaaacacagcttgatacatttctgcatttggggttaatctgctcatgttcttaaactcaagactgagaaacttgctcttagatttgaagtgtgtatgtttgtaagatattcagatgaagctcgaggtgcatatttctatagtcatcaagacaataaagtatttgtatcaacaaatgcttcttttcttaaacatgactatatgaaaagtcacaaaccatgccgtcaagtggttaccgaggaaatcataaatgagcaaatttctgaaccaataattttaggaccattatatgaactactgatatcatttaccttagttcttgaaaaggaaaactcggtacattgtcgttgtgggagaattgtgagacaacttatctgctatgaacatgaatcacatgttgttgtctctgacacaaacatggacaatccgttaacctataaataagcaatggaatacccttactcacacaagtcgaacaatgccatagatcaagaagtggattccatgcgcaccaacaaagtctaggagtatgaaactccacctaaagatattatgcctatagggtgtaagtggattttccaaagaagagaaatgttaaagggaaggtagagacccttaaagcttggcttgtagccaaaggctacacacatcgagaaggcatcaattatgaagaaaccttctctcatgtggcaatgctaaaatcaattcacattcttctttccataacagccacctatgactgagatatagcaaatggacgtgaagaccgcttttctaaattacaatcttgattaagtcatttatatggaacaaccagaagggtaaactaagggaagatcgaaaggtgtgaaaggtacttaaatctatttatggattgatgcaagcctctaaatcatggaatatcatttttaataagacatttaaagagtatgactttgaacaaaatgaagacgaagcctgtgtatacaaatacattaaaggtaatgtagtggtatttctggttttttatgttgatgacattctatttattggaaacaatgtagaaaggttgtgagatgtaaggaatgggtaagccaataaattctaaataaagtatttgggagaagcaagctaggttcttgggatcaaaatctatagagatagaaagctaggaaaattaacaatttcttaagaaaattatattgataaggtgctagaaagattctcaatggagaattctaagaaaggatagttactttccggacatggaattaatctatgtaaggatcaatctccaaagactcctcaagaggaagaggacatgagaaagtacccttatgcataagtagtttggagcttcatgtatgaaatattgtgtataaggcctaacatatgctactctatagggattgttagttgttaccaatctaatctacgtttggaacacttgacagctataaagcacactctgaagtatcttttgagaataggagatctcatgcttgtatattttgatggagagttgaatcctactagatatactgattctgattttcaatcagacaaatatagtcaaagtggacatctgaatcagtatttactcttggtggaggagttgtagtctggagaagcattaagcaaaccaatatggcagatttaaccatggaaggtgaatatatagcagcttctgttgaagatattctacactactttggatgtagttccaaagaaagaaaaaccaccggtactctactatgacaatagtggagtgatggcaaaatccaaggaacaaaggaaccgcaagagaggcgagcacattgagaggaagtatcatctactaagagatatagtanagagaggtgatgtgacggtcttgaagattgcgccagtacataacctagcagatccattcacaaagatgctatcaaaaaatcttttatgggtcatatgactaatatgggattaaggagatgcctaactttctgttagaggaagtgggggattgttaaggcttttgaactgagaagcctataaagatatttctcattattaataaagagttgaacattttttatatatgcatgaatattaaactattaatatttatcattgaataatttatatatataaaaattagaaaattccttattatatgactttatgacttgtagttgtacaaagaactaagatcacttagctacaaataaaatagtcagcaacatattaaagtatggatgtagtatggcattaaagtgaaggtgttgtagatgatgtttaccttaaaagacttatttcatatcataacaatgattaatagtagatcgacgtaaatcctgagtaatcatgaactcttgttcatattattagtttttgtgattcactcgtcaaagtttcttagagaagatgattcttataacttctattttgggaaactaataatgtggatggttgggaacgtgaactaaaattatagaatccttactttcctaacagatcaaatgttggttccctttaagt

SEQ ID NO: 59102 - DNA, 1096 bp, Cannabis sativa
actgtataaaagttgtattgtattaaataataaataactctatttttggataaaataatgtattgtgttaattattactactaaaaattttaatacaatttaagttgtattatttaatacataacaaattgtctctattagcttgtattataatatttacaaaagatttgaggtcaacctcaatctccgacccaaaaccaggaacccagacccagacccagacccagactcgggaccccagattctgactcaaactcggacctcggactcgaaccccaaaatccagaccccaaccttggacctagacccaaacccgaacccgacttggattcggtgttggggtcgagtttattaaaaatatattgtaactttacacaacatattaatataatacaattcaatacaatacgacgtactaaacgaaccccaaaagtcttgataaccacactagagctacttttcacaattacaaaatggtggccacgctccactgccattttcaaagccaaacaacaggttgcggcctcatcatagaggggaccagaaaaacatagtctcttagtaatcactaattaaaaaaacaaaaggaggaactagatcatattgaaacactaagtaaagaataagaagatgatctccaataagattaatatcaaataatcaatgtagataagataaaatcaatacatcatcttgtcctatgcagataagatcatggctcattggtgaaatttgaaaagaaaaaaaaaagattgattatgcaatccaaacaacacaacaagatctcaaattcccgagctgagacccaacaaccaccaacaaattcaaatcaaaataattaataatacaatagtacaggagaaaaagactcactttaggtctcagatctgagatttgagccgtaattgaatttttaatccctatagtaaagaaaggaaggggaatccctcgacttcaatggatcggcacaattagaagctgaagaatgtgagttcctagacattgattcagatgaagagagctccagctccgacttgtcgtatatagatacatatatagattaaagatatgagagagatagagatagatcaacatc

SEQ ID NO: 59103 - DNA, 858 bp, Cannabis sativa
  modified_base (332)..(336): a, c, t, g, unknown or other
aaaaactaaggctcaggaaaaagccccaactggcagaccggttcccaacccgaaccccagatcctgggtaccaaccggtcgaccggttgcacgagaattctcagaaccggttgaccggttctgagcaggggacaaaaattcaatccctttaattcaaatcaagcccaaacttttcaaaactttccggaacacctgtatgcactataataaagcatatccaagcaacaaaatacagcaattcaagaaaaatctcaattcaccattagagctccaacttgagctctaaaactcaaattccatctcaacttcaaaataactaactaattcagccnnnnncactcaaaacaatcaatacctaactccagaatagaaaacaaaccaacaatacactcacagcccccttaaaatcccaaaactacaaatcataacttaaaataaaaccaaagaacatcaaagaaggtaagcaaaagggttttaccttgaattggagcttcaattactacagaaactagctgaattgagcagagaaaatcccagcttagtgttggttctaccaattcgagagaaagagggaaagagagaaatgatttctaggttattctccttatttctgcacaccaaggatatttgacttttcttcttcttttttttaattaagcttatattcagatctaaataagaccaaataagacaaaatcttcccttggcaatttactaaattgcccttagccaaaatcccaaaattaaccaactactaagggtaagttggtaattataaccccgataattctaacgcttctaacatctaacaatgatactccgataatattctatatcatataaaatacgactctctaa

SEQ ID NO: 59104 - DNA, 940 bp, Cannabis sativa
ttttttttttaccaagtaaagaaaggctttaaaaaaataaaataaaaagaagcttttttgaattaaagctcagctaacacaaagggggcaatgccaacttgtacaaagaaaaagcatacgtcttctttagctctcatgcaatatattgagccatatctattgagttttaaattataccattaattttaaagtaatttgcggcataacttcttttaagtagcaatatttttgcaactaacatctaattctaaaacgtttgtagtaaaacctcctaaacccaagttttgttagcacttagccctttccatctatttttgggtgttaagtgtcaggttggaatgtctacgtgtacacagtatacacgtggtacaatttaattaatccacgtaataaatatttaaaattaaaatatattattaaaattctatttttttttattttacaatataccttttaggcttttacattacatcatacattaatttctttaaaataaatcactaaaatctactttctttttttaaattttattgtatttatttatttcaaatatataatattaatatacaaaaataagataaatgctaaaaggcactactggtgcctagcaccatcttccgtgtcataccgctattagtgtaattaactatcaaatctcatataacttaagaaaatagcttttaaggaatatcgctaaccagtcgtaagacgtcacctataaaaagtattaggcactactggtgtgcaatagcattgctccgaaaataattattaaaacttgaaacaattaataaaatatgtttggaacaatgaatagtattatataaatgtagaacgtgaataataaatttttaaataaaactttaaaataaaaaagagtttagagcatttgttggtgtatgtttataggcgtatatttaattagattctttaaattttt

SEQ ID NO: 59105 - DNA, 1434 bp, Cannabis sativa
ggtaaaaattcttgcagattctctttcagttgctggtactccaatggacgaaaatgacttaataatgcacttgctcaatggattaggccctgaatttgaccctgatgttgtgcatgtcactagtcttgtagatgaactttcccttgaatctatccaatctttattactaacgcatgaaagcagattggaaagacattacaatttagctgactctagcaccaagatttcagcaaatcttgctgttggatttgccagatctgcaactgggtccctaaatcgatactctgcaacatggagaggcacccaattctcaatacaacaatcgtgctcctcaaagaaattttggccgaggtgccttcactacaccaagactaatctgtcaagtttgtcacaaacttggacacactgctgcagtgtgtcattacaggttcgataaaggatttgttactcccaaaattggtgactctcgtgcatttctaactgagattgatgacactgatgaccattaggcctactcctcctccatgctccctgattatgccattgatcaagaatggtatgctgatacaggtgctaccaaccatatagctcttggtatggaaaatcttgatcatgaacaaccttactttggccaagattctctcacagttgctaatggtaagaaacttccaatctctcatcttggtactcattcaataagctcttacaacatgttccatcaactataataatttcaaaaacatcaataacagaagaaaacatagatatcaaacttagcaaagtaccatagtgtgatccccaatatgtgtcactagaacgttttaaagtactttgttagttcaagcctcgtccacttaagatctcactatttttcaaagcttcaagaatcatagcatctttattataatgaaggatttaacaccgtttaggtgaagctccaaccatattaaactacacgagcaactacactgaaaaatgatcctacttgaatgtgtttctttgctacaactacaagagcaagttaaagttgatgagtaaaacaatgaacatagaaagcacatggattttcctttaatataagtgttttaagaccattaaactcacattgcatattgcttgctccatcataaccctgccctcataatctagatatgcttaacccatgtttggaaaagaattgatcaatagaagccttgagtgataaagccgtggtactagaaacatgctcaattcctacaaaacgttcaatcattaatccattcttactaataaataaataaattaaataattaaataaaagtcccttaatatctattctatataaagtgtggctatgtaacggaatttttggtttaacgatatctttttgaatttttatgttaattttaacagaatatcctattaagtaaaagaatattatttattaattttata

SEQ ID NO: 59106 - DNA, 2756 bp, Cannabis sativa
ggtgagaaattctatttgccaacggctgggtattcatgaggctgatgagcgaagcaagtacttgggtctgcccagtactattggaagaaataagaaggcagtcttcagctactgtcaacaagattaacgtttagcaattctgttttatactacagaaaatttaacataaattgatctcctactttatttacatttggggtagtgttgttatacactagattgttcctacacaactatatagagtccagaacaatggaggcaaacagcaaaaattgctcagcctcaagacctctagatcccaattgtcaaatagttttaagccaatccacataggggtagagcgaagggttgaggtagcacccgaggggcttgaaaaccacaatgctctagaaaatgtctgtcacttagtcgaaagaaaaaaattatttgaaatcataatccatataattttgtaggtgtgtaaccaattcaatttgtattattttgcttatagtgcattcaatctacactaagtgcagatttaattttttttttatctaatttaatccacacaataactcaaatctaatttaacacaattaacaaaactgcgcgcggagtggattgattattttttaatattaaaatattatttaatatttattaataattttttttcaataactaataacaaaataaaataaattattgctattttatgtttccaacaataaattaaaataaataaaataacaaataacaaattttaaaaataaatatgtaagtaaaaagaaatatttaattttttctttcatccatatttcttttgtttatttgtatttactaatttttttttttttttggtcttcgtgtttcttgctattgacttctaaattatatttcatcgaattaatattgctctaacagttacttaattgtaaggcttttgaaagatgaaacacttttctatcttgtggggttatgatcttttatctatgtttgttttcctttcctgtggttgagatttgttcattgttgtttttgcctcatcttttgtaataggcttgggtgtgccttatttgggttgttatgaaatttgtttctctactttcttccttctaaccaatgataaattaatttgttcccattcaaaaaagaaaaagagaaaaagggttgcatataaaagaaacacacaaatcacctaccctattaatcgaggacaattcactttcaattaggaagaatacgtgaaattacttatgagtgttgtattggtacttggtagcttggaggttactccaggtactgtgttggctgactaattattattatagcctcataaaaggagagacacgtcaaccttctaggaaggtcccatgtcacacatttctgccattattatgtaatgtaatgtacatcacttccattttcttagacagaatccaagtcaataataataataataatctgcaagtattcaaatgaagctttgattaacttattgataaataaaccatctacacatgagttataaattgcattcttgaatatggaattttcatccatcataaacaaaatgcaagcaacatccataatcaaaggaggaataagcattggcacaattatatacaattcatggtgaccattcaatggttaaacagtacttcaatcgtttctgtttggtaaataactttgatttatctacatcaatcaccattaaatataaagacaattgaaccattcttgctgtgaggagagttaaaagagtaaaatcaactgatacttctctgagaacaaatcacttcttcgctagtaacctctcattgggtgtggggggtttaaaaagtcagccatcatttctcgccagaaatctttctactcccccgcacatcccatttgaacctcaaatcttcttaagctctgatagtcgttgcagcgtggtgagttgcgggagctcgcttcaatgccttcactccaaatgggttgttcatgctctgttcataacaaatatataatataagcaaacaattcaagataatagcacaaaaaaaaaatggcctaaagagtcaactttcacaaagcattagatgtttgcaacgaaggtgttgtctttcatggtgtctataaaacaaaaaagctctgtgaagaagttctgctcttaccacgcggcaagttccagcgttaagatcgcagactgggtagtcatgagggcagcagctgtagtgatcatcacagcaggttgcaccctcgagagggcagcatccccaagcgaagcagtattttccatactcgtagatgcagcagcaagtggttcccacagggcatgtgtagtagtcatcacaaacagttggtggcttaataggtggagttggtggagagggttcaggcttaggagggttatctccgttcttgatggggtatgagggctctatggcgattccacacttaccggtggaagcagaagccaaattacgctccaacttaatgtatccagcctctccccagctgtctccccaagagttcctcacaatccagtaatcttttccgttttctgtaccgtatccaactgcagccacaccatggtctagttgtgttccgcagagtccagtgaaaacaccctgaatgagtaaaccacatattagaaccacaaaacacaattgttaagataagatactaaaaaaagatacaactagttttatttccaatgcatgatgtctcatcaatgagtaccccaaataaaccatcaaattatggtctctaaacaatttgtgaataat

SEQ ID NO: 59107 - DNA, 1306 bp, Cannabis sativa
tttcgatcataaatagagcgtattaaacatccaaaacttaaattttttcatccattatatcttagaaatctaaattccatgataaattcatcgtattcatctcatttaacacgtttctttttacttcaatacatactataaattttaccattcaaatctgaaacaagtagaaaacaagcataattatgcacaaaataaatataatcaatcgacacatgcttctaaaatactttattaaatgtacctaaactagcttatcaaactcccccaaacttaacctttactcgccctcgagtaaagatcgacactaaactcaaaattaatgaacaacgacaaacaaattaagccttaacttttatacacaccacaccaccatcacttgcaagactcaactattgcaaaacatgcagattttgaatccaatttctccaacaactaaccttaacactcaactttgaaaaaagaatatgattcatagttgagaataaataattagaaatcactatacttactcaactcaattcaaacaatttcacatactaattatcaataagcttgcaccatttaatattctccgctaatatcaataacatatgctttgaagtcaaaaggactttaacgagttttaatattttaagcttaggtcaaggtagatggaaagtgccatttaagctcacccataccataaaatttccaatcaactcaccccattacaatcaaatattattctaaaccccccttttcttttgaagcacatgagagaacctttcttgataaccttacaacaacactctttcttttttctttttctttttcaatgaaatattaaaactgcaatttgcacatttatatatctattttatttttctttcaattttttatttcgattagttgctagtaactccttttcttgaaattctctcataaatatcctttatttttcacatactacccctaaattttctaaattaaaatcccccccaaacttatgctaagattacaatgtaaatagggacaagaaaatataataatggaattatttctagctcataatttattttaaaataaaagataaacaagtgaatgcacaaaaatgactaactaggataaataatacaaggatgacttgaaagacgtaaacattccaaaaattgtttaaattatttatcaaagcacacatcatcatcgattttagttcaaaggccaaacaatgcaacttttatctaattcaaatcatcaaacctctaaccctagtcaagcatgtataacaaagtcaaaatagtcacatttataaattatactcaat

SEQ ID NO: 59108 - DNA, 1092 bp, Cannabis sativa
gaagcttcaagtatggttccttttctttttactatgtgaaatctcatccgttgattcaatttcttaaccgatgtatttttgcaaagcaaaaaaggacttgtattttttgtaaaaataattagctataaaattctcccttgtcaccttttttttttaagcgacaactcttttatttttgttgcttaataaatttgtttgaatgtattttttttaatcattctattccatagttaaggtggcttttggttgcagataatgaaatagaaaggaaataattttcattctattcctttatttggttgcattttaatatattggaatgatattccgatggaatgctctttctaccattttggtggagtgactattccattttaaaaaggaaagaaagactatttgcagagaagtgctaagggaactctttatcccactctcttttgcactctctctcaaatgtgatgacaaatgtcatatattgagcaagagttatttttacttaatagttagttatgctattctaatgttattacaattgtgtcattactacttctaatataattattttactaactttttgtttataaaagaattaattacattaagaataatcattgaaaaaaaaaattatgttaagaataaaaatgaaaaaaaaaacatttacatatatttttaaataaaaaaaagtaacaattaatatttatataaaattgtaagttttttttttctttttaagaaattatgcaatataaaacttaatacaacctaaatctttttttttttataaaaagtaatatttttttttcagattattatagttatattatttatcaaaataaatacaccaataaaccatccaatatatttatatatgtaattgaatacttttatttatttttttggtggtatttacatgattttttttttcatatagagtattgcatatatatactattagaatagacacataccatgtggtgtactcatccttattttcttattataatttgatatatagtaaaaataagtatacatataaaaatataaccattgaaacatatatggaagaggtttcaatggttacatttttattgt

SEQ ID NO: 59109 - DNA, 594 bp, Cannabis sativa
taccattaatttgatctgttgcattagagtaaagatcgtttgttgatttccattcaacattctttcatttcgagcaatccatagagtataaactagtgctgctactgctgaacacaacacttgttttctggtttttgagtgtctccccttctcgattttctttgatatctccaccagagttgttgctttgatgttccagcaaagccatgtcttcacctgttcgagcagatcctgtgaaaaggaacacgaaaagaaaagatgctcggctgtttcatcagcttgcaaatagagtagacaagctgcgttgttaataatattgtgcctgtacaacctatctttggtttttaatctgtcctagattgctaaccacataataaagctgtgtttaggaacatttgttctgcaccaaactaggttactccacttcttcttctctgaaactggttgcagcaggttgtatccacctaaaagttgtgaaattgtttaggctcatggtgcttttcactctattccttgcatctacaatcttttttaataccagctgctggttgggggagctttatactctccccttgcttgatataaacactgtgc

SEQ ID NO: 59110 - DNA, 2362 bp, Cannabis sativa
gtgttttataaatcctaacatataatagtaagtagaataaatatttataagtaaataagaaaaaaaattgtatgcaaagagtctattttgtttaatgtgaacctaaaattctatggtttgttatgggtgaaaaaattgccctcatagtatagggaagaaagtagcacccctactatagaataaccctatatatatatgttagaattaaaacaccctcctccacgtgctgctccttttctatttgggtagctttttttttttttttttgttacttgcgtacatatactattaattacatatactaggcaattgttacgtgcaagacacatatacttagttatatgtttagatttttttttaagttatgtgttttgatttttgaaagttagaataaaaatattatatgtaattcaattaaataaataataatattttagtaaaaaaaatttattttaaaattttataaaatgaaattaatagtatatttttgaaaaaaataaataaatacaaatgctcagaatttttagaacagttcatctaaaaaaaacttttagaacaataaattatattaaaaatgtattaaaaaataataataacattttgaaaattaaagaaagaaatttatagatttttgaaaatgaaaagaaaacacgtaaatatatatatatatatatatatatattactatactgtgtgggatcgatatatacatatgtggagaaataaaataattaagagagatgaatgaataaaatgtgtaatacaaaggaaatataaagaacaaaattataatatccaattaaattgcatcatatcttcacctctattgtctccccatttgcttttcccttttccattgttgtttattaaaataaaaaaggtacttacatctttaaacaaagcattacataaggaatttagatatgatttttttttttcaaagggggagacaaaataatattttatgaaccatcctagtctctattacacaagaaagcaatcaattcattacaagcagaaagtagtatctgaaatagaacttttgccaattgtactcttgcaatcaacaactaatgctagctatatgacaataatttgaagtatgcatctgtttgtatgttgacttttagcttgccactttgttgttggtagtctatatttaatagccttactgttaaacataagtgaagaggggaagaaaattgggaaactttaggcacttaagacattcagataacagaagcaccttttatatagcttattgcatcaaatatttcatcaatatcaaaggcataatttatctctacttggaaaaataaatatcaaaagcatgatttatctatacctaaaaaaatgtgtaaaccaaacaacatatactcttctgtttcttcttattttttttttgaattgtggaatatgacagccacatataggtgaagaaaaatgtatacatgcactgaacgatcactaagtatcagcctaccagcatacttcatacatctaacatctccatatatcacacaaaattcagtgctagaaaaaactttccacttatcaacaaccttcagaaacccaaaaaagtgaactattatgcctgtaattatcaatcgtattctaaataactaacattcgcatatataacaaatagaaaaactaaaagtctaattaagatgtggaagtataccctggaaagaaaccaaacagagtaatatactcaaatctgtgggtttaaaattaattaaacttaatcatataagaaatactactttgaaactttctatgcaaataaataaataaaagagctaacaattctcaatgtcaatttccttatgaatatacaaaagtgaaaattttgtgcccatagttcagaaagtcaaataaaatataatgagtgctctcaaagcatagtttgaggactgaaaagacaccaaaaagagacagcaacccatcacttgaaaaatttctatatataaattgctcctcggtcatatcattaggtatattcccattctatcacatttcaatcagacaatatttatcctaaattagaaccaaacaaaaaaaaaattgcttactataaactgtaggaattgaaaagcgtagaaatttaaaaaataccaaaaattgtaaatgaaattaaatctaattccaacttaaagaggatggatgagtgaagaaataaggcaccataaaaagttgaaattaccactgcgatttcaatcaaaagtttttaaagaaagataatgagtgagaagaattgtttgggctaggatatatatatatatatgttataaatattattaattatgtgtatgtccaaatcttttatttattgtcattaattgtaatcaacattcctctt

SEQ ID NO: 59111 - DNA, 781 bp, Cannabis sativa
ttttacgctgtgaactattttatttacaaaaaatacattttcagtaaaaataataaactattttttagttgtttatagtttatttatagttgtcgtgtggttgtttctctagttacttttaattgttttataatttatttatagttgatatatagtcgtggtgaggttgatttctcatttttttggtattttcttactttttgttgagtaaagtgtattttttgtaaatttaaaattttacaatcgtatttttataaatacaaatttaggccgtaagaattcggggaggggttgtttttggacctagaacgaccgggttcaagagataagaaaattaaggatacctaccagaaaggctaatccattccataatgatgtaccgaaaaatgcaacatttttattacccgaccaactatcaggagaatcaaatacaacgggtacactaatcagtaaaattgatgaagtaacaattaatggaaaaacaaccagtttgaaagcaataatcattgtaaataaaagataaaaaatagtatttttgaaaatttctcaaaataaaaactaaatcattagaaataaattattatatagataattttatattaagaatataaataaattaaaattaccatgtaaatgtaaaattacatggttggttagagcatattgttcttttccagaagtcttcaacatgggtcatattcttattgaagtagtcttattattttaggaatttaacaaattaataaaataaaagttacatatttactttaaagaaaactta

SEQ ID NO: 59112 - DNA, 1315 bp, Cannabis sativa
  modified_base (38)..(54): a, c, t, g, unknown or other
atatttaaaattccgtaaaactgtatttttataatttnnnnnnnnnnnnnnnnngtatttgtgaaataattcctttttaaaaatctctaatattaaggtatcatttgctcataaacatacattgtttctttgtctgactactaaacaatgatgagttggtaaatacgaaaaaaaaaaaataaagaattttttcaataaaatacttaaaatatagattatttacaaaaatactttaataaatctcaattacaataatatcttgccacatcattaaaaaatactataatttcgaaataatatgcctaaaagaaaattaatcccaaattctattattttttttattattattttcctgaattttcaaaagtaacattttggttacttatgatgttgataagaaactaattagttacttttacgtaaaaaaatttcatttttaaattatataatttaagatataattttgttttctctaaacttcattttgtaaacatattaattatcaattagctatttttaaattatattgtgttaattatcttaattatttaaaatacatttgggtaaccttaaagtttattttcgaaactaatgagttttcatataatataataagctactatttttatttaccaattattttatttacttttttgttactttgaaaccatgtgtttatttttagattatattaaattaataatttattttaaatactttcgttacttttttattttgcttttgtaaaaatatttatgttacttagtctatttaataaattaataaattacaataaaatttaaaaggaaaaaaaaaaactcacataatttattggtaaaattggtaaatatttaaattgctaattagttattttgaaattatatttttagttatcttttaaatatacagtagaaactaattagttttcatatagtataacaaataagcatatacatatgaaatagttttatatttagtatactttatagtgatatatttaaattaattataattttgataatatactaattgatttcttttcataaaataatccactttaaataaaaatatctcccgtagatgatataatctattggtaactaattagtatattattggtagcatgtgtaactcaaatgtttcttttatttttaaaaaataacaaactatatgcttcctacatattaaaatgatcacattcaataatagattatgattgtaacttttttaaacttaactgaggaataaaatagccataataaattttcaaattagatggaaaagaaagatagaagaaaaataaaatttgtatcaa

SEQ ID NO: 59113 - DNA, 1118 bp, Cannabis sativa
aatgataaaaataagaattgatttaccacttctttctaatataatattatattatatttatagaaattgcacaacaaaaaagttaaattaaaaagtcaaaataaatttgataacatatatatatacgaggaagctatagttaattatatatatgtatatatttcctagaaagatgaggggccatgacccctgtacagcacaacatccctccgctcctgctcttattatataccgcaagcttgatgtactctatattctaatcgaatcttgctgaaacttcaagtgctcgaactcccttcgttcttcttgaagactgcttgcttcctcgcgatgcaagacttgaaaagtaatctccggaagctttgaaaaaccttctcccaaaagtagcaatgttcttcttcttctttgtaggcttgaatgcagactcaagataatacaaaatacaaataaacagagtaagagtcgaacaagctcttctctacaaacatagacactctttccttaagatatacaattcaaagtgtatgaaagagatactaagcctagctgctataaggtgtatttataatcaatatacaccttattaatagcttacacatggtctgaaccagaccacagtccactagaaacttcactaaaataaatcttcaatcagtccaggaatttctatttctgtacctacagaatcgtgagcagtaagtacaacttttttttataaaaaaggaaagtttagctccagttttctcctcaaaaaatctgatctaacaaaatagaaaactcacacaagatcagaatataacagctggttaggtaagaaagaaatgagtaaccaaactttccaaactttccagttttccatttttaccttatttctataaataggaaagctagataattttccttccaaaattaaattgattaatataaaagttaaatgcacaaaatatgaaaaccaatttaaatactccagccaaaattaataataaataataaaatatttttatcaaaataacatcccaacaacattaaaatactttagtttataagtcttgtacttttcatttagatgagatcatctcacaaattaaatcctgagtttattctacctattcaacaat

SEQ ID NO: 59114 - DNA, 5448 bp, Cannabis sativa
gagaaccctcaaaacgctcaggaagaataacctggggaaactaagggtccccctgaaaatgaacaactaaatgatcggccagagccttcacacagaaatgagaacagaaggcgaccagaaaccaaggaacaagaaatccctcgtgggaatgagggaaatcctaggactcaacctgggacatgtgggtcaccaacgaggcatcgccaacgtccttctcgaactaacagggaaaggtcacgaacaaaccccagcaggggcacacaacgaaccatacctaagggagaaggacgagacgtgaagaggcgagtgttacctcggagcgcacgagaactcatagtcaatcaacacgaggaggagaaagtacttgtcgctacaacgatcgagaaagcacaggcacaagaaactgaaagttactcaaggacgaggtccgtgagtaggacagtccatgagtaagacgagatccgtcaacttgtggtaggtcattcactctctccttctcacaagaaaaatcttatacaaaagcaagtatacataaactctccctcccttatgtcttgtatgcggattggagtttgaaagtgatgcacatctcttcttttcttgtgccttctcttggcgagtcatgatgaatattaatctatggctgagcagcagactttggtcatctaaatttgtggatttcggagatcggattaattaaaaaaaaaaacaaaaaagtttgttgatagatgtgtatttagctgtgctagtagtagtatataaaatttcgagaaaaccgtaatctttgtgtctttgagaacaaatgctcaacaccaaaggttattaataaagcaatcaagaagagcatcaaagccagaattttctgtcaaaaagtaaataagctctccagaagagaagttttaaagtcaattaaaaatctgtaatggctgcgttgagataagtgtgatttgtaacctgttgagttaataatcctttagtttgattaatgaaaaagtatttcttgatcagaaaatgtaggatacacgtgaacacgattatcaacacacaaacacaataagagaattgcagaattttaaatcatccaataaaaatacttttaatatgtatttaaagataaaaaaaaaaaaggaacagcaatgtttctttacaatgtttcaagcaaaagaggaaacttatatagccgccgcttcttacggactttaaattatattacttcaaacgaagacaaattccggaatataagtcaagaagcaaagagagaccaaaattaccatgatttcttcttcaatcttttgatatgtcagacatccgcacaagcttatagtaaagaatacgatcatcccttcctgtgttgctctctaacaatgcgctctgcacaagttcctaacgcagggcaagggagaaaaaaaagagaacccaccttaataaaataataaaaaataaaaatagtacacacatgataatataattcagaatttaatcaaatggagactcaccttgacatccctgtgcgagaggaatttccccaagttgtggataatcaaccgcatatcttcaacctgtaaaggcaaacatataaatatattactcgccatttcagagttatcattaaagagaatttcatgttcaaaagaagaagaaagttaccctgatgtagccaactcgattccggtcaaaaaacctaaaagcctgtttaagaataaaagttctatcaatacacagtccaagaaagaatacaatcaaaatacaactgaagaaagaaagatacctgcaatagctccttgtcagcagacgcctccttcaactttacaggagtttctttctcaccagtatctgcttttgtctcaactttttcagctggttttttgtcagatttggctgttgtctctgtatccttgaggtcaggttgtcccttatccaagttgtcatccttctcgtttacaggttcagcgtttaagcttgtttccttggtaccattttgaacagacgaatcacctggagcattcacatcatccatttcttcatcctcttctgggtcttcctctgggtcttcttcctctgggtcttcttctggatcttcctcatagtcttcatcatcatcatctgttccattttctgtcttcacttcatcaccaggatcaaccaagttacaggttttcgcctcaacagcaatatgctcctccactgtatttttatcttcctttttatcatctggatgggcctgatttgatgtttcagtttcagatgcttgagtagattggttgttgacagaggatttctcagtcttgagacgttttgatggtgacattttatcagtttcattccctctcttctcttccctttgcctcttattttgcaatcttttcctcacaaatttcacacgcaatttctaaacaaaaacaaagagcaatgaaaacagtacgttagtaaattacttatggtaatatgcatatccatatttgttaacaagtctcagactaacctggagaaaagtgaggagacgacaacccatttgatattgaagcatttcacagagtgtctcagcaaagagcgaaagctacaaaatgataaatatacatatatatatttaagaaaaatccataaataaactagtgcgttgttttgacatttacaaaaagacaatacgtgaaccaagaaagcaaacctcaaatgttgattcttcaacatctttatcagaataatccaagagtgtctccagagccagtgacatggatcgtaactgacaaattttaaaaagacgaggattattaaatgaattaagatgaaggacataactaataaatatttcaagacataatgctaccatactaacaaaagaatttaccttagaattcttgctcgattttgtttgtagaataaatcctgggtgtcgaggaggttcttcaggttttttcttttctttcaattctttatttgatttgcttctagattcatcctttacatctttggcctttttctccttaacatctttagatttctcgtcatctttcaatgacccgctcttactatcattgatgtccttttgggatattttcttcttatctgtttctgtctcttttctagtagcacttcgctcaccggctcccttcacctctttcttctctgctttttcatcccttacatctactttaccagaacttcctgtcttatctgacttctctacaacttgtgctgttttagaaatattttttttttctgatgatttaacttcagttttcatgttatctgcatcagccttttgcttccctgtacttggtgttccatctactgattcagcagcatctttctccttaccgtcgttggattgcacagtagcaatttttctttttggtaccctcttgataatcttcttcttgacagttttcacactggtatctttcccagctgcagcactgtttggatctaatttatcttttagtttctctacagaggaatctgtttccttgtcaactttcttctcagaatgtgcaactttatcctcactcacactagctttcaccactttcttcactacttttttcctagcaaaagttttcaccccacttgacgcagatgcatcctgttgacctgaactttctaagtttgcattattatcctctttttcatttccattatgatgtttgcttgcagtatcaccagtagtcttgccaacaactttctgtttgacaaccttctttataatcttcttcttcccagtcaccacaccgccagttgcttgagcaacagcagttgctccctcttcttttttatccactttcatctcttccacctttgtgtcacccgttgcttctgatgcatttcttttggaattgttaccatctttctcctttttttcagcatctttagcttttccagaagatgaagcctctctttttttctcttctttgtcaaccagtttaacatctttaaaggaatcattatttttatctgcaagccaggaaaaggttaaaagatagaaaataaactgatggcataggcacaaaaatccaacacctatacaagcattcaaactttaccttttagtgcatctttcaccttcattttctgaaagaatcaatatattaggttcgttaacagcaatgaaagaaccctcacaacttgagaataaaaacataaattcattttgagcactaagggaaagaatggctttgtcaagcacctctcttcgcagtgaaagaagacggtctctttcagcaacaaccttctggtgtgcaagccattgttctcgccatgcatccaaagaagggagacattcagacaaatcgggaagaaacaatacagtaacctccttatgactaaacagtccatcctttccaagtctgtcatagtgtatctgcatatggcaagcaaaatttataaatttatttaaatttataagcaaaagtatggcatataacattatgagagagaaaggaggaatcaaaagaaaacctcaagaaaacggttccagtgctggcaattttgcagatcaagttgagcaacatcctttgcatatctataaagaaaaatcgcttagtgtatttaccaaagacaatttattgccagaagttagtactaaagaaaacaaaggttcagcattaacctttgagcagtatgaattaaagatgtatcatcaacagatgggtccccaccatcaaccgatttccaagggccaccaattgccatgaaagaatgatcctttttaagaacagcgaagcgaaggatgttgtagatatggggtatgcgatcatcagaaatcttttcagatgatagctcctccagagcattcttgctaattccactcattagaataaactaacaaataaacaacaaagatgaagaattattcaatattgtatcagtttaaaatgccatctaatgaaacttccactaaaatatccaaactattaaccaagctatctggcatagaggtggattggagtgtatatgacaagactactatatgggattagattacttgactaaatggattgttgagtaccatgtttagtgccatataaaactaaaacattatcatggattaaagaatgtttttaagcaattataatataatgcaaatagtacggaaaagtaaaatcaagtaacatttacgtaaacaaattaaaaaaaaaatagaaatgaaaactaataacacaatgtgtggccaggcaaaagttttgcttgatgcaagattgtgtcatgaaaattcatttcagatgaatcactcacagtaatttacagtgtaaaacttctctaaagtacagctgaagaaaatttcttacctttgcattccacactatatttccatgtcctgattttgaagattcttcagacaaaaggttagtagaatcctttttcgaccctgatgtgctttcttcttcagcaaaatcatgctcaaaactgttccaatatcaataagagacccaatatttaaatttcctttttcct

SEQ ID NO: 59115 - DNA, 1208 bp, Cannabis sativa
cgaaagtccttcttatctccactgtgagatttgttgaagccttgttgttctttgtacttcttgcagaatctttgcaagtgtccagtcctgccattgaagtaacacttccttgtgtccttctctctggattttgatcttgagtgagagaactcactttcttgagtggtcttcctcttgccaaatacacttcttctttcttggattctttctccaactgtaattcgaaatcttttgacttaagtgcggcaaaaatatcttccaatgcaataatatccatgccatacttgatgacaaccttaacttcttgatatgcgattggaagtgatctcaacaagatgatggcctggctttcttcatcaaccttgtgatttatgtttgccaaatctacaataatctcattgaatctatcaatattctcatctaaagaaagggaagaaatcattataaaatcgtataacctttctagcaaattaatcttgctaacaatcgatggttttaagtataattcttctaatttatcctaaactcctttcgtcgtattctctgcgatgagttttcttcaaacactatttgatagatacatgatgatcgtgtagtatgccatctcctccacttttgcttttcctctggaataacttctcatctccaagaaccttggagacttcttggtgcactaagattcctttcagactttctctccaaagcacaaagtctccagttccatcaaacttctccaattcaaatctcgacattgatgacattcaagtttcttcaaggttgcagcggaaagaatcttgattatgcgattttgattgattactaagctctaatttgtgggaaaattaagactgatggagtagaatcaagatgatcaaaattttaaacaatcaaacaattagcaatgacaagattaacaatcaagaacaataatcagataaaaataagggcaaacagagtatttaaaccagaatcggtaaatacaaaaaataaagaaatcaacaccaagatatatactggttcaagtccgatagatcgatgtggtccatggctctactctagttctagaacaccaccgtaattcttctttattgattgagcaaaactaggtacaatacagtcgagacgaaattatctgttgagttctcacaaagtgttttaactctcacactttatacccaagaattttcttcatctacagaaatttcttc

SEQ ID NO: 59116 - DNA, 1404 bp, Cannabis sativa
ttaaaataaaagaagttattaattctgtatgagatgttctattgtagccaaattaattattaccattagattgagaatcaaaggttataaaaatgctcttatttttaagagcaaaagtgatgccctcacttaaggagtaccctataaatattaacctgtaaaaagtttgaaagcagttagaacactcatcttttgtgtaacccaaaaaatatcttgtttctttatcatactagtatgttgcatgtgtttagtatataaattatatattatattaattaaatttattttttaatattttactgattttatgagaatatttttcacaaaatttaagatctaattaattaagtaaatatttttttttaaaaaaaaaaatataatgtatatgtacttatttattatgggcaataattttcctttcaatttagttaatttttttttcgcttacataagttaaaaattttataattttgtgtgtttaaattttctatgttattttcctttaaaaaaatctatattattcttccttgaaaataaaaaaaaaaaaattaatgttagttatgataatatttttttaatattaaaattataaattcattcttaattatttaaagtttactttgttttttatactaaataatgctttgtaaatttactatatatttgtttttgaaaatgatagagaaaaaatattaggataataatatatttaaaagctataataatttaaaagagtatatgtgtaatagaaaaaaaatacaaaaataaaactcaaaatattatcatttgcatgtaatttgtttgaattgtgaagtaatgtatagggcaagactatggtaagacctagcaaatagggaacttttcttaaccattgattttagatcctgtagttattatgatgtaaagtgcatactcttactatgggactgcttgtatacaattaaaactttatacatattaataattaaaatttattaatttttaattttaatttttaatttgaattattattatttttaagttaatttgaattatatttaaacatgtatttatttttaaaaaataattttacttaccaattttgctattaattttttttatactagtaattaaatgtaacaaaattgattactcaaatactttcgccactaatttatttacatacatagtttgaccatataaattaatttgctttattatttttttatcaagaaagataatttctattaatcaaaccgagtccattacatccacaaaggaattccccttcaaaagagaaacttacagttcttttacatttttaagaaaatttttaactatactagacaacttccttctttgtacaagattaaatctatttttgaggctttgtgattagtggttaaaaatacacttttatttatt

SEQ ID NO: 59117 - DNA, 1568 bp, Cannabis sativa
cctttgcacggtcagttttaatgtcaatggcaaactaaccgaacatatatatggtactctataaatataactatttttgtacatatttaatatacaattttattaaactaaatttacttattatctttttcatttaaagtctcaattctatgttgttttattttattataatttaatgtatttatgtattatatacacacattcataaagtaatataggttttttaataaaatttattaccatactagtagtacaaataatttgagcaaatttaaaaaaaaaaaaaattacattgtttatttaagtaagaaagtttgtgttattgaattatatgatatttgatacaatactctaattttttttagttttcaaataattatagcaaatttaaagacttgtttttttttaaaaaaaaaaaatgaagctcggtttggtcaattttaacggaccaaaccgtggattaaaatggtcagtttttttttttttacatttatataatactcagtcggttttcggcttataaccatgaaaactgaaaaccgaattttagattttttttagtgtaaaaaactgaccaaattggttgttgctcacccctatctacatcacgacagtaataaagctacatctactttatgtttttatttctcacgaaaattacaagaaaactagctaaggtatgagctctcaattctagagatagagagatgctctcaccttatgaggtgttgaactcgattttagccaacgacgctaagtcaatcaaagcgataaggaataatgatagttattaaatgaaattaagcataagtgcacaaagatttatagaggctcggccctgtgataatagtaatagcctactctccctttacttgtattacttatgagaaaagaaacaattgagtttcttgatctcactcgaaagcttacatttttgcagcataagagctctcttgaagaatagaattcgccccctgaataatgaaatggattcattatttatagggaataagtacatcaattaggtttcccaaatgaatgaaaataataagggaaagtagaaatgttttctattttacaacaataacatgtgaaaatcacattaaaatagtaattcatttaataaaataaataagaaaagtatctccaaagatattttagctgcatttaccttggtcggtatatgtgggcttactgcgagattgacactggttggatggtgtcatttacattgtctggatgctccaatttatccttcaaataagttgtttttgtgaaataacctaccctggacgacatgtcgaggaggaatcaccagtctaggtcttaaaatgtttcacgtgtcatctagatgaacgccacatcgcactgtgcaaaatttagaataacagttgcccccaagtccgcgtgggaactttctgttggtacgtggacttgctcaacccatgtactaggggaatagggttacacgtgctctataataccctaagattaagagaatagattagcaaaccctaactatttaattgtgtattattatataatttattatatgtgaactaatatga

SEQ ID NO: 59118 - DNA, 857 bp, Cannabis sativa
tataccgagcttaatgaaacttgggagaatatttacctcgcacatgagcaaaaggttgccttcggcatgcccgagctcatgaggaatgcgaggagcaaacgagatcctaaccggtattgtaaattccataaggatatcgagcacacgaccaacgaatgtcgccaattgaaagatgagatagaaagtctcatcgctcgaggtcacttcaaatagtacgtgaagagatagggccatggataaaaccagcccagtatgcccaataacccaaataaccaagagttacaaccacttcctattgaaggagaggacatcatggttattttgggagggccacatatcgcgggggagagcaataacgctcaaaagagatacgtgaaagagataaagaacgagcagtcgacattcgccccaaaaccttctaaaaaggtgaaaactgaggaacctccaaatacattcacggaggaagatgagaaaaacatgagatatcctcacgtcgatccattggtgatcaccatacaactcaccaataaaagaataaagcgagtattgatagacaatagaagctcagtaaatatcctttataaggaaacgctaaggaagatggggctcaaaaaagccaaattgaggccttgtatggttaacctttgtggcttcactgggtacaatattgccagtcttggcataatccagctcgcattaaccttggatgaggcacccctatctgccactgttatgcaagatttcttagttgtcgacctgccatcgacctagaacatattgttgggtcgtccaacattgatcggactaggggcagttagtttgatcaagcacctatccttgaaattccaaacaccaga

SEQ ID NO: 59119 - DNA, 710 bp, Cannabis sativa
tttgctgagtgtttctagttgaacgttcttctggtccatattgaggtccaatgaggatgtatacatttgtccttcggctcgaatcttgtataatcaaagtgtctaccactaatttttgtgtagttatttgataggcccgcctaatcagcacggtagcctgccttgaacgattatcaattgcctctttttgggctctcatgatttccatctgctgatctatcaactcttggaatcagcatttttgctccttgaaagaaaaatttatagctgcacaggtatcttgatgatcatggtagagagtgttggtatgctcttgcatctgctctagagtggctcgcaaattctacaatttggtgtaatcaccaattatcctttgaggatttcaaacaaatggatttttcagtaccaggggcaatttgctcagcatgagtactggtagtcccaatttcttgcatgcctagagtgaactcggccaaaggggttgtcactcatagccttgttgattcaggacttataggaggtcgaggaatagtaaggtcatgatccatctgactagatctcttcaatttccaggagtttgcacattaggatctatgaccatcggatcagtcgtatcgttttgattacccctccttatagtcacaaccatctttgtgtgccctgaaaagattcaaaacaataattgtgttcttttactctcaataaaaata

SEQ ID NO: 59120 - DNA, 2344 bp, Cannabis sativa
tttatacccgagtcagaaacggggcggagggcgggggaatagatacccgcctcgaacccgtcccgatatgatatatgtatatatttaaattttaaaatcataactactacaattaaaacatactttagacttttaattgattatacttttttttttttactatgcacactattccacttaagtttattgttttactaagtttttatgattactttttttttttaattctctttgagacattatttttttttcaaaaatatatatgtaataggtacccgataggaatccttcccccgtcaggtaattcccgccccgtgcccgctttaatttaaacggttaagaagcgggtatgggagtgggagagcaattcccgcacccgccttaccccgtttacatccctataaaaaatattaaaagataccagtagtacgtaacactttttcatgtgtcaatatcgttaatctaattaaatattaggtcacatataagttaatataataactttaacaaactatcattaactaactaatatatttagagaagtgataaacactattatactcaataacaatatcgttgtggtatttctcttccatacatgaaagttacacatgatcaatcctacactagcacctgccaagtggagaattccaaacccatgcaccacaacacgtggaactttgcatgaaaatacgtgtcaatatacatacatataaacaacatatatatatacacatatatgtaagaatcattattacacataaccaaaatataataatgagcaataatttcagcaacttctacgaaacatggttcgatcgactaaagcacttagtccaccaactagttcaagcacaccataccccaacaaccctagaccaacacaaccacctccaacacctcaccaacaagctcatctcccactacaccgaatactacaaattcaaatccctagctatcgagcgcgatgccctaacggtgcttgcagcaccttgggcgactgcgctcgagcgctctcttcactggatggccgggtggcgtcccactacggtcttccatctgatctactcagaatcatcgattctgtttgagtctcatattattgatattcttcgaggtctccgtactggagacctcggagacctctctccctcacagtttcgcagagtcagtgaactgcaatgcgaaattgtgaaagaagagaacgagatcactggagacttctctgagtggcaagatagcgccagcgaaatgctggttgcggaattggatggtggtggtgtgagccagaagatcggacggttagggtttgttctgagaaaagctgatgatctacggttgagaacgattcagagtgttgttgagcttttgacgccgcaacaggccgtggagtttcttatcgccgccgccgagttgcaatttgggattcgtgcttggggagttaatcacgaccgtacatcaattagagaatattgattgatgacgtcattattaattaattattaaaacacatcatggccgttcattttggatgggagtaatttaacggtaatgatttatatccacttgtgtgttttttctctatggatttttctctttttttgggactaattttaatattttaaaatatttcatagcaaaaagaataatgatagtaaaaaataatgaggtgaatgatctgcaaataaatatttaaaataaattaaaaaaaaaaagattatgaattattttaattggagagaatcattttaaatatttgaatattaattaataaaaaaatattataaattagtttaatttaaaaaataactttaattaaacccatcttgaggacacttgggttgagttcagtagggggaaaaaaatttatgggaaagtataaaaatatattaaaaataaattatttttagttacaataaaattgttaattataaattattattgttgttttgttggctaaaaatattagtcataaaatttataatttattgtgactaaatgtgtttttagtcacgtaactaaaactaaattagtgataacttgtaattaaatattatgttttaatcactagtaattttttttgttgtgactaaaagtaacatttaattataaaaaatttatattgtaactaaaaaattgtcactaaaagtaacagttttttatagtgatattttttaagaataaaaataaaataaaataaaatttatgaggttaattataaaataactatccattttataaaatttatgtgatgaattctacatgtatgcttaaactattaattctttatatttaatttggggagttttcttaagtgctttgataaaaatgtaagtaactaatt

SEQ ID NO: 59121 - DNA, 855 bp, Cannabis sativa
acttgacaatttttcctagagaaagatctctcggttctagaaatagtcccagaagtagttttagtatgggacttggacctacagtgagatgaaattttaggcacctgagtatgcatgagacctttacctttacatgtagaggaaacaacagttgaaaccatgataggactggaatcaacagaacaaggaatggaactcataataggcaagttagaaccaggaaagttattggttaaagaggcttggggaggggtagtactcgactgtaatgcccgtatttaaaaactttttaaactgaaaaatttattttattatctttatatagtcttatgggttgagatcctgaattttaaaacacagttgaattacacttactaatacaaaatctcatagtatattatttttctttacaaacgacatgcaactataaaatataactcaaaatgttgaaagaccaaaaccctccaagctgcactgccacgatatgtataatcactgccaagctccaactcactgctcatccagcttagcttttcccttaccaacacaaggtagcaaactgatgagtcgacaaactcaataagatatgcttaaatatatgaaagcaatgctattccgactttatgcttaagtcgtcccgagcccaaagctcaccaattagttaagaacgttcttaatggaagttcgaccctataccatatgccctaaattaccaactccatactcgtattagtagggtctttgttgtacttctgggagttactaagtattgtaccacatgcacaacgtaccccgtggtactcgtgttggtaacactgtaactaccctaaaatcctacactttactaacaccctt

SEQ ID NO: 59122 - DNA, 6990 bp, Cannabis sativa
cacacaatgacattgatgctatgtcttttttatacaataaaaaattaaaagtacaatgtatatataatagtttaataaagaaaaaaacatatatatataacaataataatatgtgatatcataattatagcatttttaaaaggtattataccattagaatgtttttaaaagtaaatgtgccaaaaatgatgtggaagaaaaataaaataaaatataaaattttggatgatgtggatataatggagcatcttcaaagaatgctatcattggagatgctcttagtgttgaagcaaatacttttgaattttttaaattactctctttgttctaatgtcgagttcacatgtcataaattattggcgcccactctttgaatattttattccaaagaaaataattaaagagcaaagtttaattaattggttatcttcctgaaaggataattgtacaaagactccacacaaagcaacattcccacccaccttggctgcataagaatatggagtaaaatttattttaactatgttcaactatacatgaactaggccctcttaaatgggcttacctcataaatgggcctgttaaacggacgctccctgtttgtattgcagcaggaaaagttggaaaagaagctcacttggagaactggcttacttctctgcccgccttaacacctggtgattcgttgtttagagtaaccttcgagtgggacgaatccattggagtcccagaagctttgatcatcaagaacaatcacttggatgagttcttcctcaagaccatcacccttgaagatgttcctggggaaggtattgtccgcttcatctgcaactcttgggtttacccagctggaagatacaagcacactcgcgttttctttagaaacaaggtaataatgggttattctttcttttttcgattatgagaaagagtttgttgtggttttctacaattgtataagtcttccaaataacatcagaatattgttctttaatgaatatttgattgaggaatgtagagaagtgaatttggtttggtttatttctgtagtcttatcttccaagtgcaacaccagaaccactgcttaagtacagaaaagaagagcttgaaagcttaagagggaatggcaaaggagagcgcaaggaatgggacagggtctatgactatgacgtgtacaacgatttgggtgatcctgataagggatcgaagtatgttcgtcaaacccttggagggtctagtgaatttccttaccctcgtaggggaagaactggcagagcacccaacaggacaggttacacatttgtattgaattatatgtataataatgggatttcagtttgtattttaaatgttaatttatctggtacacttttctaacagatcctaaaaccgagagcaggttgaaacgtgtgaatcttatgaaacctctggatcctcttgaagctttagatatatatgtgccacgagatgaacgctttggtcacttgaagatgtcagactttcttgcttatggacttaagtctttatcgcaatccatcaaacctgctctggaacattactttgaccagacacggaatgagtttgataactttcaggaggtatatgacttgtacgaaggaggatttaagttaccaacagcagtacttgacactatcaggaaaactgttcctttcaatatgctcaaggaactgtttcggactgatggtgaacaatttcttaggttccctgtgcctcatgtgattaaaggtactgcacatatctgtgaagtgcaatcaatcttgttcttgagatgaatcttgtattattgtacaatcattaacgttcacatttggtctttcattagctattttattttgactaattgttggatctctataatatggagcagtggataaatctgcatggagaactgatgcagaatttggtagagaaatgcttgctggagtgcaccctattgccattcgtcgacttgaggtaatttattgttaattttgtagcactccttattatcggcttagtgctgctgaatgcagcctattttttcctcattggtcattatagtctaatttttactgcaggaattcccaccagcaagcaagcttgaccataaagtgtatggcgatcaaactagtaaaattacggaagatcacatagaaaagaacttggaggggcttagtgtatatgaggtattgttcatagcatggtttttgtagaacttcaaaagtagcatgtaattgtaattaatgcatatattttaagacaattcttcattgtacgattgaataggcgctctataccaacaagttatttatattggatcaccatgattcctttatgccatacctgacgaggataaactcaactgccacaaaaacttatgccagtcgaactctccttttactgaaaaacgatggcactttgaagccattagccatcgaattaagcttaccacatccaaagggagatcaatttggtgcagttagcaaagtatacacccctgctgaagaaggtgttgaagctaccatttggcaactagcaaaagcttatgcagctgtaaatgactctggctaccatcagctcattagtcattggtacaattctgtcacagaaagttgattgcataactttgatttagtttgaaatgtgttcttaaaactttttaatattggttggtctacaggctgaatacgcatgctgtgattgagccttttgtgatagcaacaaacaggcagctaagtgttctccacccaatctacaaactcttgcagccccattaccgtgacactatgaacataaatgcacttgctaggcaaactcttattaatgctgagggaattctagaatcgacagtttttccagggaagtatgctttggagatgtcagcagtagtttataagaattgggttttcactgagcaagcactcccagcagatctccttaaaaggtaagcctaataagcacagttcattgctaaaatcttgtagtaagacttaatgtaaaagctataataaagggagaaaaatgcacataaagtggtgtagtcagatagtaaatatactcagtgggacaaaatagagaaattttaagttggtttaaaaatatagaaaacaatctctcaaaaccttagggttgtggttgtgttgtggttgtgcttttctgaaattgacataccttaatttgtctatatgtagaggaatggcagttaaggatccaaattctccacatgggcttcgcctgctaatagaggactacccatttgctgctgatggcctagagatatggtctgcaattaaatcatgggttgaagagtactgctctttctattataaagctgatgacactgtccaaaatgattcagaacttcaagcatggtggaaggaagtgagggatgtgggtcatggtgacaaaaaagatgaatcctggtggccaaaaatgctgacccgagaggaactagttgaatcgtgtaccataatcatatggatttcttctgccctccatgcagcagtcaactttggacagtacccttatgcagggtaccttccaaatcgccccacagtaagccgtcggtttatgcctgaagagggcactccggaatatgagcagcttaagtctgatcctgaaaagggtttcttgttgacaattacttcagaatttcagactcttataggggtttctctcattgagattttgtcgaggcatgcttctgatgaggtctatcttggtcagagagactatgatgactggacagcagaagctggccccttgcaagctttcgagaggtttggaagaaaacttgctcagattgaagacaaaatgatgagcaagaacaaggatactaatctgaagaacagagctggaccagttaactttccatatactttgctccatcctaatggcgaagaaggactctctgctaagggaattcctaacagcatttcaatctaaagcttgtgtttttatagtgttgttaactcgcctttatttcctgtttttcctaataaaggtgtttccaaatctggtgtagtgtgtggggtaagggtctgatcttggcctttgcagaaataaattacttgtaccaagtatgatgtttaatcatgtaagaaccatatcttaaataaaagtgttttaagctttgtgcaatggttaaagttggcttcaaaataaagagaatgaccagtctagtatatggttaagcctttcaataagaagagactaaatattctcttatattcacaggtaaatgccttaataagtaaaaggcactaaaaacagttgtagttaatagtttcaagtaatatatttagtatttctttccataatatttagctagtcggcattccttccagttacgaagatgaaaaagtgatgaatgtgtaagctaaagagatacgcatttacgaggaaaaaatttaagtgagaaataagtgataatgggtaatggaagtggaatagtttgtataggtacctgtcatattcttgtcattttttttaagaaaaaaataataattatgttctttgtgaaagctcccagccgttggattgcactagataacaattaatggccatgatcttcaagtgtgacatcttccgcatgcttactaggcgtgatcgaattggcccctttaaatagataaatagagagatacatatagatatgtaaaagataaaattaatactaaataattttattatgtaaaagagtaaatgatgaatatatgtattagcaaggaaagaaaatgacaaatatatgtattatatattgtatatgtattaatgatagcaaattgacaaataaaaataatgaggttttctttagaagttcttagcattgatttttttacttcaccaaggctcgtgggccttatggcgtgactcaaacacaatttttaattttattggagttattgtttcttcttcttttttagaggtataccacagagatttaagttgctcattggccattgtttattttttttgcttgaccaagactcgtcggccttatggcgtggctcccatactattttttatttttctggggttgttgttatatttatgtatgagtatttttttcttttctgtcttctatttttagaggtgtattttagagatttgaattgttcattggctctagattgaatcttcattggcgttaatcctcttagtatgttatttttattttgttaagtttatttttgatgtttatttttatttttaataatgatgttgctacattaccttactattgttatggtagtagggttttattcttcatggcataattttaatcttgtttctttttaagacattggaggaatttcatgttggctcaaagcatatttgtgttactagcatgactattcttgtctatgttcggatctgggagattctcatatttttattgctcatatagtttatggtgcgattgtttgttacgattgttatcgctatagttggtcatgtgattatttctttttattctagattgaataatagggttgttattattttttttttaagatctttggttgatagtcgttgatagatgtgatttgtcacatgtttatttggattggagatctagcattcttcacacttctttgatggttcaatgttgggggttgttgaaagtgctattaggattttcattcctatttttataaatgacatactttttctatcttgttgattcatcatgtaataaattattgtgcagtttacctattaatagttattaattggattttaaaagtatcatttgacatccatctgattaaattcaacgtcaatatatattttttttttaaatttgatccaatccaacagtaattgaatataattttttgggatatttacatggggtactgtttcttttataaaactttctttttttactgatgcacgcgtatattttttttttactgaagtaattttctgtatactagagtcagtataaaagttttttccccctttatgctatttgtcaccttagggtgagttttttttaaaaagaaatgattaataaaagctaatgagaaaactagttgtcacgtccgtgacagattttttttaaaaaaaagccaaatgaagatggtttttattgtgaaaaagttttgatgtagattttttttttttaagaaaaaaataatcatgaaaaatttaatatatctcttcccacacggtttttcttttttgtaaggtataatagttgtcattatttattttttcattatatttaagctcccttttccctcttcatcttcttctttatttttttttctttttttttttctcaagtttacaacattaccaaaataaaagctaaccctctccttttgtagtaggtaaccgaataaaaaaaacaatatgtgaaagaggaagaagaagaattgagtaagataataatgtgtttgtgtgtgagagagagatggagagtttgctctctgatgagtttcttgtagaaattttccagaaactcccactaaattcatgttcttcggtctctttggtctcaaagcgttgactccatctctaccgtacttccaagtccaccctctttctccaacttaccattttctattactggtttattttgttattgttttattattgtttcagagttgttttattgttgtttatttcatatatttattacatttttctaaatattattgtattgctctattttcaataataataggaaaataatgaaatttgtatgtaagttattttctttaatatcttatgctctaatatatgttcagttttcctccgttgtttttaatttattttttagttgttccgtttctttttatcttttatgtcttctcctgtatgttctcttgttgtgctccagctctctacatttgctgcatttgttatggggccgtttggtaacacttttattttttaattttaaaaacagaaaaaaagtaaaatttgtatttttaaaactttgtttttaaaaaataaaaatgtgttctataaccattt

SEQ ID NO: 59123 - DNA, 720 bp, Cannabis sativa
aaataaatctagtaagagtgattataatataaatataaatattttttaataataaataagcccccacaaagtaaaatttctggatccgtcactgctcacaagtcattcttctctcccaatatgtatggaggtgggtaatttttcttttttatgttatcattttacttcttcatacatatatatatatacatattattatcgaaattttatagaaattattttataatatttttttttgaaagtctaccaaaacaccaaatgatatacttttactcagatgctatgaaatatgtatgacttttaatcctttattcttcttttttatttatttacttccttttcatatatagatatgtttatatattcatagatttgttattgtgatggacttttatacatatatattcaaattaattattatttattgttgcctctaatttcgcccaaaatacgtggaccagtatgacgacgacacgtgtaactcttagatcaatcgactaatctcttagcttcaggagtgtcaccaaggacataccctgccggaggagaggtaaaaactccacgtactcccggagaccagaggaacgccaagggacctctgggaggaacatgacattatttgcaacagtcacctcgcatttaatgccgcatgggagaaaacgtattggaactgccataagcaataagtctgacggtgtaacccctcttatgcagctatta

SEQ ID NO: 59124 - DNA, 857 bp, Cannabis sativa
tgtaaagggttttatttagggcacaaaacccaacagaaaatactaattttaaaaatctaatcatatgatacaaatatatttcaaaacttagtagttcaaatgtatatttcattcttatttataaggaaaatataatctaaaacaaaactaaatatttctttatacatacaatttttttttctttgaatttgttattttttattttatataatttaacttgttatagaaaaacataacactacaattatctgttttattttgttgtaagttatgtgaaagaaaagatatttttaataaatattaaataatttaatattaaaaaaataatcaatccaaaataatcaatctaatccacactttagaggattggattggctttgagttattatgcggattggatttgatccaaaatatgaagtccacacgtaatgaggatcaaaggcactatgagtaaaatagtgcatattgaattggatgaacacccttatataaaatattatctacataaatattaggaaagtttacgcgatacacttaaaattggaagtttattttttttttatatttttacgaataatttttttatttatttacatttttacgaattctactttttcttatagttttcactttttttttctaagaaaaacgttgcttccccgtagcagtaatgtgaaaacaatattttgaaacaacgaaaaaacagcactttgtattattgtaaaaaaaattacactattttcccgtatcagcaatgaaaataacataaaaacaacactctatatttttataaaaaaattaaaaaataaaatccgtaaaaatatatatatattaaaagaattttttgcggctaaacc

SEQ ID NO: 59125 - DNA, 1302 bp, Cannabis sativa
tttagttaacttgtgatttgatgttttaaaatatatttaatttaacaaaaattaaagtataattattaattattattgtatttcataattaaagtatatatattgtttactattgttattgataatgaaatatttgtcaccacatctttttgaattaatattcaattgccaaaaaaaaggtataattgcaataaaattataagaaaatatttttgctgctattttttttcattaaaattatatgtgtaacaattataaatattaagagagtttcgttgcaaatatctcattaataattattgtattttttttaataaatattatatatataaatattttttttgtggcaaatagacattctcatttgataagatatgctttggtagacttttatttcatagtggaggcaattataaatagtttgaatattaattcacgggacttgtctaattctaaataaagaaaaattcatgattgtgttttagggagattttatttggactttatgaaattataattatattttattttattaatttttattttatataaaatatatatttttaatttgtactattttttaaatatttttgttccttatcatattcttaagaaatatatatacttataaaataaaaataaaatatattttaaatatttagattaaaaaattaaaataaaaattatataattttttatttaaaaaattaaagaaattatgataataaaactaactattgatattaagaaaagaatgtgaattttttttttaaatgtaatttttaaaaattaatttaagttaattattttttaatattaacacatatttttaattaattataaatatgttaaaaaaataatgaaaatattttaatatatatttatttatttttaataaaaaatacatatatatatatgatataattatatatttaaaaaaaaaaattcagctttgtaatagagagggaccatacaaatttaaacatgttctaaatatgataaagaaaatatacgtaacgttattgtcgactttattattgacagcataatcaaataaaagataaaacaaaacgtaaaagtttgtttgcagagaattgttaaaatgcttaccattttcttcgatattatgctattattgatatataattaaatatcgagttttatataattttaaaaaataatttataaagaatattattaaccaatcgtagagtatactacttataaaaaatgttaaacaataccagccgatatttaataacaatactcttacttttatagggatatgattttgtcccatta

SEQ ID NO: 59126 - DNA, 802 bp, Cannabis sativa
  modified_base (318)..(320): a, c, t, g, unknown or other
  modified_base (465)..(468): a, c, t, g, unknown or other
acataaaagcgatttctaatctttattaattagtaaatctgattatcttgaaatgggttttatttagggaataaaacctaacagttcctatgtaacgccctgtctcacagggacgccacgtgtgtgattttacaaactaattcttagttaatctattagttaaggaaaagtgtggtttcgttaaaaactttcaatttaaactaaaacgtaacttttcttcaaaagattgctaagtatggggatcccatgtttaaaaaaaaattcacactttagctcaaaaccagatttacagaatagggttacatttccacaaaatannnaaaaggatggatcctatccactggtagtcgaaacaccgcggttgatatgtacatcaccgggagacctcttactcatggttgaccacagtttcatcctccttacctgcaccacaaagcacccgtgagtcacaatgactcaccaagnnnngctattaaatcaaggcaatgataaacacaagtaatcacaacatgatataatatgtgtactcataatttattacttattcaacatgcatagataatttaacatctataccaacacgcatattacgcattataagacaatcatagtaacttataatcaacaacttcatcatttcactaagcaggcattcattcaatacataatcacataattgtagtgcttcataaagtgtcgttgccactcgctgtctacgagctatgtatgtcactattgttgcccgataaaacgaacgataagtaagaaacctatccgtgatttcaacgagtaattactcata

SEQ ID NO: 59127 - DNA, 841 bp, Cannabis sativa
gcagtctgatagattgccaggtcatagactcgtaggaatatattagtaatttccaaactttttgttagaatcccatgtattattgaagcagatttgcctagtagcaataacaagttaaatctagatatctaacaatggaaaatgaaaatgaattctggttcatcgtaggtcagaaagaagatgtagaatatagtcatattcagaaacatatctccaaaaaaaaaaaaaaatcttaagtgaaaatagaaagccaatatactttctaaagttccaggacccttgagcagtgatgctagtgcccaaattagctcatggtaatttaaaattatctcatagaaacacattaactaccctataactattccatgcttaaatacttactcgaggatttgaaatgtttatcttcttgtgtttcaggcctattttaacacccaattcttctgctacattagagaaaccctgaaaaaaccattatgaaacataagtattcagcactttagcaagagcacttgtaggtaccacacacggtaagcattttatatcttacttcaaaaatttgctttatgtaagcattttctggaggcttagaaacatgaatccataattcattatcccatgagccaacactgttcaagcaaatagcgtagtcaatactctcccgaagacgttgatcaacactctgaaagccactgtaataggcaaattttacaataagagactgctaaaactatataaagaataaagtaaatcaagaagtgtacactttttctctttacttctttaagtgtgtacctcttgagttccattgtagttataaggtccaccagaagtcaacccaaac

SEQ ID NO: 59128 - DNA, 774 bp, Cannabis sativa
ccctcgaagactccctgagtgcactccactacgcccttaagcgcagtgctttccccaccatatcagcataggtggtgttgtcgtcagtagaaatcataagataatgttatatttttggattcaagccatccaggtacttttttttcttgctaaaattggttggcacgattcccaaggccaacctagccaaatgatcgaactgagttgtgtattcggtaacacttatattctccttctgggtcaactgagtaaattcctttccttttgcacttctaactacttcgttataatactttgtgttgaacaactcctggaacttttcccaggtcataacagttacatcacaagtcaaggacaccatgtcccaccaaactagagcatcttcttgaaactgaaatgtggcacaggcctctctgacattgccggtgacgtccataaaattcaggattttagtagtaacagtcaaccactgctcgactttcattacatttggacctctcaaaaatattggatgtgcctgcttgcagaacctttcatatagtggttccattcggttcactgcaacaattggtcctgcctgcacagtaggggaaggagctacctgcatttatggagcaggtattgcaggagctccctgctgcctcaggtgtctgatctcttcttcttgctcattgattctggcttgcattgctgcaaacctattttcccattcctgggtagcctacaacaggttaacatcaccccgaccgtgtaccctgcctctagggcctctgc

SEQ ID NO: 59129 - DNA, 2588 bp, Cannabis sativa
tatgaaaagcgtctaattctcgttccctctcgtcctcttttttgatcatctatctcatcttctcttaacatttttgtgcgagaaaccaccgtgtatctgtccagattgttggtagtggaggggttgagtgggttacaagatctgggtttcgatacccaaaaagtggggaagaagagatgaagacgacgatgtgctcgtagggtcgacataaaaattgggttgagcttcttcctgacctccttccacactctttcttcctccttctccacagtgttcttcttcttcttcctcttcctctacctctagtaaaccagccctaatcacctagagcccagattcctaaaatagcccagagccccaatcaccgccttttttaataaccactgccttcttctttctccttaatcatcactgtcttcttcttccttcgtaatcgccactgtcttctccttcatcctcttcccctagaaagccagctccaatcatctagatttgaagccctaacaccacccaaagccccaaatcaccttcttccattccccttagcttctacttctcctcttgtttgcccaatgttaatgaatatgtctgaatgtttgtcgccgtctactttaagaataaccccagagcctgatggacttctgtttcctctcctaatgagcccaacgtcatggaatctccttcccctatacctgacctagagaaggatgatatcaaagccttaactaatattcttttttcttttctttttagttcttctcggaaaaaacgtatctaatttttttgcaacctataaatagtgtttattgtatatgatttgatttttaatatattattattagttgattatacctttactttacatgttttgttattttgaaaaatcttgattggttagagaattgtattttgataaccagttaaaaaattgtttatgccgagataagtgtttttttttcttttttatttattttctaaaataatattttaattaccttttaaaataaaaatgagatggactaataagagcatgacatgtggcataggaaatagtccagttaacatttagcatattagtagtaactgaagtagaaaaaatgtaacgtttagtatttaatttgtagaaaaaaaagatgtggtatttaagtgtatgaaattaaaaacataaggtatttatgacgcaaatatcctttattattattattatgtttttttaaggaaaaaagtttcaatcaccaaacactaaaagcaacaagtactttaaatggcgggaacaagaatttattcaaagatagcatcctctagcaacaaatccacaataaatcttgaatataaataagactccttgccaccaaaacatactactgcttgtgtcaaaacaagtttgactaatgtatgagcaacaccattacaagacctattacaatggataaaaataacaactttgagcatattataaagaccaataatatcatccaatactagacccaaagaagaaataatagagagattattttcaatttaaacacaatattcaagcaatcaaactcaataatgatttttaatacccaaaaggaagacattgagacaaagcctttctaatagccaacgcttcaatcaccataggcatgaaacaaccatccaaacaccaactcactgaagcacgaacaactcatacctcgtctctaattacaacgcccaagctactataattgcccatagaactaataggagtgtttgtgttaacttgagacaaccaataagggtccatttgggagctacctgaagagagagctgctgtaactcatgcaatacaaagctagcagcaaccgtcgattggagaagagggtcaatagccgtctaactctacctattgtgaaacgtccccagaaagtcacgatcccaatgaacagtgagcacaggagattgttatcccaaattttgtccacataatgtggcatgtttacgtgggcaagattaataccacgtggagtacaacttgtcaataagaaggccaaggtcatcgtgcacaacatattagttgacaggaagtcagaatacataagcaggacaaagagacaatgaattggccacctaaaggggtctggccggacccctctggtcggccctatggccaacataggtcggccagcctccagcagaggaagggtcagttagcctatatcctagcaggcacttggctgtccaacttgcaccctggcaggcacttagtgtgcagcctggaccctagcaggcccttgatgtgcagcttgcatctgggacaacaatccaagctaagaattgggcttcaataacccacaaaaatagggaataaatatcagctatttacctattcttgggggataattaacctattaattatttttattttattatataacaaatatattatattttttttttctagggatattaggttattattctcttgtaagctctcctatataaagagcataaacctaaacctaatttctctaagtatcaagcatcctaagttctcaagctctaagtctgaaacccttgctctctcttcctatcacttatacacgccctaggcattgtagaag

SEQ ID NO: 59130 - DNA, 2992 bp, Cannabis sativa
aatattgaaacgtaattattagaacttaaaaccatagttttgaaaaaaataccaacaattttgaatgaagcttattattaagttaataaccttaaattttgtttttatttttatataggatgtaagtatatttgtataattatcattgtttcttttatagggaatgagataaaagaaacccaaaaaatatataacataaatattaagacaataaattaaaagattaaaaaagaaataaggacaataaatttggcacgtagaatgttttgtacattctttttttccttatatatatttttatttttattgattttcatattgatcttgattattattattgaaataatcaattttatttttgctttatatttcccaatggtttttagttttattgtttcaaatttcacaataataaaacttgtatttaaaataataacatatctcaatcaagacattgataaaatagaaaaattactgttacacagtcaataaataatttaaacactaaatactgagaaatccatatagtctagaggtttaacaaccatattaacaatagatggaaataaatagtcaaaaagcccaatattcaaccatgaaacacataaacgaaaatggcatacacacccaaccaccacacaaacagttttttgaactaaaaacttagactaaaaccaacttaaaagaaacaaaatctttccaaccacacaaatgaaagatagccaaaaggccaaaaccatcactaaatacacgtgtactaattttttgcatcatcatcgacttcttcttcatcatcaacaatttgaaattttctctttctacattcaccagcgacagtcatatcttcaacttccaaatcttccaaatcctgtaatatgttaataataaagagaaaattattatttgaactaatctccctaactcttttaacaataaatataatatagaaagtgtgaaaagaattattctatcagaattattttcgttcctgtcaatatttatttcctacaaaaataatggacaatttattttcttaaattacatatatatatatatataacatgtaatgtattgagttaatattttcttgattcgaaattagaacttgcattgaaatattacctctctctttttggattcatgagcttgttctaatatatcatctggcacaaaaattttagatacagtaaagttctcatatccatcttttaaattaaaatgattcaatcttaatttataaacaaaatcctttccacaaagagcttgaattactgctggaacttcatcgttatttgtaggtaaaatcttctttactgatgtatcaagtagtttctcggccacaagattgaataagacaaaagttgtctctgcacttttatctctgacttttatatgaattttgtacctatattagagaacaaaaatagattaaatatgttacaataacatgatatttttatttttaaagaaaaaaccagaaaactatttgccttacatcaaaagaggatagtcacatattttgtcacaacgatcacaggtatgaacaccatttttgagtacaagctttttcaaacatgttttgcaggacatataataccagccaaaagtggtatcaattccaaaaatctttgcctttatagtaactttgtattcctacaatcaattttttattttaatatttttaatttaatttacataatgtagctctaatgagaaataatacaacaataatagtaaagagaaaaagaaaatgaagaaaagtcacctgcattccatcatcccagtcagcctctaatagttctttaatgttcattcggttgacgaacatctcttcctcaagagaaactttattcacattagagctttcaatatattgcaccccattgacaacggttgaaaatcgttcaattaaagatgctatataatctataatctatttctagatttatgtataattttgtagcacttgttgaagaaaaactgatttcacctatttatgttaattgtgaaaccatctaaattatattaaaaagacatagtaaacaaaatagcattgtaatattaagatcaacatttataatcaccttgaattttttttattgtggtagaagttactatcacaataataggaccctcatcttttttatacatatttgtatcaaacatctctgccatcttaccccatagtgtaatttttgatgtgattgaactgtaaaatagaaaggtaaaattgcattaacatagttgaaccaagataaaatataaatattatttctataagtaatgtactctagcaacaaaaaattgatatagttgtggttcaattaaacttactaatctgttatgattttcaagtctctttttttccaacctgcgccaataatctcactgtctcccacaccacataaacatccgataatatctaatattttgagaaaaaaagtaataatattaagatgttaaaatttgaaaattgaaaattttcaattatacatcacatttgaacactaaattttatataaatacccgagagaattgtattgttactgatacgtgaatcaatcaaattatgagatacgaattgaaatccgttagttggaatcttgatgcttccttcttctaatttcatgattgaagttgtttttagaaaaataatcttgtaggcatttaaaacaggcctatactcgcctgtactttcaaccaccttgaaattctttacagtatagagagaaccctcactcaaaagatgcttaaactttgaaacaaataattttcgaattgttgcatgcataatatttttctgtatcgaataaacttattacgttaattataaaataatataaaataaattaaataaataattggaggaataaattcgtacataccttctcatcaatgaaaatcatgtccagactaattaattcatcatccttcttagtgttagtagactcccacatcttacaaagtttaatccttatgatccaactttcat

SEQ ID NO: 59131 - DNA, 1330 bp, Cannabis sativa
ccacttaaataactcagtacatagggtgaaggtatatgcattccaatgttcaatttatcttcttcgtatctaatttcaataataattaagaccagatcaaatcttctatggcaatctcttaatcgttaaaatggcaatggcaaccaaggaagcatgttaaacattgtgaatcgaaaaaaaaaacataaaaaaaaaagcaatgtggtacaaaacaatcaatcataatttagcatttcaaaaagaggtggaaaatggtaccttcatgataacaacgaaaagtagctcatcttctgaaaactcagattgagattagacctaacaaaaagggaatcaagaattgaaatttagataccgttggtcggttggcaattttttaagagatcgaagattagaaagagcatcttaaccttgtttcttcgaagattgcaaacagatagagtcccatctccactaaatgaaaaaaaatgtattaaggaaatcataatcaaaggataaaagggtttgaataatatgttaaaatatgaaaaaggaaaaaaaaccttgttcccaaaagcttcatggaatcggacgtaaaagtcatgtcagaaatgtactcttcatgaactttaaaagaatttgtgcaagtgcgttgtctggtatcccaaacctgcatttagtcattaaaagataattactatcataattaataattagttaagacacaagacgtaagataataagatacatggtgaagatgatgatgatcaaaccttaatacaaccaccatcatcaccagaagcaatggtagaattcgttaaactgattatcttgttaatggcatccctgaaaaaagcgcaggcagagagtgtaattagttttccataaaagagagaaatatagtaagaattaatgaagaaagcgaaaactaactcatgagcatcctcaagacgagcaatggcagaaccggtttcaacatctgttgctagaattgaacagtccggtgatcccgacacaatagctgtcacgttaacacagtcaatttcatattatcttgatcaatcaaatacgtacataaacatctatatatatacaatatcataccgcggccatcgttaatgaagcgaacagctctgcaagattctgtgtgggcgtgcacttccaacaccctaacaaacaaaatttaatttagaagaaaagccaaaggaaatgagagagtgacagtgatagagaatggtttagattatttattacctttgaggagtggaatcagcagtgtagcggtacctacaagaatatcaacagtatatacatgagaagaagaggaagataataatgataatggtgatgaaga

SEQ ID NO: 59132 - DNA, 862 bp, Cannabis sativa
gggcacaaaacccaacacgtacattaaatcaaaacataaaatataagtttggaacatatacctcttgaagactatcagggtatcctcgaaacttgtcgtatattgtatccgttaatccagatgatgtggatgatgcaattgaactcacactagtgtcttccaagttaatccaccacacacaagaaacagtgtaggctattaggataaagtgtataatgttgttcttgttaagttctcaacacatgagcaagaacagttgtggaaaaaaaaacagtttccttttctcctcaagtaatttaaaaaatcacttatgaaaagcactttttaattttcaaattaggcttcaatttatagtagttaaaaacctttaattatatcatatctaattatttaaatatctataaccaaattcggttactgatatttatgaggaaatctctcactacttgagagagtatctcaacaactttgaaatatctataactacttttcaaattcaaatatttatctaattgaattaattaaataatgaattaatccaaaaagacaaactccatagtatataggtgcctaccatgtctaaattaagagaaggatggtgtcttttgtcctgacaacttttgtgtcaacaaacattgtcttgaaaaaaattttatcttaacaacttttgtcttttcctatttaattaatttaaaaaattacttatttattaaaaaaataaataattactattttgccaattcaaaatagatatttccgaatgacataatacagctctttatccatttccttagcaatgtttcaaggtggcgattcagggaccatggacctataattctaagctccaataaactaaattatt

SEQ ID NO: 59133 - DNA, 1954 bp, Cannabis sativa
tatatcaatgaacactgtagtaaactcagtaaatataattttataattactaagagctgaattccatatatatagtggactaatcatggaattaataagtaagattattcagttgatgagattcaataaataatctaatttattggagcttagtattgtaggtccatggtcctcgaatcaccacctcgaaacactattaagggaatggataaagttgtataatgatgttgggaaaaatatattttgaatttttgaaatagtaattatttaatttgtaataaataatttgtttcaaatttattgtttaaataaattggggaaaagacaaagcgttgtttggacaaagacaccacctctatctggttaagactatggtggtgccacattcactatattaagacacaattatagtggcctataagataaggtgagccctattggctttgtttttagtttaattacttaattgaagaggcaaatatttatttgaatttgaatatgaaaagtagttatagatatttatagtggttgagatattctctcaaagtggttgagagattctttccaagtagttgacatattctctcaagttgttgagagattccctcaatcggttaatatatatttaattaaaatctaaatatctaattcaaaataaatgtctatacaaaattggttatatatatttattcaaataattaaatattattattttaatatttgaaatataaatatttattttgacaaaacctttattattttattggttttattatatatcggtctaatcctaaatctatatatacgtataatttaggaaacctaaaaaggttaatcgcattattattcactcaaagaaagcaaagttcttgctgatgtgttgataaaaactcaagaatacttatacatttttatccttttagcccacactaatccttgtgtgtggtggaagatttagaacatcacagtgtgagttcttcatcaccatattaaggatacaacttacgaaaagatttaaggataacctgatacgcttcaagaggtaaataatgcctttcgtcttttattttagatttaatatatgtacatatggagatccatggaatgttgtaaaatcataatcataaaatatatttccattgtgtacctaatttagtaccataaaaccactacgaagtacctacataaaacacccctttcatcatggaaatacttctgagtgtggagtggttcgttggtccttactctccaactctcataccctccagtttcatggtagagtgttcgattccctcccccaaggttggctgtaggtcccttcctctttgtagagtaatgaggcctagaatcattagacctatgaggagaatcctgggaaggagatcaatttctcgtattgtttagattgctttaagtagggtcacagttggtcctgatagtggcaagtgctagccatgtaggtcaacgttctcgagtctgagtcctttggatgctcactcatagaccatttccctaacaggtgaccgctccacatcaggtggagggcccatcagcctacgctatcaagtgtgagtccttttggatacttgctcatagttttcatccctttggggatcctaagtgcctactacacactgagtagtatgactacaaggaatggtaaaggtacctagtgcaataaggcttccccttgagcgctttattccatatggctagttggcacacaagggttgtttccaactctagtggaagcaacttccggaggagccatttcattattggatatataggcttctcaaatttgttgagcaacattttatcttattcagcaccttgattttcaaagcttctcaatgttccatgaaccaggtttggaactattcatattgcttgtcaagagctttttacaactactgttgtaagttatcaactaatgggctaagctgttcaacaa

SEQ ID NO: 59134 - DNA, 1536 bp, Cannabis sativa
agtggataaagagcatacaagctgccagatgcatgtcctttaccataatcttcttcgtcataagatcctgaaacaaacaatgatcgagaaagaatgagattgaataatttagattacgagtgagttgactaacagaaagtaaattaaaggacaaattagataaatgtaagactgatgacaaagtgagcaaaggtgtgagagcaacagtgccagatccaaaaacaaaagatggtgatccatcagctaaagtaacagtaaaagtgggactatgagactgaaaagtggaaaagagactggaattacctgtcatatgatccgtggcaccagaattaatgatccattttgaggatgtcgtaagaaggcatgcattagagttacctgaattagctatcgcaatgacagaaaaagatgaagacttaagtgattcttgatacctcgagaactttacaaattcatcaactgaaataaaaatcggttcgtcagatgcatcactagtgcttgcaatattagcagtgtttttgttgatttttgaattgtaacttcctacactcaaacttggtatggcctagtttcttacaatagttgccaatgatgctcccgaaatttggtgttcgaatatcggtccttgtgaattacttcctttgtatccacttggagtagagttttatcctggtgcagaattgttacgactcaccaaggcgctattaagaggagctacataggtagtttatatgcaaagaacatgagtaaacatatcatgtaaagaggagacatcagaaagagaacttgtgactttgcagagtcaaatttagatgagagtcctgtaagaaaactcataatagtcatctgctctcgtatgtgctgttgaaccttcacatcattgctaaatggaaataacacattaagctcttcatatatatttttaaatgccataacataactcaaaagagattgatattatttctccgcacgataaaaggctttacaaacatcatatatgcgagatatgttgtctttgccagaatacaaaaactcaaagtaatccattagttatttaaccaatttacaatgattagttaaactaattacctcattatcgatagaatttcgaatttgaaggaacaagtgacatcctaattttgtgacatcccaaatttcaaattttgaatttcaaatctaaacatttttcttaagattatcaagttctttcttcaaaagattaatttcatcaatttttaagcatatatcagcctcacaattcttaatttttaattcaagatcaataatttcttgagattaatttttattcatttttttcattaatctattttcaaaataaatctttatctactttttaaacataaccttgtaggattatgtccagtttggattcatcagattcagattctatagcaccatcaaaacttttattatccaaaatagtgttgattaggcaaacaaaatttctatttttctgcaaaaaattagacatgctagaaagaacagaggtttaagcaactaattcatcatcactag

SEQ ID NO: 59135 - DNA, 1515 bp, Cannabis sativa
tggtgccttaaggaactgacttaagaaacttaagtccggtcttgtgtgtgttaaatactgcagagcgccaatgatactcctgtattcggttggattttccagtagttctccatcagaaatagacagcatttttccaattgtcattggggttgcacaaggtttcacatgcatcatgttggttttctttaatagctcatgaatatacttggattgactcagatagattcctgtttcatcacgcactacttcaattcctaagaagtagtgaaggtctccaaggtctttgagagcaaaggcttggttgagtttgtctgcaaactgctgaagcttgatagtgtcatttcccgtgattatgatatcatccacgtagatcaaaacaatcactatatccgttggacttgcataccagaacagagaggaatcggctcgagagttcatgaatttccagcttgccaaggtggatttgagtttgtcgaaccaggcacgaggcgcctgtttaagaccgtagagagacttattgagaaggcagacatgattcggtttgtcaggatctataaatccttcgggttgctgcatgtaaactttctcttcaagctttccgttgagaaacgcattgtttatatcgagttgccgaattgtccaacctttcgagacagcaatggttaagacaattctaatggttgaggctttaaccacagggctaaaagtttcactataatcaatgccagccctttggttaaagcctttcgccaccaaacgtgccttaagtctctcaacagatccatcggaattgagcttgattttatatacccatttgttccctacgatattcataccatcaatgtaagggacaagaatccaagtttgattccttaccaatgcatttttctcttcgttcatagcccgattccatcctgggtgtgccaaagcttcttgtatattagttgggacatcaaggtatggatttgttttccattttgctgtagccaagtacatctttggtttaaatatccccgctttccctctggttgtcataggatgagtgggaatgattgaagcttttggaggttgtattacatcttcatggtcatcagtaggcatgttctcgggtacaagatcaacagctgcttcctgttcttcttcatgagctatttcaaattcaccagatgttagtgaagagggtgagttatgtacctgactgatgttatgagtagattgaggtgcagacggtggttcttcagaatcatcagctggtggtgtaggtgtttctggttctgatggtacagagggagtttgacttgaactaaaaggtatgtttagcattgtagaccatgagggaactgatacatggacagtttgttcattttgatgagtgtttaggaaacctgtcaagaatggaaactcatcttcattgaagatgacatttcttgaaatgtatagtcttcccgtgctactaaggcacttgtatcctttatgcctatcactataaccaagattaacacacttggttgagtg

SEQ ID NO: 59136 - DNA, 1486 bp, Cannabis sativa
ttacatgatagagcattaaaatagctttgaaacgaaagttaaatctcgtcaatcagatcaatattggctgagttatgttcattttattgatggttgttttgggctcattgcccaagttgacatccaacgcccaagttgacatgtaacatcaacttggatgctgggtgagttagaaaatgtgtcggtgatgttttgatgcctaagtgatattttgacaacatttagccaatttttccattctggtgaagccgatcacaagttctttaagatgttgctgttttgcagaaacaagagacttgaaactccccatttctgagtaagtcaattgccggaaaagtgaaaatatgaagttgtgaatttgactcttttgtcttcatggctctcaattattatgaaaaactagacgaatggttaaggcagaatcaaaatcaaataagtcgaacccaaggcactaggccatttgtcaacctggcactgggtgcttatttcagagctttcgggataccgttttgatatttgcaaggttcttgaacttgaggacaaagtctcccaccccgtttttgaccatttcagagagaatgcacatagaaaaatttgcatttgagtgaacaaaatcagcgcacctagtcaacctcattctgggctcagtttttaagcccttgcaattatgggtttctccccgagtttacttatatcttcgttatttctaatgtcaaaaaaatatccgaaacaccttttcagaaaacaatattggaaatggcccaagttgactatatgtcaacctgggcactgggcctagtaccaggtgttaacttgggagctaggtctagtttaagccatcccggaagttctatttgctcccaaaaaatagttgaatcttaatctttgatgaaagcggagaatatgcccagaagactctttagaaaaattcatcattgttgaaaaatgtcaacctgagcattgggccaacactaggtgttaacttgggctctaatccccttttttggcccccaaattggcttgtttcttccttaaaagtacttgttttcccatttttgatgaagatgaagaagatgcatgagtcagcttttttatctgatgcttataaattgcctaggttggcaaattgtcaacttgggcgctaggtgcccaagtattgggtgcttcgggggctaaaaaatgaaagttcttcaagtctgattctgatgcctcaaatatgttcgtggtatgcctagttcatgtcccagtgagaaggtggacccatttgcactaagatgttcccaaaaactgacactagttggattgtcaacgtgggtgctaggtgaaaccctagccccccaaattgatatatgaggtatttttttgtgtgttttcagatcctggggcctggacttggatgattcatatcttcatggtacggaagactaaaagatagtgagttagaaaaaacttagcggaatctaaacacccatttcagatcggaaga

SEQ ID NO: 59137 - DNA, 3604 bp, Cannabis sativa
attataattacagcattataattacggctaaaaattaaacttaaatatttatttgtaaccataaattaaacttaaatatttatgttgtaaattattaattaattaattaattaaaataatcattattattacccaagcaaatgacatgcaccatccgctcctcacgtgattttccttccacgtggcaactacttattggcaccttctgttaaaaaacagtgaagaaatataaacagagacaaaactcatttgacttgccagtttggtaagctacttcctcatcactcactcactccctcccctcactcactcactcacctcgtcactccaattttatttatttattaaaataaaggcaactcaaaatcttaaaataataataataaataacatttaatatgtctaattatacataaaaatttcatacaattacaaacaacaccccaattaaaaaatcactacttttcaaaccacccacttcccctaaaaaaaaatttgttttttttttttttttcatttggtttttaaatttaattttcaatgggtcatgtattttgactggtacccacaaattatggggaatttggggtataacacaccaaatcattactcttacttacttttgtctcacaaaagctaagacgaccctcttctcttctcttcacttctcttttcttctttctcactttggtcttggtttttttttttcttttctttcaattaagcttatgacttggtttgtaatatctcattttctttaatgaaaaattaaatagaaaatattcttccctttttggcttgcattccctcttaagaaatatcattagggttttcttctgaacttgtaattgagatcaaatcaaatcaatgctgggttttttcttttgtagtttaaagtttgaaaagtagaggaattttggaaaatggggttgagagaagaaatgggtcaatgagagttggtgttgtggctgtttggttggtgagaaaatggggtgtgtgtttgggaaaacggcgaaaccggtagggggagttggaggaggagagagggagagaagaaagcaggaaagtgatgaagttaaagttgaggttgaggaggttgaaacgagtcatcaagtggtgggagtgagtcagaacggtagtgggaatcgccaagagaatgagaggaaagaggagacgagtgtgaagcccaagggtgagaaaaggcgttcttcgaggccgaatccgaggttgagtaatccgcctaagcacgttcatggtgaacaggtcgcggccgggtggccctcttggctctccgccgtcgccggtgaagctatcaatggctggactcctcgacgagctgacacttttgagaagctcgataaggtaactgacccttgttcgaaaaacgtgttcaggttgatggggtttttcttaatttggtatgtttctttttttgtttactgtgtttttcttttgtttggtagctgagacaatgtaatgggaaagaaaaaggattttccagaatcagaatcagaaaaatggaatctgggattttgttttctatttcaggctctttagtatccatgaactaaatttagaaagatggtttttagggtcatttagaaattgactttaggagctgaaattaaaactatgtacatatttttgttattttgccttttattttagatttttccttttggaatttgaatggcttagttctttttttttttattttcttaatcagattgggcaaggtacttacagcaatgtttacaaagccagggatacattgacaggaaaagttgttgctcttaagaaagttaggtttgataatttggagcccgagagtgtaaaatttatggccagggagattctcattttgcgtcgattggatcatcccaatgtggtaaaattggaaggcttagtgacatcgagaatgtcgtgtagtttgtatcttgtttttcagtacatggagcatgatttggcaggacttgctgcaagtccaggaatcaagttcacagagtcacaggtattgcagcagttattgttcttgcttttaatgtgtgaaactgagagttagacactaactaccttgagttagttttcttctgatgataaagctggctctggctatcattttctcagtcttttgtaatatatatggtttcacaggtcaaatgctatatgcaccagctattatcaggacttgagcattgtcacaatcgtcatgtgttgcatcgggatattaaagggtcgaatcttcttattgacaatggtggagtcttgaagattgctgattttggattggcttcattttttgatcctaataacaagcagccgatgactagtcgggttgttactctgtggtatagacctccagagcttcttctcggtgccactgattacagtgtaggtgtggacctatggagtgctggctgtattttggctgagttattggcaggaaagcctatcatgcctggtcgaacagaagtaagttttgatttttcaaaagatttagtatggcatttcagatgttattgtgttattgttggtatgcataattatgttatttgtgtatatgtctgtttcttttgctgatgattttttatctctttaatcaggtggaacagcttcataagatattcaagttatgtggttctccttcagatgaatattggaagaagtcaaagttgccacatgcaaccatatttaaaccccaacaatcatacaaacggtgtattgcagagacatacaaagactttccagcatcatcattaccactaattgaaagccttctagcaattgacccagcagaacgccaaactgcaactgctgcattgagtagcgaagtgagatttaactttatcttttaagttgcctttcattataatctctgtgctagacactttgaatatgtcaatggcaaacaaggttaaatggttatgtcttctgcagtttttcacaaccaaaccttacgcttgtgatccttctagccttccgaaatatcctccaagcaaagagatggatgctaagctacgagacgaagaagctagaaggtgatgagtggactgatttattattttgaaattgttcttataaataatggtttttttcaattcattataatgtctttctcaacaatccacgtaaatagagaattgagaaaaaaaaaatcctttagaggctgaaagaattccaactatgacatttttctcttcctgctcctggaatatgaatcagtgttattgtttctgattttgagtccatttattatgctttcttgtttttatcttaaaacttattgagatcaatttctgggactgttgactctgactcattagacaattttattgtatctcgtattctcatcctccatgtttcttcttccaagattggtctcgtcgtggttatgccctcctttcaatattcacaaaattatcttacaagctcataacctaaaattttcttttatgactaaaatgtaggttaagagctgctagcaagactaatgcagatggcgtgaagagatcccgtgcacgtgaccgagctgtaagggcaatgcctgctccagaagccaatgctgagcttcaagccaacctggatgtatgtaacattagctaat

SEQ ID NO: 59138 - DNA, 744 bp, Cannabis sativa
aaattgttcttatttgtttattcattattttcaaaaatatagttttcttttattgtgtgaaaggctttccaaaataagattttagactcttttcacttattgtgaattaaatatgagttttccttttatagaatatttattgttatcttttactttttaaggaaatttttaatcatattttattccttttgatttgatttcttgaccaagaagccgtgcacaactatgtgtattaatgtagtcaaaattgctttaattgtttatggaaactttactaaaaaactgtcctggttcactgtcttgtttgaacggattgtctatctgtttaaacaaatacttaactttcctttttggaaagattttcaattattgacttgatcatttcatggttattttaccacgacctagagggattctaaagtgtataaattcatccttaggtcgctggttttggttagctctcttggtgtatcaattctaaatcacatttcaaagttagaggaagttttctttgttgtgtgaagaaattgagtccaacaagttcttagtattttattattgtgttactctatattgttttttgttgaaattgtacaggttgaacagtttggatattgttaatcaagctttgggagaagtcttgttcacgattcacttttcgggaggaattaaagttcatgtgagtcactcttcgagaggaagattataagtagttagtcactcttcgggaggaagattgcaagt

SEQ ID NO: 59139 - DNA, 1374 bp, Cannabis sativa
atttataggaattgagattgtgtatgtttggtttgttgcaaatttgtaaaagatgttttaatggaataaaatcatctattgttttattcttaaacaaaaaaaaaaaaaaaaaaaaatctattgtttgatttgtttataaaagtgatctaatgaaattataatgtaataatgattaagtatgtagtttttattacattgaagaaaaagttatgtaatgagaaaaaaaaaatatatcacaaagattatgaaatttaagtgaagacaattttgtcttcaaattttcattctagcaacaaactaaagatttaataactttaaacgatcagctaatatagtggctcatacttttgctaaagcctttatattttaccctgattgtcaattcaaattgaagaatgttccttcaaatttactaccttggttggtaactgactgaaactttaatttaataaagctggaattctcattcaaaaaaaaaaaaaaaatgtaataactttgaaattgaattagtaatttaggtagaacttggaatagaaaatctaaattagacctaatcaatatttgatttaatactattgatattcttgataggaatataataattaatctattagttcgatttattgtgatttgtaaaaaacctagcaattaaaacattaatacgaagatgatgaaacttgttaatgaacatggggagaagttgaagacctcaagattttttccaattcttgatttcatttttcttgtaattttgctttattttattgtgtcttgatttttattgaacttggattgaatgaatattagtgtttagtaataattaacacttgaaatggtaaattagtctatgtgacatttgtctacttgttaggatatgtgctcctgcatgagttataaattccatcagcaacactagattccaccatatatatgaaagaaaacttttggtaactcataaatgatgaaaaatggtaaatgtggaatcaatgggcaatatggattcatcggtgtattatggtaattgttgaaatcaaatcaacaattttctcaaataacccttctttttttttcaccctctactttgttatccacaactatacttgtagttttatctccaacgaactcatgatgtcgagtcaagtatttgttagaatttaggataagataaataaaatttcacctcaaaactaattaacaatgagaaaagtgactcaatcatcttatatataacaatttatttctacacattaataatgtagaattaactctaataaaccctcctcacgtttgggcatgaaaagtgtgggtataacgaacgatctttaagagactatagaaccaaacatgacttttgaaagaatctcacaagaccaa

SEQ ID NO: 59140 - DNA, 1907 bp, Cannabis sativa
tgaaaatcctctgcagaatgcctccagtattgacttctgtctctgaaattcgtactccttttccctctaaaattgcttgactgaaatcaactccaatttaccttttatatatataggctttcagggactaaaaagatagaaaaatgcacatgttaaattcctattcaaactaggaaacccccaacacccacgtgagagaaaaatatgattttcgtgttgtttagggggcggggcgcggcatgctaaagccatgccgcggcctgtgttggaggtgatttttctgctgcgtcgactgatagtattttggccacaactctctcgatattactcgaaatttgacgatcaagatgtttgggaaagataaaagagagatctagaacttttatgtttggttgttttccaaaatctaatcagaagatagtcgaattcaggcttgaagtttcagttttattttattgcacaattttctctattttaaatatcatctttttgtgagatatttttatcttttttcatcttattcctttcatattttctaatcttcttttattttaaacctgcaaaaataaaagatagaaacgtaaaaatactccaaatacaattaaaactcaattaaaaatatacaaaacttaatctaaaattaatactaaaaataacctaatagtaactcataagtattaggtactaaatttcatatactgagagactactacaaaaaaagatattaccatttcggtcaaaacgccaatttttaatcgagaatagatgctaatgaaatcgattatctatattaaaaagaaatacatttgggcaatcaataggatcgattagtaacagatactagacattaccgtcagttatgaacgaacacataacttaattaaatcaaaacaggttttgtttttgtataggcgttggtgggtcttgctcggtaatagaattattgtcgatttaaattgaccgcttacatgatagcaaatattatgaatccatgcactaattttgaaaaaataccctaacttttacaaaccctaaacctaaacacacacatacacaactctcaccaatctccaatatctctcattctcaatctatctctccctcactctcaatcttggtctcatctctcattctcaatctatctttgtttttggtttttgagatatgcacactgaaaaaagcatgatgatgacaattaagatgggactcgatagtgatggaaacaacgacaaggacgggacacgactatatcagaactgagggatgatgacgactatggctttggattttttttttccagaattattttttttcttagattttattttaatttcagaatgacaatgatgaatttttttggtttagatctatttttaaattttttttatttgttattaattttctgatcagcaatggaaatgtaaggtggtggtcgtcgtcattactaatggatctagcctttttgtttttctattttggtgtgggctggtatggtttggggtagtggtggttgtcgctaaataccgatatgggtgtggttcgatatattgtacttttaatttttttcatgcatgcagttagcatcattagagaacctatgataatgctcaactttcgtcaactctcaaccaatgccaaatatcttcttttttacgtcgctagtgtagatgtcagtcttagaaactaatattaaacgtctgtttaaaaacagcacctaaacccctgaattacctatcactgcccctcattggctgttaagctatttttagcctattacctatcaagcctgaatttggctatgttctgtttagattttagaaaaagtgaaaacataaaagttctagatctctctttcagctttccaaaacatcttgaatcatctaattctgagcaatattgaaagagtt

SEQ ID NO: 59141 - DNA, 1136 bp, Cannabis sativa
aaatttaattaaaataattagataatttcctttttgtattttttaatattaattattagaaaattagaaaaaaaaatataataaagtctttaatttatttttatgtatagacaaataatttttttctaaaacaaatatgacactcttaaggttttcatatttttatattaggagagtaaattcgtaaatcaaaacttctcttccacaaaagatatataacatcattagactatatttataaaaatgttaagggatactgtgtttaacactaattataaagtgatatgttattggtaaagttaaatattgaattaaattttaatttaataattattataaaatctcataaattatgatcatgtagtaatattgaacatcattaggcctaataataatattttttttaaatattacttttaatttgacgaaaattaaattcatggttattcagtactattttgaaaaatataagatttgaattgtcatttaacgaaatagagaatccaattaataatttttacaaaacacaaaatttaaaatggtattttttcttgtagaattcacataccattatataatagagtaattagtgatataaatacataagttcaactccccgttttaaataaatatataaatttatttttttatgataataatacttaagttatatttaaaacttttgtaggtacttgtctattaagtatcaagtaaattgccagcaatcttaaattgatttatgttattaaatttttattttttattataatgacttaatatttaatagtgtaaattaatctatatatataagatatattttttattttttgaaaaaaaaaaacataaaatcttgaatatatcaatttctaattaattaaaaaaaaaaaagtggataagataataaatgagatgagagagagagagagatccaatgaagtgtttggagagtgttttttttatgttaatagaagcatgcgcatgcaaatgcaatgcaatacccaaagcccaaagagctggcgtggcttagtggtgggtcctacacacttacaccacactgacacgtggtgggcagcattcgtgggtggaccccacttcactctactttgccacttggattgaatgcatttattcatgta

SEQ ID NO: 59142 - DNA, 1306 bp, Cannabis sativa
caattttgaatttatttacaatcacagtgaacaattttgctgatataattgtagttttgaggaaggagttcaatgttgaatggttgatgagtcggcgatcaagcttttgtgttcgtgaatggttcttttttcttcttctttgagaatggtttgaatggcaaaaatccattgagttatagttttataagtttccttgttagtccattatacacgcgcgattgaaatgattcaatcccgtggataatggaggagcacggggcgtgatgggacgattttgcaggtttcatgtttgcaattctggtattatttttttaaaaaaattctcggtagggatgataacgtggagcgttaataaaaggctattaaattaattaacggtaatattaataatagattgtattttaggtatataaatgaaaattttccttatatttatagcatcatataggtgtaataacaattttttttataatttatattataattacaatagctaatctataaatttttgaaatatttcaaattagtgttgaaattaaaattataatattttgtacagacttgtgtttatgtataaaaaggcagtcataacataatattttgcactatattactaatgacgtcataaattattttaaaatttttgtacgtgctacttactttaattacaatatacataattatataaaaaattaaattatatttatttaggtgtaaaaaaaaaacacacgaagctcaaagaaagtagcttcaccacccccaaaactttgaagtaaaagtcaaaactatgagtgttgggttgaaaattattcacataagtttatgaaaatatattaaatttaaaatattatcaattaataatgaacattagtttcagattctttatagattgtaaagtgaaaaataagacgactagcatatttattttgatccagcacttcattaattaattaaggtgttaaaaatagttaatattaaattaacatttgatcgatgagtatttaaaatgtgttttttttaaaaaaagaatttaaaatgtgattaatgacacaaattttatatcaaactgggacatttaatttaactaaaaaaaaaagaactgggacatttaaaattccaaaatctataaaattgtctccacctgaacttttcttccattttgaatttgacaaaaatgagaattgttaaaaattattactagtacttttaaaaaaatatcgctaaccaatcgtaaaacgacatttataaaaagtgtttggcacgactgtatccaataacaaggcacataaaaataggggttgaaatg

SEQ ID NO: 59143 - DNA, 682 bp, Cannabis sativa
aatacattagtaaaattaaataaagtttggacaaatatctttgcatacaataatcttaatagttttaaggaaaaaattcttaattagtataataattattagagtaattagtgacatacatacttagtttaactcctgataggcatatcaaaaagatccatttaattggatcgggtcggagctccgatccgacggatcacttctaatccgaaacattcggatacttattgggtctcgcatcagatctgttctgccccacctaattttttttggatcggatctgatccgatcgagtttcaatatattaaaaaaaagctcaattcaagacttggaccccagacccggacctggacctggaccagactcgaacctggacttagacttggaccaagacccgaactcagatccacacctaaacccaaacttggacccgaactcaaacctgggctagacctgagacccgagacacgaatacaaacccggaccaagatcaagactgggacccaaacccagacccggacttggaacaggactcgggatccagacccgaatccgggacccagacctagacccggacccgaggctcagaccaggacccggactcggacttagacccgagactcagacccggacatggacccaaactcggtcccggatccgggccccgacctggacccggacc

SEQ ID NO: 59144 - DNA, 1028 bp, Cannabis sativa
ggttggccctgagtatgagagagagtctaattaactaacttaagttagctatagcaaaatataagaccatctcttctctaatgtaagatgtataattgtattaatttcagcccaaaatatatactaaagatatatttagcctaatttgtaattgtgctccaatgcacaacgagcaaaataattaaaaaaaaataaagaagtaactaatgtttattgaaatgtacaatacaattaacttattttatttttcttgatgattaacttttttatgagattaaaatgggaattaaaaaaaaccttttttaattaataaatatattaatgggtgagaaagtagtaattaaaaaatataatatttattgtgtgttaaaatttaaattgttatcttttgtattaaatttagcacaaattttagcataagtcaaatttagaacaaatttacaccaccattgaagcttacttttatcaacaacatattctaaaaatgacaatacacaattcttataacacttcattaaagatgctctaacaaacaaccttaaacattcaattattaactctaaagttatagatatacaatcctatattttatccatagagcactacctatgcaattattttttgcatgagctctccaattatactaaattagtcatgaatttagtcttacatcatgaaactgtttgtaaaaatgagtaaaatgcaactaaatgggtaaatttataattattttcaaagttctaaaggtactttttacaataaaaaaaaaatcaaatagtaaaattataacaatatcaaagtttaggaaaaaaaatcttatatattttattttcacaattcccttccattatactaggaaaaatttaattttgatgattaataaaacaccccatatcaaatttgactccccttactaatttataccaattaatttctttgattacatgaacttctcattttgctcttttttaaaataaaaaaaatagttaaaaactgaaatggttcacccctctctctcttccctctcg

SEQ ID NO: 59145 - DNA, 719 bp, Cannabis sativa
tctattttccatgcaagccttagagatagaaggaggcaaaatagaatttggtccatagagcaacaagatggcactcgaactgagaaaccagagcaggtaacaaatggctttattagttattataagactctgttgggtactacaatggatcataggagaaaagtgatgaaacaggtagttaacatgggaccaaaagtctccaaccagcaagcacagatgctattggataagtttacaaaagaagatgttaaagctaccttatttgcaattccaggaatcaaagcgccaggccctgatggtttctctagctattttttccaggacaactgagagctaatagggaatgatatatatgaagcagtggattctttcttgactacagggaacattttgaaggagataaactccacggtgcttactcttatacccaaagttaagtgcccgaacacagtaaaggacttcagacccattgcttgttgcaatgtcatatacaaaattgccaccaaaatgttatgctcccggctaaagaacatcctacctagccttattggtcagaatcaaagtggatttgtaaaagggaggctcatagctcacaacgttatgatatgccaggacataataagacactatgggaggagaaatgctaagccaaactatatgattaggctggacttgcagaaggcatatgacacaatttgagtgggacttcatagaagaaa

SEQ ID NO: 59146 - DNA, 765 bp, Cannabis sativa
aaaatagattgatattaattgttagtgatagatttttagttttattttttaaaaattaaaacataaaaatcattaaaaaaaaagctacgggtgtttgctatgaaaaagagtatataatgatgcatatttaaaaaagaattgttagtaatttcaaaaaaaaaaaaaaagaattgttagtgatggataatttagttttattattttaaaataaaacattaaaaaatcattaaaaaaagctacggatgatttagttttataaaaacaataaatttagtattaagtttgtgatattttttaggaaaataattagtaatttagttatgattaaaaaaattatataaatgagaaaattaaggagagaatagaaagtcacatttaaaataaatttagagtgatacatcgcccctttatacttatcctttatatatatatagactatgtgtgacaaaactaagaaattatatatttaaggaaacacttatatattacatacatatacaatatcgaaaaagtatctaacccataacaaagttaaagaatcatattattattattttttaaaagttactttcattaactacaaaagtcttctattataatagtacgtaatttaggagataaatcacctattgaaaaatatgatttatagtgaaacaaaagttacacactacacactaatcaatgaacaactttatttataaaccgttcaacaaacaaaataattattaaattaattgattcgtgcgtaactcttgtttctaaact

SEQ ID NO: 59147 - DNA, 1253 bp, Cannabis sativa
taggtgctctaaaagtattgattctattaatttttgaggcttacgcctcgccttacaaaaaaaaaatgcctcaaggctcatttgcgttttttaaaacattgttagctactgatattctataataattattaaattagattatgtaaaaatagatatcttttagtggttttctatacaagtttagtaactagtaagtaatgggaagacccttataaaatttgtagtattgcttcacattgaaaatagcatttttacttcttccaaaaaagtaactatatatattttagtatgtctttaactacaagaacaagacctcctgactggaaggtatcaagtattttcttttctattgttaatgtattgaaagcactgccagttgttcggtttttttttatcaatcatagttttaatacatggtgttgctaagaatgctagagttgctagcgatttagctattttgtatcaagaggagggtaatctccttgtgattcccatcgactttcttaattaatgaacacattgttctttcaaaaaaaaaaaacgtacctagatttagattatatggacctaaaaatgaattattctaaaaacttagaaagggtatatattttacttcgaatataaagaattaattaatcggtaatattagagcaataaatagattcatatctctttgtttgaattactttgagtgtaagagatgataaaattttgaaatttttatttatttatttttaattatgtaatactttcaacaattaaaaagacttgttgggaagagttatcataaatatcaattgaggtaaaataattttctacttagtagagtaaacaattcatgcaattctcttcaccactatgagtgttagagaaactaaaataaaaatcaataattgaactaaaaataaattttctctaaattaaaatgaaaaacaaccatctaaacaccaaaggatgtcatataagtttcacatgatatgacatcccatagtattatcttcacagaagtagtctccaactcgagttggcggttgcagggtttgagagaacaccggtatttctctttcactttggtaaaggaaataatagtaataattattgttgttatatggggtaccaatagtaaaatcagaagaaggaatgatcatattatgttttctaacctcattagatgaatctataaccaaattaggcatattaataggcatggcttgtgttttgtggatagaagaagtgggaacaacaacactttt

SEQ ID NO: 59148 - DNA, 1872 bp, Cannabis sativa
acgaaaatgacactcttcactaacgaaatttgtcctcattaaagcctatttttcttgtagtgattaaatatatttttagtcacaaaatttgttatgactaaaaaactaattttagtcacaacttgtaactaaatattatattttagttacaattaactttttattgcgactaaaaatcacatttaatcacaaaaaatttatgttgtgattaaaaaattgtcactaaaatagctgttttttttataatgaaaatgtaaaactcaagaataaaaaaaaattatattactcactaaaagccatgtgcgagacccacgatatttctacatcaaaaaattacgggaaagaaggtttcccttgaaacgcacttaattactatcaaaatcactctgaagaaaattatatatatatcgatcgctattgacatgttatcatttcatatgattgagagagttttcaatttgatttgatcatgtaattttaaagcaatcagagttataaagggagagctttaattaaagggggtcgatcgctgaataatattttgacaaaataaaagaaaaagcatggctttgaaaaataacaaaaattaagatctttgcaatatatatttgttcaggtacttattataataactacacaatatagtagtcacagtcagtcactgtatgtttcagtcaatttataaggcatggtgttgaaaaagaaagccatgaggatattcacattcaaagaggtccattttatatatatcatgtatataaatgtgtgttaatttaaaaggaccaccctaataagttaattagctcgtacgtatatatatagacctctgctaatagttacagcttaccatttcttttcttattttcactcgaatttattgcttaccttaatatatatattattttcacaaaatttaatattattagttgtcattttcttacactatctcctcaatcatatatccatatacctaaatatattctttttttcttagtttgccactaactagtaaacaattatataatttcaaccaataatttagtaagatttaaataaataaataaataaatagaaatactgtgtgatattacaaaattggcaatgttctctttttatcctgaggtcttttatttttgaaaacagacaagtgtgcctttctatttcacaatatatacagctctcgttttaaagtaccaactgtacacactatgatcttggggtggagaattttcatccaactttttctccaactagtgaataatgtcgtgtcggcttgaaaatctaatgaactactagaataagttaaatgtgactaatttagtagctctacaaaattacatgtatattggaatgttctatattctataataatttttgtacaaataatagaggaataagttgaaaaatatttattttttgttttcattaattaaaaatatttttatattatatttttttaaaatatatttattttttgagtgggttgttcaatatactctcactctctacttaagtctagcatataatttgcattaatttaaagggtttaatgaggatattatctttaaaagtggatatatcttaaaaataaaaaaataaagataaaaataaaaacaaaattaagtggatataccatataatttacttagaagtggagtgagacgttggctttaagcttggaaaaactgtacctccactatggccctttttctcttgggcccattcaatagcccacaatttacactcacaacatttatagggctgggcttaaaatggctgagctccaagagtattattttttctttttttcaaataacaccaactattattgctggtgttttcgaaaccttcattttaagacactacaaaaaa

SEQ ID NO: 59149 - DNA, 1700 bp, Cannabis sativa
tttaaaaataatttataattttttgtcaaactattaattgtaattattatttctaattttataaacaataaatataatttttttaaaaaaataattgttagaaacttgccatagaagattattaaattgttaccttattaatattttttagttcccatccatgggtattacctattaaaaagtgttctatatatatatatttgggacagaaattgaaattaaattctcattgagatgtatagattataacaaaatagtgatacactaaaaaaacaccaaaaagtgtccaatgttacaaaaataacaatatattatcctcagtacttcattataataaaattgtagttgaccgagtatataatatttatatatatatatatatatatatgtattattagaactttagatgtaaaacacagcatatgaataattatgaaatgccaaataaataaaatatatatgtattatgaacaaataattgaaatacgcttcattcttctaaactttctctaactttttatgaatttgagaccgatactttatatgtaagatattttatcaatatctttaatatattaattattagaatattttgacaattaattcaaagaataaaattagataataaaatatttaataaattaaaataggatcataattaaaatattttaaattaaatatcaaataattaattatatattttataaaatataatcaaatcaaatatttagcttaccaattataaaatattctaatatctattataatttaaaataaaattattaattttatataaataaatttataaattatatatatttattaagatgtaattattaaattttttaatacaaaatttataaatgtataactaattataaattaaaaattaattttatttaaaaacaacaataatagtactctttcaaaaaaaaaaaaatattacagtatttaaaaaaaaatataattacacaaaactattaaaattataaagtggaattagaactcttaattagctcccatttcaaagttgtcaactttgattatagagttgtcatgcctgaattcttataggccttttttatttttatacttatattttttttttttttacatttttacggaattctatatagaaactcttattgcaactagcgctgcaatttaaattgtaacaaaaaatcgtatataaactcctattacaacaccattttagaaacccaaaccgtaaatttaaaaaaatatattaaaaaaaaaggtaattcccccaatttccacctcttatggagagtctatttataaaaaataataaaattaaataagatgtcaaattaaataattatttctaattacattaaatttaattagagaaaattctcccaaacaattttattgtgttgaaaaattagtgaaagtaaaccaatctaaataaataaataaataaataaaaaatgtgtgtcaaggtgagaaaatatagatatcccaacaacatgccacgtcacattttggtggtcagcatcttcaatggacagcatttgagccaacagaaaaaactgagtattgaaaacaacaaaaaagaaagagataaaaagaaaactgaaaaattgagtcaaccaaagtgtccccattaaaaccagaatcataacttattattagccatgaatttcaacttccaagtaaacttataaaaaaaaaaaaaa

SEQ ID NO: 59150 - DNA, 3033 bp, Cannabis sativa
  modified_base (275)..(278): a, c, t, g, unknown or other
  modified_base (2965)..(2989): a, c, t, g, unknown or other
aatctaatataattcaattatatttcttaaatatataaaattaatttaattttaaatttatttataagaaaatatatcaaactaattttatcaaacaataaataagtaaataaatttagaattttaaacaatataattaataaatttattataatgtatgattagttaattgaattagtgttaaatttaaatttaaattaagatttatataaaaaataattatttaatttttttaatacttttaaataattatctaagttatattttaataaatnnnntaaatttaaatatttaaatattttaaaaataattgattaatttatttaacgatattagttttaaccgttaaatttaccgaaaaataaaaaagaatcgtcaattaaacaataatttatgttagataactaaatttaatataagagatatatatatagactcccaattttataatgtattatcacattttatcaccctaaataaatttatatatttatataattttaaaaacaagttgccaaccataactaaaaaattctcacatttttcatttttcaactgtctgaaaataaaaaagaaaatttatactaataaatatataataacctaatagttacggatccaataacctttttttttactattattttgctaggattttctttggtctacttttcaattaggccacatatatgttatataatgccaaacttagtatttgaattgccaaaatacatgcagttgctctagtcattgttaaattccctaactttttcttttatggctagcttgactattccattgagtggataatgaacaatataagtccttacttacatagacccttttaaaatgattattgcaattggatattatccttctagcttggttaacattattatttttaaagttattatataaaattataaataagatttgataatgaattaattgtaacaatatccactataaaaatgtttacttttagtcatgataaaacttatgactaaaagtaaaaaaaaaatatgactaattataattattattcttatgttgtgactaaaaactatgtggctaaaaatattaattaaggagatcactatttattattactaaatgtgtttttagtcacaatacttattgtgactaaacctaaataacttgtatttaaacgttatatttttgccacaagtagttttttgttgtgactaaaaatcatatttagttacaaaaaatttgtgattaaaaagttatcactaaaggtagttattttttgcagtgagcaatattaacatgtagaatatgtagcaactactagtgtcttttacaatttttcttttaaaatagataaatttaagaggttccttaatgtatcaagcatcataaaaaaatgatatatattaatattagtataatttaatattcaatcttaaatattttaatttaacaaataatacgaaaaaccactaactactcatattagataatattgggtactttaacgtgcttagtaatactctttaaaatataaatatataatataatattctctaatcttcaatttctagttttctcccatagtcgttcgtttgtttggtggacaaagaatgaaaaaaataaattaaatatgaaaatatatagaaaataaataatatatataccattcaaaattattgtttcatatgaggactgattaagcttattcatgtttgttaaaagttagctaattataatgatcatctatactatatattactatagtcaatttgttacttttgggaatattctttctttttttctttttaacttttgttttttctacaaataattaagcatgcttaaatttgactagcctacatagtacatacacgacacactcccaaatatttttcctatttcattttgattccataaactttattattactttacgttgtggactcatcgtcaaagtcaactggaaaagttgaccgttacatagtatatgtactattactatgtattggggattgtaatatggaatgtatagaaaaaaaagttaaggtattattataataatattgttattaggtatgagtagtgtttaattaatattttttaaaaattattttcttattatatgagactagatatttaattatactaatcgtaatataacactgagtaaggtgccaaatgctaatagtatcttttaataatttttattataccaatgtgctaaatttaatacaaaaaatcaacaaatactatatttataattacaatatatatctattagagaaatgcatgaaaggtactaatagtgtctagtactctcctatgtattactattgttattggtgcaattaagtatcgagtctcatatattttaaagtaacgacttttaaagagtatcactagctaatcataaagtgacatgtctagaaaatgctaggcgtctaataacaatgttctatttattattgtgctttaatacaattatatttgagcaatgctacatatcttcacaaattgtcatgaatttccattgtggcaatatatttattccaaaattatccaaaaagtaaaacataaataataaaatacaaaattatgagatttcatgtcatgccattcattatataatattttgtgatacaaattatatatcctaaagtataatagcattaattaatatcaataaattagatatttttaaaaataattaatacaatattataattaaaaaaaatgtattaaggcttattattaatatcaatggtaaaattataattaaaaaagatacatttattgtgtcaaatttatcataatttttagcatgaattatcaaatttggtataaaatttaacacactatttggagaactattttttttatatataaaaaagtgctaaaatgtagcactacaccactattttaacacttaattggagaataaagatgttctttgtgacagtcagtagtcccnnnnnnnnnnnnnnnnnnnnnnnnntaagctgtgcaatcccacaccgcctggggaaggtcaagtgggat

SEQ ID NO: 59151 - DNA, 707 bp, Cannabis sativa
tgaatcaatagttcgtacatccctatctcgcttaagactatatagtcagcgagttatagctacgctctactaactctgcatttaatgagttattctattttaatatccattaatatatttgccaatatatttgttgatttgaatggttcaagattgacatgtgtcttcctctgaagtgccagcgaaatttcgggtatatcacctaaaataataaaatcaacacataagagattatgaatccttacattgatggcagcataataataatgactccttccatttagatctctattccttgattcttgtttgtaggagagcattataaagatttaaacttggatcttctctccttcactatgtttagacaccatcttccatgctatgctaggtattactttaacatgagtgaacatactctcaattaactatggccttgaaatattaagaggcagaagaagaggaattcaaaatagataatggctttcttctattttctattttctgtctaacaaaggagactagagttaataatgaattgagaaaacaagatccatcttattctatttataaggagatactaaggttaggtttataatgtaaatagaattaaaaaaaatgataaaaataattactttattaatccatcatggccaaaccctatatgggcttatggatttcaattttgccattttatttaactcatcttt

SEQ ID NO: 59152 - DNA, 1535 bp, Cannabis sativa
  modified_base (1156)..(1158): a, c, t, g, unknown or other
gttatttttgccatgtggcagtatgtttagattatttattaaatttttaataattttggtttgattttttaacatatgtgtttataaataaaataaagttgaaattatatatttaggaatatttaggtttttttaagtaaaattaatatgttttaattaatttaatatttttttattattgttttcaaaattaatagaatattataatttttaaaattattattttttaataaaaaagggcaaaattttgtattggtcaaagtttaaggagtcaaaatattaatttttaacagttaaagaaacagaatctaaagaacgagtataattatgtaactgttatattttaaagagaatttttaacatgtcgtatattttagaagataaaatctagtagtactgaaagtttaggttgcaaaaaatactactcttttattaaatcatatttagtcaactcaaatacatatattctctgttaattttgaattatataataattcaaataataacttaatattttttaaacaaatacctctaaaatcatatttattaataaaatatattataaaaaatacaaatgttacatcagtaaataaattttattccaaaacaaataagctaatttgtaatttttccccacacatattaaatcgtgatctatgaactattttttatgttaaaaattccccctaaacttttgacaatatttaatttgtggtattctattttgtttcgttcattttaataacggagtgctgacgtggctcctattatgcaccacccagcaggagaagaagaataacacccccacccaccacgagaagacaaaaaaatttaattattataattgaaaatagattggtccaattgataaggttttatttaggggtgttcattaaatcgctcaaaccgcccgcaccgcaaaaaaatgcggtttgaaattctttgtggtgcggtcgtggcttgagtttttcttaaactgcacggtacggtgcaatttgcggttttcacttgttaatatgcggttcaaacaatatcgcaccgcacattataaaaataccaatttttatatttgtttaggtacaatatgtgaatgtccagcccaaagctcactaattattgtatcgttgaaactttttcatatttattttcaagcctnnnggtatttttgacaagtgttgctcaagctttgttgtatttgtgatagtttaattatttggtgacagtacacactgcagaaatcgcaaaaactgtaccgcaccgcactattttttgcagtgcgatttctgtaattttctaatttcgcggtgcaggtgcaatttaagaaattgaaaaaaccacatgtacaagttagtttaaaaaaatagtcaaaagtcgcatcactcgcactacgaacacctctaattttattaataaagtaccatataaggtgcaaaatttgtattttgataaaaacacaacttaccaaacaagtaaatctaatcataaatttgctagctaattttttgtttgttttttttttttgtgggggggggggg

SEQ ID NO: 59153 - DNA, 725 bp, Cannabis sativa
atccacctgttgcacattcaaactaaaagtgatggcaggcttctcaaaattaatcttttgacaagaggcagcgtcataagttagaaggatacgctttatagtttcagtatcacctctattagccctaccaaacacaaggctatcgtctgcaaagaataagtgagtaacatgtggccccgatctagaacatcaaaactccatcagttcaactctggtctccgcaaaagagaacaacgaagacaatgattccacacagaagagaaaaagataaggagataaaggacatccctgccgtaaccctctatcggaatcactcgacctttaagatgatcattgattaaaaaagtgtactctagagtcgtcacacaatccatgatattccaaacccaaccctcagcaaagccaaactggctcatcatactggctaagaatctccattccacccggtcatatgctttactcatgtcaaacttgagtgccataagttcccttctcccattatttcttttaaatagtgaatgaagtagctcaaaactaaccataatgttgtcatgtatcgaacgccctggaacaaatgcactttggaaagatgagatgagggggccaagaatacttttcatcctcagtgataaagcttttgcaataattttatacattacattacacaaagtaataggtttatactctttaaccaatcttggcttttgtacttttggtatcaacac

SEQ ID NO: 59154 - DNA, 813 bp, Cannabis sativa
atatatatatatataacagatcaaagaagaagataaaaaaggaaaaaagatgggcagttgatggaggaaagaagttggagatgatggaagagatcaatttttttttttatcaataaaggattttgatcgtgggaaaaaatttcaagcaaaaagtgggaatgagaagataagaatacataaaaagaaaaaagattaggaaaagagaggaaaaacttgattgagtgtaaaacttgtcaaatgaaaacatgcatgcaaaatgtatgtggaagtagtagttgtgtaaattaaaaaaaaaaaaaaaactaaatgtaaaaaagttgctcaaactgtgaagggcacataataaaagtgcccatttttattttttagataattttttttttaatttttattatatttagcgattttgctattttaaaaaaaaaaacatacgtacatttaccttactaatacatctattgaactctaaaagtaaagtatcgggcattgccctagctacttgggattagcttgaggtcacatgtggcataattttattttgtggatctaggggtccatagataattattaataatttattttcgaaaagaaaaatattatactaaaaaaccttaatataataatattacatatagagaagggtaatttgctgctagacttcttatacttttgtgtttgttacggtttaacccctaactcaaaaagttatagttatattgtctggacttgacaatcgttttgctttttagtccttccatccattttggtttgttaagtgccaaagtggactgccacagtatacacaagtgtaca

SEQ ID NO: 59155 - DNA, 671 bp, Cannabis sativa
  modified_base (637)..(646): a, c, t, g, unknown or other
gatgcacaacagtctttgtttcattcttgaaaagtttccagatttttcgagatgtgtagggtgagattttagcagaacactaacgagtgtaagaggatggaaaaaatttgttaaaatataccttgaaaagaagaatattttaaatttaatgcgaatccaatcttcatactcatgttttagtagtacgagtttattgttactagtggcaaaaaatattctgagatgggtccgagccacatttcacaaaggggaacaactatcagaaatgtgagattttcacaattttaattaaaatgattgttagtgcatgaaaactactttatctctcaacgtgtctaatagaaaagtgatgcacaacagtcttagcttcgcctatgagaagtttcactattttctgagatgtgtagggtgagattttaacagaacactaacgagtattaaaggaaggaaaaaactttttaaaatttaccctgaaatgaagaatatttgaaaattttgaattagggggcccttttaaccaaatttaatgcaaagaaaatcttcatattcatgtattagtagtaagaattcattgtgactagtggagaaaaatatttcaagatggggtcggggcatatttcacaaaggggtaccactnnnnnnnnnntgagatttttactattttgattaaa

SEQ ID NO: 59156 - DNA, 949 bp, Cannabis sativa
atttttggacggaggtgtgcagagccaaaaatttggtttttgtggttaaatgtaacaaactataaagttcaggtggtttagccgccaatatcccatcttttatttttaataaatgtaaatatcgaatttgatttgaattagaattcaaattcaaatataaatatctaataactgaataacaaatatcagtaaatcttttattttaattattatctttttaatcaaagaattatctaataattcatttaatttataattaaaagataattagcttaatttagtttaaattaatttaactaataaaataattaaatttaattaatcatggacctttatatgtcaccccacacatgtagattgggcctacacatgtgggccatattttaaggtcaaaattgatttctcaattttactataaataagatttattatttagtctgctaataaataataattgattaattttcattaatctcttatttcacaaacactaaaatgcatattaatttttctaaaataatatatttctctctttaatattatttaagaataatattatatttaactaattaatatagtttcatctaaaaaaaataaatagttaaatactattaattatataatttataattatcataataaatcaaaacaaaaattttacaaatttctatcttgcccttgagaatttattttccataaaaattagttctcagtcaaaattcattcatcaaataaagaattcccatgtacattattgtattaaggtgacttgggaattatagacctatattttgaagaagggccggcccgaaaaatatatgggcccaagacgaattaaattttggggccctcaaaaatatattaaaaaaaatatcaaaagaagagtgttgtgagatttgaacccaatgaccttggacattatgccatccacctcaaccaactaagccta

SEQ ID NO: 59157 - DNA, 949 bp, Cannabis sativa
  modified_base (481)..(485): a, c, t, g, unknown or other
aaatatggctagatggatattgggatcttcagtagccaagccaccaaactgattctattgcaccatattgattaaagcaggcttcaactaaaaattattagcagcaatgactggattagtaatacaattcagatttccattcaccactggtaagcaataatcacgaacaacctgtggttgtgcatcagctacaacaggtgctggttggttgttattaaggccattgttgttattggctaccgtggtgaagtctagttttttctttacttttaactgctttagagttctttcaatctcaggattcagcggagtggtgtgcacttcgatttcttcgcataaactgaatcacgacataacaaacaaaataagaaataaaaataaaatctaatttaaagcaaaaaattttagtaataatattagcaataatttaagaattttcaatccccgacaacggcgccaaaacttgatacacaatttttannnnnagcgtacagtgttgttatagtaaagttttaacactaaaaaggttgtcggacccacagggagtgattattaaatttttactaattattatactttttaaattttatactttaattagataacacaaagtaaattataattaagaatcaaataataaagtaaatagaaaaatatatacacaaacaacgatttttaatcaaaaggtaaaaacctagagcattgatttctctacttcaaactatgaatcaatttaccgattatcccaatttatcctataatttgtagttttaagaatcctaatgtaacctattaacctctctcgagcgatggtagatttaacttagattaattaacatgataactctattcaatgttaatcaaataagcactcataaagcaatatgattctctttaaataaaactcatagaattaatggaatctctcagtctcacactttttctatgt

SEQ ID NO: 59158 - DNA, 4108 bp, Cannabis sativa
ttttttttttttttttgcatgatacttgacccttggttttgcaatttcttttaccaaaaaacttaaaaatcataaacttgtaatgcctttattttatgagaaaagaaacttgtaatatataataacctattttcaaaattgttaacctcttctttttacaagcacaacaaaggagagggcaaatataacaatttattttcttctacaattactaaaactgtaagtgcaaaatacaaagaatatgttatcatcaccaaggctagagttggctagttgggaaagggattcaaaattttcaaaactcatcttcttcataaccaaactcataaccatcttcttccatgttccaatcatgaatcccgttgtcgtatcctttgttgtatccttctttcacattttcaaaatctgaacctgcttcatcattattgtcctcgatatctgacttgtgttctttatcgttagggctgaggccgtaagagtcttcatccttcgataatttgggagctttatttgcgggggttacctatatatgaggagagatgagaaaaacgagtacgattggttaacaataacaaacaataattttaagactaattacaattcaggagacaaaaaacagaaactcccaagattctatactatatattcgattgactgagagatgaatgtcaacttacatcatcgaagaccttctccaacatatcgaggttgacttttgaaagtagtcgctgttaagaaacagttgaagcaaatcagagagaaatatgaaatctgattataccttgacataatctgattataaatatctaatgttagcaaaactgtaattttcattcagtttttttagtacaaactttattttaaatttatcaaaagaaaatttaaatataactgatactacatgtttccgttcagacccaataatttagaatatgaattttacatgtgtcctgtttaagaatttgtttccgtacatataggtactaagaacaaaacaaaaaaacgaaccagaaaaaacaaagagcataaattatcccgaacaacaccaataataataacaaggatttcactaagtaaaagataggcaagcatatgattgattctatgcaactgaattacctttttacttaacatttggcgcgctgcttcagcagcagtttgaggattgggattagtatcttgtttcttgctcctctcctagtttagaatacaaacaaaaacttcaataaccttgaaattggaccaactaatgaagaatcgcaatgataattataggaccaaattgccagaattaatgttatttagaaaaggacctttttcggctttgaactcttatcgccatccccactacgctttgctgcctgttcctgaagatccatatttgtaccattttgtttagtgttatatcatattccaatacaaatgaattagaaatcggataataataataaaaatgaaattctaacctccaaatgttctctgtacaagtcttcccagatggccgtcttgtaacgtgtttcctcctcattgttaaggtatccatttacctttataaaaataaataaaagtcgataaaaccaacaatatactttaatttccaatctcaattatcatctaaccttattacaaaaattacagcaccaggaaattaggtgacatacctctaaatcatcgatatcagaaaggccatcatctgatccgtcactagtaagattacttgtagaagtaaacttagaggccttatcagaagtgtcatttgacattccatctgcagcaacagctagaaaaacagtcacagaattaatctgaaatgtattgtaacaagaaacataacttaaacattccaaaatctacaaaacaatatagcttactgtcagactctacggttcccaatttttctttattgttcgtgttttggtcacattcagatgaagattcaacattcttgttctgaaataaacataaacatgtgaatgttaatatatcagaatgaatgataaaataaatacttgatactatttgttttaaggctatgcagacaacattataaatataaatacaaatccttcaacttaatctataacgcaaacaaaccactaatttttcaccgaacattgtaaacaaaattagtccagacgaaaaaaaaaaagaacataaaagtgagagaacaatatggtgatggaaggcaagaaactaactgtattatccacgtgatcggttgttttatcaacgtgatccattgttttatccccgtgctggagatcaacttctgaatcatctgatacagcagctttattggcaactcttattttttcagcaagctggaaggcaggaggatctgctccaccactaactccgccagaaatttccacgaactgcaatgacataatattcacacatgaagagcagaaatagaaaaacagaatttgacaattgcgatgagcagttggaaacttacatctctgaaacaactctcgcatagcccatgagcaaatggaggtggagcttctttactctctttatgttgacaaagcaactccccggacttatggggaccaataggtgacaagttcgatttttttagctccacagcgttgttgtttaactcttcaatctgttcagaaatatttactaaattatgtactgaaactagaaacccaaatgtagacatgtccaaagatgaagataattactcatcaccaagaatactcccaacagtttacacaagtaattcataagcagctcagttaactgagtaattaactcagagactggtaaccaagatattgctttcacaatgcacttattaattaggttatttaagatttttatcccccgaactatgatctatgcattattgtgcccctgaatttttcaacctattaaaaatggtccccgaactatacaaagtgttgtaaattggtccttcggtcaagttttatcacacgtgtcaaacagaacatggttatttagacaattgtcacgccaacgtcacgtgtataattaatttgaaaaaaaaaatataaaattttttttttttttaatttagttttacgcaatttttttaattattaattgattttttgtttaatgatcttttaaaaatacataactttatgttttttaattttaaattatacaggcactgacaataataaatacagtttggtgtgattttattaaaaaaccaaattaaagaataaatagaaaactaagtgtgtgtaatacctggtataatccttattgaaatatacatgacatcaaaacaatacaagcacatatgtatctcagaagtaattataccgggtattacagtgtgaaagagaagaacaaacacgcaagagaatgtcacacagaagaacttacagttaagctccctgattctgtgttctcgaactcaatcaatcgttttcgcaatgtcacttcacatatatgtacaatttttacctagtaaaaaaagagatccatcagtcacagtatatacagacatttctagtataaagcacaaaaaaaataaaaagtcaatttctttcttttttggtaatccagaagttattcagcagttagcacaaacaaatcaccaatttatgattgattcatggtacatgaatgatgaaatattaaaaacaacaaactgcagacattataattctacaccttaaaaattgtatttcaaaaatgtagtgtatattaaaatgcataatcattacaattacagcgttgctatacaacaccttaaggtgcctaaacaattcatgaggtggcattttatgtacggtttagtgggtgcgtaacaccacttattaaattataataagtaggatcggattttatgtatgtcaaccatacataaaatgtcatctcatgtagtgttggctaccttataagaaaaaaaacaaaacaagaaaaaatatatatacaacattatacttgcaatccttaataatagctggacttacaacatctaattttgttaaattatgaccatgtgcgagagcagagatgtataatgctgcgccacataacccgcttggttttctacctgtctgtataatatgtagctatagtaagattcgtatgcacatatattatctatacctgctaatat

SEQ ID NO: 59159 - DNA, 1304 bp, Cannabis sativa
gtgattaatatttttatttttgtttgtgtgtgtgtttgtatttttttttttcttcatttggttgactgatgaaactggtttcagttgacttcattgtttatcatttatgttttgttatgatttttcatagggtcgaaactagttttactgagttcaagggtttgaaactggttttacatgtttctagagttctataatggggttgttccattttatgatgttattgcatattttttatttcaagttacttttttattattttgttcctaagttcgaaatttacacttatattttgttctgattattagtatgcattgtgttttgttttaattatatttgtgattagtattttttttttttttttgtataatttgtgtatttttctttttttatttttcatttggttgtctgatgaaactgatttcagttaactttattatctaatatttatattttgctatgattttttatagcgtcaaaactggtttcatagggttgaaactaatttcataggttttaactgttctgtaatggggttgctccatttttatgatattgtatatttttaagtttgtataaaatcagttttattattgtacgatatttgaacaacaatttctgttttattttaaataatcagtttctaatacacatattattttattattttcataactgatttttttttaagtaactagtttttataactgaatttttttttattgttgttcacaattgagttttaagttttaatttttgtatttgattattatttcaggaaactgatttttatctcttaatttttatttcggttgttagactaactggtttctcacatttcactattttttattttttgttattcttttatggtttttattgtatttttgtctctttaattttctttgtttcctttttttttctttgattttagtttttgattctctttgttatatttgttgcatattgtatgctcaaatcaactctagtttttgagcaagcaaataaaaaattaaatgtcacaatagagaatgaagttagaagtttggttatcaggtattgatataaaatttatatgttcgaaactgatttttaaatttagtatcgcttgtaaaagttttgttattaaacattgtgtatttttcattatgttgttgatgaaactatttttttttttttgcctcttttaatgaaataattaatatcttttagtattgaagaaactggtttttaaagttatatcatttttagattataattttttttgttaatgaaactatttattttattcttttaatgaaatt

SEQ ID NO: 59160 - DNA, 813 bp, Cannabis sativa
acacagagaaatgcttcacacgctgatatatgaaatcagtactcgtgacagtcaatatccacaatttatatatcacactacaatatttgttgagatcttataaattcttgagcacaattattatccacggaacttatcatttgaaaagagcataatcatttaaaagaataataaaatgcatcataccattcaagactttgagcatataatcctcaagcttaggccttagagcctcataaagatcttgtaaacccaatcctgtttcagctgatatagctattgggtctccaaatcctaatctgtatgcttcggcagctacagagacaagagaattatcgccatcaaaaaaacattctgatttgttcaatgctactacaagcaacaaattaattaaagttatacaaaaaaaatccaaataataaaaagaaatagtaccattttggatataaaaatcagtgaagcaaaaaccctagaaactcagagactttgagcaaccaaagtgacgaccaaagaaataacaaagaatgaaagagagagtatcagctgtcgaagagagtaactgaagggttgtcgtcgtcgttctttgggaggagtaaacgtcgtcgttgtctttgtgggaggatttaggggggaccaaaagaaaagtggcttcgtctttgactctttccataacttgtattatttttagctcttttgtttgacactttaaaaccttcttttcggtttctgctatgtaattcgttgcaggaaattatagacgaggaagatgagagcctaagaaatctaaggaaggaatggggagaaacgatatat

SEQ ID NO: 59161 - DNA, 1974 bp, Cannabis sativa
  modified_base (507)..(535): a, c, t, g, unknown or other
tttttttaaagaaaaaaattcatatatattataggaaatttttaaagtagaactcctaaagggtcgttttgataaacctttatctgtttcagtatttataaaacttttttagtttattttttttataatcgtatacgttataactatttagaatcacttgtatattttaaaaaaattctaatagtttacaatgtcgaaaataaaatttaaacaattacttactatacgtataaaaaaaaatagtcgtgcatacaataagatttataaatcttatgttttgtaatgtaaattatttaaaaaaatttaaaaatttacaagtaatttgaaataattataaaatcgtataaaaaaataattagattaaaaagttcttataactgtcaaaagatataaaaagtctacccaaatatttatttagaaagcttattgatttagccaatattatatatgaaagtaaagaacatgttgtagggtactagggcagggttattattattattattattnnnnnnnnnnnnnnnnnnnnnnnnnnnnntattattattattattttaaagaaaataataacatgaggattgaggacctagagctctcttaagagaattttcttaaaagagaaagtttaagataaagtgtaagaagtgtcattgccatgtcacttccacctatgtacactctgtatttccaacacttttatttatacaaaaattttattaaaaaaatgcaaattacaaaagcacttttctaatttgtggtgatagatatatgccttataattttgatagatatatgccttataattaataaatatttaaaatgactaaaataaatacatataattctttttgtcataaaaataaattattaaaatgaatgaataattaagatatagatgacaaagaaatcctagctccatgcatgcataataaactaatacacatgatatatttaattatatattttttcttcacacaaaatcttatacttttcaacatatattcataaaacactttatgatttcaacttgtgaattaatttaccaaataatataatttgcattgagtaatatctttcaagtctaaagtgatatctcacattctttttcacacataaaaaagtcatgaataaaatcttctaataaaactaaaaagaataatatatcttctttgatatataaacttttcttcatagtaaaagttgtaagttgcaattaaaaaatggttaaatatgctataatggaaaagtcctattaattatccaataataagcagcaataatccctttttgcccacacctaataaataaataattaaaacataactagatagacttaaaatatgacaacgtatgttattattttatttattgaaaaaatctaaaagcaagggggaggataagaaacaatgatgtcatctatcatcaacacaaatttttaagttttacattaaaaatagaaaaatatgcatgcactaccaataaataaataaaagaataaatcacgtcaatcagaatagtattgagtgagttatagctattttactcaagactgtttaacactccgcggtcacgtttcaatcttgcaatggaaaaaattcatgatgtcaacctgaccactagttacatgagaaaacgtgctgaagtcataatttttatagtctaagtgatatgatttcatcacttagctaattcctttgctctggttaggttattcactagttctcaaaggttttgctttttcacgaaatcgagtgttttagaatgatccaatttgcgaataaatcgtccatttattttactttgccaaaaaggtgaaatactaaagtgtgaatttagcttgccacaattcgtagatctcatttatttcgtaaaaataatcggatgctcgaaagggatctggatttggatgagcacactacaagaaatgtcacttttaccagccagttcgctactgcgctggtaaaagtaacttttacc

SEQ ID NO: 59162 - DNA, 895 bp, Cannabis sativa
ctcctcacttgaaacttctctcaacacttcatctcccaagcttaacaagatggcactatgtgcttttgtttcgatttctttaatcttcattttgtcatctcttaactcctccaattcttccttgtcaatggcttgatacactccttgatgaaccagaaattctttcattttattcctctatagtccaaagtcattggctccattgaacttgtctacttcaaagcgtgtagaagccatggatcactttcttgattctgtttttgctttaagaaacctgagctgtccaattgttgtgaaacaacaactcagcaagaacacattaaacaaaataagaatcaatgaaaacctattcaagacaatcactgtgttgcagcaaacataaaaccagtaacaagaacatcaaatgtaaatagagaacacactaacttaacgaggttcaaacaaggtaatggtgaatcaccttgcctacatccttgaccaaaaaatagctacaataatggccttagagaatctttattaactgatcttcaatgagagattacaatagttcaatattagagctgagaatagtccaaaggtctcagattttttctctaagaaactcaacccaggtgtaccgtgaataatcatcaacaaggaccattacatatctctttccactgagactttcattttgcatgggtcccatcaagtccacatgcattagttccaacatactcgggattaatagtctgttgatagaagggtgagatatcttagtctgtttcccttgctgacatggtccacaaattctatccctggatactttcatctctagaattccttttactgcttgaaacttcatcagtctttggaggtctctgtaatttaggtgccccagcctgtagtgccacaa

SEQ ID NO: 59163 - DNA, 1321 bp, Cannabis sativa
gaatgagacaattccactagttaacaaagtgttatagtgaaacagcaagatagaaataacaatttgagagttagaatcataaatacgggggtaatatcccgaaatgtttaaataaatttcgaggacaaaatttttataaggaggggatggttgtaatatctcgaaaagcctaatggtaaataattaggggttggattaatattatgggttaatcaggtaataagtgggattatgatcctactaatctagttcaacataaattttaaatatgctataagtgggtaaatatttataatttacaaattacagagatttacatagcatgtatgaatgtaatatgagctatatgtggaataaaaatatttttagatttagcgaccttggcgacttgatcggggcccagaaatgtcataacaggtttaattagtagattggacgagaatattatgataagttgataatataggtattagggtaattagaagtatgtaaaatttaacttaacacccttcaaatatagatttcttagtggctaagaaacgatacgatgattattagtaaaaaaaaattattaatattatcatattattatttttcttactgttattattattattatattaatattattaatatattattctaatataaaacgtttaacaatgtatatatattataagtttatattagaagaacaaaaacgaaaccttccttcaccgttcgaacgaaacccttacctccctatatccatttttttttattttcaacccaaaatctagcgatctaagctctggtaataacgggatagcaaatctttgaagaggagaagcttaaggtatggtttaatttcgatttaagttaaaaactatttgttttatatagtggctttgtgatttagagtggttatagagattctgacttggtagaattgttctttggtagctaggggactagtttcgatgtttgcttgttgaaattgtggtaattttgggttataaattgagtttaaaactttttaaagcttagttcgaatgataatggcgttttctatctaagggctcaattttaatttctgttacgtaaatatggtagtatgtctggtatatatgtgcccgatgaagtttggagtgatttggataggtttcgagggtgtttcattgagttgaaaaattggaatttcgtgctttaccgttttttaaaatttattggagatcagaaatcgtatttttgtcataactttgcattcggtgtctgttttggacgttctatataccgttttgaagcttgtgacgagctttatcatatggtgtatgttttagag

SEQ ID NO: 59164 - DNA, 989 bp, Cannabis sativa
cagtccagatcaattctctgttggatactctcaaagtattctctatcatactcttactcacgaatcttcttcatctacagagattcttcatgcaaaacccaaattcaatttctttcttttctctgcacctctctctctacctctcaatctctctcttcgaaatcacccctcgaaactcatttgatttagtccttctttaaaatgataagtgtcggtggtatttataggtccaaaatataatcctaaagtcggtggttgcaggtgctaagttcttatgttagttacgacttaacaaacttcttgtaacagtatctccacgtcagcataagataaagttgcttcagaaagttgtggtatatttcctccaaatgtaaagatctccaaaagttgttttagttatggaaagttagaggacatccaaaagggccttcctagaagtctagcttgtccatccggaagaagtcttgttgaatggtagttgtcatccggaagggagttcctggatgcctatcatgtccacctggaaggagtcttcaggaaagctagtcctcctcgaaaaggagttccaaataactagctgttttctcctagaatggatagtcgactccaactatctctattcctatccaagaagtcctttcagcgtgtgcttcagttcttagttcttgcagcatacacttcttccagaaacactttaccttatgctgacgtggagatactattacgagaagtttgttaagtttgttaagtcgtaataaacttaacaacttagcacctgcaagcaccggttttaggatctatatcgtggacctataaataccactgcctcttattatttcaaagaaagaggagatcacacgtatttcgagaggtgatttaaaagagagatattgagaggtagagaaggagagaggtgtagataaaagagagagattgggtatgggttttgtacgaagaataatctgtagatgaggaagatttttgagtaa

SEQ ID NO: 59165 - DNA, 674 bp, Cannabis sativa
  modified_base (622)..(623): a, c, t, g, unknown or other
tcacttgtcttatgaccttataatatgtgcaggcaatggccaggtatgcttctcgagaagttagttgtctatcattaacaggtatgttttcttttcacttttcacaatttgatcatttattatttcttagttttttaggtatatagtaggataaagatttgcacttttttctttggtaattaaagtattgtaatgtcaatctaatgaaataacttttccgtaacattttgaaaaaaaattaataatattttttttatcaattttcttaatgtattttaaattttattctattatattcttattcctattcaatttattttcattgttatttctgtatttttattcttcctaactaaacgtagtcttaatctttcatcatgatcattaaatttgatacagtaggatttagttttgtgtaaaaaaaaatgaaaaaattactaataaggttttaattttaattaattatctagtttgtgaaatttgcaatgtctatttttatttgggagtggtgaactactcatgatattatgacatgttccctatattatataaaaaagaccatttgttatcgagaaatttacatagtatactaacttttaccatttttttacaaaaatactgnnaggcggtattttttacttttttattgtgttttttataagtttcatactgca

SEQ ID NO: 59166 - DNA, 1584 bp, Cannabis sativa
gaatgcaaaaaagcctttcaagagttaaaaatgcaactcgtaaaacctcatgtactctcaaaacctcttgacagagaagaattaggaatatacctggttgtcatggagcatgttgtaagttccgtactgatcagagaaaagaacaatatccaacacccggtctactacatcagcaaaagactcatcgaagctgaagaccggtacccattgataaaaagctcacttattgcctaatcctagcaacgagaaagctaaggccctactttcaagctcatcttgttcaggtatacactgaccaaccattatgccaagtattgcaaaaaccggacacctctggacggttgctcaaatgggaagtggagttaggccagtatgaaattatcttttagccccgaccagcgattaaaggtcaagccttagcagatgttgtggttgaatgtacgggtaaagaagagagcatttcagaaagtaacccagagccagtacaagtaccttagctgagaaatagtgaagacaagcctacttggaagctacatgtggacgggtcagctacggatcagctgtccgacgcaggattctcccttgtcacgcctggggggcaacacttgcacgttgcggtcaaatttggatttaaggcatccaataatgaagctgaatatgaagctcttatcgccggcctaagacttgctcaggaaatgaaagtcgaacacatcgagatctgtagtgactcatagttggtggtaaatcatgtatctagagagtacgaggctcgtggagagaagatgatagcatatctaagcaaaatacacgacatgctcgcataattcaaaggctatgctctcaagcgaattctaggagaagaaaacacaactgctgatgcactagcccaacttacgagcagcaacataaatgataaagcaaatctgattcctgtcaagtttcttgaaaaacctagtatcaccagcacgaaagaggttgaaacgattgatacatccccaaactagatgacgccaatagcagcctacctcaacactaaggaactcctagaaaatagaaacaaagctgagaaaatgaggagaaagtctgtacgatacatcattgtagagggagttatgtatagaagaggattctccatgccactaattaggtgtgtcacacaagaagaagctggacgacttttgtcagaagtacatgaaaaattttatggcaaccacgcagtcgggtagagtttatccaagaaaattctaaggcaaggttatttttaaccaacaatgattgaagactccaaggcctacgttaagaaatgtgataaatgccagatattttcaaagatacctcgggcaccgcccaacgaactaactcagatgcaaagtccttggccttttgccatttagggaattgacctgataggcaaaggcagagtccagtatgcagtggttgtagtggattagtttaccaagtggatggaagtcgagccattggccaccatcacgtccaaaaagtgcaagacttcattgtgaaaaacataatttgccggttcggattaccatataagatagtctcggacaatggcaaacaatttga

SEQ ID NO: 59167 - DNA, 689 bp, Cannabis sativa
aaaaaaaatatatcttctaatatataatctcaaaataaatataaatttgataataaataaataaatgtaatagttcatggaatgtaatttttttttttttttgacatggtgaacaaaatcacacatgattaataatgcagcaaaccacaatcgacggtgggacctcctcgaaccaggatagttcatcgtctaactgaagagcacgttttgtcaaaccatgagctgcagaattcttatcgcgagccacatgggacaaaactgctcccagaaatttagacaataaaactataacgtcttcaaacagcaccccattagattgaaaaagcaccttcctatcattaatagttgttgctagagctagcgaaactgaaaaaatatcacaacaccaaaaccaaaaaacacaattatattagaatgacaatcttcaaaataaaattaatatagaaacttaaaaattaacatacaactcaaatcactaggtcaacataactaaaaaactaaaaaaaccaacaaaattctaaaattaactagccaaaggtattaccctttggctagtaacaacatactaaaacaccctaatagaaaactgttgaaaaataatgtcaaacattatatttaaaattaaacttatcggtaaattctctgtgtaattataagccctccacaaaacaacctacaaaataacaaaa

SEQ ID NO: 59168 - DNA, 2169 bp, Cannabis sativa
tccaacaccttcggataatactgtttctcaaacttggtggaaacagatgtggtcactccctttagctcccaaattgaaacactttctttggcgtgcttgccatgatattctacacaccagtcacaaccttttcaaacgggaatctttaccttcaccatgttgttgtcggtgtttgtgtcatgatgagaccttagagcatgctcttttcaggtgcccaactgtccaagaggtatggattttaactatttttcatgattttattgataaaaatgattttctcacttgtatggatttactttaccttgctgccactacatttattgctagagactatcactactttctgtgtttggtgtggaagctttggcaatgcaagaacaattggttacatgctggtctgcatacatctccttcccaagtcctgcattgggtagcagactacatatatcagtatcaaagatgcaataccaattgtttttatactagtcaaacactatgtgtctctttgctgtccacagagaatgaaccacacatccccagctacagcctttggatttctgtagatgcagctcaggatgtaagactaaataggacgggctttggtatggttgttcagacatgtcaaggggagatactcttaactttggctacaccttggagcggaattcatcaacctttgataatggaagcacatgccttatactatgctctttcttggtgttgtaatcactctatttatccagatggcatagtttcggattgtaaggttttagttgattatatttgtaataaggatactcataatctacatctcaacaaaattattgctgcaattaacagtttactgtcatatttccctaaaggttttcttagctacatcccaagaggagcaaatgaagctagaattaattaaactcgtgtcattaaatgcaatattattataattaacattatagcgcttttatgaacacccataattaaactcatgtcatgaaatgcaatattattataattaacattatagcgtttttatgaacacccctaattaaactcatgttattaaatgtaatattattataattaacattatagcgcttttattagagtgtaattagagtttgaattaatttaatggggtgaaatgaaagggaatgtctaaattagaaaagaattcagaatttttttttattattttgtttacataatttaaaaaaaatattggaaatagtttaagttgattaaattaaaagtcaacattcagtttttttacttggtaaatgacacaaataatgattaattacaactgacactaaaataaaatctaacgctaaaaataaaacttaagagaaaaaaaattataaatatataggtatttagcaatcaagcaaaagaggttagcgtagccgtagctatattgcgtccgttagcaaccaaagcaaaagaagttaaaaaaaatctgaaaaaattcaaattaaagcctatttatataaacaaccttcatataaatacaaattaactaaatcttaatacactcagccgtccatatcttttctctctatctctattcactctcagttctatctctctccattgttggattggcgacgacggatacctccgctcgcacccttgctacaaagtaaacatgccattgaaaataacattgacaattcagaaagaaaattgattttaatcacaaatttcacttaaaaaatatatcttcaaataatttcaaatttatccattttaatttatacaaaattcaccgtaatgtattattaattttttttccaaaaaaaaaaacattttatctattagaaaaaatgagaaaaattaacaatcgcaagataaaaaattgtatataatatatataataattgggtattcatacctaattgatttatagaaatggatataattttatactattaactaagtctttttttctaaatctctaaataacaaatagtttatttatctcactatcaaaagtatacaattgtcataaaacaatatatatttatagagttagaaagaagccttagctacctaatcgtagttagattgggtctgctcatcaaaggcttcacacaactagaaaaacccacacttctacttcacctatactttacacatacagatgctaagcccattaactattgatcacta

SEQ ID NO: 59169 - DNA, 1067 bp, Cannabis sativa
acatttatttagtttgtctaattaaatagtcacatctaaacattcaatagttgaatcaatttagtgaaatagattataattaaatcaatatgagatatgttttaaataaattaaaactgttttaaaggatgtgtttagaatacattgagattgagagtaaataattgaaattgttcataaaattaaatctcaataattatgaaaattgaaagggagataatttttaaagagtcaaaaatatatttttatagtcatgacgatcaaatatattcaaaggtaataattattttagtgggagtgtagtattcattgaaaaaagtgatttttaagaaaactagattgttcttaaatgcaacaattagtatttctaaattcaatcatatttctataaaactatataaatttcaatgaatgagatttattgaattaaagatataccaagaaggtttgaacatccaactaatttaaattagtaattattctgacatatagaatatcaaatccttatgaaagaaaataatgaaaaatttaggactttctaatttcaaacttaggagtcaaaatatgattattcaataacatacattaattctcattaattattcaatacatagatgatattgaatatgaaattttattaagtgagaaactttaaccttattaaaattaaattgattatagtaattaataaaggtatatgagttagttcaaaaaatattcattaaagagaaggataacttgatcattgacttcataagatcgacatttgaattattatattgtattgaattcaagcaatatatagattaataattattagatatcaaatattcttaagaaaataaagtggttgatatctatcatgtatgactactaataaatagtattactaaatatgaatttgataataaatagagatgttattaaagttttgaataaaccatttaaataatattcaaagtatgtgatacgagttttgaatataataattatgggtgactattcaatggttacatttttattataaccatatggttacatttttctttgacctgtaatagcaggtt

SEQ ID NO: 59170 - DNA, 1546 bp, Cannabis sativa
  modified_base (103)..(114): a, c, t, g, unknown or other
aagttctaataccaacattaatttgccaacccccttttgccaacacatcataagtaaattctattttaccagcgcaatactaatttttgccagcacaaaaatnnnnnnnnnnnngtgacatttcttgtagtgatttttctatattagaaattctcaagttgtatgaaattaaaagtacaatttcctataccattttccatttcttgaaaattaacaaacaaaaagcctacaatctactataaatttagattattttttaaggataaatattattttggattttatattttacaaaaattatcaattaaattttttttttgccatataataaattgaatcttatattttctagcatggtaaaaaataattcttttctcaagttttgtcattattttttttaatataatcaacccgaatctataattctaacacgaacacaaaatatatataaccaatttcaacataacatctcgagttcaaaatattattaagtttttatttgataaaaattgagctctattttgtaccattttcaaaaaaaaaaaaaaagaaaattgaattatcattcaataaaatagatagttcaatcaatatttttttacaaaatacaacataaaaaaaatatatattttttttatactaaatataatactacaatattatactacaaaaattcttagtggcaatttgtaaataaagaacatcattatatatacattcactaaaatatttaaatatttaaatgttatttttaattcacaatatttttactataaataaaaattactttttagtcatagaaatttcatatgtgatgtctaaaaagtcactaaatgataataataatgtattatagtataagaaattgagcgctttttttttttgtactatttaataccataccaggcaaagaaattatattaactgatcttgaggagatgtgtaagagtgatcaagtgcaaaaaatggtgagttaatttgattaaaaaaattggtgttaatatatatccctttatattgtattttatgctccctttaaattataataactaagaaaaaaaagtgagtgcgtgggaatgggatatccattatgtatgaatcattttaaacttatagttggtttatttttcctttgattctgtattagttgtttctctttattatggtgtcataaatatatatatattcttattattatatcttggttaaagggtgctctatttttatattattatcatacataaagaaattgactagtagtaaaatctcattttacatggggttgatgtaaagcagattcccttgttccccaaatgcttaaaccttcttttctggcatattattatatgggattccaatagtgccaagtttgcgttactccaccaccaaaaaaaaatgtggggaaaaatttgaccttccaaaccaatccactgagatgaaattctttccttagcacctaagagtaagacaggccaaaaaagagaaacaatactattgtactaagaatttaaaagttgagagaattcggctctctctctctctctct

SEQ ID NO: 59171 - DNA, 1086 bp, Cannabis sativa
atacaaagaaatgctaaaaggcgcgaaatgtttaacatcctctaatatgttatatcgatatttggtataattatgtatcggatctcatataatttaatgaaataatttttataaaatattactaatcaattacaaaacgttatttttggtagtgctaataatgtttaatagcaatactcacacactatagcatatccttcaaatatatatgcatttatacaaataagttagcaaagagtgatatcaacaatttcatagcctagccactagggcgggctagacttgagctgggatgagctagacccatgcttaagggccaccgagcccagagccccaaattttttttcttttttgaaaaatataaagctcaataatactttttgtcctaaaaccttacaaattttcaaagtccacccagtagaaaaagtaaaatgaaacttaacataaatctcatttcatataacacttgatatagtttggggttattttcaaaatattaatgtataaatcataattttaggcaaaaaaaaaagtataaataactagtttatcaatagacattatacctcattacattacaatttgaattcatgcacattcaataacaattcaaattgaactcttatcacacttgcatactctatatctttttattcagttgaaaaaacccaaatatccttctttctcaatctccatatcattatcaccacaaccaccaccaccacctatgccatgatcatcttcatcatcacacttccttttccagccagccccaccaggcccaggcccaggcccactatcatggcccatagctaccggcccactattcaaaatacttttaagcgggagcataaagtaaaactctttgcgaccaatcttaagcaaattcttggacttgagttgaactggaaaacaacccgcgcggtgatgaactccatcaacgaagcacccgttcctaccgagtacttctagggcaaaacaacggcgcgagaagtcgtagaagatggtggcatggtggcgtgatatgttcctccctccgccgaggcttgagaggtcgatgtctactgatgatatctttgaatttcg

SEQ ID NO: 59172 - DNA, 2163 bp, Cannabis sativa
gcggaggtgcggcggcacgtcctcgtcggagtaccggtacaaatatttttttagaaaaaaaaagaagaaaaagagagaaacaatgatttggtagtgaaaataagattttgggatggtgaaaatggagtttggaggagaaaaaagggggctgccggcggtgggtttacaaaatgcacagagagagagaaagagaagaggaaaatggggaagaagggttcgtccctggttttatttactttcgacttttgctgacgcaattaggtgcgccggcaaaagtccatcctgaataaaaatgcacgaaacgatgcgtttcatttaagttgggacgttcgtttgacgacgcatgtaagttttccacaaaattttcacacacgttttcctttggacgggaagttgtccaatggttgccaaaccctgatgcaacgtgtccaatggtccaatggttgccacttttgctggcgcaattatatgcgccgtcaaaattccccacctacttttacgcgcacgctttttcactgtgagggaaattgatcgccttttttcaaacttttgccggcgcatttaagctcgccgaaaaatgtttgctcgaaccgccaacaattcccaccttttggcagtttggtgccaacttttgccggtgcaattcgtgtacttcgctggctatattggctattgctggcgatattcagcgccggtaaaaggttgaggtgggaaaaattgtttacttcctttgccggcgcatttgttgacttgcgccgacattggttgacattttccagtgcaattactcaatagcactggcaaaaggtggcattcttgtagtgttggtagcctcagacataagccttcgaatgtaagcctttaaggttcccctttttgttgtttgacttcgacaaggtcttttagctgcgattgtacaagtcttgaggacgagaattatgtgtagaattcttgtgagaacttaggccaagagttaaatcttcttggggtgagttttaagtaccattcatgagccatctcaaaaaatatgggtgggaatatgcggcatcgcacatcacaagtaaacttctggagatcgagttgcatctcaaagtatttcatgtgagccagtgggttttcttgcccggtatacatcttccatacttgaatgttgaacttagaaaagggcaaggttagttagtgggtcttctagccttgtatatatcttccaattgtgcttgcacagaaggatctgttgctatggggactggactgactaaccctccttggggaggctgtagattcttgagagataggggctagctggctctaccgtgtgagaggttatggtgaaggtatgtcaaacccgtgtagaattgtagagcctcacttaccattcctatgtatgggagctagccttggtaggctaggcctacacttggctactgtacttggctggccagacctgcattgggcaaggtctggcttcccatcgctcctccatggctgacaagacctacaaaggtcgggtttggctgcttgtgactccgtactcgattgatgttggttatgtgttgacaggggaagatcacaccaattgctagagtttggtggatctagaagtctaaaatgattggttaaacttcttgaatcgctattttgggtgtttccacctgctcccaatccttttcagttgaagattgacctctgggcacctttctccccttggggaggaagtgctattctctagatgggcaagggtgctcttgccgatggctaggcgaccattggctgcaccatgggggtgttgctaacccaaagatcctcggctgaccccccgtgctgctggttgctgggttctggctattttcaccgtttgacctttgatgaaaggtctttcttcccttaagcgagggaagatttgtcctagttcctaaggaacttggttgatcagcatgtcgatagaccctccctgatctatcaacaagtctttattgaagtggatctctgaggagatcctagcctattctatcagttctctggttgaacggtcttatcagattgctagcctttcatttgttgtgatctaacttgtaatgaccgctttagtaatttggattagtaaaggcaattagcactaatttctgctattttataattatttatgaatttatttaattgtgg

SEQ ID NO: 59173 - DNA, 884 bp, Cannabis sativa
tctctctctctctctctcatcatcccaaaagagcagccctcttcctcccccatctctctacctcccaactacaaaacaccaaaagccaccgccctcctcctcccccaaagtcactactctccgatctacctccctctcgtcctccatccaaagtcgtcgttgtagaggccaaaattgggctaaggctcaatgtcatacatgatgtttccagagaatgctgaaacaagatcaagttggtctatttaactaattatgatggtacgatcacaacaacaagcctaatagacccaaaacaatacaattgagtcagatattaacattactcatgacccaatattgagctcaaaatgatccaactcgtatacgagaccaagtcttatcattcatctaacaacaatatttgtagtggtcagttaaactaaccacataaataatgatctccctgataaagtgggggagaagtgcttccaaagaggggtgagcggtcatgagtaaagtctctccatgaacatctataagagccactctcagtcaatgagagagacaaatcaatttgagtcatcccaatgcttttcacttataattcactctctcattctctctaaaactagatacttatttttgcagtcaagataggtggtaacttagttaaaacatttattctcatcttttttattacgttgttaacaatcttgctgacttgaccgtcggagtcccctcgaccgacaccatcccagtgtcctaaggtttctcggttactctcttatttgttctacaggttatctgtgcccgcgtacgattatcttcgattgattgtggattatagcctctacaatttggcacccatcatggggccctagcaagctgcaactaagcaaagtgtc

SEQ ID NO: 59174 - DNA, 1074 bp, Cannabis sativa
acataaatcacttcaaatttcgtatattgataactaattagattgtaaaaggttttatttagggcacaaaacccaacaactccatgcaccagctcgcatctaaaagtttctgaattttgttgtaggaagttctcaaattctgccaagtacaagctcctccttcgcagcccaaatccacacctccaaagttgaaaagaaaatttcaaagaatttctccttctcgtctatcatacactttgcgtcctaccttctcggacttgtcaagaatgacattgagatcacccattaacgcccaaggatcacgacactctaccactttttccgtgagccaattctagtaggctcctttcaaagcctggtatggggtgccataaacacaaattcaactccacattggttgccccaggccatcctgaaaaagatacacgaaaacccgcatcatacatttctaaaacattacattggactcccctcctccaagccacacaaaaacctctagctaagccattcggagggatgcaccaagaatttacatagcccaatcgattcataacattgatcatagatttcgcatccacctttgtttctgaaagaaaaagaaaatccacatctgaggcacggattaggccccgaagggtcctttctgtcgtagatcgatgtaatccacggtaattccaagccaagcacctcatgacaatggtgggggcatgcttctagccgcctccttgtcccttccaaaagtttgctcataatccactctaacatccacacaattagcaggaatttcattcaaatcggctactccgtttagctctctgtttacctttgattttcttccacggcctgagcttctcttacttgtttcgtcaccccagcaccaatacagaaattttctgcctcaacaaagcactgatttttttctggctcttcattcttacctggtccattgggcaaaataaaacttgatctcgaagaagaagaataaggttgataccaagtatgggcctcttctttttagtgttgcccaataaatgcataatcattttagaaagatctggtgggcttgagataaga

SEQ ID NO: 59175 - DNA, 1045 bp, Cannabis sativa
agtacaactcactaataggaaggccaggtcagcacttaaacaaacgaagaccccggaactcaaacaggcatcaagtgataaactagctcactcttagcagccggacggccctactgtcgaccagccttgggattgcaccatggccagctagcctggcctccacaggggccttactggccaagaggtgcactacaggttttcctggacacttctacacgtggacaacaacacatggattgcaaattgggccctaaaggcccaacagaatggctaaataatatctagaatcaagggcacttggtgttttttaaatatctaacaaactatgcaagtattaagagatttgaactgtaaacctaaggttttaggcctcctacataaaggccttaaccttaggctagaaacctaagttgcctctaagcctgaaacctacttttaatatcaaagtgtctgataaactttctctcttccttactctctttctcacacgcctacccttgaatcacctcagcacttgagttttgtcattattgattcatatcttgtattcctatgggtgctatataacatctctcctatagtgatcttgatagtcttaaccatcggtacaaatataactgaaaggggagtaggtcatcacccactatcacaagggggttgaacctctacaaaaaatcttgttgtttattgcttttcattcttatttgtgcaaacacgtggcaagcatcagatctatacgaccccgctgttggttgatcactttttttggtcaatagtttggtgctttcattgagagcgtggatatcgtgatctgatcaaacgccatagttgacacaagaagaactcatgttgcaccatctgcatctttaggtgtcgctcaatacccacaaattgtggatccatacactcaggttccagtcacaactggaatccctatgagcattgcaaatgtggtgaatcctatcaccacaacaggcgcttgattacgatttttcgctcagtagagatgcaaatttttgacatggatggatgatcaagagtacat

SEQ ID NO: 59176 - DNA, 1255 bp, Cannabis sativa
  modified_base (173)..(173): a, c, t, g, unknown or other
ttacttatagttatcagttaaagtatgatgctggaatacttaatacattaggattatgatggtattgtatatagttgtattgttgtgaatttaagacatgtgtggtgtattgaatgttaatgtgtgctaaaacatttccttactggacttttagctcaccccctttactttcnccctacaggtattagatagggaagtacacatagtgagcagggtaagttctggtatgtatactgtgagcggctacggataggcaaacgatctagaacgccggtggtgccttggttttattttaagcagttgataaatctagcacagtggaaatgtattatttaaaattatttacttttgtatcttgtttacaaatgaagaatccttctctattgcattttgatttttaaaatccactgttgtatttaaattattttttttttcatcctttcaaattatacatgaaaatagtatttttgtaaaataagacaaaatatcaggcatcacattagttcacaattatttattattgttctaatctaataattataataaaaacatacaataataataatttttttaaaaacaaacctcttatatgaaaaagtcccctaaataatattattaataaattaatattttaatttgtaattatatttaaatatgccatgagtatttaatatgaataaaaaatatataggcatcaattaaatttaaattaatgtatgtatataccaaaaaaattatctaggtggtgatatattttagatttacttgattttcagtatttattattttagttctagagttggaagaattctaaaagtttattaaaaatgataatgagtttattgccaacaaatacttaattaaaaaaaaagctaattaagatttttgtcctttgaactttaacatgtactaaatcatacccctgtacttttaaagtcgttaaaaatactccatgaactattgaaaaaagttcttaaatccaacaatcccaatagttcaaggggcatttttaacgaccttaaaagtttcgaaagcaaaaattctaattaaccataaaaaaaatctggtacatattaataatttattggcgacttaatcgttttgattaaaaaaaattaaataaagacttacatatgtttatgtatatttttcattatggttccagtagaacactttttcagtatgaatattaaattctatttcattaccaatcatagattttatatgattggatcttgaagaatattattaatag

SEQ ID NO: 59177 - DNA, 777 bp, Cannabis sativa
tttctttgagaatattacctgattacaaaaaagatagcacagccgcactgatatcctcaccaatatactcccaattatcttgaaagaagctgcttgagtatccatcaggtctaggtgacttgttcccaggaatactgaaaatagctttattcacatcatcacttgtgaaatgttgagtaagcattctgccttgatcaacagtgagtatgggtctcctagccaatatgcttttctcagttttcctcctcttttccattctagtgccaagtaagctattatagtattccagaaaagcatctgataccttagaaggttcattaaccctgctcccatccagcttttcaatggataaaattctattttgccgttgtctttgttttatataggcatgaaacaaggctgtattacaatctccactctataaccaagcagctttagctttctattgtaggaaggatgcataatccctttgagacttacttaacttttctctggcttctttttctcgagaatgcaggtggaaattagaaggattttggtgaatttgttgttgcaaagtatctagatccatcttgtttctagttacagcaacctgcaactcatgaaagccctccttgttaatctctttcagcttgtgtttgagttgtttcatcttggataccaattgaaacattttcgtgccatcaataggtctctcccaaatctctttttaaccactctcatatgtaggatgtgatttccacatcttaaagtatttgaatggttttctttcgctca

SEQ ID NO: 59178 - DNA, 714 bp, Cannabis sativa
tgacacggggttgtacttgtcacagggaaaataaatatcaaaacttctacaaagagtgaatatgatcaatctaaagccgagtccaacacctatgacagtaggcaaacctatgtccatacatgatggtgaaccaatggtcgatccctctcactacagacgtgtcataggtgcattacaatatttaagccacacaagacccgacatctcttttgcagtcaataaacttagttagttcctcaagtgtcctaccaatattcattggaatgccacaaagcttgtattacgatatcttaaaggaaccatgcagcatggaatccacataaaacgtagcgatagactcacacttacaggaaactctgatgtagattgggcctgttgccctgacgaccgaagatccattgctggttactgtgcttttcttggtgactcactgatatcatggtcttccaagaagcaaacagttgttgcacgctccagtactgaatcggaatatagagcattagctcaattggctgcaaaacttacatggcttcaagattaattaagttcaagctcccagcagcccctataatctggtgtgataatatgagtgttagcacattagctgccaatccagtttaccatgctagaaccaagcacatcgaacttgatgtgcacttcatcagggacaaagttcttcagagacaactggagattagatacataccgtcacat

SEQ ID NO: 59179 - DNA, 527 bp, Cannabis sativa
tttggaccatctttgttggaaagttaatccttcggggcagttttctctcaaaagtgcctattgggctctaaattcctctcattttgaatatgtggatgttgtttgtaagcatatctcgaagatgcatattcacgagagactgaaattgttcctttggaggcttgtccaagatgttctccctttcggttctaaaatggcttccatttttggctctaacattgggcggtgcatgctttgtggctcagaggaaatggatgttgtgtctcactttgtctcggggtgtgatgttactagatctctttggttctcctccccgtggggtcttagaattcagagtttcaatttggggggaggtagagagctggtttcttggctcttagaaccaaggtttctagttgattgtggtggaaaggtgttgaacgagtttttttctttatggtgcgattttgtatcataaagtgtggaatgttaggaatgatattttctataacaatggggcgctgtgtttggcggaggtgcggaaggca

SEQ ID NO: 59180 - DNA, 1056 bp, Cannabis sativa
  modified_base (494)..(496): a, c, t, g, unknown or other
gtagtttagccgccaaaaattcagtttttgtggttaagtgttataaaccgtaaagttcaggtgatttagctgccaatattctttttttgaatataataattgcgacttctgtcccccaaatacatacaaaaataacttttttttttaatttctttttccatatatagtagtgtttcttatactcaacgtcattcaagtaaaattttaaatttttgaattgtttacagtgtcgaaaataagtttaaaattttatgaacacgcaactggaatattaagaatctttgtttccggtactgtaaactattcagaatttttttaaaatttataaattagatgactataactataacaaatacaaaaattaaaaaaaaaaaatatcccaacatataattttggacgtagagaattgactaataagaaattataatgtgaaattgtaattagtactcttagggctcgtttggtacgatgtataagggtcgtattgtattaannnataaataacactatgtttggataaaacaatgtattgtattaattattacgactaaaatttttaatacaatgtatgttgtattatttaatacataacaaatagtccgtattagcttgtattataaaatttacaaggaattcagggtcaacaccaatctccgacctgaacccgaacccgggacccagacctgaacccaaacctgaacccgggatccggaacccgggccaagacccagatttggacccggacttgggacccaggacctagactcggatccagactcgaacctagatcgggacctggacccggaacccgagactcagacccagaccaggactcgatatctggacccaaacttgggatccggagccggacccgggactcgtactcgagactcagacccgaactcgagactcatacctgagacccagacccagactcaaacctgagacctaggactagggatccagatcaggactcgggacccagactcgaacccggacccgggactcggactcagactcggacccggaccccgtacccaaacccaaacttggacc

SEQ ID NO: 59181 - DNA, 2785 bp, Cannabis sativa
tggttttggaagtattttaataagctgtgtggtgttagtattattatttattacacaccaaaccaaatattcaaataagaataaaaagatttaatgggactgtgtgaacttttaatgggttctgctttagtatctagaaaatatcaaacatgcatgttctcatgaattaaatcgaaaacgagtttgcatctaatacaaaattcaaaaaaataaaaataaaaataaaaaacagctgtaaacaaacctctcgtttatgggttccaccccaagaaccataaacctcaccacatactatttaattatttattagagaaatagtaaaggccaccgaagtgcttaacactctcttacgtgtcaatctcgctattgatttaattaagtatcgggtcccataaaatttaatataataacttttaaagagtatagttagtcaatcacaacgtgacatatcgcaaaggtgctaggcaccactggtgcctaataaatgctcgtttatttattattaacaacagctttgtgaactgttatgttttcagtgctacaccgctctcgtttcacaaatgtccgtttactaattaatgtcgtttgttttataataactttattcttactccaaaatcaaatctaacggtcagaaattgtctgtgagatcagctaaccatttttggccgtagctttagtttgattctttttgacaaacacagactcgtatatctttgtatatgtatattttttttttctaaaaacaacgatataataagattctaaacttgacccttgtcataaaatcttaaaaagcccggcaaacactcatctgtgctaaatagagagagagagtaaaaagacttgtttttttttctttctttctctctctttctttccatttttctcagatttgtttcatattttcattctatatatagctcctctaaagctggattcttgaacaaatttttttatttttatttttcttcctataaatgtttctgcattttctgtcagcttaagctagcaatccaaggttatttcaaagtttgttcctttttacttttggggtgctgaaaaatacaataattttagaaaacttggtggcagagtttgaaacagaggagggttagtatgaagcttttgtgggttggtattgcttttgtagttgttttagccaaatgggttaatggctttgtggaatttagtctgaatgaaactgagatatccttaatggaaggctttggagtctctaaggcaggttacaaccctttaatggttggtcttaccctcattcacggagctggcgcaaaaggagctggtacactctcttcttcttcttttgattatttttctttttttttttttaattttttttattcatgctagatgtagccataacctttttacaaaacataaatgaaatagattagtaaatggcattttttatcatgagtttataggaaaaatatcaaataagtagctgcatagtagagagtggatttgtttctgggtaatcaaacatctcctttagatttttatagtgcctctcattttcatcttaaaatgcttttttcttctaagatctctgaaaatctgggtatatttttctatgcatttcttcatttagctttcctcttttaaccatttcttaatgcttggttgttactttgtcttaatatgtctactgcacatgtcatttttaaattttgaatttgtagatcttgtttgaattgtgtaaacaacagtgattttaaatatatatattttattcaacagctttgtcttacatgatgggctaatgttgtttgtttatcatttacagtctgcttggatggaaccttgccaggataccattggcaccgtggatatggatcaggagcaaataattggcttatacaattggaggtttgtgagatataaacattgaacaattattatatctttcatttgttactgcataaattttgcatggcttgatattaacaaaaataccactcaagactcaagacccgagtccctctcgggtgctatagagtcctggttctcaaatattgggttaggtggggattctagtttcaaataagtattgacaaaatttccattttatagtatttttctttccttggattcttaccaagatatagaatgagataaaaagtcaaattgtagcaatgttttgttcctagctgtttttggtgctttagtatataagaaaagagtgtttgacagggtcaaggatggtccatatagaatacttttgactggatgatttcagatgacaaagtttgtggtcttgaaaaaaaaaatagttgctttattcttattcttgtttcttttctcattacattagaggttcaagaaaatttcaggagtcctttatatgctaatggtgtttctcttaaactaaaagttttatttgaataatcatctcattgcagggtggtggttggtgcagtaatgttaggaattgtgtatatcgcaaaaaaacaaggcggggatcgtcaacatacatggaaaagctaataccatttacaggaatactaagtgaaaaagctcaagagaatcctggttatctctcaaactcaatctcaaaaaaaagattaaaagaaacactgtttttgcctgtttctttgtccttttcccttcattaactcactgtcttgacaattatcttgttccattccatctgggatttcagacttctacaactggaatagagtaaagcttcgctactgtgatggggcctcatttactggcgacagtgaacataaggtttggacaatatactcaccatttg

SEQ ID NO: 59182 - DNA, 1181 bp, Cannabis sativa
atttgaagatatataaaacaatttctaatgggtattatatttattgatgattactaataaatttaattataaatattaattttaaaatactaatgtattaaattttgatttaatttcgaataataaaaaataaatttaatttttatacttaatctaactacttaattgaaaaatattaaaaaaatacttttttttacactatattaaaaatatgtttatatacaaaacaattaagccaaactcaatttttttttcaaaaaatatttttttaagttttttttcaactaatggtacaaccccaatcatataatgtaaaaataagaaattttttaattagatagaaaaattaaatataaaaattcaaattttctcaatactatctattcatgcgtaatatgaggtcaaatcaaaagtaaccatgagatcaaaatgggaaatgagatcaaatcaaaggtactaggcaagggtactattgatgtgtttttcaccttcagtaagaaagtcacattggtgaatgttctttatgtgcccgacttgaatagaaacttgatttgtggagacttacttggaaaacccagtattaaggtcgtttatgagtccggtaagcttatactttccaagtctaatgtattttaggacaaacggtactcttgtgagggaatggtgaaattatgcgccaaatatgtaactttcagtgttaacaataataaagctttacttccacttatatgattgagcatgattctttatatttgtggcatctaagattagctcacattagtttttctataatgaaaagagttattaaaaaaaatgtggcatgattgattgtgatatataaagttatagtaaatatgaaagttgtgtaaaagcaaaatgactaaaaaaccttttccaagtgttgttagaaatttgctagatttaattcatagtgatatatgtgaactaaatagaattcaaactagaggtggtaaaaggtatttcattacttttattgatgattatagtagatatacttatgtatatttgttaaagtaaaaggatgagacctttagtgcttttaagattttaaagcggaggtcgaagatcaacttaacatgaaaataaaagtgttgagaagtgatagaggaggttataacttctttaataaatttactatttttgtgaggaaaatagtataa

SEQ ID NO: 59183 - DNA, 724 bp, Cannabis sativa
tattttattttattgctagttatgtaaaaaaaaatttatatttttttaatattaaataattcaatttttagaaagtaataaatctaaattaatacccgagtcaatccgcacagtgcggattagattttaattcttgtgcagaatgaattggattggattcaaaatataaaatccatacttagtacagatcagatgcataggaaaaaaataatgcaaattagattagatgaaaatccatcaaattttaaaattgatttgataaagagttttatgtaattataaattttagtatattatttttattttaattaataaaaaaatcgtttattatatattaaattatttattattataaatttatatatttttccttaataaaaacgtagtaataaagtcatataaaactaagcaaatattgcatgtaagtttggagaagacttctttttaacatataaaataattatacttcgtttatttttatacacaatgatcatgatatacattatatattgtaattagagcagacataattctactaattgaaaaagaaaaacctccaaagaatttagtgtcaaattttttaaaaattattcagaaattcctttaaataaatggtggaatttatatctaactattaattaattagtattgtcatatatataaagaatagatctcccactagataattgatctataaatgtaatgattattttatgatgtaggt

SEQ ID NO: 59184 - DNA, 1083 bp, Cannabis sativa
  modified_base (29)..(30): a, c, t, g, unknown or other
  modified_base (92)..(102): a, c, t, g, unknown or other
aaaatttttaaaaaaaaaaattttttttnnaaaaaaaaaaaaaaaaagaccagcccaactcaaaactcggtcaaaacccacccggacccggnnnnnnnnnnncccaaaacccaaaaattcggtcatacaaatgggcatgttcgatttactaattctatgcacttgaattcaaaaacttgaaattcgtcaaaatccacttgatgtgcactcctcaatcagagtactattttgtatcattataaaaattacaaggtctaattcattatttaacaaaacaaaaaatctaattagtaacttttacaaaatacagtatccaaattttatgtgggaattcgggatggtatgatttgttgtggtgcccaagccactacctttccatgtattcagatgatagaggccaatttgtattcatagcctatggtttgtaggccattttttggtgaccatctgattaatggacggatgatagaggatgtgtgggaattcgggatcaaaattgaggatggcctattcacaaaacaaggaatggaaagttgtttggatgtggtcttacatcaagaaaaaggaaagaaaatgagagagaatgtacaagtactatgagaggttgcaacaaaagttgttggcatagatagaagtaagcagtacaaagaacttcaaggagtaataagtatagtgttgctcagttagtgcaatcaaatgttactaaaatttatattgcataataataatgtctaaaatgtattactatatctagtatctactcctataaatgacactaatctaagcaaagtaccaaaatttggcttgttatagggtaaagttgtttaatgcattcacatgcacttgacatacattttgcaataagtaacaaatatcactttttcaaattacactattcaccacttaaattatttcaaaacttttatcacctttcatttatttatttaataatgtttatatagttttagaatgaaaattaatatgcagcacgttggctcaatttttgggtgcaaatagaaacatgatcttactaactgcatttgctttgatctttctgtcctttaaaggatcccaaaagcctga

SEQ ID NO: 59185 - DNA, 847 bp, Cannabis sativa
caattatacataattatctagttatggttttgctaatcctttttcttaatttcgggtattacagtctttacaccaaaattaataaagtaaaataaagaagaataaaaggacaaaaattttgtataataactctaggtaaaatctgatgcccttcacatttccaaagtgctaatatttatagtgatgatttgctcctagaattaatatttacgtgcatagtatagtgggataattgattagctggagatggctgtaatgggatcatgttgaactgagattatggcatgtgagttattacgaaacgtggcacatgaattgcatatatctcggcttagactcgttgtggcgaatatcaatgagttaatgagtaaggctttttcttgaatcacatcagatgacttgggcctccaattaactagcggaacaatgttttattatgttgggtcttcatgagtttgaaatgaaatccaattgggatgcggatggactttaaccaattcatttgggctcgcattctttactttcaattgtaccaatttgtgtacgaaatctgaaaaataacacaaaattagattaagtcaaatatttcaaagttaaataattttggcaagtaaactcatcaaaatagataatttaattctaattattcatcgaattacacttaataatatgaaattttacacactgatcacaaccccaaacaagcttattgctagtctctagcaattcaagcgaaaagaatgtcaacgtgatatttttatatgtcaaaaattctaaaaatagcacaaatattcaagcaaaatgttagtaaaaagccaataaaaactatacaaaattaccttgaata

SEQ ID NO: 59186 - DNA, 1388 bp, Cannabis sativa
caatatctataattggtaagaatacatattacatatttaaaatacactgattgtggtatttagatagcttgccatatctctgtgatacgaccccaaatttatagggattgctcttgtggttcacgatgcaaatgcttgaattgctaagtgttgatatgctgcttggattatccactactcggttgggaggacctcgcccgtacaggtatatacggtactctacttggaacatctccttcgggcaggcagggagaatcaagtccacgtgtcactagcatgtgatgccatgttagagtgcgaaaattgggataacacttgcccccaatcctgtacgggacttccaaagtttcgtatagacttcatccgagttgtctttacatttgaatgggtgacacgtgttgggcgcgtttgctggtgattcgatgtgagtctgaccaggcgtcccttcaattttcggctaattaatgctttgactaattaatacctctagacatgtttccctttgcatgcctttgacagttattctcttgaggcacttgatttcttttaatttcccaatatttacttttgggggaaaatgaaagcgtctgaggattttgaattgattacctcgtttcacaagttagcttataaataggactgaaacttcttagaaattactttcaccattttctccacgaaatcgtctcagagcaaaagaaaaaagagttttctttcaagtctatcctgggatttttagcagtgagtatccgaaaagctttgcctggacaacgcttaggctttaaacagtatgtttttaatctttctcttctttaactttgtatctttaatttctaggttactattgtagaaaatataggtgtgcttcactttttgtaaaagatacgtagaaaatcctagttcaaaactttgttacttcttctgtaatagttcgtacgactttgttatttacaaaattttgactttaatctcgcaatgttcgattctcaccttgctcattcaaagcttcgtgaaatttagcctttaatcccaaaaatttcagcctcttggggttataacataatctttatttgtttttcgtctttttaatctattgagtagtcctagtcggcatatttgcctatttttgtttgatatcttgtccaaacactcatctcgtgtgttgtcttttgtagatgaaccctagtcagttttggggaggcaaacatcgaattgaccaggatctacttcaacttctatacgaggatcaacctcatcttcgcgctagtctgtcctcttcgagtggcgaactttctaattcaagcttcaaggatcgggaagtgagtagtgatcgttcctctactccagaactcgaactgcaacaccacttctataccaagcagatcata

SEQ ID NO: 59187 - DNA, 1819 bp, Cannabis sativa
  modified_base (49)..(52): a, c, t, g, unknown or other
ttttaaaaaatattttcacttcttcaattttaaaaatagaaaactgatnnnnaaagtgttaccaaacgccaccaattataaaaccactaactactcccaacgcacagcatgttttgaataccttatgataaccaattacaatacaatataaatataagaatatagtgaagaatgtaagagactgaaatgatttataattaatcaatgattaatagaatttatgtagctgttatattatgatcggtaggtaggatttgaataataacttattgctgcaacttgcatttgatagtggaaaatgatatttcatagcaagaccaattagatgtgtttatcatgtgccataagatatcatataagactgtatatatccagtaatattcatatatataatatagagacgatgcacagtggatatgtatgtaccacaagtagtaattattagatgacacagtattcctttgaagtggagcaatatgagtaaaaaacaagaatacattattttcagtgactcttccaaattccaatagaagaagtattgacaatcattactgttaaaaaagtgaaaagtatatatcacacttcacaaatacagtacgtacaacctaatctatgatctaaataaaaatatgtatgtgactactaatgtgatgatttttagaccaaattaactagcactacatatatatattatatatatatttataacaagagagtgggaatattatgccaccttggtttagctagaaaagggtgagcatccaaaaaatttatgggctgagacgtgtggtgatggttacacaaaatattataaataaatatgttgcacatttagtaacattacatagctagctaatcataaagtattggtctataatataaaccatggcatataacagagaatagtatacctcactttcttaactttgtttgcatttggttggtaggctccaattaattataatatatgcatatctactatatattaaatatatgagagttattattgagcatgttattagtctaatttattacattacttcatctatattcgaatctaatttaaatatatattaaaatacaaagaactgctatagtcgtttacaccttttgattttaaaaaataaatcagctataagcggtgctctaagtatatacatgaaactgagaaagctcatatcctcttagcaatttgggaaaattgattgatttaaaatcaaaatacaattctttttcttaaaaaagaaaagaaaagaagaaaaaaaatcaaaatacaatttatgctcaaaaaaaagaaaagacaaaacataaacaaaattcattgatacaattttaaaaccaatttatgaaataatttagacaacatattcaacaacacattaatttgttgactttcagaattaaatgtaacttcaacacattagcaaattgttttggttttcattcgttttgggatttagaatttgataaatcttgcgagtcacatcgatcagcagaagaagaacaaaaataatactcctcgtgatgaagcttcctttgaatattattttcctctccttaatggctgaaaccattactctagccaaagaggagctttcattgggcttgacatgtcaatatatagaattgtttttccaacaaaaacacgtatcaatgataaaagtaagtctctatatagaaaaatcataacctacagttgagaatattgaagattaggtttaatttttcaattaggtttgctcaatgaagaaaatgtttggtgtaccaataataatgagatggggaatattactaaaagatactatacttccctctttac

SEQ ID NO: 59188 - DNA, 578 bp, Cannabis sativa
aagttacacttaagcacctaagtgttagcttgtcccttaattagctgaattgagtaattcgtagaggtttagtgagggtctaccttttgataatgtgtgtccacatatcgaacctcaagcttgcttgctaagactttgtctcgaacaaaatagagatatatttctatgtgtttagtacaagcatgatagaccaaagcaagtgaccctgcaccaagattgtcacgccataatatgggactttgaggaagagttactcatatctcaattagaagagattggatccatagtggcaagggctagagcacgatacttagactatgtgcttgatcgagctacaacactttgcttgtttgagcaccaactgatgagattttgaccaagagatacacagtagcctaaggtcaactttctgtcaccatagtggaattgttcctactagatgtcttagtacttatttgcatgctcgccggtgagtagtagtaggggattttagaaattaacttatcttgtttacaacaaaggagatgtcaggcctagtcattgtaagatattggaaggctccaaccatgcttctctat

SEQ ID NO: 59189 - DNA, 977 bp, Cannabis sativa
tgtcactttttgtggtgccttaaggtgcccttaacatttttccataaactttaagtatcaaatattatattattagtgtaatttaatattaagtcttacatattttaatttaataaaaaatataaaaaattattaaccactcataacgcatcacatcaataccgtattaaacattttaagatacctaacaaactgtaagcattgacttagtcttttttgatccacatatatatatctacctcatgttgagaaacatgaaacaaaagccggttgatacaaagatcatcgatcatatataacttcacaagagcttaattattattaatattattattattagatcaattgaaattacttaattaaacttcatatgcagtgtatctggttctgatcatcatcgaaccgtgtgatagatagatataatacatgcacatatataaataaaatattaattgtaaatatttgtaaatatgtacgtgcatgatgcaatatatagtataggacaaatatatatatatgatctcctaatgtaatactaattaattaatactgagattgaaaatgttatcgtatcttaaaaaatatctaaaaccaggctagtagttaagcacgtactcattgtttttttgcagagtaaataatcctggtcacgactgaagaacctcctcggaagaagtttgaactaccaaaattctgacaaagatatatattagctggctgattatctctcaagaaataataatagcataatttttcaactttaaacaaaatatgtatgtcagtgaatcacccaaatctgatattgtgcacaagaactactcatttgacggtaggtaaggtagaggatatatattgggcactggaaacctaataataacatgttcttcgagttggaaagagatgtatattataaagaataatttgcagcataaatacttaagtttaactattagctgtaaataaatacctaagtttaa

SEQ ID NO: 59190 - DNA, 5349 bp, Cannabis sativa
  modified_base (3537)..(3538): a, c, t, g, unknown or other
agggtctgcttcatcttcacagccagctgggacttcgcagtatcaccaagcctagcagtcgcctccttttatgtatcctctgtcatcacctccgcaaatgtcctcttttccttggatgtcatcgccgatgtcgcaaatgcaagtgatgaacatgcagcaagacaccacaaacacaacagatgccacaactgcagcagcagatgccatcgatgcagcagacatcacaactgcagcagcattcaccacaaatgcagcaaaggccatcgatgcagcagacatcacaaatgcagcaaccttccatgcagcagatggcatcgatgcagcaaactccacagatgcagcaggcttccatgcaacatatgtcatcgatgcagcaaacacaacagatgcaacaaccttccatgcagacgccacatatgcaaccatcttccatgcaacacacaccacttgtgcagcagatgacacatatgcatcagatgtcacatttgcaacagatgccttcaatgcagcagacaccacatacgccttcgatgccattgatgcatcatatggtaccaacgtctcagatgcaaccattgtcatcgatgcagcaattgtctcacatacagcagccatactatccccaaatgccagaagtatcacaacagccttactatccccaaatgccgaatattacagaacaacactctggagagaatgatgataatgacaatgaggagtctacacaattgggattatagtattgttatttgtaatggtataattatgatgttttaagtattgtttatttgaatgtttattttagttattgttattttaatatgtttattgtagtttggattttaatttatgaggtagaaaatacttttattaattaatttttattaatttgataatttatatttaaattaaaatatatatatttgtttttagtttacttttttttctttacacaaaatgtaattggcacgactttgtagtgctaaaatataagattaataaagtttccgtttccaacttgacaccacattagtcgtgtcattagatcaggcaattggcatgccaatatttgtggtgcatattgctaattttaggcacgaacctattggcacgacaagtcgtgccaaaataactatgggcactaaaatctacatttgttggcactaattttgtcgtacctatatctcttttttcttatagtgaaattgcacattgtatattacgcacccatacaaaatttatatataataattctgaaaaaataaagtaaaaaattactaaattgctccctaaaatattcatgctgttaaaaatttatccaaactattaatatttttgaattcaacaattttcgtctaattttgttcaatctaactaatatacgtctaacgttgtgattgaatttctgtctgcatcaggtgttcattagtaaaattaaaccgaagttgttgaatccaacaatctcaagttatcagagagaatttttggcagttaactgaaaagttcgagggacatgattaaggcgacgaatcctaattagccataaaaaaaatggtacaaaagtaattaataagaatagtatttgtagtgatgaaaaatatgcatcattccaatgagagaatcagaggcattttgcgcaccttaccagtttggaaaagctctgtaggtcgagttttgacagaaggccttgggtttcaaggtttgtcaatatggtgaacaacggcagcattgattcttaattagccaaaagagatttgggctattgcttgactgaaagtcagtgaagctaaatatgttacaataatgtaatttcatatagtaagggatgcacttcttgttaggagtgatttgaatgaaccggccaagagccgaaagggaagactactagtaccactcatgggtcatggctgtacctgtatcaggctatggttgttgggagagtggtgtgatctgttgaaactctctaagattagcatataatatcactgtccacaatttggctaagtgggctttcaggatcatatcacaagtgttaattattgagtcatctcaagtagataggcagatgttcaatgactatggggaactactatagtgtagtgtagtgtagtggtactgaattgttgttaagtcttttgtttttggtagttttggactgtaaatgaacaagcttgatgatggtgaaattagttctatgtatgtctggcttttttgttgtgtgcctagtttttttagtttgatgctggttgttattatttgttggagggttgtgctgcctgtctacctctgagtctgaggtgtatttttttattttatttttggttattgttcatttattctgctttttctacagcttgttttatattttgtgcgtgtatctgttcggccattcggggtgttttctatgtagttagtgttcatgtggagacgtacgctttcatgctaaaataaatttattcacgtagagaaatgtcagcaaccacagtacatgagatacagcttacactcagacacggagccaataaggttatataaatgggccaaagccccgattcaaagttagtttatatgaaagttttacacataaaaagagtaacaaaaatataaagggataatttcacaaatgcgcaaaaataacaaaaaaaaaaataataaaaatacgatttcacgaaattttaaacatttttacgatttttttaattttatttacataaaatatggtcttttatgttgaaattttgttcattctttgaacgtaaaaatgtaaatattttacaaaaaatgatgtcttatgtaattattccaaatataaaagtagtgtctcataaaatttagcatctttaaatacttaaagttttgaatttataaaaatatggtatcaaactgtaatttttcatcaatttcgttagtatatacttttatattatcaatagaacacgtataataagactcatgttctatatcattagatttggataaaaatatatagtgtcagttacttgcaaattttcttttaataaattcaaaatagaatttatatatatattgataaaattgaaaaaaaaaatagagttttacaaatattaagtacttatgctactgaaaaaattattagatttatgccgcttacaaatttaaaattttgggtacttatgctgcaatttaccgtaaaaagtataccaatttaattgttttgagtacttatgtcgtaatcattaggttatttgtaaatttaaaagtaaattgcggtataattacctaaagttttgagtttgtaagagacataaatctaatgatttttttagcgacataaatacccaaaatttatacagaattttaaacacttttgcaatttaagaatccgtccattacaaaaaaaaatatatatttcataaatactcaaaaacaacaaaaaaattacaaaaatatagttgtatggaattttaaacatttttataatttgtatgattttatttacaaaaaatacagtcttttatgttgtactcttgttaatttgttatttgtatgttatttttnnttattgttttgatgttattttcctattacttttgtgtaatttttttatcattttcgtgttgttatcataaaaaaaaatcgtaaaattattaaaaaaaaaaaaaaaacttttatacgtaaaattttagtaattttacaaaaatagtattttatgtaattatcaaaaaaaaagaaaaaaaaaacctctaaatctcactttgattatttaatagaaatttacactctatactgttttttcctattttcttttaattttactcttgttaggaaaaaattactttttttactatttcttcttatattgtgtactattttttttttactttcgggctacggtatataaacaaaagcttgaatatttgaagtgatgttgttactatgctatcgtaaaagtgagttttttttttttattttctttccttaaaataattattgtttttctttttaaaaaaaaaaaaattggggcaagcccacttgatctcccaaaccaagaaactatttatgtgtttatatatatactcctattgaacaaataataaataactctctttttttcactctcttcttcctcaagttgtctctatctttctctattaatatgtaaactttttattttatttctctctatctttctccattaatatgtaaaccttttattttatttcttgttaagtttttcttcttcattttctttttattttctaatttagtatttgaaattttcattcacattttcgggaaagataagagtggcttttttattctgatttttcagaacttgcttgcaaatatagtctctattgcatcttgtgttgagattgtgcagaagattgttggtttttttaatcatttttttcttttaatttttttatttattttaatattgttttatagttgtttgtcatggtttatttatttaacgttgatttcactgtttctcgtcgaaattaatagttattttttgagtgttctcatattgctgtggtggttctatccatgagtgttgaagatgaagtctataaatacattttttttttgttctctttgactatttttgtggtttttttattctgatttcctataaatacatttgacgagttccttgacaaaaaaatttgaagtgtgtgattttttttatgtttttttaagtagttctatatatttcattgttttacatttgtttttgcgttgttttagtagtttttttttttttattctgatgtttcaagactggacttgcaaatataattgttattgcattgcatctggtgttgaggttgtgcaaatggttattttttttaattcttttttcctttcatatttttttatttgttttagtattattttacagttcttttgtcatgattatttattaaatgtcaatttactgtttttgctcaatctcgccaaaattaatagttgtttttcgactttctagtgttgctgtgatggtttattgttttacagttgttttgtcatgattatttatttaatgtcaatttactgtttttgctcaatctcgccaaaattaatagttatttttcggttttctagtgttactgtgatggttctatctatggttatagaagatgggagtctcttttttttttttttttgtgtgtgtgtttacagtttaaaagacaaaaaaaatagacagtatcataaaattgtaaaattttacccaaaatctaatatttttttgtaaaaacctcattatttagtgaaaaaactcttgtaaagcaaaataattagggattatttcacaaatacactaaaacaacaaaaaatttacaaaaatacggtttcatggaa

SEQ ID NO: 59191 - DNA, 699 bp, Cannabis sativa
tatttttaaatattatatgattttataaataaataactaaataaatttctattcgattcagcttccacttttattcatctaaaaaaaactttcatttttatcttgttgttctcttccttgttcctcccagtttagatatacaatacaaaggctaatatattttatataaataaatacaagacttgaaattaaacaaagagaacattaaatatatatcattgaaattatcacaagtcacctccttatatataaatatattagctccaaaccagaagactactatgtactagctgttgtgttgcgaacacaatacatgaataaaaaaacacaaaaagaagaaagaaagaaaagatcaacattcagatttcagcatgaaaaatatgacttagcagagataaaaaaaaaaaaagaatcctatagggatttttttttaatatattaactcatataatattaaaattaaataaaattaacattaaaaagatggataatttagtcatactcgaaagttaggtccaccaaagtcaaagatatatagggtaccacatgtgtaggatttgtaaataaagagtaccaagtaatcatttttaaaaacataaggtactaagagcaagtccaaagacacggtaaaattttatataagtcgcgattttcttccaaggagacagcatttgtggcaccattttaaagttttgtcta

SEQ ID NO: 59192 - DNA, 920 bp, Cannabis sativa
tgtgatgactgtaattaaggatattcaagaaaaagttaatgtcattcatcgtcgaccttctaatgaggtatttatttatatttttcttgtttcagttttttaatgctgttattattagtttttttttttctgttttattttagttgcaatactgttgtatgattcagggtaagtcatttgatgagttggtaacacaagattctgatggtgatgatgatgatgacaagggattacatgatcctgagaatattgattttgactccgatgatggtgatgagttaggtaaagatggtggtgatgctgctggagttgttaagattgttagtgatgttcctactactaatgtgaatcaatctgagactgttgcaggcagtgaagagaggactaaggatgttgagaatgttaaggccaaagagtctagtttaaagggggataatttttttcgatgttttaagccagcttgaaaatgatgatgaccaagttgtgttggctggtttagaggctgttcgtaaaatcaatataagtgtagcttaatttgtttggctagtaaaatatgttttgatttagttgcttcacagttttatgtttgttttgcaactttttctttttctgattttccaatttaattttttcaggtcccagaattaaatacaagtgttgctgttgaaaagacagctgccattccttctgatgaagaagctgatcacactgtttctgatactcctcttttggataagagaaagcgtgcgccggcattgaaatcgccttatgttgattttggatcggctaatgtgaggagcgctccaatagaggtaatgtcattaggccattaatcaggaggagatgagagggattttaagatggttacttatgtcaagggcctttatgctcttaacgattcatttgctgatcccgtctct

SEQ ID NO: 59193 - DNA, 946 bp, Cannabis sativa
gtgtacacgtggacattccaccatggcagttaatgaccaaaaatggatggaaatggctaagtgctaacagaacttgggtttaggagattttaccaccaaaattttaaaattggaggttagttgcaaaaatctaaccacttaaagaggttatgccgcaaataactcactctatttttaactttagttttgctcaagtgcatttgaggtattttaggccgtttgtgattttttttcaaaattttttaatcattttttcttttgtttttgctttaaaaggatttaatatgtacttctcgaccatccatattttaggccgtttgtgaatatttttttttcaatatctttttttcttttatttttgcttcaaatgaatctaattagtactgtccagccatctttcgtaattaaaattatgtattaacttttcttatttttaactttagttgatactcgaggacatttagggtatattaggccgtttttgatttttttttaaataaatttaattttttttgttcttttaaattgatccaacgagtgcttcacatctatccttcgcaaatgaaattaagttttaacttatcccatttttaactttaattaatgcttaatggcatttgaggtatgtaaggtcattgttgaatttttatccaattttttttaatcatttttttttttgcgtttgctttaaaagaatttaatatgcacttcttggccatccctcgacattaaaattaagtttctactactcctattttttagtttggttaatgtatcgaggcatatgaggtatattaggccgcatgtgaattttttttttttaatttttttaatctttttttcttttattttttcttcaaatggatccaataagtattgcccaatcatctttcgtaattgaaattaagttttaacttattctatttttaacttttgttgatgctcg

SEQ ID NO: 59194 - DNA, 1722 bp, Cannabis sativa
gaaaggtgtgaaatttatactgatcacaaaagtctcaagtactttttcactcaaaaacatctgaacatgagacaaaggctgtggttagagttagtaaaagactatgattgtgagatcatgtatcaccctgggaaggcaaattttgtggcagataccttgagtcggaaaggacctgatcagactttcaatatggtaataatttatcctcaactagcctcgaatatgtctagggaaaatattgagtttgtggtcgggaaatttcataatctgacatttcagtcagacttgttggagaggattagaatggcataacttgaagaccctgaactgaaaaccgagaagatgtcttagcaagcaaagataaggaccttttgatctctagtagtgggatgttgttgtttaaatctcgggtgtatgttccgagtaacattgaacttaagaaatgatgaagctcacactaccccctactcactgcatccgagaaccaccaagatgtatcaagatctgaagccctatttctagtggtacaatgaaaagggacctggcggattatgtaactaaatgcttaacctgccagcaaattaaagcagaacatgagcgaccaccaagattacttcagccattatcatttccagaatggaagtggaaagacattgcgatggattttgtggttggtttgcccaggatcacaggaatgtatgactcaatttgggttgtaatggatcgctttacaaagtcagcgcatttcttgcctgtaaaggtaacaaatacagtagatcagtatgttgacatgtatgtgaaagagattgttcaccttcatggggtaccaaagtccattgtctcagatagagatcctaaatttacatcgaagttctaggtgagtttacagaaggctatgggtactagtttgaagttcaacacggtctttcatcctcaaatggatgggaagtctgaatgaactatttaaatacttgaagacttattacgagcttgtgtcatggattttggaggtacgtggagcaaagattttcctctggttgaattctcctacaataatagttaccaaagtaccataagaatggctccctacgagctgctgtatggtagaaaatatcattccccaattcactgggacaaaataggagaacagaaatatttaggccatgagtatgtccagaagacaaatgaggcaatagataagattaaagctcagatgcttgcttcgcaaagcaggcagaaaagttatgcagatcccaagcgtcgggacattacatttcagctaggatatcatgttttcatgcgtgtgtcaccaatgcaaggaatcaggtgctttgagaataaaggcaagcaaagtcctaggtttatagaaccttttgaaatacttgagaaggttggacaggttgcttattggttagccttaccaccaacattatcagttgtgcataatgtatttcatattttgatgttgaggaagtacgtatctaatctaatgcatatcctaagttatgaagcattagagttacaaccggacctgtcttatgatgaacagccagtacaaattctcgacagaaaagagaaggtccttcgaagaaaaaccatagcattagttaaattactctggcaaaatagtaaagtggaagaggccacttgggaattagagtctgacatgaggactcaactgttgggttttatgccctaaataaaactccaattcaatgtaat

SEQ ID NO: 59195 - DNA, 2642 bp, Cannabis sativa
tttctgattttttttaatttaaaaaaagattgtttaattttttgtgtttaattattgggtttatttattaacggtagattaaatctattaatatcgttaaatttaacagaatattcttttatttttaaaacaagaaatgcgttttagatagaaacttttaatatataaagatatatatatattgtgttgggatgcttcttaatgattgatatgttcttgagaaatattgaaacaattcttgaaagagttgttgatctttaacaaaatagagatttgattgaagttacactactgaaacaactcaactctctcctatggcagatcacaaaaacttaactatgctcttaaagtatgaagtttgagcccctagtcttcttgctgattttgttttcgccttgttttctggaaaggttttcgtttttctgtaactgaagtttggtagctcctctttatgtatgagatgattcccaagtcctaatgttggtgaaaaaacgtaggcagtgaatgaagaagttatgtatagagaatgtcattatatagtgccacaactaggagatgtctcctacttttagagaaatgcaagaacatgaaagacctgaagcaagctcatgcatcaatcatcacaaccggtctaggcagtaataactttgctctgagcagagtcttggacttttgctcaaaaccacatcatggcaatccttttcatgcttggaaaatcttccaacacattcacaaccccaccatttgtatttggaataccatcttgaaagctttcttactccacaatgaactcattcaaactatacttgtgtatagaaacttgttacagagtgggatagtcccagacaattatactctcccttatgtgttaaaggcttgttctaggctgaaaagtgttcatcttggggagtcagttcatgggcatggcatgaaattgggtctagtatttgatttatttgtgggaaactctttgattgtcatgtactgtgagtttcgtaacatggaaggtgcacgatacgtgtttgatgaaatgtctagccttagtgtggtttcatggacggtcatgatttctgggtatgcaaaggtaggggaagttgacaatgcaagactgttctttgatgtggctcctgtgagagataaggggatatggggggcaatgatttcggggtatgttcagaatgcttgttttaaggaaggtcttcacttgtttcgtttgatgcaactcactgacatagagcctgatgaggccatctttgtgagcattctttctggttgtgctcatttgggagctttcgattttgggatatggatccacaggtatttggatcgtcttggtttgcccttaagtattcggttgagtacaggtcttatagacatgtatgctaagtgtgggaatttggatttagctaagaggatttttcatgagatgccacaaaaagacactgtttgctggaatgccatgatttcggcaatggcaatcaatggagatggagaagctgcactcgaactatttcgagatatggagaagacaggcgttcaaccagacgacatcacctttatagccatttttactgcttgtagctattcaggtatggcatatgaaggcttgaggatgtttgagaaaatgcgtggtgtgtacagaattgaacccaaaactgagcactatggatgtatggtagatcttcttagtagagcagggcactttgaagaagcaaaacaaataattcaaatagtgatcatttcaactaacccctctgaagagaaagtagcttggagggcatttcttagtgcttgctgtactcatgggcagactcaacttgctgagctagcctttgggaagctcttggagttagagagtggaagtggattttatgttctactctcgaacttgtacgcttctgttggaaaagatagtgatgctagaagagtgaggaagctgatgaaacatagaggagttgaaaagttaccggggtgtagcttgattgagatcgaaggtggagttcatgagttcgttgcaggagaaaagatgtacccatgaatggaagaaattcacttggttttggagcttaaataaacatttaattattcaaggtgctacacattgaatactattgtataatgaggctattgtttttgtttgagtagatctccattggctggctcacaattttgcatcatgatcacaagcatctttctctatgtttatttggttgagtgtaataacttaggagtgaaaaatcaacattataagattagatacagtgcatgttgcaaacaacccccaataagctcatcatagaaatttgcctgagggtggaatcaaagggtaccccaaaaagggtgtcccatgcccaaagaaccagccaattagaatccactcgagcctttggaatgtggatgattgggccacaaagcgtggtttagtgaagactaattcgagcaaggcacccttcacaacctcatacagaaacttcaaagccaataatgcttgtgttatgatctctgcctcatcttcttgtgcttcaatttcatcaaactctcaaactaattcaaatccatggctcaaccaagagttgaactctactggtgagcaatagctcaattgggttcagaagaattacttgatctacaattactgcact

SEQ ID NO: 59196 - DNA, 2638 bp, Cannabis sativa
  modified_base (349)..(378): a, c, t, g, unknown or other
  modified_base (1119)..(1130): a, c, t, g, unknown or other
  modified_base (1736)..(1743): a, c, t, g, unknown or other
  modified_base (1798)..(1803): a, c, t, g, unknown or other
  modified_base (1859)..(1889): a, c, t, g, unknown or other
  modified_base (2306)..(2309): a, c, t, g, unknown or other
attggacttattcaattaataataattatttaatgaaaggttaaattcctctcttttgggtcttgtgtgagagttagggagccaatagtagtgagaacgacatactggacccaaccctctctcacatgaacaacgctaattgtaaagactcattttccttaattatttaaataattgtattaggatagttatattaggttaacctaattaaaatttaaatagcaacataattaattttgaaataaatgaaattaattttacattagattattttagaattaatttagaaaaaaatacatttagtttaaagaaaagtaactagatagtaatttctagtaactaatttatnnnnnnnnnnnnnnnnnnnnnnnnnnnnnnatatttaagttgaaaattaattctaattaattttagaccaacttaaattaggacatttttcttacaacttaaattagaattaataattaagttggttttattcaagatacttaatttttaacttctatttcaagaaattaaattaattagaaaatatatttaagttaaaaattgatttatttattaattttagaccaatttaaattagaatatctttcgtaggtattaaactagatttaataattaagttgattttagatacttaattattttttttattttaataagtttaattaaatagaaaattatatttaagctggaaatttttaaatttcagatcaacttaaattaggataattttcataatatattttattttattttaattattatttttttatgtaaattttgagatacatttatttcaattgtagatattttgaaattttcaattttgaaaatttgattaaagttgaaaattaatttgttagttaattttagatcaacttaaatcaagtaaaattttcattaatgattaattaaaatagatagactaaaatataattttttttaattagaaaataaataattagttcatgaaatatctagatagttattttctaagtagactttttggtatttttctagatgtatttagttaaatagaaaattaatatttaagttgatttgttcaaggcacttaaatatttgataattttcttaagaaatttaattaaatannnnnnnnnnnnttatgttgaaaattaatttatttattaattttttatcaatataaattagaataatttttccaagtttattttattttattttaatgggtaattcgaaaatatatttttaaatacattagatttcgaattatgattagagatatatatatatatatttattaaaaattagctttaagttaaaaattattcttaattaattttagatcaacttaaattaagtaattttcataaaatttattaaaaaaattaatactaaggatggaaaataaatttttattttcagatctattcgggtatgtatgtaattttattaataaattaaaatttatatttagagttatgtaaattagtaattttaattaaataaatatattaatattaaaataaatatattaaaatacatatcaaatgaaaatacaatcctttaaaataacgagctttagtttaaggatattcgatctccattgttggttctacatagttcttgttttaatgagattcattcctaatagatgttcattcattagcaatttaacaccgtagaatctgaaaagataagtattattgtaagtgttttattcttagtaacgatcaccccaatagtgnnnnnnnngagtagggcttacaaagtatgaaataatattgaaagctcataagatagaatggcnnnnnntctcgcctaaacgggacaacgccagattcttgtcttgatcaaataaaaggttgctnnnnnnnnnnnnnnnnnnnnnnnnnnnnnnnctctattcaatgaatgatatctttcactcttgcctaaatgggacactgtatcagtttgttggaaaccttagaattgatttaagatgtgtttattttgtattttcacatgtctttattatgttctaaacttataataatttcagatttgtatatgaatttatattgaaccttcattatattttctattattaattattgtagtaccgatttcgagtcttcactattggtctaacataatttgttgtttttaatgggacaaatctcaaaggattgtcatccgttagacaaacatgatagtgttagatcttgacagattaatatttttaaatgcaacatctagttaactcatcaaaatattacaacttagactagtgcttacaatatgaaacaatgaagaaatttataaaataagaatannnntgactctcgcctaaacaggacatcattagattcttattttaatcgaaattatcttttagtttttcctcttagcttattcattaagaaattgcttaggtagtatgtcattggacaaaaggattataagtcatttgcttatgatgtcattctattttcttttatgaaattgaatggcgtagataactatattctagaattctatcccgaaatgatataatccttgatcttggagagtctcctacttgtataagcttaataaaggaaatctactgttggaaatattttaccaggatgtagatttactaccatgtatgtttcattaacatcct

SEQ ID NO: 59197 - DNA, 794 bp, Cannabis sativa
accatctgtttgaggacaaaaagttgtactgaacttcaactttgtagccatggctcgttgaagactttcccaaaacttggaagtgaacttcaggtatctatctcaaacgatggacttcggagccccatgcaatcgtactatttcttttacataaagttctgcatactgatctactgaatatattatttttactagcagattgtgtgcccacttggtaaaccgatccacaactacccatatggaatcgaacacacctgtggttctggataaaccaaccacgaaatccatagtgacaacctcccacttccatttgggaagtgttaaaggctgcaacaatcctgcaggtctttgatgttcagccttaatttactgacaagttaaacatctagtcacatattccaccacatcttttttcatactgcaccaccaatagtagggtttcaagtcttggtacatcttggcagtatcgagatgtaatgaatatggagtggtatgaacttcatcaagaatctcctttttaagttccgaactattcagaacacaaattcgagttttataaagtaacattttgttacccgacactatgaaatctttagcttggccaactaagacttcttcctaaacgcgtaccaattctgaatccaccaactaagcagctctaattctttctaacaagtccgattgtagtgtcaaattactaagttttccaactacaaattcaatacgaccatgtcatctgccaactgaggtgagatcataatcgtgctaaatacttacccgagacctttcttgct

SEQ ID NO: 59198 - DNA, 826 bp, Cannabis sativa
  modified_base (461)..(464): a, c, t, g, unknown or other
aggattctattaccaggtaaatgcttaagggaatgctgctattacataaacacagaagtttttatgttttctttctttatttctttttgtgtagttattttgttactaatacaaatgaagttattgtgttattaacagactcggggtttaaagcatgggagggcgattgtggtttctacatgtgctgctgtggcatcgattgttaccggtgtgctagctggaatgctcgctttgggtgagagattgccatcagcgcccacagcccgtttatcgcttttgcttggatggtaaatttagataatgattaatacgaattcttgaaagagtaattcggcagttcatgctaaatttatcattcatagacgttgataagataagatctttccatttagtagcaccttggggaagcgaaattcccttatgttttaatataaacccctaatctctctctctctctctcnnnntctctctctctctctctcttgtggcaatactctcttaacttcacttctgtttgcaaatttgaggctccagctgaaattccatcgttaaatgctggctggattgccactgtggaaacctgtgtgtatgttgcatgattggattcgagattttagtgtcacatatacacaaaatttaactggagcctcaaatttgcaagtaaagataagagagtattgtcacaactttgattgggtaaaatgtggtccatacatattgcagtctcttgttatttggccataaatgtttatatgtaatacctattgtatagactcatgtgcacttgtcatgccttctgttttttttggttaaaattccagaaatt

SEQ ID NO: 59199 - DNA, 1112 bp, Cannabis sativa
agttttaataaacatattttattattaataatttttaaaacattaatataataaacataaggataagatattacaagcatgaattatattaatctatttatgatggtaattagttctatcattaataatttatattatttaatgattaaaatgtatggtttcatataataagtttttaaaatgtataaatttttaaaatattttttttttgcacattttttgtatttatattatttttgttgtacatttatgaaaatagctctaaaaatttttgagatgcatgccattgctaatccttgtgaattttgataaaattgttccaattctaattggagtactttcatcattcaatgatgcatccaaatttaatttaaatgtgccaagtggtggagtaattcattttgatgttgatgtacaaatagaattctcttttaaactggcagctcgctagatattactgaatttatcaaagaggacttgaattctagaaactatagtttgaggtaactaaattggtggccatgaactacttgattttgttctccctaaatatacgaagatgccacaagaaataatttaaagtctgattgtgataaaacttgtgatggtttaatgattattaattgaaaagaaacttctatggagatattttttaatacattgaaatttaataatttacacaccttctaaaaactattacacacaaaaaatagcatggttattggtatcaaaattgtaaccacataccggacagttagaatgggcaataatatttcttttcttcaaaccaatattagtaggaagtatgtcatggaaacttttccaaacaaagtttaaaatcttttaggtaaatccatcctccaaaacctcttccaccaaactaaaaacacatccttagaaggagatggttcagacaaatcaaaagtagaggctacaacataaccacttttaacggagtaagcaccatccaacgtaaaatagcaaaaccaagaatcatgaaagtcctaattactacaaattctaattgattaatctcaacagattatttctaagctctgaacagaatttaaaatcaaagaacacagaatttacaagcttcctctgcattggaa

SEQ ID NO: 59200 - DNA, 603 bp, Cannabis sativa
gtactccattcctagaacaaatagaagcggagacatggggtcaccctgtcggagacctcttttcccttcaaagaagccatgaagagtcccattaaacattagtgagaatcgagcagtgcgtacacaggtcatgaccaactgagtgaacctcccaggaaattgaaaagcttgcatgatctcttctaagaaatcccattcaagtgtgtcatatgctttctgtaaatccagcttaatcatacaccctggcggagcccctttcctcccataatgtcgaattaaatcctgacatatcataatattgtgagcaataaatcgacctgatacaaagcctccttgattctgtgcaatcaaatctggaagaatagtcttgagccgagaacatagcattttggtagcagtcttgtagatgacattacaacacgcaattggtctgaagtcttttactgtattcggacacttgcttttaggaactagtgtgagtacagttgcattaatttctttcaaaattttccccgagtgtatgaatgataacactgcttcagaaacatcatccccaactatgtcccagttatcttgaaaaaagaagcttgaatacccgtcagg

SEQ ID NO: 59201 - DNA, 719 bp, Cannabis sativa
aatttttagaggtattgaaattttatgtagagtcattttttttaataggagttattgtttcattttatatccatacttaatttatttccttatttatttatttttataattatttgtcaaaattattcatatccacaaaaaaaaatattttttggtgtatatgatatgtacaacatttttttttttttgcattattttttgacttcgccattaaagaatttttgagccttaacttctatttttcttttaaaagaaaaaaatatcaaacctcttagttttgattatagtttaggttttatgataagcaatttttaagaacttttttttttttttaagagaatgatagtatttttaacaaataattataaatgtaaaaaaaataaataaagaaataatatttaatagacataaaataaaataatgacacatattaaaaaaaataactctacagaaagtcatttttaatacttttactgaagcattatcctatatatatatatattaatatttcattaaaaaaatatatattaggtatatataagaaaagtatctgaattggtttagtttgaaccgctaacgataattccaaagatgtatctgaattaaaaaattataaaacggtccaaaataactaaagtgccgtttggtaacacttttgttttctaattttttaatcccaaaatgaaagtaaaatttttgtttttaaaaattttgttttt

SEQ ID NO: 59202 - DNA, 1758 bp, Cannabis sativa
gactagatgcaatcaaatggtaatgtcttggatattacattccgtatcacctgaaatcaagagcagtatcatgtatcttgatactgcttctgagatgtggacagtactcaacaaccgcttcaaccaaggaaatggtccccgaatctttgaattaaatgagtccttgacttaccttcaacaaggagaagaatctgtcagctcctacttcacaaaattaacagccatgtgggatgaaatcaaccagttacggcctcgaataccctgcacttgtgcagctgctgctcaatcccacgatcaccttcatgatcaagttttacaattcctcaaagggttaaatgagtcataccatgccatccgagaccaaatcctccttcttgacccatgtccctctctcaataaggttttctcaatggtcattcatcaagaaaggcaaagaaccttaggcactcgaaccccacaacccctcactgcagctgcaactcataacagcaacaccattcccacaactgaaacaaatcccatggcaaatgcatcttccaagaacaaaagacctaggcctcattgcactcattgtcaaaagccgggtcattacaaagacaaatgctactttcttcatggttttcctcctggttatgggaagccaagaaacaatgacaccaacactactcaaaatcgcaagaatgatggagcttccacatctagaaacacccctcaatcctcccaagtttctgccaacacaactgagcaagcaccactaactcatgctcaatgtcagcaaatcatttccatgcttactcagcaacttcaacccactgatgcttctacctcagatgggccaaacatcaacaattttgctggtaaacccgatccattatctcctctttcctggattattgatagtggtgcaactcaccacgtttgttgcaacattaattgtttttcttccatacagaaacctattactaatagatctgttactctacctaatgcaacaactgtcaccattgaacttataggaacagtcaaaataaattctgctataaccttatacaatgttttatatgtccctaagtttaaactcaatttactatctgttagtagcttaatcaatgacagtttttttcatttttatttcactcctaaccattgtcaaatccaggacccttctcggacattgaggattgggacagctgaaaaatacggcaagctttattacctgcagcaagacaaacttcacagtcatatttcaaattcagttttatgtaatgtaaacacaacaaatgaccaatggcattcacgcctaggccatccatctgtactcattaccaacaaaataaataaacaactgaattttcctcctaatttcagcaacaataatgactgtcccacttgccatttatctaaacaaaagaaattgccttttgtctcacataataatttttcccaagagatatttgaattaatccatctcgacatatggggaccctatcacataccttctattgaaggatacaaatacttcctaaccattgtggatgaccattcaaggcacacatggttatatctacttcgagcaaaatctgacgctcccatcattattcaaattttcttcacttttgtacaagttcactacaaaagaaacattaagtctgttcgaacagacaatgcaaaggaattaacattaaatactttttatactcagcaaggaacaacaaattttaactcctgtgttgacagaccacagcagaatgctgtagt

SEQ ID NO: 59203 - DNA, 816 bp, Cannabis sativa
aaatgccgttagatagacacttttaatatataaagataaacacaaaatttggcaaaaataataagaagtttggggtgtaaattgttaagtttgatttttctttataaatgaaaatttaagtcatatttctgtaacttctgcaggaagttaatgactaaataatagtccctaattagtttatagattattaaaattttattattatttaaaaatttatttaaatatatcaataaaaaaaatgacacatagatattgacttagcacttaataactaggtatgaggtatctacgaaagtttcataccgtaaaaaataaacttaggtatttatctataactgaaagttaaatttaaatatttacgctactaattaaaaatgtgactttatttttaaaaatattttgagaattacaccatatactattttttaattttttttttttttaaatttacggtatgagttgttccggtggtttctctgatagtttctatatgagttgctatatgaattttgattgcgatttaggttgcttcgttagttgctatagggatttttgcgtgaaatttcgtaaaactacaaaaaaaaaaaactgttttaaagtgtaaaaataaataaacctcaaaatattttcatttagtaagtttgtattttctttaaactatgataaaataatctgttaaatataataaaagaaaaataataggtaaacaacaagaattttgaagagatatatatgctaaaaatcctttaatattttttctccaaaaaaatttaaaaaaatacaaatcctttaatctatgtccattattttctactt

SEQ ID NO: 59204 - DNA, 1406 bp, Cannabis sativa
tccaccgccacccgaaccacctccgccttggctaccaccatgtcctcctccaccaccgcctttccctcctccttgactaccaccatgtcctcctccaccgccaccttttccacctccttggctaccaccttttcctcctccagggagattggagtctagcgtgttggcgtcacctggtatcgtttcttttgcttcactcttacctgaaaataaataattcgaaaaatgaggcacccgcgcgcgcacacatatataacttatttatgtattttaacaaataaaaacactttaatcaattagacgaaaattctttacacaccaaacgatatcataatataattgatgcgtataaaaaggatgattaggattattagcttcaaattttaaattattattattgcccatcgccttgaattagtgtccgtacgtacatttcatgctcatctttattataatatatatgaaaccaacttcatatatgttatgtatatacagccatacacacttttaattatatacatctaatagcctttgtgtatagaaatttaatttagacttcatacgaatatgaatgtcgataaattactagctagaataaaaaaacattatgcaataaattaatataaaaatatgaatgtcaataaacatgttacatctgatagtaattctcctgcaaatgatattaaatatatatgcaaaatccataaaaatgggtctatctattgaaagttgataagtacatatataaaatattcatacacaaattttacacgtatgtctatacactatatattgtaaactaattaatataattatttgattataactattattattagtttgttaaatatcaaatttgataagaaagtataataggatatatataacaaaatgaagtgggagttttcggagtatattcaacctttttttccatcatcataaatctcgaacgctgtagatatgacgagaagagcagctaaaagagaacctaagacaagaaaagttctggacctcatttttgttcagggtatatactaattattaatgatatttctttaagagacaaagatctacaaggctggttctttctgtagcatgtatttatactaaacttaggtataaaacgacaccggccgcttgctatttaaaaggtagtgtcgtttagtgcaccgatatactagttagaagttggatatatttttgtgtgtatactaaaagacatgttgttgtagtgtcgacagatatgcagatttagctgcagagatgtcttattcctgaagtcacacgtgtaatgtggtgcatgcaagacagcacctgggaaagtcatcaactgtgattttggagagacgattagtatgaagaacattcactacttgttacctacttgttggagtttttcttctgtc

SEQ ID NO: 59205 - DNA, 1006 bp, Cannabis sativa
  modified_base (482)..(484): a, c, t, g, unknown or other
acgatatatcatagtagagggaattatgtacagaagaggattctctatgtcgtagctcagatgtgttactcaagaagaagctgcacgaagcctatctgaggtgcacgacggatttcgtggaaatcatgcctatgttaagaaatgtgacaaatgccaaagattttcgaagataccttgagctccgcccaacgagttaactcagatgcaaagtccgtggccctttgccatatggggaattgacctgatcggacaattacccaaaggcaaaaggggagtgcagtatgcagtggtagaggttgactacttcactaagtggagggaagtcgaaccactcgacactattacatcaaagaaagttcaagaatttattgtgaacaacataatctaccggtttggattgccgtacaaaatagtttcggataatggcaagcagtttgacagataatccttcactgatatttgtgcgaaccatggtatcatcnnnagtttctccgcagtggcacatcctcaagcgaatggtgaagtcgaagcagtcaacaagaccttgaaggatacactaaaaaaaactcgaagatgccaaaggaaattggctggaagaacttcctgaagttctatggtcatatcaaacaactgagaaaatggcaaccagacagactccatttgccatggcatatggatataaagctatgctgcatgtagaactcaaaccaccatcccacaggagattggtgtacaaccaagatacgaatcacgtactcctggctgaatcacttgatgaaattgaagagaagcaaaccacagcaaacttaaagttgatagcacatcaacaaaaagtagctcagtatttcaataaacaagtgaaggctcagaaattttttgtgggagatatggtcctaagaagggtatttctaaacacccaagacggtacgacaggtgtactcggacctaactgggaaggaccctatcaggtggtcgaagtcctcgaatctggagcatacaaattagg

SEQ ID NO: 59206 - DNA, 2177 bp, Cannabis sativa
ttttgtgctgcaagtgcacatgctactgcaacctgaattataataatataaaagggcagagtaagcaagcttatgacaccatacaggagagaattattaggattatgaaatacttctcagtacattgtcattctaacagcttcaaacaattctaaagcagctattcggaacgaatatttgtgatggggaaagtgactgaaatgaactttggagatttatgtagcttttaatagtccaaaagaagactatagacagaatagatgtaaatcttatgtcttgcaattaagatactatttccttcccttttcttttattagcgatagccaaaattgaaatcaagacaagtaggaaaaacaacagctgatgcttatgaggaaaggtaaactttcttcaaatgaaggatatcaccagcagtataaaacagaaagtccatcctctaatcagataacttggtcaaacagattagtggataatactaataacaattgcaagctaaaaaatggattgattctctccatttactttagttttcctttcctgtaatatggttgtggcagaaggccttttcttctttctctgttgtattctctttctttgttttctttctgatttcaggtcgtggattccttattagtaagaggggttgatgcttatgatatgtaacagctgaatgatggtgaaaccgattggaatggaataagataattttgcaaggttatcagccaagacaagaataaacatgtggggttatatttcccactgacaaaaataacaaaattgtttaaaagcaaatgaaaatattatgtcaagtaaaattacagcttttctagagattttgtttttgtaggaaaaaaaattagttagctttgcagggaatctaagtcaatcatagaaggtaaacttgaaattttcaatcatgatttaaatatttggttatcttaggaagaaaagagatataaaactgattttataatacttacaggcatcgctttactggattttcccccaaagccacctccaacccttcttgtgataacacgaacattatgtccccgtacacttaaacattttgcaatagcatcgtgtgcaaattcaggaaactgaattgagctataaacaaccatgcagttgtcttcatctggtatagcaagggcagtttgcgtctccatgtagaaatggtactgtgaaggaagcttgatctggtaaaaatgaaactataagttaaatactgcgcaaatatgccaaatcagtgttcatgcaatattctctctctcccgttctttttctcacaatgttgtattacatttgatttcttctaaatagatgggcaataccttagcagacataattttgtgatcagcttcagccattccttctaatgcatcaccaacttgctttgggtaaatggaagtaggcacttcaaaaaaactagatcttctaacagcctcatcaacagataaaatgggtggctctagatcttctactccataatcgaccactgctaactccgctaccacatctgcatgtttctgagtatctgcaacctaacaaagaacacatatctcaataaacaaagaagattgatatgcttgcaaatctacagagtaaaattacagttaattgaagacagccattgtacatagagatgtatagtgggagttggagttaccacaaaagctagacgctgaccagcacactcagtgagatcatcagcaaataaaggttcagtaccaaacaaggtcttggatccaatgttctccccaccttcagggatatctttaacagatataacatcaactactctactgagctgttgatcaggcttgaatgttatattcttcactcgtgcaaaaggttctgtggtataaatgaatgccccatacaaacaatttggtggtgaaggaatgtcatctacatatacagcctcccctatgcagattatcaacataaatgagacgaattagctgttaagaaaaaggaagaaatatcttgaagcaattcaattagcagtaatcattgagaaacataagaggaattagtcaaaagaaatatttcaaagcaattcaattagaagtaatcacaagaaacattagaggaacaaagacacaccggactgtagttttcttgacaatgtaattattaaacaaaaaaattagcatataggaagaaaacaaatg

SEQ ID NO: 59207 - DNA, 556 bp, Cannabis sativa
atcaaccacatcatgaaatctgattaagaaaattccataagagagcattccaaccttatctattttatccttccacaatcgtctcacaaaaccatcaatcacatttaagggaggattagcacctagtatatagcatacaagagatgagttccagaattcacctcctcatgaatatcatctagagtatcttcacctgactggtattgttggtatgttcgaaggttgttgagaggtttcttacaacattcccagatcgcagaattgggggagttacatgaactcctcttttcatctctttagaacacctacgattagcctccatgaagaaattgaaatcccgcacaacctcttcgttctgcagaattgtgttcaaagaggttctgggcgatagagcctcctgaaaacaacctgtgaagtcgatttggcttgtggagatttcagagtacaatcttcttcctcatccgagaaatctattggttcaattcccaaaaccttatccattgacttagttttccttatatcaatggacgacgaaggaccttttttcttctttttc

SEQ ID NO: 59208 - DNA, 627 bp, Cannabis sativa
aaaggggaagattgacaaacatgatccatagcagcatttttttggtgcagcagatataacttgccacatcttttagctatcccaatcacgcgattctgagaatactcctggatgatacacatatcaggttttgaaataaacaagattattggtgtaatcaacataggtagtaacagaaaagagattgatcttgaaattaagaacatataagacattatgcaaaaatatttctagtgttaattgaacatttccaatggcatggacaaggatattagtattattaggtaaagtacatgtctaggaaatggaattttaaagaaggaagtaaaatgacctatattggagcacatgtggtgagtagcaccactatcaataatccaagatttagagagagtagtataggtgtaactagccatattagaagcatcagtagggatgtgagggtccgtgggggggtgcattctgattgagttgttggctaaggagtgatatcacttgctgacattgagttgacagatcaatttgaatctgagtagccgaagtttctgtggaagtaagattggcagaagcttgtgttaggctaaaattagtctaagtttcgggtcatattttcggttagttttcact

SEQ ID NO: 59209 - DNA, 863 bp, Cannabis sativa
  modified_base (551)..(562): a, c, t, g, unknown or other
gctttgtacatccttgtgtttctttggggaaggcatgctcaataaggcctgtatttttttcgggtttgcctctatcccacattgaataacgataaatcccagaaattttccgaatttgacgtcgaaggtacacttctttggattaagcttcatcccataccttcaaaccacttcgaagcactctgtgaggtcatctacatggcccatgcatattttagatataactagcatgttgtctacgtatacctccatatttcttcccaggaggcctttaaaacattcggttaaccattctctgataagtggtacaagcattttttaatctgaaaggcatgaccaggtaacagtataccctcttgtgggtcgtgaagctagtacattcttgattcgtgacatgctttttaatctggttgtacccggagtaggcatccatgaaatatagtagcttaaatcttgaggtggcatccaccatttgatcatttcgaggcaacgggaagcaatcctttgggttggccttgttaagatcagtgaaatctatgcaaacacgccannnnnnnnnnnntttgggtaccaacaccggattagctagccactccaggtagtatacatcccggattatgccagttggtaacaacttatccacctttttctctaaggcatctgcctttcctgtatcaagatggcgacttttctgctacactggaggcatgtctcagttaacattcaggacataggtaaatcacatgggggcttatcccggtcatatccccgtggaaccacgcaaaaatatccgtggctgcccttcacgtttcaatgatcttacttctgtcctccggctccaggtttttccctagccggatgac

SEQ ID NO: 59210 - DNA, 1265 bp, Cannabis sativa
tttagggttttctatattaaaacacttttaggaatatgattagatctgtgatttatatttcttaagtgttttataaaccctaacacatatctcatatgcaatcatcactatattaaaaattattattattaccgtatcttatttgtatttgtcactatatgtaacccactattatcagcatattttacttgtagtcgttattattcttcctaataatatatacataaaacatataagataataagtactatttatatataaatagataataaataagtttgaagatgttttagaataatcacttgaacacaatttgaatagaaatttatagtctatatatgtttgaataccctaaataatataaatgcatgaaggagagagcaacaaaggacattatcatttgtaaagatccttaaagaaaaatatatacccaaaacactaaaacaaattgagtgaagaaaagaaagaggtgagattaatgactaaaaatgtaatagaataatagttagggttaattaattagtatatttatacttaatattttctattttctaaaaaaaaaaaaaaataaaatagaataatgaatatctgataacaatatgtccagtaaattattttattaatttaaaagcataaaggttaaatatctattacaattagaatttaaaatttaatttaaaaaatatagattaaaataaatttttgaaaaatattgttttcactaaaagtatatctaaaaaattgtatttttttttttttaattttcttttaatttttttggtaaaaatatcagaataacttgctataaaattggtaaatttcattacaacacaaattattgttaatttttttctaaaaaaataacattaattaattaatttatttaaataattactaaattaatgtattaacctcatggaattgtttttatttaaaaatataccattctatttttaaaaattaattacatatactttttttagaatgaaattaaaatacttttactttatacaatactaattaatttataattatgatgaatcatcattctattacaatgtatgatttaaattttaaatatttatattcatttgataagtaagtttatttattataagttataaatatatttctttcaataaaaaatattaaagtatttaattataatcaaagaaaaaaaaaaagcaatgcaattttattctttagttgaattttctacaaataatattacaaaaaagttttacatacacacatatatatatata

SEQ ID NO: 59211 - DNA, 2359 bp, Cannabis sativa
cgtaattagttaatttaataattactgcgaaagcttttttttttttttctcttctgaaaataagaaaagaaaaaccattgctttgtttggcaaagcaaattattagtaaatcgtgttactacgtgtagaggctcttgttgtattaattgaaatttaactaaaactcaatctattaatggtgtcaatgaccaaatactgttcattaattatatcaaaaattaaaactcaaatgttgatatgaatttttaacaataataatacttaaggaatttatttggcacttaaaaacaaaataatttatttggtggactttgttctctacaattaaatttagttccgacttaaaagtagatgccaagtgcaacccaaattttattttagtcattaaatatttgattaattaagatttttgtcttttaaatttgacatatattaaatcatgttccctaaaattttcatacagctaaaaattctcattaaaattattaaatttaaaaatttttattcaattttagtgacggaagcttaatgtagatgaaagtttaagaaacataatttggtacatgtttaaatttgagagcacaatttaacagatatcaaaattcgggagacacagtttagtaaataaacaatcgtttagatagaattccttaaatccaacaatctcaataattcatgaaaaaatttgaatgacctaaaaagttagagggcataaaaaaaaatactttggtggactcaataattaaaaaaaatcataatcactgaaaaaaaaaaaaacattaaaagataaacaaaaagatgatgataacattggtgttcagatattaatggcccaaaaaatattaaaatacaacaaaatactaacattcgttatttatgccacatgaagaagccagagttgtgatgataacaatggtaagttataaaacttccggctgacagtactatatttacgtggatagagtgaaaaacctctagttaaaaatgagagctacatacatagaatctttgaatgtgtgatcctattcatagttcattacttccttaatggtaacaaatcgacctttctctattgaaagttgtgctgcagctcctatggcaactgagattaacccatcttccaaatccacagctggagctttttcaccttttgctcttattgcgtacaagaaattcaaatgttctaaatagctagaaccatggtgaagtccatcatatctgagaaataaaggatataaatattatcatcttatgaaaccaaatatatacactgacacacatgtttatggaattctttcacaactcacttgattcgatcgtcctcagcttttgaagattcaacaccagctcttcctgctgctcgagtcccgaaattgacaatgctttcaggaacaaaggcctctccctgtaatctaagcaaaagttttgatttcatgcatagtattggtaattacattgaatgaaaaagacttcttttgcataccttcccaatgtcaccaacaacagatatttcttgctcatttttactcccttcagcaaacatgcaaaggtccagcattccacgacaaccgttatcaaattcaacaataacatacgcgttgtcgattatatctggcacctgaaccagcaacttacatcagcagaacatataacatacaaacaaataatgagtaaccaaatggcaactatagggcggtgtgcattgtctgatactacttgggtagaactcaccattcccatatacttggccagtgtggaatactaacaatacaccctcttttggagccagcgtccacagcagcccactctatggttgcctactctttcgcgaaatcagtcccacttgagggtgcaggactctgataccacttgacacaactacttgggtgcataactctttcgtgatatgggtcccaaaagttagcctaagggggagggtaccaaaatagttatatactattaactaatctcatacttggtgaatgtgagaatacaaatatctcgatgggtttgccctgccataccccataggccttgacaggcctaagtatgatgttggttaaactgtattatgatgagaagttgaaaactgaatgtactaatctgtaagaaccacatcattttacctttccatcatatctttcatccttgtgattaacatcaatagagccagaagccatgacacgaataggatttgctcctgcaaagagcctcatcagatcaaagaagtgacaacacttctcaacaagggtccctcctgtattaatattgaaccggttccaattgttgacctgatacaagcatgattgaatgagatcaattgtataacgagaagcttaagttgcataagataaaaaaa

SEQ ID NO: 59212 - DNA, 846 bp, Cannabis sativa
tatagagagtgtgtatatggcaacccagtcgttaattccgtacagaaagcccgagcccatgaagaaagataccaacaaaagggagatgacaaaattttgtcggttgaacggagactacggccacgacaccaatgaatgttacaatctgaaacgggaaatagaatttttgatcaagaaaaacaacatgcacctgcagaagtatgtcaagaccaaccaaggtcaaaacaaccaggatgtgctacctccacccgtagatggacacttacaagtcattattggatgcctgcacatcgctggagattcgggaaaagctcgggagaggtatgcccgaatagctcagtacgagcaagaagaattcatcctggccatggaagaaaggaagcccaaagttccacaagcaggagagccaaccataactttcaacaatgaagatgttgtcaagattatatttctgcacaacgacctgctggccgtggaagtccagatagcaaatataatggtggctagaaccatgatcgacaatggagcttcttcaaacattctattcaagactgcttacgagaagatgggactccaattcgaggatttaactccatgcctccagcctgcttatggtttctccggtcaaggagttccccctctaggacaaatccgactaccaatcacttttggacaagctccgacaagcataactatcatggcacagttcctaatattggatgttccttcagcctttaacgtaatgctggggcaaccagccctgtatgacttaaaagctatcacatcaatatatcactcgtgcctaaagttcccaacaaagaatggggtacggtgtcttagagggaa

SEQ ID NO: 59213 - DNA, 1183 bp, Cannabis sativa
attttattaaaataatattctttgattttttgtatttacattaaattgtttcatatttaatgcttagaagttataattttaaagcgaaggaaaatctactttttagtagaaaataattggtttgaatactggttaaattacgagaatcaatataaacataaatattttatatatacttaaattctgaacccttaataatatccccaaatatcactgaaaatatctgttactgtcatttttacagtttaaatattttattttattttattaccaaaaatctcaccattttcggaactaggttagagttgtaataacgtagattaaattagtattttctttgatttcacgcaattctcatgggtttgacctcgttcttcacaatctccatactacaataaagattcgtgtagttgcgagttgataaatgtaaagtgtaccactttcagtacacaacaaacttccaagtttctgcgtctcgctgattaggtgggatttcttttggagttataccttctatcaagaagtcagctaatgcttggcgcttgatggatgttcgaggatggtatgttatgtcgaactgccccagttcaatcaaccattttatcaatcttccagaagcatctggttttgataaaacttgtctcaagggctaatcggttaacacttttatagggtgagcctggaagtagggccgtagtttgcgagatgcatggactaggcataacgcgagtttttctagagggggatatctagattctacccctagtaaccttttacttacgtagtaaataggttgctggggcttgccctcttctcgcactatagctggactaatcgcatcttccgagatggctaaataaagaaataatgtctctccagttattggttttgccaaaactggaggcattgtgagatgcctttttatgctctgaaaggccacttcacactcttttgtcaactcgaactttttgttgcctcgcaatatgttgaagaaaggcacacacttatcagttgacttcaaaatgaatctgttaagtgccgccattcatcctgccagggcctgtacttccttaggctgtgtaggggatggcatgtctattaatgccttgatttttttcaggatttgcctcaatacccctcgcgttaactatgaatcccaaaaactttcccaaggagactccaa

SEQ ID NO: 59214 - DNA, 869 bp, Cannabis sativa
tcctgttttgagtatcgatggcaccttcttgaagacgaagtatggcggtataatgttagttgttgtggaatacgatgcaaataaccaattattgccggttgcttatggtatcgttgacagtgagaataacgactcttggacgtatttcttacaaaagttgagggtagcaattggcgtggttgagaacttagtgtttgtgtcagataggcatcaaagcattgatcatgttgttgaactttttttccccgaagcagtccactgtgcatgctatcaccatattgttatgaacgtgaactccaagtttaagactgatgcttttcacaaccaaatatttaatgtttcttactcatggttgaaaactgaatgtgatagagagtttgagaagcttagaaagatgaatcctgtcattgttgcatatgtagagagtatagggtttgagaagtgagctcaccctttttgttaaggcgatcaatacaacatcatgactagcaacgctgctgaaagcttcaacagtgttacagaagagttcaggaaatatccaataactactttcgttgaatttatcaggttcacactgcaatcttggtttgctgatcgcctcagaaatgtagacaaatgtacaacacctttggccacactctttgaaaaaaacttggaaaaaaatcatgaaaatggaaggttgaggcgcgtccaacgaaatggagccaatttgtataacgttggtaggggacctaatggtgaaagtggtggtgatgtgaacctagttgaaagaaaatgcacctacagcgtgtttacgttattgaaactcccttgccttcatgcatgtgcctccgcattgaaaatgtatacaagtgtgtacacgctttgct

SEQ ID NO: 59215 - DNA, 698 bp, Cannabis sativa
catacttgaggtatgagaaaaggttttaaatcataaatatgctattatttacttgtctctcatgctttcatggattttgacatgacttttggtagattgaatgtttaacttattttgactatatgaactttcatcttttaatgcattttgaaatttctatttacctattgtgcttaattagtataattcatatcttgtatgattaaagagaaaatatatttgtttgaccttgccttttatgccaccctttttgatgaaatcaaaaggaggagaaatattagaattaattattttggcattattcatattatgttttcaagtattaacaagtttattgagtatataattaaagggaagttttgtcatgtcaagaaaaggtaacaataaatatgcaaagttaaaacgatataagtcaatatattcatatattaagggagagctaaactcaacatgtttcaatttacttttcttttcctttaaaataatcaaatattttgatattatcaaaaatgaggagaattttgaccaaaagtcaatcactcacttattctgatgataaacaatatttgattattatttgctattaatcttttcttgatcattttacatacaaattcacaaagtatcaatatttgttcggtaaagtaaaacgtaatcaaagaagtagattcaacaagtatacatacattataagagca

SEQ ID NO: 59216 - DNA, 3277 bp, Cannabis sativa
atttttacattttaaagtaatttttttttttcatttttacgaaatttcacacaaaaaattttcaacctaaatcacaaccaaaattcgtatagcaactcactaaaaaatcacaagagaaattaccggggcaacccaaaccataaatttaaaaaaaataaataaataaaaaatagtatatggtcgtgatttttctttttcataagcagcaaatgaaacgaggccaattatattacacatgtaatcaacaattcttatctaagtaggtttgaatattttggtcaggtttgactcggacccggccaacccactcagactcaactcggtcaacccatttgtttgggaaaacctattttctatgagcggtcgggtccagcccggccaactcttttgtgcgagtttgggttggacccgtacccgcccacaaacttgggtggcttttttttttatccaacagcccaattattattttttatgatttaaaatatttaaataatgtattttttatataagattttttgtaaaaattatatgtatgtatatgtataacaatgaaactaaaaattaaaatataaatatgattttttatattattttgtttcttatatattttatttattaaattggagataaaaaatttaaggttatgtatctatgtgtatactatattagtgtataatcattattttataaatgcttatgtcttatatgaacattaaatgtataaatacttttttaatttaaatatttttataaatatggatataatatgtatggattatagtggacaataactagtacagtatgtattaatggactatgaagtatggactttgaatttttagtcacaatttattttaacatttttcgtttttatagtttaacgaatgatttgtttaatcattggatttatgtctctactttggatttgaaatattttttttattgaatgggtgaaaaaaaaagttgagcgagttaatcgggttaacccgttgattcggcacactcgatcaaccgaacccgcggacacgcaaacccgggagctcgaaacccgtgaacttaaatcctttgaatgggtaggttcgagttccatttttagacctgaaacccgtgaacctgaaatctagtcacccgcccaatgttaagccctacccgatggatgacacctacacttccaagacccaaaatcaactcacgggcccatttgttagacctaaacaaaggaatgggccagcccataagcaaagtcggactacgactctaggtcagctataaccatgtctcgataaagtcagacatctttgttcctggaaggatgactctcgttagagagggagagactcagagaaacacaactggatacccttaagggtattcctgaaggagtagtcgaagaggtatccggatgcagtcctacgtggcacccctttgataccagatcccacacaatgaggagtttatccttgtgttaaacttgggaaaggcgcacagcgcaaaaacaacatacattttgtccaacgtccactactttgacatttgttgtaagggatcggtggcacatggccacctgtcaatatcaaacaatactatgttatacgtttgacagtcacccctcaattgggcctcatatacccagcccaaagtcaatattataatatattttactccatctatgagcttattttcatgtacaaaaccctaatcggtctgggttcacctgagaacccagttttagcctataagatagggtgttatcccttcatataaagggttacaaattttggctagaaactctgcaaaaatttggcaagcactcttgtgcaaaatactccatagccgaaaagagtaataatattgactcgtggactaaggcgcattaatgctccaacctcataaaaatcattttcttctttatttattaaaaaaatttcttagcttaatctattattaatttgatttttaaaaatctctgtaaatattttagtgcttttattgacagctgaggaaagtattatacattgttatcatctaaaacattggttacaactagaaacttggtattcaagccaaacgctcatcaagatcgtgacgatgctattgatgacgacctaaattgtcccctctggtggacactcagacaggcgtcgcaggggatggtgaagcgtcagaagtagctacttgtctacctcgaaaaggccaacaccaagaaaaatacgttgaagagactcccatcaacccagatgaataagaaggctaagatgagggcccaaaggatgactacgacaaaagccctaataaagattatgaggagtattatgaggaagacccagaggtggtgagattaaggcaagtagttgcagaccaacagaggaagatggcggagtaagaagaagcaacatgccagatacaagctactctcttacagtttcaaaacatggcagcaaaagggaaccttaacgtcgaaaacccacaagtgagaaagtttaaccatcctagggttggaccctctaattcaaaaaatgacaaggggaaggccaaaatggcatagccccagaagaagaaatatcgaccaaggcttgcatatgacgctcctaaggacgacaaaaataaagtcaacccacttgtgcagaaagaaagggtcgtccatgcccaagggctagaccttttaatcgatctgcataccagagcttagtggaacgataggcacagtgcttaggtaccagagcctaacattgggggaaggaaaaaccacccccaatatttctattcactagatcccaaagatagcatgtcaatgaccaaggctcttggattttcccattaacactcaaatctcgggcatttgaagtattcatctgattcaaaagtttagttgaaaatcaattcaacttaccaataaaggttgtccaagcggatgaaggaggtgaatatagaccatttgaaagatttctcaatgaccaaggcatcaaattttaggttgtcttgtccacacacacacaaatgagcaaaatggaagagtggaaaagaagcatagacatgtcactgaaaccggtttaactttgcttgctcattctggacttgacatgacttattagtggcatgcattccaatgtgctgtctattctattaacagaatgccaacttctgtcattggcaacattagcccttatgagtgtctgttcttgcagcaacctgactacaaaattcaaaagccatttggatgctcttgttttcctcacttaaggccttattctcttcataaaatggagtacagatcaga

SEQ ID NO: 59217 - DNA, 1172 bp, Cannabis sativa
gggcataaaacccaacaattcaacgagcagatgtcgagcctgaactgggccaaccacaagctccttcagctggaacatctgtccaaaacccccagtaccttagtagttcaaattcgggcagtaaaagatctaacaacaacagcagacaaggcaatggaaaaaagggaaagttcgcaggcaaagccgaatagacccctagagagaatccttccaagttcactgctttctctgtcctgactaacgacttggagaccatttaaatggctactcagtcagtggttctgtacaacaaacctactcttatgaaaaaggacataagtaagcgggacatgtctaaattttgccattttcatggagattatggccatgacaccaacgaatgcaataatttgaagcgggaaattgaatttctgataagaaaaataacctgcatgtgcaaaaatatgtcaaggccgaccaaaatcaaaagaccccccaggcagacattaaccaagatttgttaccgcatcctctagtagacgggcatttgcaagtcatcattgggggcccacatatagctggagattcgggcaaagctcgggaaaggtatgcctgaaccttacaacacgagcaaaaagaagtggtcctagtcgtagaagaaaggaagccaaaaataccacgagtaggggaacccgctataacattcaatgaagaagatgctgtcaaggttcgcttcccacccaatgatccattagtcgtggaagtacaaatagctaacaaaacagtggcccaaactatgatagacaatggagccagcaaatatcctattcaaaacaccatatgaaaaaatggggctccaactcaaagatccgatcccctgcctccagcccgtatatggtttctccggccagagtgttgcacctttagggcaaattcgcctacccctcaatgttgggcaagctccgaagagcataaactgtgatggcacaatttttggtattggatgttccatcagcctttaacgtcatgttgggctcactagccttatatgactcaaaggttgttacatcaatattccatttgtgcgtcaagttcccgacaaagaatgaggtaggatgcctgagagggaatcaacaagttgtacaggaatgttacaactttgccctaatcaaggccaaaaaggaagaatcctc

SEQ ID NO: 59218 - DNA, 846 bp, Cannabis sativa
atatcttgaatgagaagttgtttgatattgccttatcaagattttggattcacttattgattaatgaaagtcatggaaaccaaaacactgtccaaagtgatagttggaattgagtttaacgtcaattcctcctcaagaacaatatctataaaaatattatttctccccaaactcaacatcctcaaaataataataaacttttctcgtttcaaacttgaacattatagtgtgggatcagaaaatttgtaactctttaattactataattccttgctatttttggagtccatattctttttatgaggcttataagacctcatcttaatcgaacatccacaaatagaatatatctatatgttagactattaatctaaccacaaccttagtttataaagaattttaacttatactttacttgatacacaattcaagatttatgttgcactcttaagtgtttctccccaaaacgagtttcatgaagaagaatgaataatcacacttctagccatgtccttaaataaatgttaattacatctctcaaataccttcatgttaggtttgcctaacattttttattggaagacaaaattacattcttttagtagttgtgcaaaataatcttagacgttacttacttgattcgtcttacctcccatggtagtattaaccaccatagctagtttcatcgactttaattttcttacgtagttgattagtcaactatggttttgaaaatttaaaattaataacgtctgaagattaatgcccttatgaacaaaataagtttcattagtctaaagacaagatactattattgatcattccatgaaaccatgaggaaagatc

SEQ ID NO: 59219 - DNA, 1073 bp, Cannabis sativa
catagcctatgctacataatccaatcgtcaaacactcacattttatcaaaaactcaaaaatcccaaggattcaatgccatttttggccatggaaaaacctaccaaaatgaagtgctaaaaacttcatcaaatttcaaatttcaaatttcaagcaagaaaattgcaagaggaagtgtagagaacctacccactatgtatatggagacctcaaagcttccaaggttattataattttttctttgtaaatatttagattatttcttttgtaaataatttattgttcctgtaatttaattttgcttgtaaaggaaaaaattatcagtgggatatattgtaaaatgtgaaaaaagtaatggttaggaaaaatatttttgggtttttggaatgtaattttagtataggcgtaatatttttggtaccgctgtgccaggtcgtcaacaataaaagtgagacccagactacacaagaaagttcctattgtatggacatacagttagaaacttgaagggtaaatgtttacccaaattttaacgacaatgacgtgtcaagagtagcaagatgtggcacaaaaatatcgagactaaattaatgaagaatatgtaaagtcatgaccattgggatgactaccaaccatgagggtggtcatgaccgttaatcatgaaaggtgatcatgaccgttataataaaaatcaaacggtcacccttacccctagcttgagtaaggtggacatctcaaagaatgaaaaatgatggagtaacgccttcgtaagcggaatgaacaatcaccagacacctacgggagttaaactagtctagggggtatatactactacccctacctctacaattatctatatggggtttagtctaggggtttacccctaccccctacaccctcaaggtacaagtcattcattttaccatagacataatgatattctcaaaggtatatggggatatccacattacaccaactactgataacggacaaggggtacgatgatgattgccacccctccaagttgggtctcggggggtcacccaacgatgacgatggtcacccccctcaagtt

SEQ ID NO: 59220 - DNA, 1253 bp, Cannabis sativa
gtgtttattttatcgtattaggaaattcatatttaaggtgttagattatagaattataatcaatatacatgttagtaaatctagattctagtaaaataacttccaataaagggaatagtaattacaatgaatggtaataaatgaaaagatttggacatccatatttatttattacatataacactcccccttagatgtccataataattgtctcattaaaaatctcgctgagaaaatccagtgggacaaaactcgatcaagggaaaaagagtgcagtacaaaattactcccccttcttttgtcattcttggaaatcttttaatcgacgcattctaatattgtaaactatcttctcgaatgttgatgttgttaatgactctgcaaataagtctgtaggattttcatttgatcaaatttgttgatcattgatatcaccattctcttaaagattgtgtgtaaagaagaattttggtgaaatgtgtttagttctatctcctttgatgtaccctccttttagttgagcgatgcatgcaacattatcttcaaagtgaactgttggtacttctttattggttgttaatccacatgatcctcgaatatgttgtgccattgatcttaaccatacacattctcaatttgccttgtgaattgcaaatatctcatcatgatttgagaaagtatccactagagtttgctttctcaactgccaagatatagcagcgtcaccataagttaacagataacctgtttaagatctagctttatgtggattagataaatatcctccatccgcgtagccaataaattgcgacccttaagtattagaatagaacaatccttcatcaatagtgccctggagatagcgaaatatgtgcttaatctctttccaatgtctatatgttggataagaactaaatcttgctaacaaattaacagagaaagttatactcttgtacagttagtaagatacatcaatgctcctattgcactaagatacggtacttcaagaccaaggagctctttatgttcttctttaggtcggaaagggtccttattcacatcaagtgatctaactaccattgggcttctcaatgggtgtgatttatccatataaaactatttcaaaatctttttagtatgatgagttgactgatgaataatgaaattttactttttaaatgctcaatttttaaactaagacaaaattttatttttcctagatctttcatttcgaactctttctttagatattc

SEQ ID NO: 59221 - DNA, 2471 bp, Cannabis sativa
aacggtaacaaggcttacaaccctagcgagtcagaagaagtctttgcaagtaagaaccgcgatcgacaccagatatacatcgtcgacctcagaagaaagaatggccccagctcactattgggatcgttgtaaccaagtttctgtcaagacatctccagatacaataataaaagacgtgtttaatacacgattgttttgacccaataaaagcgggaaaatcacagctatacaattcttaaactataaaccgcatttacactacgtaatatgtaatcaaatcccataattttatggataattattgtaaacatgttctggtcaactttgtaatttacagacctctatgtaattataaatagtgacagacaagattaaaaaagggacgaaaaatctcataaaagagaggccctaaaaaagaacacaatcagaaatctgaataaaattgactcgtgaactatgcagaattttaactacaaaccacgtaaaaaatcctgtgttcatatattattttttatagctttaatttttttttgtgtgacatcattaccgtgaggcattaacgaaaatctgtgttaacacttgccttcctttgttttgttttgctgtgttttgaataagaagttcctctttcgttcaaaaaaaaaaaaaaaacattccatttaaaaaaaaaaaaacaattagccattggtaagcaagtcctctttcacaagagattgaacacttccatctcaaaaactaaaatttttacagtaaaaaagtaattaactatatgcaccacattcatagagtgaggtcgaaaagacatacatttgcaacatcacttttatccatcaactaccacatatccacaaccaatagactccattctccacatagctttggtcgccgccccagcattggcactgccaaagtacagtgaaaaataataatatgacactttgaagataatgaaccactcaatagtaggagtggagaacagccaatccaatagaattgaaccgaaccaatcaatccaatccaaatacaaaaagttgaatatccaattacaattagattggattggatgctaaaagttggattctaattgtattggattggttattgcatgtcaatctcaaaatccaataaaaaatcgatccaatccaactacatttacgtatgttaaaaaattatttatatttattcaaataataaaaaatatttaaaaatataatatatattaattagatatttattgaattttttgtgttaaatttgtaacacttagttgtttgagtatttattttcatgatgttttattctattttattacttagaaatgttgttgttttaattattttaacttttaattgcattacacttgcaacgatgatatatatgtttatggagtattaaacttaaataaaagatattatttaatttttacctatttttcttcctattcgtaagttaatatgaaaaattagatatataactggatatccaattaaaaaaccgatctaatctaagaagtaattgaattggattagattttgagatgtaataggatttgatcggatgatatttttttaaatccaattattattggattgaatcggttgatcattgaatttattactcaagtttaatagctaagaactcaaagacaatagaagaaacatattcaaaaaatacattgcaacacaataacctctcccaaaggattcctaacaacccaacttgtactacaacaccctacaacctatcaaccacagcatctacattaatcatcaccgcacccatcacaagaggctggcacttacttctcggcctaacctcatacataagtccatcatgcttcctatcccaaaactaaacaaataatcagctacccaatcttaaacccgatctacgacaagaacaaaagttgtatgcaacacacaattttgcatatactaaatctctatagctaatacaataaaaaagaaaacctatcttttggtaccagtctatcactagacatgctttacgttgaaatcgacgattaagctattttaaatttaatgtaatcaaagagaataattgcaccagctactttccctgtaatataattttattcaaactttgcaccataatcatcacacctaattataatctgttatgttcggattgtgtattaggtcatattgtattatattatattaaattagattatatatcatatttttatttaatattatgttaaactttaatttatactaaaatattatatatttaggtatgcataaaaattaataccatatataattttttcataaaaaaaaaaatactaacatataattttatataaaaatatggcttaaaatacaatataatataatactatacaatacaatacgatataatacagcatacaaagaaactttaatgaattatggaaaaaatcaccacctatatatatactaggtgattgttacgtgccaagccacgta

SEQ ID NO: 59222 - DNA, 766 bp, Cannabis sativa
acggtttttattttacgaaaaccgtaactgactgcttagaaattataactgtataaaaccgaccgtacggtttttggccgttttcagtttggcgattttaagcagtttttggcagttttaggcagtttttagcagttttgacggtttttgggttaaactattttttattttaaaaaccaaaaacgacccccatgtcaaaaaaaccgaacctgaaactgaccgccaaattcggtgatgacgtggaaccgaaaattcggttacggtctggtcggtttgatgatcggtttcagtttttcgatttttatgaacacccctactcagtgttgtttaattatttgagtattccagtatatgctaagaaacttctagcaaatgattctaatattagcattccattcattcctagtagagccaaatcgtgattatttcaaagaaggtgttgaagcaaactattacctttgtcaaagctttcttatggaaaagttagcctatacacactctagtttgggatatatggcgtgggaaatatacttgaaaactaaaataagagggaggtatgggctgtcaaaatgtgatagcatggaacattgatgcaattagaaaataaatgtgcgcaattgccaaaaaaagaatttaagggtgaaatgggtgcatcaagtattacattatggaggctgattggatggcttttgttatccccaccaatatttttttttgagtggaaggtgactcggaagctaaaaatcataagtccaagtgttatcta

SEQ ID NO: 59223 - DNA, 1349 bp, Cannabis sativa
ccctctgcctctatagctcgccggatcttagccttagtctcaaacatcgatttggctggttcaactgcatcaactcgatccacatcgttcccaaactccgaaggaaagaacctctaatttattcaaattttgttataatcgtaataaaatattattatttttgttaatagaattgttaatagaataaagttttaaggggttttttcatttttacactttaaaatatatatttttttttttcatttttacggaattctacatagaaattcctattgcaactagcgctgcaaccaaattcgcaacaaaaaatcgtataataacccatgtagaaaccaccggagaaactactttagaaactcaaaccgtaaatttaaaaaaagttaaaaaaaaaaccgtatatgggtaattctccaagttttaattcttttgaaaagtaccttgacgttgccagcttctttaatggcgacgatgatcttaatttggtcggctaactgagcaaggccgacagtcgaaatcacaacgtcaactagcttaatcgctctaaccaaactatggtggtcgaagagatcgccgtggacgattttgacttccaaagacttgaaggcatcgatgatcttggccttgtctggatttgagagcgtggattcacgcaccaagacaaaggtctcgtgtccggccttggtgctctcttccacgataaatttaccgatgtaacctgttccgccaatgaacaagatcttgctcttcggtgaagccatttcaaaatgttagataagtgagaatgagagatagagaagaaagaaggttaggtaattgtgtgcctacattaccattggcgtgaactctctctcatttatagcacaagaacatacttctgtcttaatgtgtgccgcaatattccctgtacacatttatacatcacattcaatttctaactaactaatctatataataatctatttggcaagaaatatactagaaacatcccttaattatttgtaatctccaatagttaattatttgtagggtatttatttaattcaatcatcactattttactattttactcataatacatttgatatattttaagtaaagattttatattttaaatttaatttaattctttcaaatcaaattcaataaaatccgaattacaaattatatcagttatttttaattaattactttttaatattaaattatttattataaaaatattttttcacataactaacaacaaataaaataaattgtagaaattaagtttcaataagtttttatttgttttaatatgttttaatactcttatttatacatttcacatttctctatctctctctctctct

SEQ ID NO: 59224 - DNA, 933 bp, Cannabis sativa
  modified_base (600)..(602): a, c, t, g, unknown or other
atataattattaaattattaatttgcactataaatatttaaatttaatttctattaattataaataaatacttaattttaatttttttataataataatacttaagttatatttttaaaatttctgtaaatacttgacctaagtgtcaaatattagtcatttggcaatttatgattggttcaggtcattaaatttttatttcttatttaaaaattaattaaatatactaatataaaaataacacgtagataataacttaaccattaacaatatctatagaaatttagaaatataatttatgtattaatattattactgtaaaaaattaaacttataatttatctgcaactgagaattaaacttaaatatttacactgcaaattactctttaaataaaatattttacaaattttcaaaaaattaaaaataatttaatgcgtcaaagtcaatgcccaaataataaattacaattttttttggcaattttttgaaattctacacaaaaactcctattgcaactaacggagcaaccaaaattcgtatagcaacccccatagaaactaccgacaaaattactttaaaaactcaaaccgtaaattnnnaaaaaaaaaaaaaattaaaaactagtatatgagataatttctctttttcattttcactataatttttttttttccatttttactgaattctacatagaaatccctatcacaattagcaaagcaacctatcgcaatcaaaaatcgtatagcaacccacatagaaactaccagagaaaccactttagaaacgttaacaaattaatttgaaaaaaaaaaaaatagtatactagataattctcctaaaataaattttcccaactcttttttctcaattttaaattatttaaaatttttcaaaactacctcctgtcttaaataaagtatatcgatc

SEQ ID NO: 59225 - DNA, 3238 bp, Cannabis sativa
tagagtactcgcacttattttatagttactgttattattattattatctatttttggtgttgtaaaattccttcaacagcaaattatacaaagataaaaaatttggatctttctagcatattgtctggtagcttgtatttgtagttctatttattgtgatttgatatgtgatatattttatttacttctggtagaacaacccgccactttgtaaatgggcatcctcaactacttccttgatcatcagctctagatctgatgaagttcgtgaagtagccaaggaaggtaagggcaaaggcaaaggcaagaagagacaagtctcaaggggtgaatctcaaaaacaagcacctccggcctcaagctaagaggctgttctgaaggctctagccccaggggacttgtctgcttcaatcattaacttgacggaactgatcttggacgttgtgcctttgcgattggtgcatgtgaggcacgttgaggaggacaagttagaatgaaatgggcaagtcctcattccaacaaagcggtctggaactacagatggaggggccaaatggaagtgaagggtggagaccaaagaaaaagtgcaataggtggccgctgtgaggagaaaagctactgagtcacaatcccggaagggatctaatatctctgatggtggaaggccaatcaggaggagcacttgaacaagcaatgataatcaagatctgcctccaccatccccagcacccaaaagcattcaaaccacctccacacatttgtttagagagaagattgctttgcctcctttacctcttctattttttaatcttcctgttaggcctacatcgatgccagaggaagtaaaagcacacatggaagccatcgagcaattttacttaaagaggcgtggcagagagtatgatgaaatgaggaagtttgacaacaacatttcttccaggcacaacacttagtttgctgattacgataagtgggatgaacctgttccaaacattaacaaagcagagatgatagagagacttcatcctaaagttgggatagatttggctccatttttgtctaatttgttggattagagtgcaaccaccagttgtaagctcagggttgataggtttgcgatgatggcgagtggggaccccatctacatggtagataccacgaggacccaagccaaaggtgtaagtttacttttagttaaattgtctaaggtaaaagatatacctattttatttgttgattcattcataactctttttataagttagcttgattgcggagagtagctgctctttggttaataagctagcctatgagctttaactattaaagttagaatgcaccaacgctgaataatggagagacaaactgtccaagctctagctgaagctaatgccaaaatggagtctatcatcaagcaaagagtaaatgaatctttggacaaggttgttgctcatcagaagaaggagagcaagactaagagagactgtggagatagatacaaggaggaatatactcaggatctttctcatattagtgacttggaagcagatctaaagtaagctaagatggacctcaaagagttagaacaaaagcacacccttctatcccaggaatacaacaagcacactcaaatcctaaatgagaaaattgttttcgaagccactatggagagaaaggtgaaacttcattcagatttgcaatagaaggagaaagaagttgagaaggatgctctcaaaaaggttgaggaaatcgcaactgaattgagctctaccaaacaaaccatggctcaggcttgtgaagaatcaaggaaaaagatttcagagatggagggccaaatttggggaatggctcaggagaagcaagaccaggaggctatgacattaaaagcgttaaagaaggctttcatgtattgtctgtacaccatctagaaactcaacaattccatgatggatttttcggatgatgaagacagagaacaactgatgccacaagtccttcaactagctgaagcagaagaggccaagaaggtagtgagggcaacggtggttgatcctggaacttcacccttggagggtgagaagaccatgatcttccaactgttgatgctccttccatgattgattatgaaatcccagaggtatccactgataattaaacctgatagcacttagccactaacggatccagccatgccttgactagattttatccaactcttactatcttcttaacaacattgaactttgggggataaggatcccttttttgcatatgcggagataatttttatgcccttgcagcagggcttttaagtacataaccatatttcaaaaatttgcatactatttatatatttgtgattttatctattggatttactaagttttaatctcaattttcagctccctcaagttctggttccaaaggtctgaacttttgggctttcgtttaaatgcttagatttggttttttttttctttttaataagtcgtttgtattccctggaaaatggttccaatgacgtgaaccctggtattttaacaactttttttagaaaaattttagtaagtatgttttactttagaattttgaaacttaaacatttaattaacccaagttaattaattactcaagcatcaaatctttttagtaaatgtacttacttccaagaaattttaaacttaactacttaattaacttgaactaattagtgatttaaaaagcttgaacatcttagttaaattaacttgagttaattatgaaacctaaacttctaagttaaattaacgtgagttaattacaaagtctaaacttctaagttaaattaacctgagttaattgcaaattacactaaattaattttaagtatattaagacagtgaattactttcagtttcttggagctccaatttcaggtgatactccttactcttatacttgttgttaatttagttatttttttatggaagaggtataatgttataatgatataatgtatatgctaccccgaagtgattaagagtttagacttttgatcacttgttacaagataaaactttgaaaagctaaatttgaaatgaaaattttcttctttattaaaatggttcctatcttgaggcgtacatggaaattgaacaaaaaataaaaagcaaagagaagtaaaaggaaattgggcaccaccagtctactaatagtatacacgtaggtggtcaatgttccatgctcttagaattttttt

SEQ ID NO: 59226 - DNA, 1229 bp, Cannabis sativa
  modified_base (1107)..(1109): a, c, t, g, unknown or other
caataattacgaagaaagaaaaaaaaaatgcaatgataaataaaataaattaatacttccatatttatatttatatttataaatattattttttattataaatatatatcgtaattaattaaaatatatatacatttttttttttatttttctttccagaaagtaattgtctcccttgctccctaatgtccaccatatttttatcaaccaatttagtttatatttattttaagagtattgctattaggcactagtagtgtctagtatccttaagatgtgtcttattgcgattggctatagcaatattgacacataagaggatgcttggcaccactaatgccttttagcatttctcttattttaagagcattgttatactttttataggtaatatcttacaattaattagcgaatttttaaattttactatataaaattcgatacttaatcatatcaataataataatagagtactaagtaccagccagagctgtaaattcgtactggcacggcccaacccgacccattttcaaaaagcccgaaaaatatggatcgtgtcgtgctggcccgtatagaattatgggtcgtgccgtactagctcctatttccataggtcaagcccagcctggcccatgggcacgaaaaaatcgtgtcgggcttgggcccaaatcgtgctttaaacgagctttgttagactaaccaatagatttttttaatgggccatgttcaccacctacaatgaaggagctcgaaacagtaatgcctcacctgagataaaaaaaaaaataagagaggagcatagagcaagttaagaagagagtgaggagagcaaaacagagggagcaggttaagaaaaagatatgggcttcgacctttattttatttgatatatcattaatatatttatattataatatatatgtacagttatttataatattaacattttttaaaaaatatacatataaatagtgttacatataaataaattttaatgaaaattattttgtaaaataaaaatatgtatataaatatcaaaatatataattatgaagtacaaaattaaaaaatcatatttatttgtgtgtcgtattttttgagcttttnnnttcgtgcttgcttgtcgtgcttttgggcttgtcgtgccgcgtcgtgcttatgcccattgttttcgtgccgtgtcgtgctaatttgtagcatcgtgtcgtgtcgtgctcaagcccatattt

SEQ ID NO: 59227 - DNA, 634 bp, Cannabis sativa
  modified_base (31)..(60): a, c, t, g, unknown or other
aagaataattcatttgcaaaatattgcaaannnnnnnnnnnnnnnnnnnnnnnnnnnnnnaaaattacaaaatcacatattctagctgaaaatgcttcagtttgaattgatgtctctgaaggacaattagctaatgattctacagcacgtttgaaacgtggtagaccagtcagttccaaagataaaaattctcaaaaaagaaaaggatcaaatgatcaagatggctttaatgaagaggctgaaaatttcgaggaagatgttgacataaataaatctcttgaagagattcaggtaccaaaaaatattagaaatgatgagatctcaataaatcatgtcaatacaagaaaagaatgggattgactcgaaataattatcgacaatatttttccttttaatgtagcactagaaattgtaaatgaaaacgaggatcttgaacctgaatctatcaaaacatgtcaaaatagaaaagattggcaaaatagaaagaagcaattcaagcaaaattatattcacttgctaaacgcaagtatttggacctatagcccaaacacctgaaggtgtgaaacccgttggatacaaatgggtatgtgtacgtaaaagaaatgagaaaaatgaagttgtgagatacaaagca

SEQ ID NO: 59228 - DNA, 1466 bp, Cannabis sativa
aattatcttttaaattaatttgctttattattcttttttatcaagaaagataatttctattaatcaaattgagtcaattaatgtttcaaaaaaaaaaaaatcgagtcaattacatccacaatgcaattcccttcaaaagagaaacttacaactcaattttatttatgctagacaacttcctttcttgtacaagaataagtccacttttgaagctctctttaatactactatctatacaattcgtacactttcttatttatacacaaattttggtctagccaaatgttatatattgcacctcctaacacattcttatgaacataatataatttttatgatacattctaatatatttttaattcatttttaaaaattatgtgtttttttttaacatattttttttccataataaaaaaaaattaaaataacaaaactcattaactcaaagccaaaaaaaaaaaaaatccattcatgtatacagacacaacacatatatttctttccctcttttttaacaatttttttataaagcagatgcttttttttaaccaacaaaaaaaaagtccattcatgctttttaatattaaggttaatctcaaattcattttcacacatatacataatttgaactccaattatagattaacacatagagcccaaaataagctttccaataatatcaagaacttccaaaacgaagttcagaatcaaaagttatgacaaaaataagaaaaacaaaaaatcccgagaaaacatggccctcgttgcgacagccacaacctagtggagctcgccgcagcgagccatactgtagccgcgttggcaaccccaaaatcacccaaaaatcacaacttttcatacatttgaaactcatccaaactaataccaaaacttatccaaaatcatgcccaaactaaaacttttaatcaatactaaaccaatctaacattgatatacaattgagcatgcataacacaaagctcaagatcaaaacataaaacacaaattggccataccacacaaaatcaatattgcacataaatttacaaactttgaaactcaaaacttcaaagcacaacccagaaaattcaagttatttttccagaattcaaataccaaaatctcaattcaaaggtttccaaaacttcagaggtgaatctagcatctaaactataatacaaccacacaacaatcaccataattctcctaatttcatcaacatgcactcacaataattaaaaacactaagaaaaccttgaacactatattaataacctcttaaattcagaaattcaaacaaggaaaaaagatcaaaaataactacctcaagattctctagcaagggtatgtacaaaatcacacaaaatccaagttttttcttccaaacttaaatttaaatcacaaaatggagagagagagagagagagagagagagagagagagagagagagagagagagagagaga

SEQ ID NO: 59229 - DNA, 946 bp, Cannabis sativa
atctaatctagcggggtgggacagatcattacatgatctaaatcatgtcggatcatagctgaatcagatctaactcaatttatttacagtcctaaacttaaccaaaaccttcctttattgaaaataacctagctacaattgcgttgattggtcttctaagaattaaagctccagctcccaaacactcactttgctcatcacgagcaacaacagccacgctcgacacttccctattgttcgaacaaccttcatcaacgttgatcttagttgaaccagcaagagggggactccacttaatccattgctgctcaaagttcctccttgtagaattttcctctacaaaattgagccagaatttttggcatcactgaatcagctcacatggtttgagttcatattcacccactttaaccttgttttgaatgtgccatatcttctaataaatgacagaaaacatttaaaatcatcctactagtcactgaccgaatatggctaatattaaaatagttgttgtagaaaataaaaggaagaaatttactgaataaaatctaagttgagtcacagattaggtcgctctctttaagacattcgtgacacttcgtagaattttgcaactagactatcagcctcatcgttcctaggataaaatagcctagtcaaactactatatcagaactccactacaagttattgaagtctgagattccatcccggagatctcgaaatcaacctgggcgcaaggctagggtcccctcctaggttgactgctatgactcgggtctattcaactccgtgatgtcatcctttataccacgtgttaaacattaatgtccacgccaccaaaaaagtttttgggttaacaagtattaagttttattttgacaagaaaaaacaatttaggatgtactattttataaaatatgggtctaatttgtcatttaacaaa

SEQ ID NO: 59230 - DNA, 1378 bp, Cannabis sativa
agaattacagaccccagctgatggcaaaataggagggtatgatgcagttgagagaatgaagactggctttgttaaattcaacaaggagaaatatgagtaagtatactcactactaactatactcatttaatctacagaacaatattggtgactattttgtacaattttcatttccaaagaaacaacaaagtccagcaaaaaggggaagataagtctttttattttattttattttatttttttgaaaccaaacataaaaggggtaggaattaatgttgtgttcatatcattcatctagttatatatatatatatataaaaacgtgatggatacagattacagcagcattcaagtgacattgggtgggaacagtgttcttggcagacaattttatccattttggatagaatcgatggagactgatcattcgtcatatacatataataaaaataaaataaaatacaaccccaatttaaaattaaaaataaaacaataataagtgtacagagagagaaagagagttaaaatgagagaataaagagattatagtaataagtactcaataattgtataataccttattaatttcttaattttttgaaactacagaacaaacccaactctgtacgctgaactttccaaaggccaaagccacactgcatggaattggaccaatcaattgatcagaaataaaaaaatacaaactggagaatgtttaaacccaaaactaagacttctttatcttaatataccaacaacaaaatattccttagaatctcacatagccacaaacgtgattatcaggaaaaaaaatttcagctgggaaaagggtcaaactgggacttcgtaagtgagcccaaaatcccagaaaataacattataaagcacaatagtatataagagctagcattgtgttcctgctaacattgaagcttaaatagaagaagaagaagaagagaagagaaccagcctgagcgatgacgaggacaggagactactgagcacgaaccagaccaccgtgggaggcgaagagagagcgatgactgctttgggttgggcagcctgggctctgtcgacggagagagaagtcgaaactgagatttaggtttagaatttgggaatttttttagggatttaggttttttttttttaatatatattttttgaaatcgggccgggccgggcccgacccgaaataatatgtaccgggctgggccgggcctggccagaagcccgataagagcccgaataattcgggccacagtcggcccgtcgggccgagggcccggcccggccagcgaaaatggcccagattgacattcctaattaaataactaaaaattaaaaagcaggataataataataaaaagtgtaatta

SEQ ID NO: 59231 - DNA, 1023 bp, Cannabis sativa
tgttgtagccatttaggaccacttataaattttcaaaagattacgaatagtttacaatttcaaaaataagatttaaacaattatttacaatgcgtataaaaaaaattaaatgtagaacaaaatatgtaaaatttattttcgacattgtaaactattcaaaattttctaaaaaatatataggtgatcttaaataactataacatacacaatcataaaaaaaaaattaaattaaaaagttctcatagatgtcgaagtaattgaaacactcttttagggggcgtacgtaaaaacttatctaaagtcttatgttatatcacttatttatttttagtatccagaaaaatttttagtgaatttttttttataattaggcatattgtaattatttattgttttatatacattatatatttaaattttattttcggtaataaattttttagaatttttttaaaaatttaataagaaacattaaataattacaaagtacaagatcattaaaaaaaattaatagatggagaatgttatgtaatgtgtaatacatatattttttcaaatgtatatatgtacaaagaaaaggaaaataaaaatttgcccctacccttctacaaaacggtcattattgctagatttttttcaaggataatttaataaattatctatattcaaatatatagcaataaaatctttttaaaaattaatatttatctttaatagttacaataaaaatataatcataatgattatagttataattattactagataaattttttattttaaatttaaattaattatatacttaaaataaattaatttttaattaaaatatttaataaaatcttataaaatactttttttttattttaaaaaaaataaaattaaattagtattaaattacaagtaatttttagagatatttgcggcataattacttaagttttatgtcgagtagcagataaatacttaagtcatatttttggcggtaaaaataccttccgtcacttatctggaacttccgta

SEQ ID NO: 59232 - DNA, 3284 bp, Cannabis sativa
  modified_base (1029)..(1032): a, c, t, g, unknown or other
gtcctggtccagcttcgggtccttctctgagtcccaaatcaagacacctactatgggtcttgtccaagccctggttcccggatcccaggacaagatctgaatcctaattacgggtcacaatctggtttcggttcatgtcccaggtctcgatctgggtctcagtctaggtctgagaccgagacttgcatgcaattcttggtctcgatcccaattctaggtcccgagtcctgttccatgttcgggtctaagtttatgtcttggttctggtcctgcatcccgattcgggtttggattcgggttttgggacccaatcccagggtgtgtttgtgtctgagtgtgggtcttggtccggttatagtttaaggtatgggtccaggtcctggtcctgttcctaagtcctgatctacttctagttttggttctagtttcaagtcacagggtatgggttcaggtcgagtttgggttcgggtcctgatttttgtctagggcgaggttcaggtctgggttttgatctcggttagggttctcggtcgggtccgatgccgggtttaggtccgagtccaagtcctggtcctattccaagatcccagtccggctccagttcaagttttgatttttgttcccgagtgtgcgtctcggtttggggtcaggtcattaatctcaatccaagttctgaggccacagttctggtcctagtttgtgggcccaattcccaggtctaggtccccaatctatgttcaagtcctaggtcctggtcctggtccgggtccatgttcgtgttccggttcaggttcgggtctccagtcccaatctgagtccaagtcccaatttgggttacggtcccagtttgggtcccagtcctagtgcaagtctgaggttcgggtccctggtctgagtctggttcttaggtcctgggtccagccccagtttttggtttgggtctaggtctaggttcgggtcccggtctgggtcaaggtctcggtcttggtttatgttctaagtcacaggtcccggtctaggtccaagtcnnnntatgggttttggtctgagtttgggattaggtttgggtcctgttactgtcccaggtctgggttctagtcccaggcttggttcaattccaatttcgtgtccgggatcgggtctggatcccagtttgcgtctgggtctaggtcagggtatggatccgggtatgggtcatgtattcaaacactgactacgggttaggtcgaagcctcaggttcagattcggatctcagtcttggatctcagtcttgttccaactcggccctaggtctagcactgggtcctaagtttgggtttggatccgtgtttggggttgtgtccccgtagtctggtcttgggttccgggtctagggtcgggtcttgtgtctcgagtctagggtcgagttttgggtcttagtccctgttccaaggcccagtttcaggtcaaagtctcctatctaggtctgaatccttggtccaggtctgggtctaggttcgggtttagggcccaggtcccccatctaggtctggatcctaggtctcggtgtaggtccaagttcaggttcgagtttggatcccgagtttgggtctgagtctaggtcccagtacgggtttaggtttgagtttgggactgggtcgcggtctgagtccaggtccctattcgggtccgggtcggggtcccgatccggatcccagtcaaggtctaggtctcgaaccaggttctggtctgtgtttggatccgagttcaggtcatgagtctgggtctaggttcgggtctatattcaggtttgggtctgggtcctggttctgatcttggtatgggtatgggtctaggcccatgcccaggttagggttttgggtttagtgtttagggatttaatgtttagggtttcgggcttagggtttaggggtaagtgtacagagtttaggatttagggtttagggtttaagggtctgcttctagtttagttcacattttgggtcatagggtaagatttaaggttcgggtgtgggtctaggtccgagtcctggtctgggtctaggttcgtgttttggtttaggtctgagtcttggtcccaaatccagacaccaaccacatgcgagtctagtttgagttctggtacgggttccagttctggtccgggtctgggtccgagtccaggtccaattcccagatttagacaccgactgtgggtcgggtacaagcctcgggtcttgggtcatgggtctcgagtctaaatcaagatcttagtccagttctagctcatgtcttgtgtcctggtttaggtctcaagtcaaggtttgggtcttgggtcctcagtcattggtccatgtccccgattcaggtcagggtcctaggtcccagtctgggttaggttcccagtccaagtgcaggtcccgatccatgttccgtactagtccttgtctcgggtcttgaccttgtcggggtataggtcacggttcggttctcaggtcctggtcccgatcctggtctcgggtcccagtccgagtacttgtcccagtttaggttcaggtctcggtgctagtctgggtctcggtcccagtcatgatctcgatccaagtctgaaacctgggttcgagtctgagttatgttacgagttcgggttcgggtctggtttgggtttgggtcttggtctaggtttcagtctgtgtttgggtttgggtcttggtcttgttctgggtctgggtcttggtctgtattttggtacgggtctaggttctggtcaagatcctaagtcacgggtcctaggttgcaggtcctagcgctagtctgggttcaagttcgggtctgggtccttcaaatggttcgaggttcgggtcttggtacgattccaagatctagacactgactacgagtttggttgaagcgttgggtcgtggtcaagatccgaatcttgggtccctgcccatgtttgtgtctaggtctgggtctgggaccaagactagggtttaatcttggatcccagtcccagttctgggtcctgatttcggttctaatttagagtttgggcccccaatctaggtcttggtactgggtccagctctgagtctccaatcccggtctgggtcctgggtccgggtttgggtccaagtctgtgtttcggttcgggtttgtgtcccgagtctcgatctgagttttttattcgagttcgtgtcccggtccaggtttgggtttgggtccattcaaattctagttcccggagtcaaacctagactcggacttggacctaggtctggggtacgggtctgggtttgggttt

SEQ ID NO: 59233 - DNA, 889 bp, Cannabis sativa
ttcggttacctaagtgcttatctcttgatcttacaccacctaagttgatctacccgatgcccgattgcttaaaagttccctctcgagtaataaatctcacaatctagatgaatgccttaattataatcacataaagtaaaaccacatataaatcataataatggtagcaattaaacaaggtaaaatcacataaaaaatattgaactaaactaaatattacattaaatcataaaatcaaagtcataatttgagatccatctaaacctaacaactaagaaaattagccatacataatgtggcacatcatctcaaaatattatttataatctgaataatactgaaaaaaataaagaagaaattagaagaagaatcaatataaaatcttgaatacaacttatggttgcttccttgatctcttaaacttgattctctctttaaagttgtgttttctctttatctttcggtgttttggagccaaaattataatgctcttttcataggccacaaaggatgaaaaagataagaactcaaaacgtgtacggatggtgctatgacgccaagcaagattctcaaatttgcgaacatgtgaaaatcatcttttttatcatttttttcttctttccaggcatgtgctatagcgcctacatcaaggaaccatagcttcgaaggccaattttcatcacttgcttattctcaactcatgcacttcctggtttcagtcctttgctcaaatgtgtaccgtttactcgtaattttatcattttaagcttaatattgcacactactgagaacacataaaatccaaccaaaaactcaaagaaaacaacttaaaacaagaataaataagagtagatgaatgcataaaaacttgcttgcctatgatcttcca

SEQ ID NO: 59234 - DNA, 1197 bp, Cannabis sativa
  modified_base (217)..(218): a, c, t, g, unknown or other
aaaaaaaagaaaaagaaagggaaagaaagaaagaaagctagagagagaaagggttttggtattttgcattgaagatcaagtggttgattctcatccattttagctcaaatgttgggttttgaatccttgcaaggcgctctaccaatctgttggttccgatttggcgattgtcctctctaaggtgctcttctacaatacccacttggtgagacccaanntttttctatttgtgtatctatcttttgagatgatgatgatgatgatgatgattgtataggtgatccaagaatgtttaatcttgatgttgttgtgagcctctagttttactagagaagaactttgtaatcccattattaaactttggtaatagtagatgatttgagcggactacgatcctgtggttttttttccgcattgggtttctacgtaaaaatcttggtgtctcacttttatgcttgatttgtgtattttatattgtttgtggtgctttggttgatatttgataattgtttattgtggtatttgataagtatcctatttttgacatacaaagagtgaatatattgtggttaattgcaataggttttcccaacagttctctaccctccaaaccttcaaggtctgttctcgagtcgagtagaagaatgcatcccacatcaacctcaaacaagaaatggtggtgggggtggagagaatttcagagagagagagagagcgtgggaaggaaaggcgattaggatttttaggttgtttttgttttttttttctttcacttttttattttaggaaattagggtttaaaaaagaaaaagaagaaggaaaaaagagaaaagaaaaagaaattgtttttattttttatttaaactaggaaacaggccgcgcttcacgtgcggcggttaaataattatacatataaatatttattgaacaataaaattgaaatcaaataattaaacttatttttatgtataatttttttgaaatatatatgcttataaaaaataataaatctatgtagagaactctaaagaattttaaaaaaaaattatcatgcaatttcttatataaatacaaaagcacactttttttttttaaatgtacagtatagaagaaaaattagaaattgaacaatccttacgcaatatagaaatttgaaattatatatataaatattaattgaataataaaattatatga

SEQ ID NO: 59235 - DNA, 1886 bp, Cannabis sativa
atagcctagattaacacacttcaaggactgaaattggaatttatgttgctggtatggtcttatgcatggataacaagcaaccccaaaaaccttgagttgcttgtaatcaggttttctgcagaaaagagtttcaaatggtgattttcccttaagaatgggtgtaggaagtctgtttatgagatatacagaggtttgaaaagcatcaacccaatacctcaagggcatacttgcttgagcaaggagggttaatcccatttcaactatatgtctgtgctttcagcccttgagctgaagtgtgaggacaagagtgttgaaagttaatgccattttccctaaccaggttttcaaacacttgatattcacctccccaatcacatttaatacttttgattttagtttcaaactgattttcaacaaaagccttaaaatcagtgaatgcatttagagcatcatatttgtaattcaaaggataaagccatgtgtatctactaaaatcatcaatgaaatgaacttgaaatttgtattagatgcaattggggcaggtccccataaatcagtgtgaatcaattcaagcactttggaggctctgtaattggataatttaaagggcaaggcatgtgattttccaaattgacaagcttcacataaattttccatttcatctttaaaaaattttacattgttggactcacaaacaagtttaagaatcctagaggatgggtgacctagacgcctatgccagacatctttcttggaattttgaaaactggttgcaagagcaactcttgattttgacagactcgagacaccagagaagtattgacactatttttgaccaaaaccagacttgttgagacttgagttgagttgataaagaccatctctaagcactccttccagcagcaccttctttgtgatttgtccttcacaaaaaaaaaatcaaggtgaaactcaacaaatacagcattgtcagatgttaggctagatacactaaccaaatttttaactatattatgcaccagtagcatatcattaagcagcaaaggtctatgcatattattagtatttaattttccagtaccaagatgagaaatgcataattgattaccatcacctataacgaaattttccttaccaccatagtcatgtttcgacatcatgttattttcatctgctgtaacatgattgctagctccactatccatgaaccatccctcactgtcaacaacttctggtaaagcaatgtatgcagcagctatctaatttttcttttgattactttgattcctagctttaggattagatcccatatatgcttcatcgtatctgttgtagtagatggcagtagagtgcccatatcgaccacaaacctgacaggttggtttggggccattggattgaccaccacaacctcttccaccattgtttccaccaccacgaggatgattgccacgaacacctcctggattgttctgattagtgtggtagttgttttggtgtggatgatagttgctgctacctcggcctcgaccaccattgttggatcgatttgctagatttgcatttggagaagtgggagagtggccagatttggtgttgttgttgagacataggttttggagacgttccattttattatcaaaagcaagtaggattccttgcagctcctaccaagtagttgaagcacgagcttcaatttgcaacacgatgggaagatattcaatgtccagaccgaaagtgacattgtatataagctgattttttgggtaaggttcaccagccaaagccagtgaatctaatgttggaaatattttaccaggatttagatttactaagaagtatgtttcattaacatcctaatatgaattttaaaacaatgaaataaa

SEQ ID NO: 59236 - DNA, 913 bp, Cannabis sativa
ttaggacataaaacccaacaaattcgttacctgcaaaaaaatttgtcgacagtgctctgttctccgtgcaaccagaaataatcatcgaacaaaaaaggtaatccaaaacattgctgtaatattacattgataaacaatatcattataaataacatgatcataaattttcatatacacagtgcgatttcttcctatttatgctaatgaaattcatcgattttttttttcgaaaaaaaacataattaatgtgaaaataatatctacattatttttcacaaatacttaaagtttcataaaaaaaaataaactaatatgtatatgataacacacaggaaacaatggatcccatgacaatcatcattttctagaatagaacatgggtagacagaacaacatacaatgattatgaagtggcaggtatactaatccccataaaatgttcgtataatattctcgcacaggagatctatgaaacattatcaataaacagaaacaagtatggaattacagtgacttttcaaatgaaagaagggataccaccaataaccagcaaagatgacaatggttgcaagttctaccatcaaataaggaagaaaaatgatgacaaaacaagataccattttatggtaaacacatttgaatcatcaatatcatctgaatgtcttgccatgtcttgccagcaacaactatttagaaattggagaaacaagtaggcagtgtactgaacaattacctacaagaacagaatatgcacaattggtagcagattatgcttatgagcatgcacaataagctctggaaacaagttcagagataaaccaagtaattacaaaccctcaaattgacagaatactgttggaaatattttgccaggatctagatttactaccatgtatgtttcattaatatccta

SEQ ID NO: 59237 - DNA, 920 bp, Cannabis sativa
tgtgtttgtggtttatatagtagctgcaactactcatgcgacttataattagtagagcgtatgtagcaagaaaatgcacacaaacacactcactatatatgttaattactcttttttcctccgaattcctccccaacacaacgttttgtctggcaagttgaacagatttataagttacctgcagaaaattcacctgctcttcgaatccattatataagttattttctaaacaactcttccaatctaatctaataacaatatatgaaaaacgattcttaattatttttttggctaaaaaccaatataaaaagcccctttcctcttttgtgttaactcaaaataagagatagataaaccaactagctagaattagcataattaataagttgccaatatatatatatgtatatataaatataaataaaatataataataataatttataattagttaggaactacacgacgacttagtaatcgacaagatcaatcctaggtttaatttttgaccaaacactcaaccaacggtaaagcaaaccaaaaaaagaaaatcagaaaaaacacattttcttatgtactgggattctcacgtgtgaagttatctacagctaataaaagtacttttacttaaaataatataaaatactaatacacagcttttactattaagtacttcactatatatagttttattacagtcttttccttctacttaaattgtagtatatagtattattaattagatcaggtacaagtacaaagccacatttgtactatattttaatatacttgaaatacttaaaacaggcctttttctttttgggaaaactttcctagtttcacaccaatacatatataatttaataatttatatacacatatacatttaatactttaataaataaaaaaacgctttgtat

SEQ ID NO: 59238 - DNA, 1029 bp, Cannabis sativa
tcctagtatatgcatgtttctcaatctcacagatacacctattacttagataataattaaggaacaaataaggtagtgattcatcagcaaaaccagtcttttgtttgaagctgccataaggcaggaagctgaagaataaaacgatgcttggacacatttaacctaccccacacctcgaatttccatgaaatagagatactagcaggaccaaaaaaattataccctgagataatgcaatattattaattgagacaaattgatttaaatctattttatttttaaatattttttctctgtaagtccaccagtctgtttccaaaaggtaaacattatgaatccacacccataaattgaaaaataaatagtggcataagcagccaaaattttaagttataattgacataaactcaatgtttatttcactaaaacaaatatgagtattgtcgcccctaaaaccattcaaagtcgccctatcattattagaggcaacaagttactcctaaaaagtcgtctctaaaaatttactcctaaaagtactattaggagtgacaaaaaagtcgtctgtcgcccctaaaagtaatacacaaatttctcaagtttacttttagggacgacaatatcgctcctaatatccctaaaagtcgaccctaaaaagacgtgtgataaattaatttttaacttttaggggtaacatagtagcccttaaagatttttacattaagaaataatttttttataatattaaaaatattgatattttttttttaggaaaatattgatatttaatttataaaaaatagttataataataaaaaatctcattagcacgtatacatacactatacataattacacaaataaacatatattcctatacatactcacacacataaatatagatacatatacatttacatactcacacatatatactccaataaaaaatatacatatacatatatacctactcatacacatataaatatataacattgttaaaaataacatacccaaaataagtacagatta

SEQ ID NO: 59239 - DNA, 836 bp, Cannabis sativa
  modified_base (768)..(771): a, c, t, g, unknown or other
agtcataaaccaacaccaaaatttgaattaaattatttgcacaaaaaatatatatatttaccaaactatacggtaacatatatattacataaatcaatctgtaaccattaatcaataaaataaagaaacattcaatatgtatctctctgccaaaaacaaattgaaactatatatatagccaaacatatatacatacatatggtacatcatataaaacaaaattatatatataatataaatccacaattcaagccataatcatacaattattgttagttttatggttggtaattctgttaagtcctacccttgacagttaagttggttaactgttagttttgacaccaaggacaaagctatttagttaagacacattttgacaccaactcattttggaatagcttttagttaagacacatattgtaaatacaatataattcattcaataaaaggagcattactgctcaaggttttctttctgttcgaaactggtttgtgattgttcttggatcagtgtgtttgattgcataggaatcgtctcattccttacaaattggtatcagagctggacgggttcttgagcttcaaagagacaagctcagcgtggtagtacgtgaagaacatccagggcaacaatggggaatgcaaagttcgatttggagaagtttacaggcaagaatgatttcggattgtggagggtgaagatgagagctttgttaatgcagcaatggattcaggaggctttacttggtgaagaaaatatcaagnnnngaacagagaaggagaagactgagattcttgagaaggcacatagtgccattatactctgtttgggt

SEQ ID NO: 59240 - DNA, 1579 bp, Cannabis sativa
  modified_base (753)..(753): a, c, t, g, unknown or other
ttatttaggggacaaaacccaatattacttttatgaaatatggatttaaaacgatgaatatgttaattgtgttgttcggatgtgttcatgttggtttatgtgttatttgatgattaaatgtgaattatgaaatttttccatgaaaagattttttttttcgttctgaaaatattttatttggatttcttgtaaaaaattaagcaattttgatttttacgaaactcaattctgataaaaattgagaaagttatggttgtttgaaaatcggatgcatatgggtgtcgagatgggtgcttgattgcactagcatctcagacaatgaggcatgatgcacgcacgtgacccatacattttttgtctaaagtcgtgtctcgcccaccctcagacacgcgtcatgttgcatacgcggaggaggacctcgcatcattcataactaattggttttgaataaaaatttagttctgtaaaaaaaataaattgcttaattttcccatactatccaaataaaataattccagatcgtgaatccaattattttgcataaaaaatttgtaaacataaatcaatcatcaaataaacacatatatcaacctgaatcacatccaaatcacacattcatcgttttaaatccatatttctcgaaagtaaatcattaacttaactctgatactgtttgttggaagttattttactaggatctagatttactaaaaggtattttgattaacaccctaaatatgaattctttaaaanaatagaattaaacacatataaaatttaagaaaccttacattagtgacagcggaataatatgtctcctttcactgaaatctctaacacttgttcctttgtgctgttgagtattatcaagatttgagcccgattctccttcacgtgttggattcttcacagtcttccatactatgattgagtatttgatttgctatgggtggacatatactctttcactataggctcaaaaattatgaagaaaaagagaggggaattcgaaaatagtaaaggaaggaggctctcaaagtttctagttatctgacagattgtaaactaggttaaatgcatggattagaatgagagcatcctattccttttatattatttctcatagggttgggatttaaattatatagaataaaaaatataaataatagcaaaataatgaattaatggccgaccatagtaatgggccccactagttataatattgctattttttcaactatttatcatttctttcacttatgtcatattttttaattttaatcctataaatgtcaaaactatttatttaacaaatataattaattatcaaaaaaattgccaattagactttacaaagtctcttaataaacaaataaaccataaatcctctttccttcaaaattaagccatttgcttagtgaaaatttataaataagacagtctaattttagaattataattgataaattagaaccaattaactaagtctacaagaagtattatctcaactattgtggggaccatggacctatataatcaaacttccaataagtaattctagaatttactaagtaaattc

SEQ ID NO: 59241 - DNA, 776 bp, Cannabis sativa
ttagatttaccttattaccaaaatttgaccaccaataccaaccaaaattcggccaccaccacacaactccaagaataaaatcttaacaagctaaaaatcctataaaattattagagattagatttatactttaatggacgttgagattcaataatttctacaccaaatctagtggtcggagctacaaccaccacctctaagctcgatttacactgaaaaactaaaaaaagaatgatcaaacatcaatgatatatttttaagtatgcaaaatgaaaaattttaaaaaatgagtgaaaatggtagaaaaacgatgaaatgggggttgtttggtggtggacgacgagggttttgtggtttggtgctgatgaaaaatgaagaaaatgaagaagtcgaatgcccttatcaaggttttaatgtctatgtcgccgattattagaaaataactaacatagggtgtaaattagagatgttcaacaaaatttataaaccattcaacccgaataaactgttcaaactatattgaataaactgacaaaaaatacaatctaaaataatacaataaaaattcaaatcgtctaatgaatatattgggtggtttacaaattattctaaaccgttcaattaatctgaataaactgaattatatattttttttaataaaaatgtatatattatattacataaattatatttattagttaaatctctaaacgtaaaaatataatttttttaaaaaaaaaaataatagtgagttatgtaattatggtaataatata

SEQ ID NO: 59242 - DNA, 1333 bp, Cannabis sativa
  modified_base (390)..(390): a, c, t, g, unknown or other
ttgtttaactaatggtgagaaaatttcattgaaatccacacccttttgctgagtgaaacccttagcttccaatcttgccttaacctctttgtaccatccttggaatcaccttccttttctctgaaaatccatttacagccaataaccttttttctagcaggcttcttaaccacaatccaagttctgttcttcttgagtgaactcatttcttcctgaattgcttgtaaacaagctttactattcttaccattgatagcttcaaaataacttgaagggactgagctgtcaatctcatctgcaacagtgagtgcaaaggctataaacttagcatatcctagtctattaagtggccttatttctcttctatctctatctcttgccagctgatanttgttgagatcatcttgatcatcatcagatctgtcttgactttcttcattatgcttttcttgtgtttgatctgagtcattacttggctccacctcaagttgtaaactgcttgaattagtgtcttttgcagggacagttttagtttgatttgttgtcactttcatcgccatctcatcttccctgaacacaacatccctacttatgatacatttctaaaaactaggttcgagacaccacaacttatacccattgatcccatcagggtaacctaggaatagacacttaatggctctaggttagagctgtcttgtcttatgtgagcataggttatgcatccaaataccttgagatgttcatgcttaggaatttgactagtctacatttcttgaagggtttataagtttaaagtcgttgagggacatctgttaattagataaaaagctatttttagtgcttctccccaaaacaatctctccaaactagcattatttagtatgcatcttactctttcaagaagagttctattcattctttcagccaaaccattttgttgtggattcttgataactgtgttgtgtcttctaattccctctcttatgcaatagctcttgaactcatatgaacaaaattcaaggccattatctgtcctcaaaactttgatgcagcatcctgtttgtttttctatcatgattctccaattgacaaatgtttgaaaggctagattcttacttttcaacaagaatacccagacttttcttgagtaatcatctatgatacttaagaaatagtttgcaacccctagtgtttgaattttggagggaccctagagatcagaatgaatgcagctcagtttctctgtagttgtatgcataccttttggaaatttcactttgcaacgctttcccaatacacaggtcacagaattcaagtcaatagtacccaa

SEQ ID NO: 59243 - DNA, 1275 bp, Cannabis sativa
taatctcatcaacccactcaatctttttgtatcctttcactctttgaatttccattaattcatccaaacaaccatttctagctcttcaaacccttttggtctctcttattttgctatctcaacggaagactttttaagccttaatttgtttagacaccaagaaagagatatggtggaaagcagaggaaatcctttacaactcaaatcctaattagtacacaaggcatcgtattacacagaaaacaagcattttctacaacatcaacaacacccataacaacataagggaatatatgttggatttctcttatcttacccttccagtgatgagatcataaaaataaaccaacattggtattgcaaagtagtccaagccataaggaaacaaattaattaccaaagagaactacaaagtccaagttaacccaggtatacactaaagggacaattagcaatcagtttcagccagaaatcacatagatagattcttattacaaaaatagatatcatagcttaagaataaaaaaattaactccacaattataggtgaaaggttatgaaccaaatgataatcaaaacacattaaaggttggttgtaattggtagttgctagtgcaactttgtattggttttgtttgtttgaaatgaaagcttttccttttttctaaaaaacaaatattcttattcaagtaatattagcaagtacttaaatgggagtcacttttttttaacttatcagaggaaatatataacacacactatccaagtattcattcaaaatgaaatcaactcctgtcaaaggccattcttacattagatacactgaattcagtttgaacagtaagagaagtcttcatcttaaaatcagtgaaatgggttccactaaaaataaatttaacatgatatgctaaattggtttactactttatactgcaaagaacacacaaaaatcatcaaaacgagcaataattatatgaaattgacaacacgtaatattgggttcctctttggtaaaccaaattatagttcagagataagttatttacaaaattaagactaaaactatacagaaggaggaggagaaagttgtaccagctgagagcagatgaaagtgaagaagaggagattgtgctttgggaaataagactggttaagtggaaaatgttaggagagtgttacgggcatgaattctgttgagagagtgtgggagcttgaagcttttaattggtgagatttataggagatgatattgtagatcccatttcagagattaaa

SEQ ID NO: 59244 - DNA, 2417 bp, Cannabis sativa
  modified_base (449)..(451): a, c, t, g, unknown or other
gtaagtgactattggagtcatccaggtaacttttttggcaacatctatctccatcacttcatctcgactcactgtcgggtgtgttaacacatcaacaggaaacacatcgagcagctcagcttctctagttgaggccaagcgggccaaagcgtctgcgtgtgagttatgagcacgcggtactcgggatacgactactttcttgaatttctgcaacaactcgcatactatgacgcccacctctggccagatattctccatttacttggcatacgatgatttgggatttgctaaaagcctataagtattctattttcatctcgagggcgagcttcaatcctacgatcaaagcctcatactcgacttcattgttagatgcagagaattcaaaacataaagcagcgtgtaccttaaaattgttaggactgataagtatgattccaccaccggannnttcgctattagaagccccatcgacgtacaatgtccatccttctccattcagtacagcagtgtcaattttttcttctacgagtgccacttcagtgctttggaactcaagaatgaaatctgccaaggcttgccccttgatcacagatctcggtttgtacctgatgtagaactcgcttaactctactgaccatttcagcaatcttcccgatgcctctggctttgctaagacttgcctcaaagggtagtttgttaaaacttcaattctatgggcctgaaaataaggtcgcagttttcttgacgatattaccagggcaaatgctagtttttccatttgaggatagcgagtctcagcatctaacaagcatttactaacatagtacaccgggtattgttgtccttgatcttcacggattagtaccaaactaatcgcatattctgacaccgataggtaaatggataagacttcaccggatatgggttttgacaggattaggggctgccccaaatgcgtttttaatgcttgaaaagattcttcgcatttctcgatccattggaactcctttttgccctttaaaatctgaaaaaactctttgcatttatcagaggatcgtgatataaaacggttaagagcggggactttacctgtgagactttggacttcttttggcttagtcggtgatcgcatttctactatttctttgatcttcccagggtttgcctctattcctccctgattaaccataaatttgaagaatttccatgaaccgactccaaagacacacttaagaggatttagccgcattttatatcgtcacagtatatcaaacattgcttgtaaatggttgacatggtctcctgcatgtttagattttacgagcgtatcgtcaacatatacttccatggtgtccccaatcaaatctgcgaacatcatatttactagcctcttatacgtcgcacctgcgtttatcaaaccaaagggcattactttataacaatacagacctcgatctgtaatgaacgaggtatgttcctgatctagttcatacattgggatttgattatatcccgagtatgcgtccataaagcggagaagctcatgacctggagtggcatcaacaagttggtcaatgctaggaagtgggaagctatctttgggacaagctttatttaaatcagtgaaatcaacacatgtgccccatgagccgttaggcttgggcacgagtacgggatttgctaaccaatctgggtggaacaactcgcgtatgaagccgcgtgccaagaggcggtcgacttcttccttcagcgcttggtaccttgcggggtccattttgcggcgcttctgtcggacacctcgcacttcggggtcaatgttcaatcgatgacacatgacctgcggagatattccgatcatatctaattgtttccaagcaaaaacatcaaggttttgtttgaggaatgtcgttagtttttctcgctgttgaaaagttagtttagaaccaattttcaaaactttattattatctactggatcgataggtacctcaatggtgtcttccgcgacttgggcggttgtggcataatcgaggatcctggtatccaaatccggtttgtctttatgcggcacttgttctatcctgaagacctcctggcgaggggttggtgcctctagcagatagatgacaatgactgacttcttttctgtgagcttaaccgctgtgttgtagcattctcgcgagtctaactggattactcgcacagagcctactccagcgggagtagggaacttcattgtgagatgatagattgacgtcacgatcttcatctcttccagaattggccgaccaattacgacattgtatgttgagtattggtcgattactgcgaagtcagccatcgacttggctactacaggggcggttcccaaagtaattgggagcttgatccatcccttttaatgcaatgacgtc

SEQ ID NO: 59245 - DNA, 975 bp, Cannabis sativa
  modified_base (428)..(435): a, c, t, g, unknown or other
aaaaaaaaaaaaaaaacttttgctaaatgaaaaaaaaaaaacactttttattactaagtcataagaaaaacaaacacaaagacaataaattaaggcatgcatatatgtgtatgtgaaaaaataataacaagtgataactattattaatatttataattagtctacgagatgctaaaaggtatcagtgttgtttagtattttttttagttaattaggatatttactttccaaactttaacatgtactaaatatgtctcctgaaattttctagccgttaaaaattcccctagctttgaactattgacaatgttagatttaaggactttgtctaatttcattaattttactatttcagtgattatttatatactaaatcatgtcctcagactttgatatctaccaaatcatacccctcgaactttgacatnnnnnnnntcatgccccctgaactttcattcatgatagattttgtttttttactaaaattggataaaagttcttaaattcaacaatctcaatagttcaagggacatttttaacgaccttaaaagttcaggaagcatgatttgttacatgttaaagttcggggggtaaaaatcctaattattcattttttttttgtgcacaccgaataataatttttaaagaatatcgttaatcaatcataaaatgttacttataagtggtgctagtcacaccccaataatatatgttattttttaaaaaaatttaatttgataattaatctcataataattaattaatgtggcaatgtgtagaatatatagcataaaaagttaagaaaattgtcagcaaaagatattggtacgtatgatatttttgttgtgaaagttgtggaagtagttgtagtttcatgatcctaaaaaattaaagtcaagggggaatccttttagtttctcactacttattttatatacaaataaaaagaaagtcaaggacaaatttaattcttat

SEQ ID NO: 59246 - DNA, 653 bp, Cannabis sativa
atttccacaatatgcatttttataaataataataaaatctcatgcataaaccgtaattatttaataatccaaggtattaatcataagcggtctttacaaaaacactctaaacttggccatcaaaacttattttctcacaattaataattaccgaaaaggaaattttaactttacaaacaaatatagataaataaaaataagtcaaactccaatattctctaccttaactcaaattctctaaactcacaactcaaaccatcaataagagtatatatgcatcaagttcatactctcattgaacttcatttgagcacttgtcttcacattcctcaatcttttattgatgtcttctttcttcaaacaatctctaactgaagttttcttcaccttgtcgcattccttcacactaaatggatgtctttcgtgatttgacttcacttaaaatagccttcctgactaattttaaccaatttcgctctttcttacctttcacaactactaaaatacctttcttgataggttttcaccatcttttgtagagtagccataaccatgagaatccaaaactcccaaagagattaagctcctccttaatgtttaaacatatatctgacataaaatgttctcataacaccatcattcatcttcacctt

SEQ ID NO: 59247 - DNA, 611 bp, Cannabis sativa
aaatatattataaattttttttttttataaaaattaaattatattaaatattttctttttaattaattaatatataaaatcatttaattaagagtaaaaaattaaatattttttcatacttgttgcctcgggtttttctcaaaatacgtggccacggctacgtacgacacgtggaccaaaaggacacctcacccgggaattagctaagagtcgtatatagaagaataagtgtagttcggggagtgagcccccggagttgtacaaaaagcatgccctcctctccgggagttacaaatatagtaaggtacctccgagaccagaagggcttattcgaacagtcccctcgcatttaatgcagcatggggaaatcatctagaaacgtccataagaagacatgtcgtcaggcaaggtaagctttgtttaaggtgattacacgataatcgaaggggctagtgacggctctattatgaagaatcaagtcaatcaaggaaagataaagattaatctcacctaattcctacaatacctacggcataggttatgcatgccctatttggtatctcttgggaacttgtgctcatagatggctggcactgaaagacaagtgatcc

SEQ ID NO: 59248 - DNA, 1171 bp, Cannabis sativa
tgaaatcgttgggcaaaaaaacaaaaatgaacgggttattgttaggggtactatgcataaatcgatccaatccaataagaaccgaccgatccaattataactggccgtgccgtcaaacatttgatatccaatccaataatgattggatcagattggatgttatttctaaatatgatccaattggatcggatcggatggtggatgagatgtccaaaaatccaatacatccaacatccaatcgagctaattagtatttttatttagtttgaatgagtaattagattttatattattatacctaaaatttgtatgtatatatgaaatttaacattaaaattttaattttttttcttggattggatggatccagtccaatccaatatatactggatctaaaatattggatgaatcctatccgatttaaaaaaatactaagtctaaaatattagataaacctaaattaaaataataaatatatatgagatacatccattagatagaaccgatccaatccaacatccaatggatgttgaatcgattggatgactaaaattaattggatcagatccaatattggtgaaatctaacatccaatatataatttgatcggatgtggataggcctaaaaatattagatgtgatccaatgaacacctctaattattatggaaagacggctctgaagaagattttatttgaactagtaattaacaaaacatgaaggtcttcatttgaaaaagaagtggaagaggagtgaacgtgataagagttctataccaaaaattaagaaggggattaagaagaatgtcgatgaaatacctaagttttcattttagtttcttttctattttgccctaatttagaaattttgcctctgttctttttagtgtttttacatgtgagtttgattctagggtttcatatattttatttattttgtttttatattagtggtaggtttactaatttagaatattgttagatttagattttttttagtgtttttgacataaataattgtattttttctatttattttttattttgtatttgtattattttaagtttaagtttggccatggagttgtttgttaatattttgccaatagttatattaatgtagttttttatagtgtgtttattaattgctttcattttgataatgttattgt

SEQ ID NO: 59249 - DNA, 1278 bp, Cannabis sativa
aagtccctgtggagacgaactttgattacttatcattgtattacttgtttgtgattgtgtacacttgcgcaattataaagcaataaaattttcacaacaaatccctaaaaaaataagtgtacaattaactatattaaattttgccttgcagcaagtgctacaagcagttcctaccactgtgatggacgaaaggaaccactctctgctacagccgtttactgtcaaagaagtgtcagatgctatctacgctcaatgaaccccaataaaagccgaggtagtgatggaatgtctgcaatgttttatcaacattactgggatcatattggaacagatgttacttcagtggttcttggagtgttgaatgaaggtcatgacatgagtagattgaacaaatcaattattactctaatccctaaaattaagaagccaaaagcaatgggggattatagaccaatcagcctttgcaatgtgatttacaggctgatatcaaaagtgattgtactacggtttaaagacgttctactattggtgatatctgaaacccaaagtgcttttcttccgaaccgccttatcactgacaatattctcgtggcttttgaacttgttcatcatctcaaacacaagatgcaaggaagcaagggttactcggcactcaaacttgacatgagcaaagcatttgatagagttgaatgggattaccaattggcagtgatgataaagatggggtttgctccacaatggacctctctcattatgcagtgtctctcgtccaatagtttctcttttcatctaaatggagagatttttggtaatgtttggccaactagaggtcttcggcaaggggaccccttgtcgccatatctcttcttaattttttcggaaggactttcaaggcttctaccccatgaagagcaattgggtaatttgctgggtctaaaaatcactaggcgtgccccgtcggtatctcatctattattcgttgatgatagcctcttattttgtcaagcgaataatagctctgccttggccatcaaagagtcctcgcggtctaccatcaagcatcaggacagttcctcaatactcaaaaatccatcatgtctttctctccgaatacttctagtgatgcaaagaacttcttcaatcaaactttggggatgccaatatgtgaatgccatgaaacatatctgggtctccctgcctattctagtcataacaagaaagagttattcagcaatgtaaaggaaaaaatttggaagctcctacatgcttggaatgaaa

SEQ ID NO: 59250 - DNA, 1102 bp, Cannabis sativa
taagaattacttttgatattttttaaaaaatttccttttcacattattttcatttaatatcaatagttagttttattttattttcacatttttttttaaatcatgtatgatttttttttttttttaaaaaaattctaataaaatttcatataatttttattttattttttttttttgccttaatatttaaaaatatattttatttttgtttataggtatattttttttaagaatataaggtagaaaaaaataaaaaaaaaactagtacaaattaaggatacatatattttatgtaaaatatattttttttttctggggtgcaaataaaactccccttaaattatatctattatctaaagggaaattttcaaaaatatcattcttttatgtttaaattacaattttacagtctaatttttttaattataaaaataagcttgtaaagttttaaaattacaaaaatacactttgctaaacaaaaagttaaaaaaactaacaaacaacgagaaatcaacctcacaaaaactataaacattctataaaacaacaaaaaacaacctcaagacaactataatacaaccataaataaattataaaacaaccaaaaaaatgtttattatttttactgaagaggtatttttgtaaataaaaaagttcaaagagtaaaagatgaaaaaaatttccgttttgacatatttttgtaatttttttaaaaaattttggtctactatgtaaatttttcttgtctaaatgtgttgatagtgagaactcgtcaactatcttgttggtcagaaaatcaaactcaacttctaaattagaactaagatgaagagaaagatggaaataacttcaagtgtttatctcaaaatacagagaaaataaaaaatttcttttactctcaatatggtggttacaagaataatttttcaacccctttctccatctgaaagaagggtatttataggctctaatggcctgaggtacatggttgtcccagttggaatatcttttattaggatctagatttactaataagtatgtcttttttaacatcctaatatgaatttctaaaacgatgaaattaaacacataaaaggtatga

SEQ ID NO: 59251 - DNA, 1145 bp, Cannabis sativa
cttgttgaagacgtccctttaaatctgagtttttaccctctacctcggtgacccttttcatggattcttcattagccttcacagatgcattcagtttagtctcagcatcgtcagccctcttaatagtctctgcctcagcttcctctacattctattacaattccagatggtgcttcacctttctctccatagtagtttcactgatgtatttatcctggataatttgagcctgtttttcgtactttagagatagggtggtaatctgttggtctttctcttggacatccagcttgacctgctcttcaagttggcttccaagtcttttattttgatataagagcgtggaatgcaagtccttgtacctgtctccacggtccctctccgtcttgctcgccttcctttcacgggtcaaggccttgtccaaagagtcagacaccctttactttatagtagcttccatcttggcgttggcttcagctaaagcattggttgctttctctctccttagctcgacattggcatgcttcgccattagcacccctaaatcataggctagttgaatgaccatggagcgatttctctccaccatcaagtcaacctgtgaaagagaaaatacaagtgaatcaaacaatggaaaaatatgaagtgtttatccaagtaaaaataaagttaaacttatagcattagcctaggtcctcatagcatcagctacgtacattgcatcactgcttcccatcatggtaaacctatcagcaccgagcctatagcttgtagtagctctcaattccaacaggtcaggcaaaaatgggagcacatcaatttcaatgtgaggacagagcttcttcgtcatctcaactctgtttacaagaggagggcaagcttcatcccatttgttgtagtcaacaaactcagcattacgtatggaagagatgctgttggtcagttttttcatctttttgtactcgatgccacacctcttctggtagaattgctcgacggcttctaggcatgcattctctccttttgtcattgacaaagtcttgacaagaagagtgaaaggtgccagaggcaacggaggcaattcagtcctttccctggacagctgggtaaaggtggctagaataactctaggcgctagggtggtg

SEQ ID NO: 59252 - DNA, 923 bp, Cannabis sativa
attgtttttcattcattaattggtctttattgctgtgtaatttacataaattgaatctaaaagcttacataataaagttttgcttctaaatatcaaatggctacccctgcctgacttgcgtagcagaggccactgttgaagaacggtgggagtccacgccaaaaaggtcgtgggtactagctctcttacactctagtgttgagtaggtagaattgctactttgtattagtgttctgtaagctggttactgatagtatttgtaccactaatcgtccctctgtacagcttcgaaccacagttctaagtgcactagaccccaaaacaatcaacacacgaccccacatcccagaattcaccaaaccccgacacaccaacacaaccagcaccaaccagaccccaacatcccaaccccactcgattcccaatcaaaccaggacaaacaccaccaaagtcgagccaaatccaaaacaacctgaatcaactcactactaccaccaaaaccaaaccagaaacaagccaagactcacccacacaaacaaccaaaaccacaaaacgccactccaatagcaaatcaacacaaacaaagtcactccaaaacaaataaagccacccagaagcaagccaaacaaaccaaaatccaaccataatgtaatgaatttctaaccaaaccatgaccaaaaagaaattcaaattccaaccaaaccagaaaaaccaacaaagccacttaccagaatcaaattgcactcccactcgcacaaacgactggtgtctggccttcgcacacctccatcgcactcccaatcacccaaaccagagtaggcttcgtaacctccattgtcaaccacccacacaacagtgagccctttctcaaaagggactaaacccaatgtatttccttgagagagagaaaccctaggactcaa

SEQ ID NO: 59253 - DNA, 708 bp, Cannabis sativa
ctacattatttatttattttcttagtgaagcaataacactataacaagttactaacatttaactaatattaaatatagtaataatagtatacccaactaaaatgaaaacttataattctttatcagttagatttttatttataaatcaataacactattctatttcttttattacttactatatattaattattaattaatattaattataatatctatatatctatctatatcaatatatataaatataaatataaaaaagcacaaacaaatttatgtggcattttataacttcttcttttatttttcttattttttgaggctttcatactttgtccaagaaaaaaatacacatacacaagttacatattaattatgagtgtcttttaatttttgtaattcccatttcaatactattttattattatgattataattatatataacactccttttgtattcccatcactaataacattaatttgtattagtttatgcggcattttataatttttttctttctatttttcttattttttgagattttcatattttgtctaagaaaaaaatacacatacacaagttacatatcaattatgaatgttttttcaattttataactcccatttcaataccattttattattataattataattataatattctttttgtattcccatcactatacaatatataatatcctca

SEQ ID NO: 59254 - DNA, 1327 bp, Cannabis sativa
  modified_base (779)..(779): a, c, t, g, unknown or other
tcgatccttattcatagtgtatatatgtttgatttaattccgcattttatacataaacatatatatttcagtttatacatataaaactctaacaattttatcactggtcgtactcttttgagcaacgatgtttctactgatttgtttcttgtaatcatgaatgattgcacttaaataaagttaatgattttcttcaaaaaaaaaattgaaaagaaaatatataagataattctcttttttatatatacgagtccattaatatttaatatttactcaaatatcatatattatatggagaaaaaaaaacacatatgctattcatcagaattaaaaaaatattagtggcgtttgttaacacttttttaatcaattttttgtttttaaaagtggaaaagtgaaaatatttttcaaacacatgttctataaaactgtttttccttttcaattttgtaattagaaatcaaaattttaaaaccaaaaaaaaaaaattactttcaatatttttttaaactattttttttcttaatcaatcttttggattatgactagacccggacaaaacctcctccccacggccctggcgctgaacccggcttctcatccgaacccgaatctgacctcggacctaggcccgacttaaataaaatcaaaaaataaaaatgaaaataaactttacagaacacacttttgttttctgtttgtaaaattgaaaaacaaaagttgttacagaacgtatttttatttttcaaaaatagattttttaaaaacaaaaattttantttcattttgtgattaaaaaattgaaaaacagaagtattaccaaacggcaccattatgttttaaaaaactaacaaaaaaaaaagttagaatacgtccgtgtccaactgtcaccgctctctcttactttgactaaactaaaaattataagtatatatatgattctatatattttaaatttttaaaaccaaatgtaaatctttaaaaaatttaaataatctacaataataaaaataaaatttaaatagttgcttaatcatcactgcactagtataagtaaatattttcacctgtataataaaatattgaattgtattttcaatttttcagtattaaaaattatttagaattttctgaaaatttataaataattttatataaatacaacatacgattattttatgtatataaactctaaaaaactctctagatgcttaaaagatacaaaaaagggttaatttcacaaatacacaaaaacaaaaacaaaaaataacaaaaatacggtttcacggaattttaaacattattacaatttttttgattttattta

SEQ ID NO: 59255 - DNA, 1741 bp, Cannabis sativa
ttgtaactaattattatttagttatcagtcttgtctcatgacatggttggattctttgaaaagtagtaatttgtcttgttcggttttagcagtgttttgacttgtttgttatcaaatctacgtgattattactagttttctacggtatggcggaggagttcatgaacgatgcaatggaggaggaagagatgggaagattaatgtatgatgatgaggatgaagatctatcggagattgacgatcgttggtgtcttgtaggacgtttcctgactaaacggggagtggatttccaggcgatgcaacataaaatggctaccctttggcagccggggcgaggtatgtatgtcaaagaactcagtccaaatcattttctctttcaattttatcacgaagttgacatcgaaagggttattgatgggagcccttggacttttgaccggggccccttttgatctttgaaagggtgacaccgggtgttaacccgcgatcaattcagttgaatcaactggatttttgggttcagttacatgacataacttcgggctttaaatctgagagagtggttcgtgacgttggcaattacattggtaagtttgtaaagtctgatccaaacaactttgctggtgtgtggagggactatctcagggttcgtgtcacacttcgggttgataaacctctcgaacagaagatgcgattggaaaaaaagagtggggctttttgtgtggtcttattcaaatatgaggatctcccaacattttactttatttgtggtgtgcttggccattcggagcgcttctgtgacagattgtttgaaactcctcttcatttgatcaataagccgtatggcttggagttaaaggcaaccccgagacgacgacattacaatatgggcgctcaatggctccgatctggaatcgcgtcaaaggctggggcttcaagctcctacggtggtgagaggggacaacacagtaatgaggtggagagaaatcagggaattgggattttgccagccaataatccaagcatgaatatcgaatatatggtaagtatcctaccaatcattttactggaagcaatattgatatacatggaaagtcaaatgtcaatgagttggccacagaatcaatccagaataatgttttgcctagtattcaggttgttgatttgaaaagaaggaaaacaattattgaaggggattatattgaggaggaaattgatgattttactgggccatgtgataggccggttgtggatgctagtggggccgaagatgaggatgtaaacatgggctttaatgatggaattaaccaaaaaaactcctatggggcgggttctggttctcaggcccgccgggcattatgaatgttttgagttggaattgccgcgggcttgggaaccaacgggcttttcaattccttaaagagattatttctcagaagaaacccaaatttgtttttttttatgtaaaactaaatgtaataaagtgagaatggagtgggttggaaaccaattggactttgaaggggtctttgtggttgaggcccaaggtcttagtggtgggctagcttttttctgaaaagaggaaggatgatgggatttatttggggcttttctacaaatcatattgacatgtgtgtgaaaggagagagtaatgaaacttggagacttacaggtgtttatggggatccgaaccgtgctaacagacataaaacctgggaccttcttcgtatgattgctcgaa

SEQ ID NO: 59256 - DNA, 1002 bp, Cannabis sativa
tcggcctgcatcagtacacaccccagaccctgtctagatgcatcacaacaaaccatgaacttctctttattagatggtagggctaacactagtgctgtgattaatttctgtttcagctcctaaaaacttgcttcacacttattcgtccacacaaaacgctgattctttttagtgagctcgcttaaggatgttgaaattctagagaacccttcaaagaaccgacgataataaccagccaaagctaagaaacttctaacttcagtaactgttctcaatcttggccaatccttgacggattctatctttctcgaatccaccttgatcccgttattgctaacaatgtgcctaagaaaggacaactgagatagcctaaattcgcacttcttgaatttggcataaagcttatattctcgaagccgttgtagaaccatccggagatgttgctcatgctcctcttctgattgagagtacacaaggatgtagtcgataaatacaacaacaaaaatatcgagggaatccttgaataccctattcttcatgtccttaaaagctgggggcccttttgtttgtccaaaagacataaccaaaaattcataatgtccacatctagtacagaaaccgcctttggaatgtgctcttctaggattctcaactgatgatagcccgattggagatcaatcttttagaagaccgtcttcccctgaagttgatcgaagagatcatcgatcctaggtaaaggatacttattcttgattgtaagtttattcaattcccaatagttgttacgaaaattatgaacaatacgcaagtgcatgtaatagtaaactcacgcaggtgaggtcaaactacaaggaattgaactgaataccacttgttgacctcgcttttagccaacaacagtgagtcttatttgataagcgataagtaatttatagcgatagatatatagtaaagcaatgtaaagacacaataattttatagaggttcagccccgaacagttc

SEQ ID NO: 59257 - DNA, 1257 bp, Cannabis sativa
aggatgaggtctagccgcccaaggcctacaggatgaggtctagctagccaaggcttgcttgacctggcgtgtcactatagctctaccaagaggaggccagcctttggatgtaaaggccaaccttttgcaagttgaggacaaactttgttacacaatttccttgtagaggccaggttcccttagtcaaacggaatctcccttggtccggaagtcacttcttggccagccagcttgtgcatagatcttggccagcctataggctcaccttggctagcctgtaggcttttcttagctagctaaggatgttggtatatctccttgagggctcgctgcactccattcaattgttacttgatagctatgctatgtcttgcctcgagaccctgttctgctaccggctgagctgtactccacatgtactctatcttcggcttgcatggacatgcctcgctaggtggacaaaatttgggatgacattttcccccaagtccctattcaaacatctggtcagatagggactttctagctctcgtcttgtctgtagtagtctttgttgagcagccttgtctagccaagtgttggctctttgcatggcatgcttttggatctttaattttttctctgtatgtacgtcttatcttcggcatctcttctttgttcatgccattaacaagtttcaatctttttaagcttttggaaactttttgattgtcatataagtttataatctctttggtatattgatcctcatgacagttttagaatgtgtaatgtgtgactttttgatagaaaaaatttgattttggccttggctattattcttgactctttgagtcataaagaatacgaggctcatattcaagttttgaaagaaaaacacacattgggattcaaacctgaccttggccggcctgggaggtcttgctaagacctggccggtccttaggcttaatcatgggagttttccagctttacggttttaccctataaagcttgcttgttcatgcttgggtttggtgaccctggccaattcttggctgagtcatgggacccaggccaatcctttcaaggcttgagaaccttggtcgacatgggccttggttctaagtaggtggccagttttctatcctcttttaaccgacaagaatccagctctgtaggcatatacaaccttagtctcatgcgtggtttccttggaaactttatatgaaagttaatggtgagtctattatagttgaatgttcaacttaagactca

SEQ ID NO: 59258 - DNA, 1366 bp, Cannabis sativa
aactcccattaacccaaaggaacaaaagattacaaaatgtctgtatcaataatattttattaaataacataacacttaatcatttggctagaggatctacaaatatcgacttggtcttacaatattctatcatactgtctcatttcttgaccaagtctctaactgtgagatattttatttctatatgtttggaagcactactagctcattattttttaaaaagaaaacagcagtattcttatcacaatagagtagtataagagaggaaataaaatcaactagtcatatcacaatagagtggttttgatgttaattaattgaagcaacgtatttaacatgtttgtgttctgatattgctactatttttgttatgctaaaagtttttaagttaatactattttaaattatgtattttgtgaaaagtactaatcacactttttatattttgttaaatgataaattggaccgtgtatttttcagaatggtacaaaataaaattctgagctcaacttttgtcatttttaattttgatataatcaacctgaagccaatttcttaagcatgaacagatgaaaaaattgtaacaactatggtgatcaagacacattccagtcaggttattattaagttttattttgacaaaaaattagattataatattatttaccattttgaaaaatatatggtctgattgttatttaacaaaacaaatagtctaatcggtaatttttacaaaatacatagtctaaaatgatatttacccaaaaaaaattctataaaaatttgacaaaagatcacatacattgacttagtgaactaatctgttaagtcgtgcatatattatggggctaatatgctaaaaatattaataattttggtgcatttattaatttttaaaatatatgtaccttatattcattagtttttaattttttaataattttggtgaattttaaaatatttattaattaattttagaattaattaatatttttggtgctgggtggcttgtttggtaccatatatggtggtttgtacgtggtttaagctagtttttagattcttcctataaaagtgatgtgaggtaattgtgacatcttcagctcgagagaaatgatattaaagataagtttttttttttcattaattttataatttgaaatttttttttaacatttgaaataaaaattcatattttaatttaatattatcatttagtgtgtttattaaattttatatatttatcttatacatatatcttcacttcatttacttagttattcaaagatctaaatttccataagatataagtttgttgggttatttttaataattcaatatgtatgcggtcttacaaattaagaca

SEQ ID NO: 59259 - DNA, 999 bp, Cannabis sativa
gttcacagtgctctaatgtcaaaagagtgaaagaagaaatcataatacatggatgaaatggtagggaaggtttgtttgtccgaggaaaaatggataagagagataacatggttcgagaaggtggcatgaatggaaaatctcatccaaagtacaagaagaagtgttactgatgaatgcacattttttcactcatccttagtcaattattagatgaattagtattaatttttaaagtttgtatagatttgattaaaagataattttgtgatggactgagacctttgagctaatttttgacaatattttttatcattttctcgaagagcttatgaaacccaaaatgatggagctcgttactatcctttcaaaacatgttaaatcatctcatttggagtcaggacgcggaagttatgcatgatttactaagcaaggtcgaagcagtaaaagggcgacaaaaaatggcatgtggtgctatagtgccgctactaaaaaaagataaaatagagaaaaaaaaaagatatttttagtacttgggtggtatcgggaagtcatgcatggctatagcactgtgtcttaaggcgctatagcgtcatacatgtatttttgaatttaaatctattctaaataaattctattctttttaggcctatataaagaatgacgtaaatcgacttttggacgacgggagagatacaaacaagcaactttgagattagaaaacacatttgttgactgggaaaatttccaactgactcagagtctaaataataaataaatagaaaggactctaggaattatagaggtagtccccttatatatgggtaatgacctgctccccttatagttgtataatcttgagataatgtcgtgcaaataactaaggaagacaaaatgaattctagttacagctatcaagtatttacaaagaatatgtttcagagaagtgctcttggattcaagataacgaatttaggtcctttcccctgtgaattcattcac

SEQ ID NO: 59260 - DNA, 1406 bp, Cannabis sativa
aagttcatatttagggtgtttatcaacatacttgtaagtagatctaagatccttgtaaaataatttccaacacatagtcccatatggtccttattctcgactcaatgaattcagcctcgaaggtgatgttgggatcttggggagtctttgacttaggaggcttggaagatattatttcagcccaggtcacctggtaaagaagcaattgtgactctgggtaaaataagggcttagccaaaggaatatacgataaatatacaggcagcatctcgcaagaaatgacgtttactctcggttatttcttgtatgaaacgcctatagtgactagcaacttcttcatgggtagtttttattaaatggtctctaatttttgcatcgtttatctccaatttagactaaggtttgaaaattctgggtttgaatgggagggcaagttcactaggatattctgtgtctaaggattctggagaataaacttctaaaccagattgggacatttctacaaaaaagaacaatcccaattcctagatgaaatttattaaattagagacctacgaatgtgataaacctaaatttttactctacctaaactctaaaaattatccaaaaaaattaaattaaaatcgctaaaaccaaatggagagacaaagatgtaactaatagcatggggatcataacccaaaaaaataaaaaagaacagaagaatggagatgggtcacttaccgtttgaagtcgagtttttgtacgataaaaagctctacaaccgaagatggaatgaatgtcgtgataatctttttgaactcctgaggtcgaacagtatatctgagtgtacgcgcaagaaatatgtcaatgacaatgagggcatgcaaagctacaaaaaatcagaatggactttttcgcagaaaaagctcaagaatttttgaaatggcaaacatggaggaaaggtgattcctttttcagttttataccttgagtttgatctccgttagattaaaagacaaaagatccaacgggtagaaatcgagggagaggtcgaaaagatggctcattaatgttaatgatgtgcttcgaaaacataaacagccaaattcaaaagcatgcattttttcaaaatagattatgacgaatataccctcagtaatcatttaaaaatacttttcattgaaaatgactttttaaggggcaattgttataaccgaaattcggctgtacttcagaaagtgacacatgtcaatctcgtagaatatgaaccaataaatataatgataattatgtcattaaatgcaaaatggaataactcatagaataaatagagtatgtctgtaactcgctggctatatagtcttaagcgagataaggatgtacaaactattaattcatgtattggcgagaaaccatcttgcctc

SEQ ID NO: 59261 - DNA, 810 bp, Cannabis sativa
ataattagtattactaaccacaataaaggctttgataatttgatcagtgtaatattgaggatcagaaatttgcaaagcaagcatatgatcaatcatggtaatgtcttccttcatactcctacgctcatcaataagcccttgcaagaaatcatccaatctcttagcagcatttttcaacttcatctcataaccaaatcccaaccatttcaacccatcaggtaaaaactccgccaaattcgccactccgcctccggagataatctcatccttaattttcctaaaccgcgaagcctcttcgtcttctttgctgatgtcatccccgcaataccgttttccagccaccattctcattatgatgttgaaagccagatctgaaaacacgcttttcatttccactttattatttttcgatgatgattcatagtgaagtgagttctgtgaaagtttgattagcatgcttttaatttcgtccgtacgcgtgtccaagtgtgatttgagccggctagctgagaagacctcgattgagccgatttttcgcaagttgcgccagtggggcccataagaggaagatatcattgtggtgtggttataaccgatgtgttttccgctcattgtgcgtgagcggttggctaaaacaacgtcgtttttggtgaagcattcttcggctgcggagcgtgatgatattacaacaactcggcttgaaccgaaccaaaggctgaaaacggtgccgtatttggttgccaggtggcggaagcatctgtggacaggtggctttattagatggaaatgacctatgagtgggagaggata

SEQ ID NO: 59262 - DNA, 1033 bp, Cannabis sativa
tatatattgagtctataatacttgcaaatatgtagcataacagaatatgattcaatccattagtgatttaactctagttcatacctattataaagtatgattaatcactaattctgaatttttcaatagaacaagaacacaatttttcttcttcaacctctacacagtctttcatagaaatctaaatgttgtaacagaattgtgtagacaagtgtaaacaattcttacaactaccaagtaattttcgaaagttacaagaagaaagagaaaaagagtgtatttcgaaaataagagagaaaaagaaagagttttctgagagacaaacaaatgttattaataactctatttaagctctttaaattttaaagttttttttttccttacaattaattaaacaagcgaataatagggagaagttgaaaaatatatcttttttgtgtccattaatcaaaaataccctcatattatattttattgaaatataccttttgtgagtgagttgccaaatatactctcaccttctacttaagtatagcatataatttacattaacttaaggggcatattagggacatcatctataaaagtgggtatatcttaaagaaaataaaaataaaaataaaggtaaaaataaaaataaataaagtaaagtaggtatgcaatgtaatttcttccgaataataaaacaagagactcaatgcttggtcaccaagcatagtcggaaacctatagggcttgaactttatttgtgattatttattctctcaaagcccaataaacttaaataattctttcattttaatttataccataattaatttattctttttatttaaataattacatcaatataattattttaataaacacaataaataaatatttattattaatttataaaacaaaatatctaattaataataaaacaataatgtgaatattaattgattaaatatcaattattgtaacctatcgttaaatattatccttgtaacgtccccgcttcaagcatccattgggcccttacacccac

SEQ ID NO: 59263 - DNA, 614 bp, Cannabis sativa
ctaagaagcagaatgttgttgcatgctcaagcactgaaagtgaattccgtgccttagacaacactgcagctaaactaaagtggattgtgtccttactgactgagtggaatgttaacttgtctcattgccatgttatttgggttgataatcagagtgcatctgctttagctgttaaccctgtttcccatgctcgatctaaacacattgagatagacttgcgttttataagggatcaaattctggaaaagaggctctctgttcgatatgttccaagtcgtgatcaagtggctgttatgctcacataaccattcatgacaaaggatcgattcatctacctatagtccaaactaaaaatgactccaacaccttttcatttgaggaaggatgttaacactattaacaaatcctagttaattttctgtaagcttaagttagttaagtgtgttcaattagtttaggtagttaacatttctgttatgagttgtgtgctatgtttttcttgcctctttctcttgtatatatacattgatcttcattaataaagtgagcttttccaattctgtttctctatgctttctctctcaggtttcttctctacactatgcaccatattt

SEQ ID NO: 59264 - DNA, 560 bp, Cannabis sativa
ttctgtaaatgtaaaaattcagggtaaatttttaataagtatattttaggaggcatgatcagatatgttaaaagttcatgagataaaattgctaattatttttacttcaattattacgtttgtatgcctaggttaatttttgtaggggctgaaaaatatatattcatgttttggtacaattaaatataacagtacaccgtaatttgttattcgttaccttaatcacaaggaattcactttacactgtaatttgttcttcattaccttaaaccacgagaagaggatgtcgaaggcaggattagtgattggagcaaagtcgtaacaaggtagtcgtactgaaagatgcgaattgcagccagatcacctactttattagttactttactatttctacgataaatctttttttatttatttttatttttatcttttgattaaatcaattagcacgcttgagccaagacgggccaggccagtgcactcacctagcctatgatctaaaaaaattctctttaaaaatacatatatattttaaaaaaattcaaaataccacatatttt

SEQ ID NO: 59265 - DNA, 712 bp, Cannabis sativa
gacccatcttctaaacatttctttagataaaaaatctaaaaaaaaaaaaaatactatattttagatttttatttttatttactaaaaaaaatacaactattattaaagtaagcctaatttgctttttagaaatataatatttttagattttattgagaaaaaaaaaagtcaattatttttttttctgaaataccaaatttaaaatatttccaactacaaacataagtttttcttaaaaagaaaaaggaaaaaaaaaaactttttgtccatggccttcaatcactaattttttttattattattattttttaaattatcatgtgactctccaattacattaagtatcattttttttaaaaaaaaaatcttatctaatatgcctatatttattaacttatatttttatttttattattataatttatgtaatatgtcattaaaaaattgtaagtaattaaaatattactttgaaatttgaatacacataaaaaaaaaaattgagaatctacggcttcataatttaaaaactattttcagattataatttttcaaaaaattaaaaaataatttttaaaaattaatagaggcattcggccaaattttttaaaaatagatttttaaaaactgagatttaaaaaactagaaaacagaaaacatctaaatgttgttttttattttcaaaaatacatttgtctaatatattcttttttac

SEQ ID NO: 59266 - DNA, 854 bp, Cannabis sativa
ctgacccaaatgagggacttccacttgccccacctcagttccatcttatggccaccttgtatgccacaaaacattttaaccacaatgccctaaagaattttccagagaagtactagaaagatcgatttctagtgagtgtcaaagaaaaagcccccaactccaacctttacttaactgctttccactgtgagggggataggtgtagagccatcctcaaccaaccctgggtctttgacaaatgccctgtccttttggaaatccctgacctaaaaaatccatgaggaaaattcctttttgggtccaaatccacaacattcctttttctcgaaggtcgatctctcttgccaagttagtgggccaaattacgggcacccttcttgagatacaccaaccttcacttttagaaatctggggattctaccttcgggttaggattatgtttgatgtcaccaagcccctccctcatggtatcccaattctctttcctgaaatggcttccccaacttggctagagttgaaatacgaggatatccctgaccactgctaccattgtggccgtcttgggcactcatattttgcctgcactgagtgtatgagggcttttgacgagtccaaccaaccaccccctcccttatgagagtgttttgcaacgcactgctcgcccaaactttggcccttttgggcccctcctattcccaaacccactcctccatcaccctataccacctccccaaaacaaatctgccccagtgctaaaccacaacacaaacaacctgatccctgtgaatcatctccgtggccaagtcctgcaacaggactttgttgggttttgtgccctaaataaaacccattac

SEQ ID NO: 59267 - DNA, 841 bp, Cannabis sativa
gccaaaaaaggactttacaatctctccttttggcattttagatgaacaaaatattttttaacaaagaagtacctgcaaatcaaagttaacaagataaaacaaaaattccccctgagaaacacaatcgaaaactgaaataacaaaataaaaggctaacttttaatccaaagtaatcacaagtaccaaacacaactctccctggaaaaagggtccagagttgagaaaacaagaagttaaaaacaaaatattactccccctttttgtttatctaagcgccaaaaacaaaaaatatgaaaatatagaaatatgtccaacaaaagcaagaaaaagaaagaaaacttatgccccatagagcttgatcaatgaggacagctgcttggacatcttttgctgaacctcttccatggcagcaagacaatttttcacctgttgaacctcatgcttgacctcctagacatctgcaggagcagaactcgaacttgcaccaacagcaactgcagcaccaccaaaattggagcagtaggaggatgattcgagggcgtaggatcggattcttccatcctttttcgggtgccctaggttctttgtcttagccataggaatttgaaagatagaaagaagaacaaggaagcgaaaaacacaaaggaataggaatcggttaggtagtgagaataaatgacaaaagaaaattggtttaaataaacatgggagagtggagtaaaaaagaaaaccaatttcaaattttgaataaccatcagcccacgaacaccaaagaaaaccaccccactctttttccacaattatttttttaaaaaagaaatagaaggaaactagaataacc

SEQ ID NO: 59268 - DNA, 899 bp, Cannabis sativa
tcctagaccgcctgaaacccaatcgtccaagcccaatcaccatcgaccaactctccacctctgcctttctttgttcgatatttatcgacattagacatgttcttcactctaggattcaaatcgtggaatgggtgtgggaagagatgcaacagatctagacatcgatggcatgaatatatggctttacaggaggagacgctacaaaatctaaggatttggatctgtagttttttcttgtgaggtttgttttttcattttattcgaagagttcacaccagggtctttcaagtcagcctcaacactcctgaaataaagtagcttactagttcaatttagatgaatataatttttttgatgacaatgtgtactcaactcaggaggcattgtgattaagataggaaagaacgcactcacactaccaccacaagagagaggtgtgtaagagagagagttagagaaagagagaggcttgcatgagagagaaagagagaattaaaaaattcaattatatttttaaacctgaaactgatctctcttttttctcttctccagttattctgaatatatcatgtaaatatttaatgttataaacaaaccctttcatttaattctataaaataaaatataacatttattttaaatttaaattttaaatataaatatcatataattgattaactaaaattagttataatcttttatttaatattatattttaattttaaatacatattgttaatcgcaaaaattttaaaaagtaagtattcttataaataaaaaatgaaaggatgaataattcaagattctcaaggcaagcaaaaggagacaaaggatggcccctacctcctttgtcctcaaatccccttttcccacatcaggctgctcctcaatgcccgtgt

SEQ ID NO: 59269 - DNA, 1055 bp, Cannabis sativa
gagaattttctattcttgacttgtttattgaagtgcctttctaccttttgctagtaggcctgtaactttaggttggcttaatctcttctttcttctactttatcaagggactcttccagcatggtattgtttatttattggtcatagactattctcctatgagacagtggcactagctttataggcaacatcgtcttatagccataagctagagcaaatggagtttgcctagtggctgttcttagtagtcctatgcgaccataggacctctgtgagctattcaggccaattgccttttgcctcctcaaggcacttctttagggtgtccttgagggtttttttgacagcttctaacttcccatttgcttgaggatgggccataatagacatgcttttgatgatgccattcatgttgcggaaatcaatgaacatgtcactatcaaactacttccccttgtctgatacaatcttctggggaagtccgaattgacatatgatgttcttgacaataaagttaaggacttttttagagatgattgttactagaggttcaatttcttcccacttgctgaagtagtctattgtgactacaacaaactgtacccctccttttccctttgggaattgaccaattaggtctattacgcaaactgcgaagggccaaggagactggatcatcgtgagctcactgggtggagctcttggaatttttgagaatttctaaaaatcgtcacattttttgatatagtccatcgagtcctcgatgattgttgtccaaaattacccctatcagagtatcttcttagataggctttgccccccagcatggttgctgcagaagccttcacgcacttctatcattacctactcggcttcagctttggtgacacacttcaggagaggcatggaaaggctctatttgtacattactctgcctaggattagatacgtagtagcttttcttcttagtttgtttgcttcattcttgccttttggcaaggcttcagttaggaggtatgctgcaataggtatcatccaacatgttgacttcttat

SEQ ID NO: 59270 - DNA, 728 bp, Cannabis sativa
  modified_base (323)..(326): a, c, t, g, unknown or other
tatttgttaaattatcaaaattttatcataaactaaatttaagcatatattttttccaatttaaattctattatatttttaaaactattttttttttataaaagtattagttttagtcattaacttaatgagaaataacatataaatgttaaacaaaaatttttaataagtacactcagtgacaaatctataatttttattttgtgggggcttatttatcattaaaaaatatttataattatattataatcactcttactagatttatttaattttgtcagagcttttttattattttggtctataattatcaaattaaaaannnnacatttaattttttaaaagacaatatttttgttaatgggactatagccccacattgataatagtagatccgtccttcagtacactttacatataatatctagatattatataatatagtaaatatctaattatatttgaattagaatccaaattcaaatataaatatctaatacctaaataacaaatatccgttacatcttttattttaattattatcttttcaaattaaacaatgatccaacaattcatgtaaataataattaaaagataattagattaatttaatttaaattattttaactaataaaatacttaaattaaattaatcatgagcttttatatatcaccatacacgtctaaattggacctacgcgtgtgggccatattttaaggtccaaaat

SEQ ID NO: 59271 - DNA, 973 bp, Cannabis sativa
aaaaaaaaagaaaaaagccataaagatgacacaattaaaagccataaatgacatctaaactatcaaaaaattggtgcaaaaataaagctaatcaggaccaccgctttgagtttgaatttgcaagccaactttcttggagcatagaatagtgccttggatatgggagacatgtgaaggagtgacgataacaagtggttttggggttgtgtcaaaggtgaatctaagattgtgtattgtcgaatttaggacagacatatacaattggttgttttgagggtaagttttagacttgttacatcggtgggaatatattgcgagaagcatttaaggaagttttctcaaggattagcaattgaagtttagatattaaatgagagaaagaaaaatattatcttgcaaacaaaccaaaatgagaatgttgagtacttcatttttctttagttctaatatttttgaattactatgaatttagaactatcctatttatagctttatatattggagcaggggcaaataaattaattaaatatttcctagtttgatatcattaagtcacatgcggtacaaaaaaattcaccaaaattaggcattattgttaggtgcatcccttactaaaaataaatataaattgtacattaagtagttgagcatcatttgttgatggaaagaagttaagatgccatattgaagttgactatggaaagaaaagactagcaaatatttatctatggttctttttatcttgtttttaagaagtgataagaatcactcatgaatatacgatgcaaatatccacaaatattgcagaaacctcctcgaaataggatagatcatcgtctaaccgaatcgtatgctttgtgaaactatgaatttctaaagtaagcaagcaacatgggacaaaactaccactaaaaatttagaaaataaagctacacatgtaatgaccgctctagtaatgtggattagaaaaggc

SEQ ID NO: 59272 - DNA, 2545 bp, Cannabis sativa
  modified_base (2211)..(2212): a, c, t, g, unknown or other
  modified_base (2431)..(2431): a, c, t, g, unknown or other
attattaatttatcatcaaaatatatagtagagaaacaataatgttggtatgatttagccatacattttggaaattttcatttttatgctcttttagcaaagttaaataaaaaataaattatatgtatattttatgggaagactaaaaaagaaaaacaatatgaaaatatagtttagttttatcctaaaggtaactagataaataaccagttgtactgtaggataaaacagctatagcagaactatgaaaaaaaatgaatatttgataaattataaattttaaagtgaagtgagttgttaagattctattataataatgataatattttaatctagtttattataattacaaatacaaaacttttattttctatatatttttaattattttttttccacagtataaatttacatgcatttgataaaaataatttttaatatttttatcatttgtaaaagaaaaaaatgtagtttataaaaaatttaggttgatattgtttgtcaataataaaaatataaatataaaatatatttgaaaacaaaataaaaaaagttagaaattgaaatattatttattttaaatattttttcctacaataaatatttttattttttgtaatatataataagtaattaaataaatttttagtaaaaaataatttattatagtgttttaatcaaaacaactttttctaactgtagctttttcataaatctttcaataagctgttttttaactgcttgccaaacacatttttgtcacagttttttttaaaaaacagcttttaacttttttttaaaaactgtgccaaacgggccctagtctttttgaatttttctaataaaataatatttttgagaaaaaaaaatattttgaaaaacttgtataaaaatccataaatttgtataatttgaaatatacatatcaaaacttttactttatattatatctaaaaatgcatgcataataccattattaggtgacatattatatatgatgatgagtagtagttgaatttaaaatagactaccccatttaactactattcataataataattttcatcaaatgatgttgttaattatgtgaatataaaggagtagaaaaagtattatatatataccttgagacactggataaccatgttgtcttaggagtctaaattcaagagaattggcatagacatttttgttggtgttgcacacattattgttgttatatatatctttcaatatgtcattaatttcattctcaaagtggtaagagattccaagtctttgcattacatcaattagctcaagttgagataaaggcttctcctcctcttttgctctcttcaccattactcttacctcttcctttactttctcaactcttttggcatatgctccttcctaccacacaaacacatatctaaatatatatatatatatatatattatttttggtatctaatttttatatcaagtttataatttaagatatatatgacctatattattataccaccataaatttgagtcggttcttaactaacaaacaaaatagggtttcaattccaatcaacccttttcgggttgattagtggaaaatataaattttgtaattgtgccataacatatatattatgagaaactcataaaaatatgcaatattgaaaatgagttggttcaaataattaattttaaatgtatttatttatacacgtagaactattttaaattttatttttaacgataaaaattatttcaaaaatttcaaaaaaaaaatatatattgatagaaagtttgttataattcaaattatttaaaatgtacatataaatataactaactatatttacacatttatataataaagaaaaaatcgagttatgtatcttcttttagtacatcaaattaacaaagaaaatgcataataataataataattattgttaccttgaaaggggtagaaagtgattgtacataatcaaaatgccaaagtgaaggttgatagtttgctgatcttcgagaaataatattattaatattattattattattggtagacattaatacagttttattatgaataatattataattattatggtttgaacttaaacatgatttcacagatctagtgaaggcattattattattactattcaagctaataatactacttaatattgcagccattatagattatattattattattattanntatatatatatttatgtatatgggactaattgcttaatttgttattctaatactctcttgcaatatatgtatggatgatatagtttggctctatttatatacaacaagattgcaattaattttattatgatttaaataagatagagtctaattaataatttttataaaatctataattaaaagcagtatttacctacccttattattattattattatnattattattattattattagaaagtgtcatgtcatagtcacacccaactaagcatttgagtgaaactttataaaacgtgcatgatgatgaaattgaaatgtcatcatatatata

SEQ ID NO: 59273 - DNA, 917 bp, Cannabis sativa
aattgatgacgtcgggtacttccctcagaactcccgctttatcccctaaaacaatcagacctaaaaggatagcccacatgttaggaagtaattgagcaggagcaattgagtaatgtagaaggaactccttgattaacttagggatgggtagccttagtctgatttttgacttgaaccaataagtatgcaaacatacccactcaacctgagcggagtccgccctctcatgtggcttaggaagtctaacttcgacccccgacgaaaaaccacaagacgaaactaggaagtcgagttcctgctgagtcagaaccgacagacaacttgacttaacatccaaataggaactccccagggcctgttttttcctcttagatttcttcaacggaggaactgctaaagtaaccccctcaaaggggatgacttgaccactgatacccgcttcacccccaaagtgagagcgggaaacgatggagacactacctagacactccacctccaggtcagcggggacatcgacattctcgaccttcatgggaggagtgtcagaaaccagcagggattcgacgaacccaagagctatactcgaagaaagagagtcagaaaccaaagaggaaacgcctggataatccacattcgccattataatattaataaagcaatatttggaacccaaaatttacctaaagaaagaagggccaaccctaaaaacaaccaccccctctacccacgaccctcgaaaaggccgcaacagggggaataccgaagttaaaataattggcgaaagaagggaggatctagaactagggataacaccccatcatcaggaattcctaagtatcgcaacgctaactcaaaaggttaaaactctaccgtttcaaaaaaaggaggagagaaaaagaagaagagggaaaagaaga

SEQ ID NO: 59274 - DNA, 956 bp, Cannabis sativa
tatcttatgctgcaagggctcaaattgtactctcatacctcaggtttatttcctaatccctctaaaactgccttttactgcaacaacatgaatgataatgatattaaaagagtccttgatgcttcgggatttcaaaggcaggatcttctatttaaatacttaggaatcccaatctgtccaaagaggatttcagcagctgattgtggtactttaatagaaaattttttggctaggataagatcttggagttcacgcaatctctcctttgcagggagagttgttctcatcaattctgtattgatggccatccattcttattggtgtcaaatcatgattcgtccaaagaaagttgtgaatgagatagaatctatttgcaaaagttttttgtggaatggaagccatactctctcaagttcaacagcagttgcttggagctttgtttgtctacctaaatcagctggaggactaggcttcaggagtatctcagattggaatctagcagccatgttcaaatatgtttgggccattgcaaaaaaataagacaacttatgggtgaaatgggtccacaatgtatacatcaaggatgaaaattggtggtcttatagggccactccaatagccagttggtactggcacaagctggtaaccatagaagataaggtagtaagcaattttgatgtatcctaggtagagaatgacaggtacaaagtggcagagggatataacggtattcggcctattgctaacaaagttgaatgggattcatttgtttggtgcaggttgaatattccaagcatagtttcattctatggctatctatgctcaatagaatcaaaacaaaagacaggttgcagtatatggagcttgagaactctaaatgctttctttgcaacactgaagatgagacagtgcctcactaatttttttgagtattccttctcttcggaatgtttgga

SEQ ID NO: 59275 - DNA, 832 bp, Cannabis sativa
aaaaacttaatagtttaattgaacacaaatactaacttttctcggtaaacaaaagatccttttatctaaattttctcgggaaacaaacaaattgaacgacgataacaaatagcatgaatggattgtactacctccttgtgatttttcagccgcaaagctgcgaattagggtaagaaattgcttctgtggatcacttccagttgttcccgccatgaccgagtgggtctcctatattctgtttcgcgctagttctacattcgatatttcaatcacagccgtatttatatatgttgagcgagataaagaaagctttactgtcaaaggcccataaatagagcccatcaaacccaaactatttaggcccaaacactttttagtgacctgatcactatgtgaattattctaaaatacataaataataataattataataatattaattaataaaattaattaactttttttttttattttcaatatcacttagacactcaaaaaatctttattattgttattattattagcatgagtaaataagtttattttaagtatcatactacaagaaatgttatttttgttggtattttttgcaggctgtttaagcagttgtagcattggattgggctcttactgtgtgtctttctttacatttagttgaatctgattgtttagcgattgtaaatgtattttttaaacacttttctttcctcaatgaacttagatttttgttagagggtttagctagttttatgtccagtttttttagagtatcactaattcatgttcgtcgaatacccaataaaactgcacatagattaaagatcggaagagc

SEQ ID NO: 59276 - DNA, 863 bp, Cannabis sativa
atatatatgtatattatataattttttaaaaacaatttaatataataacttgattagtatatatatcatgacgttaaaagtttaataagatagttttttttcttgaataattgttaaaattttattggacgaattttttaatttttattttaacgtttgataaatcgcaccacaccgcaccatatttttgcagtgtagtttttcgcagttttaagatcttgcaatgcggttacgatttaaaaaattacaaaaatcgcatatgtggtttagtttgagaaaataacttaaacccgcatcacccgcactgcgaacacccctagatactataataatctatatccacatattcatataatgtaagaagaaaaaaattaggtggcattttatatgattttctttctattttactaatttgtgaggctttatcattttataagaaaatttgatgataaatgttctacaggttataattttttatttattattttataaaaattttaatattaaaaaaatatatattataaaataattactgtaaaaaatttattaaaaattaaatattttttaatatatatgaataaatacaatatgtttttaatatgtattacatgtagattaaatcaagtttttagttaaattttgaaagtttcttccaaaatcctatccaatttaattaaaatacaacaactcacttccaatcctatcaaactataactagatatatattttttttaaagatgaaataggaacttcattgaaatattagcattcagagtacaagagggcttttaaatcagcccaagcattatgctcaaaaatgctacaaccagaaaaaaattgagagtgcctagccacatagtggg

SEQ ID NO: 59277 - DNA, 889 bp, Cannabis sativa
tatctttttaataaaagtaatgttaaataattttgaatataagatttttaacaaaaaatacattattttcagtaaataataattatgaaaattaaataatattaaaaagaatatgatacatatcacttataatttaaaagtaaaaaagcttatttcttttaaaaaaaaattaaatttatgatatacactatatttatcaaattattttttataatccgatgatatataaataattttaagctattagataaaattatccaattcatcataaaactcattatagagaataatattcttacaatgggaaggctaccgcagaactcattccaatcacattttttaccccaagcggtggggcctcgaccgtcgaaagtgccagtaccagagatagtgagttggtcgacataagcaaaaacgatccaattgttgccagaactgtaactagagcccaatccaggtgcctgcaatgtgccttccaaatcgaaattaataggagccttgcagggtccttgtagcatcgctgtgcttaattggaatgtccctttcggcaccaacactttactcggtgttgatgatgcacaagccccattccaagcctctaacaaactctacatgcataaatacaaacaatataaaatacacttttaaagttctatttaaatagagcaaatcgctcagcaaaatagataacaatttataaagagccgaaatctctgtaataatacgatcaactaacaatcgagagtttctggcaacaaagtgcacacctcgattcaaagaaaatacagaaacatttcttaaaaataaaattcaaattaattacacactagtttcttaccttggaaatatctgaactactagttgttgcacctttttttgtgatatcaaa

SEQ ID NO: 59278 - DNA, 645 bp, Cannabis sativa
aaaaatttacttaatatttttaatatctataatctcataataattgagtgagatggtaagctatgttaaaaacataagtgtaccaataaattattttgagagagtatacacccaaaaaaaaaaaacacaaaagctcacaatatcatatgataaataatatttttaaaaataaaaaataatcaataaaaataaaaataaaaaacacaatcaaccaacaaaaaaatataacaaactaaattggataggtttaaaaattctcaaaatttattacttgttatgcttttctagagggagggagtgagaaatattttaattataaactattttcatttttttaaaaaaaaataataaacacgacaatattaattcgtaccggtaataaataaacatacttttatttaagaataaataaataaataaacttactgttatctgttgtgtattttgattagttattgtatatagtcctttttggtaaaacttttataacagggatctccagaacaaagttttagtatcgttataatgtccgctactagtgttttgttttagtgaagtttttagtattatcacagattttaataattaattaatctattatgatttgtatatatagtagtgttaaagagagcttcaaaagtggac

SEQ ID NO: 59279 - DNA, 945 bp, Cannabis sativa
tatattttaaaataataaataattgttatttagttttgataataatgttaaaggtaggatttcatatatatatatacagattattagtaactttttatatttaattataatttattaatttcttaaatattaattaacatgaaaaaattgctaaataaagtaacataaatgtatcttagttagcaatcaatttcatgggttacttaaaattatttttttttataaatttttaagttatcaacttgtttcatatgaatttttgtgaaatttaaagtttggttccttatctcttattaaagtataaaagaaactaaaatgttacgttatatttatatcattttgacacgatggaactatagaagttttgagcaatttaaagttttggaattaaaagtaatcttatagttacttttatattttttttcttaataaaaaagaagaagtaactgataacttacaaattgtttatacctctcaactaatctcgtagattactattaaattgtttgtaattttacatgtaaaagttaccatacgatatgtattctatataaatttattttattgtattatactaaattttatatatctttaaaaataacataaaagttaccataaaaataaataaactaaaatgtaacatcattgtatcttgatcaataatatataggttgaaaatgaaattatattaactacctaaaataagtaacaaaaatatatatgagataatatttttcacaaactaattaatactttaatgtcctatttttgtaataacatctcatattttttttttttgattgattaacaacatataaaataaagtgaaaagttgcttttattttggatatatggtttcaacatttttaaatgatgacattgaaaaagtaaattggagtggcactatgtttaagcctggactaatagtgtaattgattttttttt

SEQ ID NO: 59280 - DNA, 1261 bp, Cannabis sativa
attagcgattgttttcaactgtcgctatttttggtaccgactgtagaaaactgacgcaaaataatgtagtttttgtgtctatgatatataggtcggttttaacaaccgacacgaaaagaatatatgtcagttgcaaatcgacgaaaaatactatatttgtagtagtgtgacattgaaattaagtcatttttaggagtagatgtatccatttgttttattagttagttgtattttcgactagtacatatgtctcttgagagaaagagtttatattatatatataaacgtgttaaaagaaaaatctcccttggcctttatgttgtacaataattaatattttaaattatattgatcttttaaaataaatcatttgtattgtattgtgcatatattattactcaaataaattatattgatagcttgtgctggtgaaagtaaagatgaaactcaagagcttcataaagttttaattttcaaatgggaaaattgcagtaaaagtcctcaagctcgagatttttgtaaatttgttggtcctttttttttaacagatctgttaatttctccctaaaatatcatatgttgatattaaattgaggcataagtccctaaaaaatttacgttgatgcaaataagttcccaaaaagtttactttgatgcagataagtcgtaatctcaaaaaattgtggatatagtttgtaggtacccaatttaacaacttttttgtagttcttaaaacttctacgtgtcaaaaatttattgtttcacaacataaaaattgtttaaaaataatttaaacatacaataaaaaattattaaaaactttaatattatttttcattatcttttattaaagattaaaaaatattatatatataaaaaaccttctacgattcgccacccacccttctcgatggtggaggctttcgccgacaagtgtcatcttttcatcttcactttcttcctcatcccatcccacgatcccatgcaaaaaactcgaaaaaataattaagcaaaaaaaaaaccctaaatagttgcaccttactccaaccctctccctgaatctattctgtctgtccccatctacaatgggtggtgggttttgagggttgttttgtgatattagcttctctagttcaaactttacttagatctttttcagagcgaccactcttgctaatataaattggagagttttagtaaagcataccagagctgtgatgttgggctgggagtgaacttgtgacagtcagtagtctcatga

SEQ ID NO: 59281 - DNA, 1061 bp, Cannabis sativa
gtttgaagaacttttattttgtgccaagttgcaattcagattcagctttgaaatggtgaaaggttttgagtgcctcatctttggttttaagcatataaatccatgtaaacctcgaatatgcatcaacaaagtggatatagtatttatagccattagttgaaggaatataggagggtccccataaatccgagacaaccaactcaagaggggtagtgtaagtagtgtgagaagcctttggaaaaggtaatttatgaattttacccaagcaacaggctgcacaaacagaatttgacactttatttgcattttgaacattacaagcatgaagcacagacttgacaaccttttcagaaggatgtccaagtctattgtgccaaatatcaaaaggagacatagtatgcatggagtgtacatgagtggaatctatgtttaaagtgggaatactggctgtagcagtgagtgtttgtggctgtatagattgaagagggacggggctgcttggaacaggtggtgaggagactgaattcagcaggtgtaactgagaagaatcaaaggaatacaggccattccggtatgtcccagtcagcagtacattgcgagaaacctgatctttgacaaaacaaacatcggggtgaaactcaaaatatacattgttatctctagtgaacttggaaacacttaagagatttttggttagtgcagggacatgaagtaaattactcaaaataagaggagaaggaattgaagcatttgaaagaaaagaataaccaatgtgtttgataggcaaacctgtaccattgccaacaaaaagctgttcagacccttcatagttggaactggcagccaagttttgagcatcgggcgtacagtgattggtagctccggaatcggggtaccagttgctgtcactttgagtattggtgtgcattaaatttgcttgaggagtaggggaagcattgttggtttgcacaccagtaaaactcttgtcgaatctatagaagcaatcgaccacagtatgacctattttgtgacatagctggcattgggggcggccagaactt

SEQ ID NO: 59282 - DNA, 918 bp, Cannabis sativa
gatttcatcctcaaaatctaacatgaatagctccagatattgagcccttatgctggactctaattcctaggtggcttcttccaccttattgtttttcaaaagtaccttgaccaaagctatggtcttgttttgaagaaccttttctttcctatcaaggatttgaaatagttgttcctcataagataagtttgattgtagctctagggcttcgtaactcaagatatgagtcgggtctaaaacatatttcctcaacatcgaaatatgaaatacattatgaacagtcgataatgttgttggtagggctagttaatacgctacttgcccaaccttctcgagtatctcaaatggccctataaacctagggcttaacttgctcctctttccaaagcacatgatacctttcattggcaaaactctcaggaaaacatgttctcctacctgaaatgcaatatctctgcccttcagatcagcataacttttctgcctgctttacgaagtaagcatccgagccttgatctgtcttttgcttcattggtcctttgaactaacttaggacacaaatacttcatttcccccattttgtcccaataaattagagaacgacacttcctaccgtacaacatttcatagagagccattcctatcgtactttggtagctattgttgtaggaaaattctatcaaaggtgtttatcgagtttcttggcaactaaatattttttgagcttaagaaagtaataatggagtaaattgtgaaataacaaataagagatttttacgtggttcaggcgttaattatccttagtccatgagtctattttattaagctcattggtcgataactgttatacaaataaagatacgatggactaagactcctccccgtcgtgttcctctagaagaataggaagcttagtag

SEQ ID NO: 59283 - DNA, 551 bp, Cannabis sativa
atgcaagtcatggataagttcaaaacacaaaaaccacattatttgttacaaattcgaatcaaaacatacaaacactacacagctattttataaataaaaaattgttctaagagcatcaaaaataccaagaacacgataacattttaaatgatgaaaggaatgctagaaacacttaccaacaagaaggagacttcctagcctttcaccacccagagctttccacaacactacttgaaaatgaaaagaagaaaagtgacagtttaaaattattggaccctcttatgtagaacaataacactatagaggaatgaaaatctaagtttcaaagatactagtagagcaacacattctctaaacccattgttagccatatacacaatctgatgtggctcatgagtatatatatacacacactcttgtgatcatctcactcactgtgaaaataattttctatagcagagagaaattatttcaagtgagatacaacaagttgaggcactacattacctagtttacactgtcattcacactatgttacaccactgaacata

SEQ ID NO: 59284 - DNA, 1653 bp, Cannabis sativa
gtaattttcctttaatttaactatttaattaaaatatttatatataaaaaaactattttcatactatatcaaaaatatctttacataaaaatatttaagtgaaatttaattatttttttatcttactttttcactaaataaccttttttattatcttcttttccaactcatggaacaagttattatatattattgaagaattttttttttttaattatatagaaaaattaaacatcaaaatttaaattttcttttgttcaaaagaaaaataaatttaattttttttaataatactgagaataaacaatattaatatgtatattattattcactaaagctgataaaaatggaatgtgataaaaaattgttaattcattctacatgatcataaatttataaatacatatacatatacatattgtgcttgtgtgtgtcactatgtctgcgcatggtgaaattttgaaaacactacaaaaaaagaaagaaagaacgagcaaatcaaaaagaaaaagtgacccaaaaaaatttaattaaagaaaaaggaaaaggaaatgagagggtgtaaaaaggtaaaataaaaaaaaacaaaacaaaatataacatgggagtggtagagtaaataaaaccaagaatttatacgcatggggttgaaaataacgcagttcccgggaatatatccaatatttaatttaaatgtataataaaaatgggagtagtggtagtactgcaagtctgcaaaggctggtaaagaaaaaaaaataccacacacaccacacaactaagtccaccaccaccaccaccgccaccatgcaccaccagtaccaccacttctcacagctcctctttgctttttctccatcactctctctctctatatatatatatttattgatatttataatgcacttcttttcattagtcataccatacagaatctcattataatcattattaatatatttttttattacatttgaattttacatggccagagagatatgttttgtccaatgtccataaatatataaattattgtgttatatgttgatttataaattaattaagcagttatatatattatgtatggttactatctcaatgcatttgtctccttgtgtagtaaccattagccattatcccaaaattcagcttgttgagttgtgaatgccgacttttatttttctttggtgcctaaatatatatttatgaatgcctacctataatgccaaaatgccaatggcttagcactaaccagcatttttaaaacaatatatttatataataaagtatttaataatggagagagcttgtcgttttactatgtaacaaagtttaaatttcagtgctttttttagatgtatatgtatattacctgcgtgcagtttcttctattctctctttctattcttctattctattctctctctattatatatgaatatgcatatttatatacatatccttccccctcttcaaactcccatgaaagattcttctttaataaaattacacatctagttatattatctcccattctctctcacacactttgcttttaaaaaaaaatatatttttttaaaaaaatggatatttttgaattgggattttgaagggagagagagaaaatggaaaaaataaaataaaatcattaat

SEQ ID NO: 59285 - DNA, 571 bp, Cannabis sativa
aatatttaaaaaaagaggtaaaaatgataaattttaaaaaagaaggtaaaaataaaagagaacaatataaaaagggtatatagtgtaattttctctacagaattaatagaaacaatagataaatgttaaatagcaaatatttttgagaaattaaattgtttttcttccataatttaaactcttacaaattcaaatttaataagtgaaaaaatagaagcaatgttattgagtctgagtgtgcgtagcttattagacttctatctccattgggagaggagatgcaagtattatgctaaatataacagatgaaaaatcagtgatatacttgacatgatttttgtaaactttaatgtacatgatttgatttttttttttctttatcacatgattacaaagtttttatgaacaacacatgattacaaagttgatgcaaaaatacatatatattttactatttatagaaattataattgaatagtaatttttattttacatttttttaaaagaatattaattgctagtatcgggacgtgagcaaagaggaagaaaaagatgaaattacactctatac

SEQ ID NO: 59286 - DNA, 765 bp, Cannabis sativa
caggtgtgttcagacaggttggcggggtgtagtcacaaccgagtatttcgggccgaactgggttcgggcccgaaatgcaaattggattgatttaattggcattttatttgatatttgataatctaacatttaattaggatttaataagcatgaattgtcataattgtccttgtgagtgtaaaagcttgatattgggggaaaaaaaatggttggtcttttgaccttcatttattttctaaatttaataaaagtgaatttttgagataatgaagaggaaaattctgcctttgcttcccctctcacccgacccctctctctctctcaaccttctttgttttcaattttgattttgggagaaattggtgtgatctttagcttgaatgaagctttgaaattgaagaaatttaagcttgagaaattgaggtagttctttactgaattttattgatttccagttgattatattttatggaaaagcatgttttagggttgtgttgttcttgagtgtatgttataagaatcgatgcttcactttgttgagtttgagtgtgaatagcatgatattgttgtggtttattcttgagtggtggttgtgtttgcaagggaatttctaggttgaaaattcaggtctcagttggttttgagctgtgggaaagtattagaattttgttagtttgaagctcaagtttgtgcttgagttcttgtttgaaaagcttgattgttgtgtgtttgagcaagctaaaattgggggtttattgctggaaa

SEQ ID NO: 59287 - DNA, 1543 bp, Cannabis sativa
  modified_base (602)..(616): a, c, t, g, unknown or other
gagatcttaataaagcttgtccaaaggacgactttccattgccaaatcttgatactttaattgatgcaacaacaaattgtgagatgttttctttcatggatgggttaagcggatataaaaaaattcagatgtctccagaagatgtagagaaaacagcattctgaaccccattcggaaacttctactaaacagtcatgccatttggtctgaaaaacattcgagccacctatcaaagagcagtgacagcaatattccatgacatgatacataagaacgtagaagtgtatgttgatgataccgtcgtcaaatcccaaaataaatttaatcacattctcgatcgagagagagcattccaaaggtgtaaaagatacaaacttaaaatgaatcctcttaaatgtacctttggtgtgagcgcaggaaaattcttagggtttgttgttcacaaaaagggtagcatagatgaagacaaaactaaggctatattagccatgggagcaccacagtcactagaggaactaaaaagcttccttggaaaagtaccatacttacaacgttatataccagctttggcggaactcacaaatccactacaggccataatnnnnnnnnnnnnnnnattttattggggagaaagacaacagagttcatttgacaggattaaaagcgtgttgtcttctcctcaggttatgatgtcaccagtacaaggagtactgttgctattatatttagctgttaccaagacatctgttgggacattgttagcacaagaagtagaagggaaagaaaagcatgtgtattatcttagacgaaaaccgaaagacgccgagactaattacccctatgttgaaaaacaatgtttggctttggtatatacagcccaacgattgtgacattacttagtagcacacaaagtaatagtgatgaccaaggtagatcccataaggtttatgttaaataaacacataccttctagtagaatagcctggtggatactaatgcttagcaagtttgatatcactgtcatgcatccaaaggcacaaaaaagtcaggccttatctgatctattgacatgtttacctgataatgataaaaatttattcatggataaaatccctagagagttacctgaggctatgatttgcaatgagggaacacaagaatggtgggcaataacatttgatgggtcgtcaactgctaaaggaggaggtgtaagaatagtattaactgatcctatgggtaagaatcgtatacaagcttataagttatcatttgattgtactaacaacgaagctgagtatgaggcacttattctgggaatgatagtcacgctaaaaatagaagtcaacaaagttgtgattagaggggactccaaacttgttatccaacaagtcaaaggggaatttgctgtgaaagagccatcattggcaatatatcgaacaatggtccaagagctagcaaagaattttgagcaatgtcaattcgagcatatgcctcgaacataaaataggtatgtcgatgttttggctactatggcttcaaaaat

SEQ ID NO: 59288 - DNA, 1264 bp, Cannabis sativa
tctctataatatcttatatattttatttgggttttaccgaaaatctcggtcaacagttacaatatatataataaaaaaagtaagaaaaataatatatacattaatatataataactaggtaatatagtcgctcttcgagcggttaatttaattttttttgtattataataaataattacttaaaaatataattctaatatataggaaaactataaatatattatcttattgcatattattaataataattttatttattaaaaattaaatggacaattttattaattattatttagaattatttattacaaaatttaaaatttattataagtagtattttaaattattttgttaaaaaaaattatttagggtggtgtagaaaaaaaaatacggtgttccccataagacattattttcatatctcgatcattcaaaactattattattattgtatcttagttgttgtctcattgacatggtatctcacttatttttgtcaccgtatctcacccgttatcatcattgtatctcatccattgtcattatcgtagtttccttgtagtcgtcactattgtattttccaaatcaatatcttattcttagatttcatctcgaattttaaatatttttaagatattagaaaaaatttattagtttcttaagttattattaattaatatattttttaaaaaataattattattttttaaatattttaattaaaaaaagaaaaaatatatgaaaatgtgatatttttttttctttttttttttgaaggataaaaatgtgatattttagtaatgagaaatgctaaaaagcaaccctccttgatatcataccactattggtgtaattaagtaacatgtctcatataacttaaaaagaataagatatagggaatatccctaaccaatcatgggtgttgggcaccattggtacccaatagcaatactttttagttataattatgtgatacttgacattaaagttatcattaaaaaaaacgtaaagtagattttagttaaaaattaattaatattttttaataaaaaatttaaacttggtaaaaaataattgaaatattatttcaagtatcacttcttttattattattattattattattaaatcttaatttttttaaagaaaagccaaaaacgtatacattagaattactatttttatattattattattattatttatatagttttttttaaaacaagtcaaaaacatcaagatatatatattgattgatatttta

SEQ ID NO: 59289 - DNA, 5123 bp, Cannabis sativa
  modified_base (72)..(77): a, c, t, g, unknown or other
  modified_base (4680)..(4684): a, c, t, g, unknown or other
aattgaaaaacaaaagtagttgcaaaaagtatttttatttttcaaaagcaaaatttttaaaaataaaaattnnnnnnttattttgtgattaaaaaattagaaaataaaagtcttaccaaacaatatctaaatttatttttttttattaaaattttattaatataatcaaactgcctaacatattataaattttgaattcaaatttaattattaaattacatacaattgagatctctttggttaaattgataaaagtgtattaattaaattttactttaggtaccaaatatgtacaatttaaaaatataaagtataaattaaatattattaaaaatacatatcaatattattaaattagttaattgtacaattgagatcgtatgattgtgctaaaaattaggtttagattaattttattatgaaaaaattaaagtaaaagtattattttgtactacatattttaaaaattatagtgtgattagtaacttttctaaaacaagtctaaaatgatatataatattaatacttattagttattaataaaaaattaaatgtgtagtttttgttttcttttgaatgtgtagttttaagtggaattaagtgtcatccaaatagatctgaaaaaaaaagtgtcatccaagtatcatatacaatgcaataaatcaaaaagtacgatcctttattacaagaaaccaaaaagaaattaaaagcacaaaggaatataatcgaagctaattaattttaactttgtgagttgctttagtaatattgatcttagccactaagttatccttctaattacacttttttcctttcaaataatattcttgtagtaactttgatatatagcttttgatactttcatttgatcaatactttaatctttaaatcttatctctttatagtttggtattatatgcctttttatgcaacatttctctatacgattcttaccttgttcttaataactcatacaattgaaaaaattagagagagaacatagaatttaaagtgagagaagacgtaaatttgttttgataagacaagggcaaaaataaacttaaaaagaaaaaacatattattggtgggatttaaatccttcacttctatcttatatgttatctaattttattgttacactaaaattaatattatacttatagatattatttttttttattataaatatatcataattaattaaaatacatatcttttgtaattttgattttttttttaaaagccgagatttacccgtcttgctcttatatgagtctgcccttatatagaggtagacgtacattaatttaataggggaactctatttaaagaagaaaaaaaaagcttccattattgtgttatgcttttctttagggtgacaagacaacctccaattatattttccttgtccatggtggaaaggtttaaaagttcttcttaaaattaaactaaaaattgtaaaaagctgttagtgagagtgcaactcaggtaaagtacgtaagtcctatatcttagtgctactttctgtctccttgcaaataaagcatgcgcatttaatattgaattgagatataaatatatacaaatatgaaaactttccatgccatgaatttttcatccaaaattatgatgatatttatatttgacacgactcagtttctagtaaaaaaaatggcatgtcaagggcaaacctctaataggattttttattgtgcatgctagaaatatgcaagaagatatgaactaatcgcataatatgcactacatagtaaaaaaaaaaaaaaaaagggacatacaaaaagaagttagcacaatcacaatttatatttatatatatggactatatatgcgatgacttggtatttttccccagcactctatgtaaagatcacatctttacagcgattaacccaaatgactattatatgcgacaacttgtgatggacccacgagtcttatgttgtcagtacgtgaatattcaatacgcgaccagtataatcgcatacattctataatatggatcagaaccttgatatcacacatctatacaaactccgaaaggtttatccgttcacatggtccaaagtcttaatatactcggtaactcgagtgaaccctcaagttcacatgttaccgagaatatgaacaactgatatgtgatcaaagtagtcgcactcgtttgagtactaactaagaatggtcaaaactctttcatttattttacaaacgtttttttttttcaattaagtatacttaatgtgtgtaacggtcctgtctgaacggttatgtaactgaatgattagatacaaataagactaatcacaaaccatctttaagaaatggactaagcagaccaattttttctaattttgtcagtacagactctgctatataaagcccaagttctaaatcattaggtctaaacataaacatgtagtatcagtttctttcaaatatcttttaaataaattcaaaacgaaatttgtactgacgaaagtaaaaaaaaaaaattatagttttacaaatattgagtatttatgtcactaaaataaatattgagtttatgtcgcttacaaatttaaaattttaggtatttatgcctctacttcccccttttttttcgagtattcgccaatctggacaaatactcccatttctacttgtgagtattcttacataattcatattgattggccatcggaccctatatcgggtttttgtcttcaactcagatccaattttttcatcacgatgcatcgagaatgcatcggacttgcctaaaaaatgtatttgcaacccataaatcacatatttaaaaacactaacctttgacattgggtctgtgggtcacagtggtcgtagagaaagggatcttcagtccatcagtcacggtggtcgtcagtcacagtcgtcgtgggtggtaaagaagagtgttgtttgggtcgtgggtggtggagaagggtgttgtttggatcgtgggtcgtggtggtggtggtggttgggttgcgtgaatcctcatatggaaaattggtggtggttgggtcgtcagtcacagtctcgttggtagtagagagataattgctgtttgaaaatgagagggtattttgggaaaaggagaaatgttgacctatttagtaaatattaatacatataagtttaggggattaattttaaagtaatatatacatataaaattaaatttctcttttataatcaatgaataaatcgaactatatacataaacaaaaattatataatagacggttgcaaataacagtatattattacttggaaaaaatcataattgggtataaacatataagagtaatgatgtacattatactaaagatgaatgtactgaatattggagcagtggttcgaaactacaaaggtaaagttattactgtgttattcaagtcagtttaaggctattttagaaataatgaaatggaagtaaaagcactctttcatagtgtcagttggcctaatcaacaataaattttgatagtacatgttgaaatggatacactaagaattttttcaactttgaggttgacatatagatttatcttatttttgagatctaattgatgtgtttgttgttgtttgtcctttttttttaaagttatttttactcgtgttggtaggcatgctaattatgcgacttaacaaagtatgatgtagagctagataaaaatgtattttgaattggagaaattcttctataatattatcttgtttttttttttttattgttgtaaacagaccattgatttataataatttgaaaatttctaaaaaaaaaaattgatgtgcattagacgtaatttcaatcagacaaccaattggatcattaattattcagcccagcctcttggagctatttccaaagtccattttcggccaatcgaggcccatttttgaaactagcgttgggctcatctgcttagtctactaaaccaaccctaaactaactagcaactacccttaaatataagttgtgcctctgccttctggtttaaaagtagtattttgtaaaagtaatttgtggtataaataattaaatttaattttcggttataaattaataattaaatttaatatttgactgtaataatatttaagttataactataaatttttttataagtatttagttgttaagtgaagtaaattgtcagcaattcttgattggtttattaaatttttatacgtaatttaaaaattattttaaatatactaataagaaaataacacgtagataatgacttgaaatttattgtctaggtacttacggaagtttcagaaatataaattaagtattattaacataaaaaattaactgaaaattaggagtgttcgcggtgtggatggtgcagtttttgactattttttcaaatcaatctgcacatgcagttttttcaattttctaaatcgcactcgcattacaaaactaaaaaatcgtagaaaccgcactgcaaaaaatggtacggtgcggtttttacggtttggattatcatcaataattaaactatcacaaatataacaaagcttgggcaaaacttgtcaaaaataccataagacttgaaaataaatatatataaaaaaattaagtttcaataataaaataattagtaggctttggattggatattcacatattagacctaaataaatatnnnnnttggtatttttataatgtgcggtatggggcggtttgaaccgcatataaacaattcaaaactgcaaattgcaccgcaccgcgcagtttaggaaaaatttaaattgcgaccgcactgcaaagaattttaaatcgcacttttttgcggtgcaatgcagtacaggcggtttgagcagtttgatgaacaacacccgtactaaaatatagacggtttatctgtacactcttacacatgtggtatatttatatattttttttatatttttcaaataattaaattaagtgtatcaatataaacgtcacgtgtataagagtgtacacataaacttcatcttattaagtaaatattatatgtactcgaaaataattttaatataatatagtattaagaattgtttattggtatttttgttacattgatattttttgatattttgatttt

SEQ ID NO: 59290 - DNA, 611 bp, Cannabis sativa
caatactactatgagatcgatatcgaataagttatcacatgtagtccttacacctatgatcgaaaataacttatattggaacacttgaaagaaggggacaatcctatccctcccaaaataaaaaatttcatgtggagaggttatgtaattagtctacctactatggttatgcttataactaagaaagtggttgtgaatagtttgtgtccaatttgtggtcttcgtgataaaattaccttacacattttggtcacttgtctcttggtgagtcagtattgagaaatggcaggagtaacaactactatagcagttggtatgacattaatggactggtgtatgattttctttcaagcagccagagctgagaaatgcaatctcattacaattctgtgctgggcaatttagggtgtgagaaatgacaaggtatggcaaaaaaaaagtcaattgatattccgtatcttttcgcattcgctaatagttatcttgcacatttgagagctgctcaaacttcagaaatggagccatttcaatctggtttagaatcaggtgatggtgtcgagtggtggtgtgttcctaaggctaatgaagtcaaggtaaatgttgatgtatca

SEQ ID NO: 59291 - DNA, 774 bp, Cannabis sativa
  modified_base (728)..(734): a, c, t, g, unknown or other
acagtgtccaagcttgaactagatcaagctcaattagtcgtgatgaaaaataatacagagattcagccatacataatgtaagttataggtagcttttcctttgattaatgttaattagtcatgatgaacaatacccaattgtaacacccgaggtaacttttgttatagattaattatcaatgattagtagagtttgaatatctcaatatttaaccatagtgaagtagcactactacaaaattggctttccccaacggttaataagagggtcaattataaaaaccgttggaaaaagtaagtggaggtttttcgcaatcgtttaaaactgaagcaagaaaactgttcgaaaaaacatatgcaacagtggagaactgtgggcaatactaaataattataaactgttgggaatactaagaatatattcccaacaataattagggctgaatatattaaaaaaaaactggcgctatttccaacattatatattaatttaattttttttttataattttttaatttcttttatttaatggaatatttaaatcttttttctattttgtaaccctagtagctttagaaaaccctagtagctacattatctctctcttcatcatttctccttctcctcatccctatatctatctctgcgtgtacagccaacaaccatggcctctttgcttgaagaaaccaaaaaatccactcgcctttcttgtaacaccctaactaannnnnnngtattacgtgattttcaaacatgctgtgcagctcgttgct

SEQ ID NO: 59292 - DNA, 1147 bp, Cannabis sativa
gctcgagcctttccattcagacataatgaatactgcattccctcagggattcaagaaccctcacgtcttgtcatatgatgggaccacagatccgatctcccatttaaataattttaatactatcatgcgagccagtaatgttacgaacaaattcaggaggtatcaagtcggggaacagggaaagaagtctggatatgactcggatgaggagctcgagcctttccattcagacatcatgaatactgcattcccccagggattcaagaaccctcacgtctcgtcgtatgatgggaccaactatccggtctcgcatttaaataattttaatactatcatgcgagccagtaatgttacgaacaatctacgctgtattttgttatttactttgctagttggagcagcgagcagctggttcaacaaatttacttatcattcaatcatctcttaggaacagttgtctaaggacttcaaaaatagttccaggccacaagggataggcgacccgaagcatcctcactcactaacataaagtaacagtcgggcgagacgcttaaggcctacttaagtcgttttttcacagctgctgcgagggtgagaaacctggacgataaaacccagcttactgctcttcaggcagagatcactactgatctctccactgctagggatgagctatgggatgacctacagggtcatctagtaaaaaacatcattgagttcaatgaaagagctcaagtatttgttcgaaaagagtaagcaagaaaatagatgaaattgttaaagactggctcgagaagcaaacccagcaatgtcttaacaagcactgtctcggccaaagctgataatccaggagcctctagttcaaagaggaaagataactctaaggagtcagccaaggacaagaaaaagtaaaagaagcacgacaagtacgtgccaatttacaccatttatgctaagcttaatgaaactcgagaaagcatctatctcgcacatgagcacagggtcacatttcgtaaacctgagctcatgagttatgcgagacataagagagatgacactaaattttgtaagtatcacaaagacattgggcatacgacagacgagtgtcgtctgctgaaagacgagatagagagtctcatcgcgcgag

SEQ ID NO: 59293 - DNA, 1314 bp, Cannabis sativa
gagtataggctcattgttaacaatggatggtgggatgatcagattgttgcacaagtaatggtccaagatccacaaatagttcaaaattagatgagtttgtgttatgtacaacatcaacatcatcaatcgcatcaggagcatccatgttgtccgaaacttttcgatggtttacatcttcaaccactttccaattcctacttctaactaaatcatcgagatagaaaatttgcttggcttgagtagcaagaatgtatggctcatctaaaagctcgtcataataattgaaaccttctgtgctaggcacacacactccactatttgggtgaggcaatttttgtcttgatctgttgtaataaacctagcaccgtttattacacacccttgataagaataggctgcaagatctgatccagatgctaaagctatcaattcctcgccaggatgagctaaagatccaatcttgtacaactcgtagatctaaattgagataacaaaatattagaacaaattaatttcaaatcatactcagtaagtgattatgaatgaagataccttattataaaaccatgatgggaactcctatatgtgtaaattcttatgatctgcattaggatcccttcgttttatgagatcaaggtgttccatacaccagacataaaatttttaaagcatgttctttgtaaaacaaacaacaatcatgattaacatacattggaatggactgatatcctaaacccaatgtactgagcttttttttttagcttcatagtgggttttaggaatcgtattcccttttagaaatgcaaatttcaacaaactcggtagttgatcaaaagtgttgtttgatattccaccaacaattttcaaatgcctcaacttagctaataagttgagagaggatatccaattgcaacctggatacaactctgcttcaatatctttaaacacgcatctcatctacatcattctcatcgactaccacattagctacattaacttcctcttctctgaggaaaatccactactcgtaactagtttgaaaatcccaacacaatatgtgtccacgcacatattgcgtggatattatatcgtttgaggttgacgcatttcatacaaggacatctgattttaccgtcagagcccttgtgttgttcagccatttctgattaggctaagatacctctctagtaagcaggatcagtgcgatcccgtaaaaatatccaacccttattgatcgtcattaatgttaaaatatcgagatggttaattttattgtcttatttttaaaaaataaaaattaaatatattatgaaa

SEQ ID NO: 59294 - DNA, 683 bp, Cannabis sativa
agacaataagagagaaaaaaataacataataaacaaacaaaagaaagaaaatataaactcgaattttacctggattcttctgtcggaatatacttccaatatcttcgatcatcaattctggtgatggataatccttttgaagcaacagacaagcaaactccacctgttgttttgtccaaccaaactttctgcaaccaacacaaaaggcttactcaatggtctttctaaatggcctgaattattcgaagcatgaaactctgtatggtcaaccgagaaaacatgagaagagataagagactagtctaccaataccatctttgttccaattcaataacttttctactgcttcaaatgacttcgtcaatggtctttctaatactactaagaattaaatttagagttcacagttctatgtatcttcttcctattatttttcctgcggactcgaaacaaaaaaaaaaaatcaatcttctaaaagacataaccatgaaagtaatctaatttcatgaaataattagaaatttgagatccaaacctgaaaatttctcattttccaccatatttactcatcagccaaacacgtacttttgactaaagaaataaaaaagaagagggtttccatgattactattatccttttctaatcagaaacgaaaactgaaattctctcagagggttccaaa

SEQ ID NO: 59295 - DNA, 1357 bp, Cannabis sativa
aaatgcacaaatcatgattaataacttaatttcataattaaaccctaattatttaataatttatcatattcaatttaagcggtctttacaatttctgaggaaatggtctaccattttaactggtagattacccagaaatataatctactattttttcaaaacgacctaccatttttccatagtctcgtttttttgtgtttcctcaatatttagggtatttccatactagttatcgattgaaaaacttctaattttgagttttggtctccaaaaagattttagcaagttgttaacccattttccgtgaattgtgatataagacctccgttcagcgtgtgaatttccatttaggttgaccgatacacttgaatttggatataaggtaagattagcataagatatgtgtatggatgtaaattgtatgctattttatgtgatttgtatactactaatactagtacgattgcagtacagagtgcattggtacaatatatgatgttcaaaggatacgacatagtgttacgagcactagtacaggacaagtatgtagtgcatgtggtccaacacttagttgtacttgaggtgtagtttagccctacaaacactagtgtgggacgagtacttagtgcatgtggtacaagggtcgagcttctattaagaacattcttgattcatctaatgtcttgtaaataggtgtatgggtgccttgatacaagttaatattatgttatatgttttgtgcttttcttattgagttgtcgactcacagatattgttgtcaagtgtagttgaagaaatggccaaggctaagcaccagtgagtccagagcttaagggtgattgtacatgtcacgatggttagatctagagagtttggtctcgagacgacttgggcctttattttgtagtcgcaaagcaacatgtttataaaatgtattttgaatattattgtaagcttttaggatgagatcacaacttttatttactatcatgtatttataaaagtttaaagtttaattaaaaatttaaatttgacatgatttttaagaaaccctttgattagcaaaggcatacacagtaattagaaaatcaatgtagcgtgcctaagcaagtacggtgttacaacattatgcaaattattgatcaactaccacgaaatctgccatggactttgctgttacaggtgctacccccaatgatactggcaatctgatcattcccttcagttcaatcgtgtttctagtgaactcgtagatactcgaggttattggcttcatgtaaagaccacttaactttaatttggaaattagcagataattagggctttattatgaaagttaattattaatattgaatta

SEQ ID NO: 59296 - DNA, 823 bp, Cannabis sativa
  modified_base (112)..(126): a, c, t, g, unknown or other
  modified_base (773)..(784): a, c, t, g, unknown or other
aaattaacaagaaaatactatcaaaataatataaaaaataatatgcaaataattccactacaaaaaagtattacttttggggacaacatttagtcacaacataatttttttnnnnnnnnnnnnnnnttttagtcacaacaaaatattacgctaaaacatagtatttagatagaagttgtcactaatttagttttagtcaatacaagtattgtaactaaaaatacatttagttacaaaaaattgtaatttttacgactaatacatttagccacgaatatattttagtcagaacataagaatgataatttataattagtcacaatttttttacttttggtcacaagttttgttatgactaaaagtgagatttttttgtaatgagcaaaaaatcaacaacaaaaataacaagagtacaacataaaaatatatatcaaaagactttatttcatgtaaataaaatctgaaaaattgtaaaaatattaaaaattccatactatttttataatttttctttgttggttttatattttttatttttaaaaattatcccagaaatttatacattaatttcattttgagagaggagtattagatttaccatttagttttattttggcccaatatttcggcccactatatctttgggtctcttctatttgccctatatctaaactttgtaaatgtacggtatacaattggcatttatgccgtttttggtcaatatatatctattgtgtctatataacagaagaaatttatgggtgactttttannnnnnnnnnnnataaaatagtttattattaaaaaataaaatggtttatga

SEQ ID NO: 59297 - DNA, 1158 bp, Cannabis sativa
tgtttataaaataaaaatattcttttacaatagattacatttccaaacatagaaaggaattcaatcctgcttcccagaagccaggaccccacggctgatatgtacgttgctgggagacctctgactcatggccggacacaccttctaacttccttacctgcaccacgaagcacacgtgagtcacaatgacttagcaagaaaagctactaattagactgttgaatcgtttttttattattattattaataaaataatagtaataaattagaaaaaataatacaaaaaaagtaagactcattcaaaaaaagaaaaggaaaaaaaatattattatattttaatttttccacttttctctccactaacccataactacccaccactcatctttccactctcatatcaatgtatcgtaaaaaaatagcttataagaaaaaaatcaggagaaaagaaagaaaagaaaactcttccaaaatttacagagaagtattactaggtatcttcatcttcaagaaatttctacagggtaagtattagagttacccctattttcttttcatcaatttaaatatctttttttctcccaataatttttcttattttgtctttggtccactttgatctaggctttctaagccacaaaagatctttcaaagtgagatatagccaaaggaaaaataagagaatttaatgtctccatgctgttatgttgcccaattcttcataactttttatgtttctctttgattccctagacttcagaaaataagtcgatgtggggttgcataatcaaagagaaagatagaaattttaaaaaagagagaaaggttatgctgtcaaattatcatagaatttttatgtttctctttgattccctagacttcagaaaataagtcaatatgggatgcatggttaaagagaaagatagaaattttaaataaaaaaaaatattatgctgtcaaaattatttccaaaattttaattttgataaaacagtatgataattggcaggcgtcataaatttagattaatggctttgttgtaaaaaatttcttgaagaaattgattgtattacatgcatatgtgtattgcatatggcatgaaatcaaatttcaagagaaaaaaagaattcaaatggtactggacaaaggaccaacgac

SEQ ID NO: 59298 - DNA, 804 bp, Cannabis sativa
  modified_base (478)..(479): a, c, t, g, unknown or other
agaatgttagactttttatttaggtttacactaataacaatatatagatattataacataactaatatataaaatatgaacattttttaaaattaaattaatcgatttcctatcattctctgcggagaatgatactcatttgaatatgttaagttttttatttgtacatatagctccaattcaataaatatgaatagatcactaaattaatttattcactctctctctataatatatttttaataatattctatattctgatattttgatgcaattttcttataattcttttggatattcaaaatttactatttaattgcatcaataataatcatttcaatgattctttggttatattcatataaatacaatattattgacaaatataaaatgtttactttagaaaatatttacacaaatcgatgaagatattagattgcttttcattgtcatcaaagaatataaatatatatatatnnatatatataaatatgtatttatctcttttattacatttcagtaaattatatgatgaatattataacttgcattatcttcaaaatatatgtataatttatatatattttctctatcatattataggaacaaattatataaaatatattataaataataagagcatatatacatatataatatataaataacaaagaaaaaaatataagaattcttacaattattttaatcacacgagtatgtatataaatatagggtaagactatggtaggacctagcaaaagttccctaccgatagggaactttttttgaccattgattttagat

SEQ ID NO: 59299 - DNA, 959 bp, Cannabis sativa
ctaaaatttacaccaaaaaattatgttgtttattataatattattttgttaatataataaaaatattttaatacatataattatttttttttcttaaaagcatttttaattattaaaaattaaaaatcaagaaaaaaaatattttatcgtaatttactgtgcttactattattagtagaacaatataaatttctacaaaaataatttcaataaaagtgataaaacccacactatatataatattaaggtaaatagggacataagtactcaaagttttaagtttgtaagcgtcataaattaaatatttattcttagcggtataagtacctaatatttgtaaaactgtaattttcctaaaatttcgtgagtacagattcccttttgaatttattaaaataacatttggaagtacttgatactatatgtttttgtgtttagacccaataatctaaaatttaagtcttatatgtgttctgtttaagacaataataaaatcggtaccgacaaattagagacaaattacatttttacaaatattaaatacttatattgctaaaaataaacattaaatttggggcatttataaacttaaaattttgaatattatgccactatttaaccataatattacaggttgaagatgccatgaaaaacaactatgtttccttgatgtaagatattatagtccttgtaattgtaaagttttatatttggaacatccgctcgtgaaaattaaactttgacatagactgagccattattaaattggactgtgaaaattcgattgtttgaaaaagtgtggccaacattaaacaacataaataaatgcgtcccacgtccataatataaaaaagggaaaaaaacaaaaaaatacaaaaaaggaaaaaaaattacaaaaatactttgggccggcccattaaacatttatacagtctacatacaaatatttacaaaaatac

SEQ ID NO: 59300 - DNA, 1266 bp, Cannabis sativa
ttcatctcttcatcacttttcccacctaagaatattggtaattacgatccaactttcgctctaccaaagaagaacacaaacttagcaaagtttttcgcgttcgatgctcgtaaggtggaggcactcagagccaaatacgaggaaaaatcaaagtgtccgccgcgacggattactcgtatcgaggccttatctgctttcttatatagccgttatgtcgcggttacaggcatagatgttaaaggcgaattattaactatctatcaccctgtgaatattcgttccaagtttgataagccattgcccgaaaactcattcggcaactactattttgctaatgttacatcactttcgtccatcaattacaatactgaggaagataataataatgagaagtgttacgaggtggcgaggctgataggtgatgagttaagaaagattgataaaaagttagtaaatgatcttcaaagagttgagaaatcagatgagtactttgaatctcttatgatggctattgagagatcccttaaaggagaaggggttgctcttgcctttagtagtttgtgtaggtttcctctttatgatgctgactttggatatggtgagcctatttgggtaagttcggctgataggtgttatggtaatatatttggatttttagataacaaaaaatgtgacaaaatagaggcatatgcttgctttagtccacatgaaatggccaaattggaagttgataaagagttcctctctcttttgtcaagttagaatatgattatcatgtcatgtgtactttaattaactatatatgtatgagaattgtttaatttgttttaaaccctttgtgtcattatttttataattgtatgtgatatatggcattttttttttaataatttggttaaattattattaagtaaattaaaaagattataaatgattggtcttatttacatgctgtatacattattggtatttctctgtacttaattaactatataaatgggtttttttttttttattacatacattatatatagtgctcactactataaaaatatccaacgccataggtacctctatagcataggttattttctaggaaccgatgctataggggtacatatggatcggttcctagccaataaccggtgtcatatacacccataaatgacaaatatctaatgattattttttttcagtttatttaatttaatttaatttatttgaattgtatatttattaatttatatattatattatttaatttaa

SEQ ID NO: 59301 - DNA, 727 bp, Cannabis sativa
ataaagaaacttttagttcttagtttaagtccctgaaaagtaatttagaaaatcacttaccagttttatgtatattgtgattaggggcctatgaattgttgagtagcagtttcgactcaggttgaccggcacacctgaattcgaaatcaagataagattagtataataattgcatatatgcatacatgtcgcgtgcatgtcagttgctattagaataacatatatatcaaggtatcagtgaggtgtacataaagttgcactgagatactaataaatatatattaggcaaattagtagctgttagattaacatatcaagatattagtgaagtgtacattgctagactttgttgtacgaacattacagacctagtacgcattggacacgggatatggttatgattgggtgtcgtatgtgcgcctggttataatctagtttatgtgtaggtttttcttactaagttcgttgactcgcagatattgtttatatgtgtagataaaggcaaaaaaaggctgaaaaatagtgagcgcatggtagatgaagattgtacatatgaaggcggttacacctggagtgtttgatctttagggcagttataggttttattttagcaatcgctaggcaacaacttgtgtaaattatatattttgtaaaactaatgtaactttgtaaacaggatctcgagatatattttgtacttatatatttaagatttgagtttaattat

SEQ ID NO: 59302 - DNA, 1500 bp, Cannabis sativa
  modified_base (1011)..(1023): a, c, t, g, unknown or other
cgtgtacagaataagaacaagtaagaaaaacacagtatttttataaaggttcgaccccttagttagcgggtaatgacctactcgtcttttagctgtattgatattagagataataccactcagatcacaagtgttgtgaattttggagtggctctcttaagattacaatagtgagaatcaaaaggtaaacctcaagtaggtgagatgagggagacttagtctcttttacactggtaatggcgtgtagaagagatgatgagctagctaggagtttgagtatttgaacttagcacttagagcttcagaacgtagagacattaggtttagtttagtgctctttatataggagagcttacaagagatgataggttaatatcctttaaaatgaggagatatcacctattttttacacattaaaataatatgtaaataacatgttaattaatccccaagaataggtaaatatctgaagtttatctcctatttttgtgggttattaaagccctattcgtaattagaagtgttgtccaggctgaaagctgcagaggcacaaaaagtgtctgccaggagagaggttggccgaccctccctttgttggaggctagtcggcctatgctggcaatagggcaggcaaaggtggtcttgctagacccccttggttggccagtttattgtctatttgttatgcttaagtatttgaattctccgtcaacttgtatgttgtgcatggtgacttggccttcttgctgacaagttgtattcccacatggcatcaatcttgcttatgtagacatgccacattatgtaggcaaaaattaggataacacattcgatccacactaagtgtggttttatactttaaatccaatccaattcgcacaataactcaaatccaatccaatccaatatgcaaaaatatgattggatcaattattttaaatttgctactttttattattgaattatttaatagttattgaaaaatatttttctcacataactaacaacaannnnnnnnnnnnntattgttattttatgtctctaataataaaataaaataaataaataaaaaatttaaaaggaaaaaaattaaattgtatgtaaaaaaaaatgcttaattttgttttacaatatattctccttacatattgtaagaatcaaatatacatttgatctattaagttttaaaatatataagtatcataagtattagatttttaaattattacttttttatattaaaatattaattgtatatacaatttttaaaaatatatatataaacatgtgtgaattaaatttgatcggttacttctatatgtcgatccaatctaatctgcaagattggattgagtattttatgaacacacctacgattatgtgtcatatttttagacttgtcatgttgtgttgtgttgtgtttaagctttatattttttttaatattgttattaagcacattaaaatgtccaatactatattgatatgatacgttgtgag

SEQ ID NO: 59303 - DNA, 1350 bp, Cannabis sativa
  modified_base (562)..(563): a, c, t, g, unknown or other
tatttattaattaataatatataatctcactctaagtagtaagtaatctctcactcacaaattcatgaatccaaaagtataagaatccaagttagtattttatatataaaaataatattttttttttctaacatgcatgagaggaattacatatatatatatataaataaattataaatgcatatatatatgtatacatgttttgatacatatgaatagatattaactctacaagttaatcaaaggccatttcctaaaaaaaaagcagatcagaaagaaaagggattacgtacttaataatataattaccaatgtttactctagtttgcaagctctataataatctataatatatatatatatatatgaaatgtatgtagtagatgtattaaagggtacactaaaaaaagttatagtataattttctagtctcaacataaattttttatgacgaaatgtgatttttagttataaaaaaaagttacttgtgactaaaatatagtatttagatacaagctgtcactaatttagttttaatcacaaaaagtattgtgactaaaannacatttagtcataacaaattgtgatttttatgactaatatatttagatacaaactttttagtcacaacataaaaaaattattatttataattagtcgcaacttatttcgtcacaaattttattgtgactaaaaataaaattgtatgtagcggttgttctaatagatttttcatctgtttcgacattcaaaaatattttttagtgtattttttcatgatagcgtatgttgtagctttgaccacatgtaaatgttaagaaaatctcgaacattttacaatgccaaaaataagctttaaacagttacttaccatgcgtataagaaaacacagtactgcgtacaacataatatgtatatctttttttagtattgtaaagtgctcaaaattttctaaaaatttgcaggtagttcgaaataactataacatatacgatcatgaaaaacaattgaactaaattttttttaagtaccgaaatagatagggagtctaacaaaacaactcttagaggtgtactgtaaacttaccctataatgtgtatatatacggaaaattttacaatgcaccctcctaaaagggatgcaacgatatactcctatctatttccgcataagaaaactttttagttcagtttttttatagtcatgtacgttgtagctatttaagatattttgcaaaattttgagaccttcgaagaaatttacacgctaaaaatatggttcaaacagtctgttgcacgcgtgatttttttattttatacgtgcaatataactatttgattttgaacacta

SEQ ID NO: 59304 - DNA, 1277 bp, Cannabis sativa
tttatccttttcgcctctgagatcttcttaacctcatgttctcatttgtattaataatgagtacctttcgcttttttggttttttcttttagagtattaataatgagtaccatcttctcttttatgatatgaaaatttaataattttattattattttagaatattcttaataagtactttctcctcttttatgatatgaaaatcaataatatgtgtttttttttttttctataaaattagttgtataattattctaaaaaaatgttagttttcaattattgttgtaaaactaaaattataacctacattatttgtttcttttattttaaaagatttttatcatatgctgaaaaatgttttagtcttttagtgtatacccaaattttgaaatttaaatttgttcattcattttgctctgtaaaatttttacatgaaattaaaattttgaaagatgaaaagactttgatttttaccattttctcacctttagagtgccaaaatacacttgctcttgatttcccatatggactgctggtactatgaactaataatccatacgtgtcaaaattttaaaaaagggtataccaaatttcaattaattttttagtggttcactttttttgagcttgtactcaacaaatttcattttcaaataatttgaaatgaacaaaaaaaaaatgaaaaaaaaaaaaattattacctgcgcctgagatggaggagcacgggtctgctgcgcctgagatggaggagcacggtttggtgcgcctgagatggaggagcacaaaggactagtgcgcagagggatcgaaaggaggcagttcaatgaatatgaagaaattaaaaaacctaaataatttataaaacaaattaaataaaaattaaaaaaaaaataaaataaaataccttacataatactttcaatcatctagcagctcctttgtgggcaattaaaaaaaaatataaatatatatataagaggtatcgcgcgcagagagaagaagaaatggttgtttgtgtgtatttggtctctgtgtgttatgtgggcacgatgaaagcaatgtaattagggctcatatattaattttttttttttaaaataaaggggtgtatagtgacacgccacgggtgcggctaaaactatttgccaacacgttatgcgtgtcgctaaagacacatgattaacacttggcttcagtgacacgcataacgcgttggcaaatagttttggccacacgtgtggcgtgtcactataggccatgttttttttatttttata

SEQ ID NO: 59305 - DNA, 1031 bp, Cannabis sativa
gaagcgaacgagagcttcctcagggttgggataaaagtcaagcttgatgctctggccattcgactgccaggccatgtagatgccatcgtcaaaacgcttgacgcagtgtttgcagacgaagggagtaaggagctcatcccttttagccttcttcaaggcttggtccttaaagtccctcagctccttcacttccacggtcaagttggctatcgacagaaagttcgccaggtgcagctcctccagggattttaacttggcggccatctcatccatagcctccctggcttcccgcagctcgcgcttagccttggccgtagcctcaccctccgccttcagttcctcccggtgtttcgcctctgcctgagcttccctctgctgggcctcctcccgaaacgcactcctttcggcagacaagtcccgcaagatccttacggcctcatttatgcccccaaattcagacatggcgaacccatgatcaatcagggtcttggagaggcggctggtctctgcggtaatttgggaaaagaaacaaaaacggaatcagatacattgagacaagacataagtgaaaagaaaagaacgattcacaaaaactcaccgtagccagggcagcgttgatgtcttgaacttggtaaaccgagttcactgaggcgcaagcagcgtatctcttggctgggaactgagtcagatgggagacaaactcgttggtcatctctgaggcaaagggagcaagagtaggcccgatgaagcggttgaaccaatccgtcaaagggtccatgttcaggtcccaaggattccagaaagtgtcctcgcgcaaagtgttctgttgcttctctcgcaggattttcttcagagcctcaacctcagcatgtccacaactgaactcgtccagggcatagttgtgtttggcgatgcggagcatttgcgtttctttgtctacgggaaccggggtgagaacgatgccgtgcggcacagtgtactcctccgcttcggaaggaatcccggaatcgttgctcaccgccaaagtgtcc

SEQ ID NO: 59306 - DNA, 646 bp, Cannabis sativa
ccacaatacatagttgcacacttacttaacttttaactaattttttccctccaaatattgttaatatgaaaatatttacatataaagttatagagtttttgattaactttctaacgtatatctaattcattgaaatctaacgcgttaattttattgttaaacaataatatgagttttaaacaacatttacatcgaaaatatctaatttataaactgaatatagtacacttattagcacaacttagatactttcaccacaaaaatattcattttaactattttttcacgtcaatacctaacgacaaggttaacggtaaatattctactgtttatatcgatttttggtatttttgcctttaaaaataaacttatgtatatttcaacacaacgttagtacttacacagaggatcaacttaagcattagatagcttgggtcattacacaagatctcccattttctttttcttttttatatattatataaaaaatttataattagaagtttatcttgaaaaaaaattagtaacacatttgtggtctaatgtacacaatttttttcttcttcataaaggcctcaattttaaactttttgctcaaggctcccaaaatatttgaccgtaaatatgtgatttgacaaaatgaaaa

SEQ ID NO: 59307 - DNA, 1275 bp, Cannabis sativa
ctaacttctatattgcactactatcgcacccactaccgtaccttatctcacctttgtcaaaccataacctccatatcatgccataaattttaaacaactatcgaaccattattgtacctatcaaataccgtaccttatcgaaccttcatctctaactttcagattacaatactattgcacacccatcatcgtaccatatacaaaaaaatcacaaagaacccaaaaaacacacatttcacaaaaatttgattttccaccaaaaattaagaaaataacacaaaaaaaatcatagatcgaacatctaaacaacaatagcaaaaagggtgtcggtggtttctttagtttatgggtcttgatctcggtggctatttctttggtggatgacgatggtgctacgagaatgggagggtacgtaagtttgggcagagacaagattgaggaaaagagagaagatagagaaatagggagatgagttttgggttaattttgaaatgggaaaggtatttttggaacaaaatcttaaaattacgttatctatggtgttaaacttgggtttaaagttcaaaattagccgtttagaataaagtgttcaaaataatttgattataaagaatattatgaagaagaatatgattgtatgaaaatgtgtaaactatgtttagttttgttgggtaatatataatcacattcccgttaattgaattacactgtttagttgagtacaagaatcttatatattatttaaaagattaaaataaaaatattgttttattatatgtagttaatgttaattatatataaaaataaaataattattaattagtaaatattaaattttattgtattttttattaatttaaataattctttctatatattttatcactatgtttatttttatttgctatgtcatttatgtacactattcgtataaaatttatgtataatgcatacatatgtgttattgctaataacataacaataactctattaaaaaaaccaatctaaaaaaatattaatatatatatgtggaattaaatttattcattttccaatttatattcatttgatagcatttttaaattaataaataaatttgaatatcattaatattatgatttattatagataaaatattacgatatacatttagtgagatcttttttttttaaccgagttacttttatgttattagcaataatgcattatacataaattttagaaatatttgcaccaataactattattattaaattatttaagaatttaccctta

SEQ ID NO: 59308 - DNA, 1138 bp, Cannabis sativa
  modified_base (893)..(894): a, c, t, g, unknown or other
attatttttgggtatacatatttatcgttttttcaaataaataaatatctaaatattttattttttaaaataagagatatatatactatataaaataatatttttaaaaaaatagttagtgatattttttgaaaataatatttttttttaaaaaaatttgttataaacatataacatcttttttattaattatctatttttaaataaatagtataattatttatatttatattattatataataaattaactattttttctaatcacaatattttgtcttataaatacgacaatttatctattaatattctcaaattgatttttcaaattattgattagtgtgattttaatttttaggctatttttagactaatcttgaatttgaagtcttttggaaaaaaattagcacattttggtggaaaatacttaaatataatttttgacatctttggaagtagaactgtacttagagctaaacatgaaagttgtatatttcgttctcaacttttctaaacattgagttgtattgaagaagttatggccaaaatactaatttgaacacccgatcgaatttttttggcaggaagctgtggccgcggcgagcacgcgtatactggggaaattttgaattttatctttttttttttttttttaaaaaaaaaaaaactaagatagttttaggggttgtatatagtattttatggtacaaattttagtacttttgaactacgaatttgagtgagaaacttagagagtgagatagaagaagaaggaaattgtgacatcaattgttctacatcattgttcttttttttctccttaaatgttgtggtatttttaacacgcaagtatacgtatcgtttgaacaagtattactcacaaagagtgaggtnnatcccacaaggattgtagttaagtacgttaaaattaaactcttacttttatttggctgaataaaatttaagttaaaatttaaactaggaaacaataagaacaataaaaatcaggaagtaagtaaattaataggcgaattaacaataaataaaagacagggcttttaattttaattgtatctactgattatgacctaatataattatcttcctattaccaaattctatgcaatagcaagtttact

SEQ ID NO: 59309 - DNA, 3630 bp, Cannabis sativa
gtgaatcaaaggtacaaaatagctaaataagcatgtggatgattcttgaagcttttttctcttttactatcgattacacctttatttgctttcttttaatatttattatcaaaatacaaaaaatcatcaaactcattggttactattgtcactctttattaaccttttgtatttaattttctagtaatgcttttgtccacaatcaccttcctgtagaatcgaccgccctatctatactacaactacctctagtagaagtcatattttgggtgttaaataaattttggtaccattgttgggaggtcattttttaaaagctagtgaaatctacaatcaagaggttagtaaattcctttttgttatattttattttcttgtgaatattgtcttatgtgtgaagaaaaaaattcccaagaattcaaagtatactaggttgcggttttatcctatctttcttatttgtgttacaatacatacttttattaggatattaagaaacgacaggtcgttggaatggcttatgtcccaaaatttcttctctttctcagtgctccacactctgcctatggttttgagaaagtaagaaggagacgagagaaaagtaagtaaagcagagatagaataatggtctatggtgggcaatcatgaagaacagcagcaaccacagctacagagaagaagatcagcctaagaaagagagtcctatctcaaccatggactccagattcaaccaaaccctccgaaatgttcaagggtaagattcccaactgggtgtatttcttcagtcatttctgacaatagattctcagatttgagtacccttttgatcaaacattctcatttatggaatattattacagttccacgatcatagctataaatttcttagagaaccaagtctcttcaatctgttgcatgttagaaggtcgtttcggaaattgggtctttaatccgcaatgcatagcttttgatctgtgtaaatttgggatttggttgagaaatttgatgtgggatttattttcttggttgatttgattgaaaagttaatcataaagctgtgtcatcggaacgatcttttcctttagtttgaagtcagtggtgctctttaatatttttagatgcaggtgaaatgggaaaacttaaaagaaatcaataatttcttaactaatcaattattgattctggatgcataccatctttatatcctatagttgaatccttgaagggaagcttatattcttcatttttatagataaaatgcactttaaattgtggtttttactgcattttttatcaacttatagatccacaacatcgttacttttacatcactggactgcctttgttccattatttctccaatgaaagcttgataggatagttggtatgcttatcacttatggataaaacttttattcaaatgagcttgattggatagttcgcttgattactgcattttgattttaatatgtgcttttttactgtatatgttacagtggtaatctgatatgtcttgtgtatttgcatattgtgccaactaggttgctcaaaggtcgtacaatccctggtaaaatattgttaactagacggtcagatcccatagatgatttaagctcacaagaaaactcgccgagttatcagaggagcttctcatccaatgatgctgggacaagtgaccgtatggagaaggcagtaagggtgttatgtaaatatgtgtttatgtattcatatgttgcttgctcatctatctcacaagttcttatataacaaagttgtgaatagtttcatgatttcaactttatttataggaagaaaaccagaccccaagcaagccaaatagtaatgcaaatgcaagcaagttaaaatcatcaacctcacagcctgagattgctgtcaaagaaattcaaaaatccaccatgggtgctagagcaactgattcagcaaggctcacaaagttctcaaaggtgctgtccgggacaacaattatactaggtatgatttctctatgtctaataaataataaatgtccttatttttttctttcattattttatttttattctattcaattaaaagtagtatggctgtataaagttaaggtttgtgcagaggtgcctatgttaaggtatgtgatttctctgacactaagtcattggaggaaatactacagcaaaaagttctagcattttttaatataaatatttggaatttcacttttctatcttccttacttcttcctctcaataacttttgatgttagtgtgtgaaatttagctaggatttttactacctgaatgattggttgtaactgtaatatttcattttgtagagaagttgcgtgaattagcttggagtggtgtaccgccctacatgcgtccaaatgtgtggagacttcttttggtaagcttgaatgcgaaattcttatgtttcaagctaaataattgtccatttaacaaatgcttcattttgaaaatacttttttttatcatcatgctgaaacattgacagaaattagtaggttcttggaataattttcacaaggttattttatgtatgatattgagatgaaactaagttagatgaaaacaatttttgacatatggcatgaggctagtttaattgcttttaggatatgactgagctttgctgactcactgtctggattagaagatgacttgatcaactctgaaaataaagtttaccagaaacgaagaatgataccatatgcctgggtatcatggataaacattacccagaatgataccatgtgggcttgtattgttaactatttcattttccgtttttttctccatactgtgatttagtcgtctttaccctcacgaattatttataaaagttcagtctgcagatgctcataccatttcacatcggtgagggcttacgtttgttggccttttaataacctgagttgcctttttgaaatttaagaatgaactgacaacagggatatgcaccacctaattcagatagaagggatggagttctgagaaggaagcgccttgagtatctggactgtgtttcgcagtattatgacatcccagatactgagcgttcagatgatgaaatcaacatgcttcgccaggtatctttaatgctacttaattgtctatgttgacgcgattaatgtctgtctccagttcttgacagcctattttactgtccttagattgctgttgattgtccaagaactgtaccggatgtctctttttttcaacaagagaaaattcaaaaatccttggagcgtgtcctttatacatggtagctactgataattaataaacagttctgaaattcaactgaagttgcatttaaattgggtattctcattttgtcttaattacttttcagggctatccggcatcctgcaagtggatatgttcagggaataaatgatcttgttacaccatttctagttgttttcttatcagaatacttggaagggagtgtagaaagttggttaatctctgatctatctccagataaactatctgatatagaggctgattgttattggtgcctgtcaaagttacttgatggtatgcaagaccattacacatttgctcaaccgggaatccagaggcttgtgtttaagctgaaggaattggttcg

SEQ ID NO: 59310 - DNA, 949 bp, Cannabis sativa
atgctttactgttcatttacttttctgggttggatgttgaatttctaggaatttttgtttgagtttctgtacaacgcgttagattcctcctttcttgcgtttagattgcttctttttaccgtgtttttgccgaggacccatcttcgtcccacgcaatgacacttaagggtttagagtggacttcgtcttctcgatttttacccttttttcctttttccttactttttgtaatgtcactatctgtgggattttcgcacccgacttttgtcaaggaagacttttctaggctttcttttttgacaagtgtccggagggggcctctttccagcggtttaggggaccccattccctttttgaattagggtttggtttggggcctgactgctgggttttttcaaccattttcagaaccaaaaatatcttctgcatccagttctaaatcttcaaagaagggagagaagcgtctggccaccctggaggaggtcatgaagggtcccgtggcctaagaagggcacaagttctgtgccaacgggtgggaagcggctgagcttcattctactctgacctgcgcccatcagctggagcagatcgtggtggtggcaggcatcaagccttccacctccgggacctaccaccgttttccctgggacgaggagacgcccaaccacaactacaggggcttcgaagcttagagccagacacacctcatggccgaggccatgctccctcttcaagactattttattaactttcttgtatttgtcggtcttgcgccataccaactcattcctcaagcttaccgcctactttcaggcttgttcattttttattctgctcggagctggggctcgcccagtccggcagaaattttatatttttatgaactcgtttccatccctaaaaagggagataaacttaaagatggttttacggtcttcgggcccatcct

SEQ ID NO: 59311 - DNA, 1017 bp, Cannabis sativa
ccaactttaccacattataggcatcaaaattacaagtcctactaatattagagaaaaaacaactagtaaacaatggagaataactattataaaatgagacatacttttcgattgcctagtgtggggctccttcccattaagagcattaataactactctcgagtcgctctccattattacaaacttagacctaatatcctttgcaaccaataaagccaagcagcaggtcgttgcgtctccgcataacgcagcagtaaaatctaatcgatacgtttgaattcccaaactatcctatgaaaatagttcctgtctataactgcagtacacatcctttcttctcggaactttaaatataatattgcccattaatgttttaataaataatacccctccaactttaaaaataaatgtaaatttgttacttcaattctaattcacttcttattaattttttgagacaatttattaatatagtcacaaacatacatataattacaatatgaggacctaattaaactaacataaattaaaaattttaaaattcaattattaactttaaaatgacaaaaaaataataagaattattacatgaaaaataaaaattgatactttatttttgaaaaaacttccataattaaggtgtggacaatatttataccttttatgtacttttaattacaaaaatacttcttacactatcacttacacaatcagacgatggttatagggtggttggccgaatgttgcatctgacgaaagttgctgggtagttggccaaaggtggcatcagacaaaggttgcttggtgctcggtcgaaggttgcatcaagcgaaggttacaatcagataaaataactgttagcaaaatatttatgcaactgttatgaaacattaacaatcagaacagtgtttccacgtacgtaactctatctacatgtcccttcatggtttaatatgaacaaattcaccattagaaatttagaaaacaatagacatataccaggataaacattttact

SEQ ID NO: 59312 - DNA, 866 bp, Cannabis sativa
atgttattgtgttactgtatttttatgaatgtgttttcaatttcaaaatgttaaataaaccaatgttaatattgctttattagagcttttttcttactcttaccaatgtattatacacacaacaagtcattctataaatgcaataaggtcatcttattcacattgtcaattcatcttaattagtccctattattgttctagattgcttttactatcaaattcaactattgacagagccaacaaattacaaaattgaatttgatagtaaaagcaatctagaacaataatagggactaattaagatgaattcacaatgtaacaatatatttgctaccccaaaggtaaactttgaagaataatgtctgcatttaaacacaaaatcacaaattattatatcaattcatttaaagggagagcacatcaaagttaaaactaaaagggacaataagatcatggatcaaagttaaaaatcacagatttatttcataaaattaaaccaattaatatttcatctttttgtccctttatctttgaaatcaggtgcttcgagcttagaaagaattattattaagtttaactatgaaaaatgaaaaataaaagaaagttaaaaacttgagttgttatcgtttgtgagggagaagatgtttcgtcgttggggagagaggagctgtgtagctttcgtcgctggtcaagatgtcgtcggtgacttagggaggagatgaccgtcatcgtcagcgagtaggggagaaaatgctgtcgtctctgtcgtcgtcaaatcgctggacagagcgagtcaccgtcgtcgtcgtcgtcaaatcgctgggcagcaaagagggacgaagtgaagtgagagagagaatacgata

SEQ ID NO: 59313 - DNA, 2171 bp, Cannabis sativa
aataaataacaaagaggaaagtttccagtaactcttaacttgcatcccttaatgttgttatgatattattattggattcaggtgtatggttatagaatgtctctgtgggctgaacaccttggagagctcgaagattgttttcgtgaaccacagagcctagaatgcattaagcgtgttaataagattgcaaaaagtaattggaaagcttatgttgctgaaaaatacaagaagaagatgattggtcatttgatgcaataccccattgagattaataaggatggcaatgttagttcattgcaacattatgaatcattcccagatgttggaggcaaagttttgggaacacctaccaatcttcctgatgctttaaccacataaccaatcaatatttgtatactacaaaccataattctcctgtttcttgatatgagtttgagtatgagcatatactcttctataaatatatatatatgtaaatgtactgaaaaattatcgggtactattagtgattacttttaaatatttcctataaatttttaagaaattttctatagtttaaattgtggaaaccagaattccaccaacttgttgcacgtatacttatttgcatatttatattgccgcactggcgtgaaacacacttctagtgtttaaaactttatttcgacatcctaaattttcctctcttttttctttagtttaaaccgtatttaaaaaaagtagttacaaatatatggaggtagaaattatcatatagctattagctaatcttattgctgcactagtgattaaaaatagaattaatacattgtcaaatttattgtacttcatattgttattagctaatcctatagttctattattgatagcaatgttcaagctcattattcttcaatctttttgtcacatctcaaagcttaggtcatggcatatttgtaatattcataattagaaagtcaaaaatttatggggtttgactgaaattaatttatttatctatatttattaagttgcaatttatttttaagtaattattaattgtgagaaaatgagttttggtggccaagttttgagagtcttggtgactaagttttaaagagtctttgtgtccaagttttgggactctataaatatgttttgtgtgtttgagagaggtgtgtctggagaaaaaaagtgagttgtgaaaggaaaagtgaatgtgagtttgttgtgtggtgcgattgagtacaaagcaaatggtatattgggatttgagtagagagtatatataattttgacgtgataagagaaatatatatctctttacgggtttggtagtattggccttacttttaaccaacgacaatgatcaaattaaagcgatttaaggataattaaaatatataatgaatatagatattatagagtaaagaaaataccagatttatagaggttcgaccttttattgttggtaatagcctactcccatttagttgtattgacttgtgaaaagatgaacaagaatgccttgatctctcttaaaagctcttacaatgatctctgagtgtgtcactcttgaatctaagtctctctcctgcgttgtctctaaatgaattcctgtccctaattaattacatcaaattggtttccaaattcaataaggaatagaataggaaatctatctatattataattacaattagcataataggaaactaggtaagtttcctttcttcttcaatactacgagtctatctcatgaatttagggatagtgccatgtcttccaatcttgtagatatatgagatatatctctgaaattgtctaactcacattttctggtcaatgcatgcaaactacctgcttgatggaagctgcttggatgtctttacatgctttgtttgtatgtcacaactcctttcaatgaccttgagtatcaaatcttcttgtacgactcattaggaggagaatcttccgtctaggttatgaattctatcacgtgcaacccaagtagatcccatgtcactattggaacatattttacgaggacctacatttactaacatgtatcttgataatatgattatattctaacatcctaaatatgaatttcttaaaataataaaataaatactgttattccaaatttggcactctgacgtggcatcacgagaatggtgacacctggactc

SEQ ID NO: 59314 - DNA, 1341 bp, Cannabis sativa
  modified_base (549)..(549): a, c, t, g, unknown or other
aaaaactcaaacaccatcaataagaacaacaactaaaataaagaaaaaccatgaataacatacttaaactctaagaaactcaacgagaacaagcttagaacattaccttgagtttgaaatcacaaagacttgctggaattccttaattaaaatagaagagctcctaaccctagcaaggttctatggaattcgacagagagaaagagagaaatgaagagagagtgtatttgtgttttcttaaatttttaataaaatgataataaaaagaaatcaagtctttatctaattaaatctagcataaaatcagattactaacatcatataatcgcacaaaaggaaaaacaccaattagggcaaaagaccattttggtcaactgtaaaatctcgactaatctcgacattcccaatgtctaactatatttccctgctataataaaagtactaaaatgtgattctaacagccaaacgacgcgttccaatgttgttggggacgaaacatgcaaaaaatattaaatttcatatatggcatataaaatgcattctgaattnaaataaatctccataaaatgataattcataactaatatgcaagtttcgtaattaagcccttattatctgctaatttccaaattaaagttaagcggtctttaaaattatcccccccttaaaaggatttcgtccccgaaatctaacctgaaccacttttgatactgagccctcatgttggactctaactcccaggtggcttcctccaccttgttgtttctctagagtaccttgaccaaagctatgttcttgttctgaagaaccttatcttttctatctaggatataaactgactgttcttcgtatgatatgtttgactgtagctcaagattctcataacaaagcacatgtgtaggatttgaattgtacttttgtaacatggaaacatgtaatacgttgtggactgctgaaagggctggaggcagagctagacaatatgctactagtccaattttcttgagaatctcaaaaggttccgtaaatctaggaaataaataacttgcttgcctctttcttttttctttcgaaacgtttgatccccttcattggggacacctgtaggaatgcatgatctcctacctgaaactctacatttctgggctttggatttgcataactcttttacctactcagagaggcgagcattctggccttaatcttttctatggcgtcattagtctgttgtactgatttcggacctaggtatttcctttgtcctatttcatcccaatgaatgggagatctacacttcctgccgtataacaactcatatggagccatccctattgtactctg

SEQ ID NO: 59315 - DNA, 1046 bp, Cannabis sativa
gggcgggccgcgacatgcccaaacgatgacgggacacctgggacaaaacccaggttccaccaacaaggggcgggtcccagcatgctcaacccatgccgcggcacctgggttgaaaacctagaaaacaaccaccttcaacacgaatttcagcaacaatacacatgcaaatcctcccaaatgacatcctaactctcaaaacatgaacacaaattattaaactcaaaggtagggtattaaagcactcaaaacatgcatcaaaactcataaaataccctgaaaattcagtttgcacgaacacaaaaatcatgcttcaaactagcaacactcaagctcatgaacttgagtttcaactcactcaactcaatcaattccagtagcaaaaatattaaagaaatttagattcaaatagaataatctccctaaaataacatccatagctcaaccataaaattcatcacaaagttatggaatcaatacccaaatccaagaagatcaacatcaaactcccttttcatgcaactcaaattcaataacacctattcatgcttttctataattaatttcaacaataattaaagatcaaaacccaaggaaaattacctcaaactcaaaccaagagaaagcttaagattcaacaagaacaaagctacaaataagccaagattcaagctttcttcccaaaaatcaaatttaaagatcaagagggtttgagtgagagagagagaggtcaggtgagagggatacacaagccagaaagttcctttgttttcctcaaaattccattttgtcaaacatagtaaataaagttcaaatgaccattttgcccctagggccaattaacacacatattcaccctcacaaggctatttttgtcattaaaagcataattaaatcccaattaaattttagattatcaaatatcaaataaatgccaattaattcaatccaattacatttcgggcccaaaccctgttcggcctaaaatacccggttgtgactataccgcgccaacctgtcaaaacacacctgaaaagaaaacacataca

SEQ ID NO: 59316 - DNA, 524 bp, Cannabis sativa
tgtttaattatagataattaaagattaaataacaacacaagtacctaaacttatgagtttgtaaacagcataaatctaacaattttttttagcaacataaacctgataattattttttagaggcataaactaaatgattttttagcagtataagtacttaatatttgtaaaaaatagttagaagtaatctcaaccttatatatttcttgtctaagacaataaagaatttgtattagcaaaattagagaaaaattacaattttacatatactaaatatttatacagtttaaaattataattttatttatacagcttacaaactcaaaactttaaatctttatgtcgcactattttaaatgattaaattaaaatttgaatacattttattaatcagccaaagtcaactgtacattcacattttataaaatataggaatcaatttccttagaatgaacacgccaccatatttcatccttctcaactgtcttacagtacaactattctcgtcagcctgagcaattgaa

SEQ ID NO: 59317 - DNA, 665 bp, Cannabis sativa
  modified_base (495)..(496): a, c, t, g, unknown or other
ctctctctctctctctctagactaaccacaagaaaaaaaaaatccacaaaaccccatcaccagtgtaactccagcgacctcaaccccaagcagtgctgactctttcgccgacgttagcccgaaatcgcaagtcaatgtttggagaacgtcatactaaggacatgatatcggtgtaagggcttacctaagaaattttgccgacgaggctcttttaagaacgtcatactaacgacatgatatcggtgtaagggcttacctaagaaattttgttctttactgagaacattttttcttactataaacattgcaaaaaattttacttttagtcacaacaaaacttgtcactaaaagtaaaaaaattgtaactaattataaattattattcctatattgtaactaaaaggtccgtgagtaaatgtattagtaacaaaaattacactttgttgtgactaaatgtatatttagccacaatatacttgttgtgactaaaattannttagtgacaacttgtgtctaaatgttatattttagtcacaaataattttttgttgtgactaaaagtcacatttagtatcaaaaatttatgttgtgactaaaaaattgtcaatagcagttttttatagtgaaatcttatttttttagttttgtgagtggttagcgttttc

SEQ ID NO: 59318 - DNA, 2328 bp, Cannabis sativa
aagtctgggtccgggttcgggtctaggtcggggtatcgatctcggtccgggtctaggtccgtgttcggttctgcgtctagattcagttttgggtccaagtccaattcctattctagggtcttgatttcgggtctcgggtcagagtttcagttttggtgctggtctagaaattgttccaagttcgggtcttggtacgattccaatatctaaacactgactaagggttgggtccaagccctaggtcgtaggtccttatccaattttgagtcatagggtacgatttaaggtttaggtgtgggtttgggtctgagtcctagtctgagtctaggtccttgtttgggtttaggtccgagtcttggtcccaaatccaaacacctaccacatgtcgaatctagttagagttctagtatgggttcgggttcaagtctgggtttgggttcgggtccatttctaattcccaaatttagacaccgactattggttgggtccaagcctcgagtcttgggtcctaggtccctggtccaaatccagatcctggtcaagttctacctcatgtatatggtcctggtttgggtctcaggtccaggtttgggtctaggtttgggtcttgggtcctgagtcatgggttcgggtccccaattcaggtcagggtcctaggtccctgtctctatagggtcccaattcgagtgcaggtcccgatcgtgttcggtactagtccatgtctcaggtattaaacttgtctgagtttgggttttgattcggttctcaggtctcaagttcgagtattaggtcttgggtccccgtctgggttctagtcccaatctaggttcaggtctgagtcctactcttggtttgggtccttgtcctgatctcggtctaggttcgtgtccgagtttgagtgtgacactggcatgtgttcgggtctaggtctgggtttgggttggggtttcagtccgtgtcttggtcccgatcatggtctgggtttgacttctggtacggtttgggttctggtccagttctcgagtcacaagtctttggttctaggtactgggtcacaggtcctggtgcaagtctgggtctgggtattgatcctcgtctaagtccgggtctgtgttcggttccgcatctagatctgattttcggtccatgtcctattcatgttccagtgtcctgatttcagttcttgttccgatttcgggtcttgggtccgtgtctgggtttgggtccttctctagaaattgttctaggttcgggtcttggtacgattccaagatctagacattgactacgggttgggtccaagccccgggtcgtgggtcaacatccgtatcccaatcttgggtcccggtctcgtttcgattcggatcctgggtcctggtccatgtccatgtcctcgttcgggtctaggactgagaccagtgttgggtcttgggtcccagtcccagtcgagggtctcgattctagttctaattttgagtttgggacttcaatctaggtttgggtcttaggtccaagtttgagactccaatctcggtcaggggtctgggtctgggtctaagtctatgtctaggtttgggtttgtgtcgtgggtcctgatttgagttttgattcgggtttgtatcctggtccgggtctaggtctgagtctgggtcaaggtctaggtccgagtttgggtgtgggtttgagtcctggtatgggtcccagatccaaacactgactacaggtcaggtccaagccctgggtccagatctggatcacggtctctggtcccagactagttccactttgcgtcccaggtcccggtccaggtccaggtcctaggtgagggtctgggtccgggtttggggttaagtcgtgggtctcggtcccaattctaatgcacgtgtctttagtcccggtcccctctgtccgtcctaggtcccagtccgagtccacgaccttgtcaggggtcaagtcctggtccgagtccagtttcgggttccgatctcggtctgggtccaaatttgggttcgagtctaggtccaggttcgggttcgagtcctgcgtttcgatatgcgtctgagttccgaggcccaggtctaggtcccccatccaggtccgagtcctatgtccttgtttgggtccatgtttgggtttgggtccaagtcccagtttcaatttcgattcaatgtttaggtttaggtgtgggtctgggtctgggtcaaggtctgagtcctggtccgagtctgggtccaagtctggatcccggtctgggtctgtgttcgggtccaggtccgagttcgagtcccgagtgcggatctaggtctgggtctgggtcagggtctcggt

SEQ ID NO: 59319 - DNA, 1001 bp, Cannabis sativa
atcattttatagtgaaaatttcataatctaaattgataatcacataaagggaattgaaaagaggagggtgaaagagcaggaaaattaccctaaaaaaggagggggaaaaatcaatttttgttttactaattttctttcccaaaatttctcaattcgggtattgtagagagagagtataaataagtggtgctcacgaagatggagattaggatgaatcgtcactatctttgccagtggccatacaaaagctcgatcaacttagaaaaaatttcaaattatttttgaggaattgattcaaagaaacagatcaaggtgaggctcattaatcagaacccagttgactcttatacacgcagactaagggaattgaaaagaaaaaaattgattcaacaggaaaaaaaaaatagaaaattaaaaaatatttccatggcattcaatggacgagttaatagataaacattgattgtgcaggagctgttgatgacaaagttggcgaacggcggcgtgagtgatcagggacggagaagactcctgcgattgaaggtgaggagccgcagttgatcaactatgatatctctggttcgattttacgaatgaaaaaaaaaccctcaataaaataataatttttaaatttgaatgagggtaattttttaaacccaaaatttaacttcccacaaaatctaaaatctaaaagtttgtgtgggtcaactttaactaaaagttataattttagcttaaattgaaaaaaaaaatgctattttttttttattttactaaacactttttaagtaatagatttttttgaaagtacttttaattttagattttctaaaagccaccctaaacgggtcgttgatcccacttatctaatagacaacacactaaacaggtgatattgttgatgcgtgtcatacaattattggattaaatgtacacgattattataaaaataaacaaattattcataatgattgctcaatgaggagtaggccaagtatgtc

SEQ ID NO: 59320 - DNA, 692 bp, Cannabis sativa
gtattcatggggattccaattgtggctagaatccgagtgcctggatctacgatctgtgggtcttgagggagacctaaagatgcagatggtgctataatagttgttcttgtgttcaccatggtatttgatcaaatcacgatatccacgctttcaataaaagtaccaaactattgaccttgaaaaatgatcaaccgacagggaggtcatgcagatttgatgcttgccacgtgtgtgcacaaataagaatgaaaatcaatagatagtaggatttattatagaggttcggctctcttgtgatagcatgtaatgacctactctccttttagttgtattatactgagggaattaccgtctatatcgttataagtgggctatgctatagtacccttaggattacaatcaatcctggaaaaactcaagtgttggacaaccaatggtgttggacaacccaaagcaggcatgtgaaagagaatgaagaagagagagagtttattagacatttgagatcaagtttctagcttagaggcaactttagcaacttaggttttcagtcagaggttaatgcctttatataggaagtcttaaaccctatgtttacaattcaaatcccttgaaaatcatataattagttagatatttacagaagaccgaaatgcccttgtaactaaatgttattcagctattctgttggg

SEQ ID NO: 59321 - DNA, 2021 bp, Cannabis sativa
catggctcgtaatgccaccaacgtaaaaattccatgcattaaactttctacaacttttatatatttactatttaattggttgccaaaaacctcggttaatattttggtgcttccattgagagttgaaggaagcgtctttaaacatacaacaaccttataagccgaagcaattatggtggaaactcgcgacacacgtcacccccgtcctcctcaaggcgctcaaaaccctgaagacgaggaagttgcttcaagagtcaacgtggattctgaggaatgaaaagaggccaacgatgacgagtacgaggaaaactttgacgagtatgacgcctacgacgaaggcagctacacatagctactgctcttaagacaaaaggctgctaatattgaagctgagatggcagcccaaaaagaacaaaacaaaaaaatgcaagaggtgatggtagccatgtaaaaagccatggagacagtagggatccacatacaccctaaagccatccccgcaggagtcgaggaagcacaggaagagtcctcaccaatcactcagaagcataagtccagggaaactagccccatacggtatccctctgaaggaaatcaatggaaaaaccttacttccatcccagggaaaaagaaaaaggtgcatgatccgcgaaacgttcgctcagatttcccgaaagggaaaggtccacaaaggggaaaactccaaaaagggagtcttggccctcaggatcgagagtaccgaaagagcatttctgtgcaccaggaatccggggaaaagggaagagggagccgacaataccctcctgttgacttgagacaccaaatcaacgagaagcatggtgatttgcgagatcacttggacaaaaagaagcagatgtcggcagtctccgcagagacgctgaacgagggaatcatggctgagctagcggtactgcctaaagacattgctcgagtctcccagagataaaaagctgatgactcggactctgattatgaggaccgagagccgtgcgctaggcacattttagagacagagctccccaagaattttaagatgcccgaaatggcaacctacaccggggactcacaccccaccgatcatttatctcggtttaaccgagtaatgacagttatgagagtcagtaatgatgcgaagtgcttgtgctttccactatcgttaagcagttccgcggaagaatggttcaaaaagttcgaaccaggatctgtggattgctcgaacaaatgtcaagttagtgacagtttgtcgccgcgagaaagatttatctcgaagttagtgccctgaataacatcaagcaactacccacagaaacattgaaaatttttataaagaggttcaaggaagaagcctcgaaaaccaagaaagttgatgaaggacggcagcttgcacttcttcaagccgggaaccgtacaggaaccccgttctggaaagaattataataagaaggagctgctaacctccaagatttccagaacagagtcccaaagtacatcaactttgaagaagcccaaatagtggcctacggaggatactacccaaccggagtggcggggtatgtacccggggttcaactctcgggaaccctacatcaggctactccaccaatgcgcgatatacagttcttcactactccaggatacaatcagagccaagccttggctcccgtatcatcgcattacgggaacccctcagggataagcggacaagtcccgtctcactcagctcttgctacgagcctaaccggaccttctcaaggctcccggagcaagaggtcctcaaaaggcagcaatcggatgaaggacaagtgccaaaaaagagggtatactccccaatatacccagtacacggagctgacggacacacaagagcgtgtgtatttcgccatgaggaaaaatatgcactactgaaggccgcctcctctgtacagagatagttcgcgaagggatcccaacaaaagatgcgaataccacaacgacattggacacagtaccaatgagtgcaa

SEQ ID NO: 59322 - DNA, 790 bp, Cannabis sativa
cttacctcaattccgaatttaggtgtgtcggccaacctaagtggaacaactgctcggtgaattacaagctcttaatcacatcgataacaacatggataagtgccacactaaatcacaatcgggacttaggttttcaacgaaaaccctatctactgcaacttaatatggcaatacgctaaactagcagggagttaactaactagaaacctgaaactagcatgaatcgatatcctaaatttttccggataccctactgcaaaattcgggtaactggttttacaggtaatgtaaaataggttagccggttttacaggtattgtaaaatcggttagctagttttacctaaaaaacccaaaaaacttcaaagcctaaccaaatcgatttcaaacataaccaaactttgtagacctgcatattataccccaataaatattttccaagcaataaaacaactacccaagctcagaattgaaaaacaccattaaagctccaagtttgagttgtaaaactcaaaactttgttaaacctactaacagccatcaaaacaaagcttaaatcaacctatctagacatactataactacagaaacatactttaaacaacaacaacaacaacaacatctaattcacaaatcatacaaaatctcttcacttaaaggttagaaaaacaaaggagattaactctgagaaccttacctttgattatattactaacacttgatctaatactctgattgcagcaagaaaacactagtcacaaagctgttggtccttagggtttcgaacaaga

SEQ ID NO: 59323 - DNA, 1146 bp, Cannabis sativa
  modified_base (748)..(749): a, c, t, g, unknown or other
agaagtccaagggcggtgaggggtccctttcaaaggaaaagagaccttctggagaggtcattgatctttccgaggagctgagtgctgcaaacccctctacccccaagcctgccaagtcgaaggagtctagaccaccaacggctgggtctgaactagtcaggagtgatcctgagttggtgcaggcaccaactgcacctttgctagtgcttctagaggccaaaaagggcaaggtgatgctggcccattacatgaaccgactggttcttaaggccagtgagcaactgactggtgctgataacgactcatctttggatgtgttggtgggcggagacttgaaggagttcaccagggtaagacttttttgatacttcccattaactttccacacttagcttaatatgctaaattttttcctttatgcaggccggtctgaagttggcctacacttactcccgggcaaagtctggaacgcggctctgtccgacaccttgaggggggaggcggacttggccaagaaggaagctgtagaagcaagggcggaaaccggagctgttcggttggagttgggcgaggccaacaagaagctcttcgctgctaagaagaagatctcaatgctgactaaggatctcaaggctgctgaccgttttgaggagaccatcgagatcttatctactgaagtaaacaatcttcacgatgagaggacttccctgcgagtagttcttcttcggatgaaggaggagaaggatgnnaaggagggggagctttcggctgaggtggacaggttgaaggagaaggtcaatgccttggagacagtcggtctcgagctcttctttgatttttagaaggctaatcctcgggccacctttgactacttgggcgacgccaaggacatgtacattgagtactacgcggcccaagtggcttatggtagaaacgaggcagctgcttcaacctccggccaagctgcttcaacctttggtcaggctgctgatacttctcctgttcaaacaacagatcctccagctccatttggcccagaacaaccgaacaaagagcctgggactccaactgtttaaacacttctttttatctcttttttttatatatcttattcggcctcagggccttttctaaaacatcatgacc

SEQ ID NO: 59324 - DNA, 1271 bp, Cannabis sativa
  modified_base (1174)..(1177): a, c, t, g, unknown or other
atatactttccctgatcgatcctagtcctcttcttcggtgacggtatcgcgattcttgttcttctccgataccttatttgctgcgtattctctctctattcttctgttcttctatcatgtcaagcgaacatcaagctgaaacccagatggaaggtgaagatcaaacaccaagaatggttcgaagtccttcagcttcaattgggcatgctaatcaagatttgcagttcatcaactcaagaaatcctattgaagatccaacaaacccgtactacatacatcacgaagataatctaggtaatgtttttgtctctcaacttcttattggacaagaaaattatgtttcttggagtagagctatgcagctctctatctctgtcaaaaataaattgggtttcctcgatggatctattccaaaaccttcttcttccgattatactctgtataatgtctggatccgtaacaacaatatcgtgatctcatggatcctaaattcagtatccaaagaaatctcttctagcatactgtacgatgaatctgctgccaacatatggacagatctcaaagttcgttttcatcaaagaaatgggccacacatccacaacctaagaaagagtttaatgaatcttaaacaagaaacactctccattggcatgtattttaccaagttaaagactgtttgggaagagttggccaattacagaccaagttgtacatgcaatgggtgtacatgtggaggagttaagaaactctaggaaaatcaccatatggaatacattatgtcctttttgatgggtctatcggataaattttctcaagttcgtggaagtatactgttaatggatcctctcccagaaatcaaccgggttttccaccttgttactcaggaagaaaaccaaaaaggaagtattgctgcagaaagtaatccaaatacaagtcatgcttttgcatttcaaggtgacatgaacaacagacctgatcctcaaggccaaaaaatctcaagcaccaaagaaagggaggcccttttgcactcactgcaacatccatggtcataccatagaaagatgttacaaaattcatggatatcctccaggatataataagcccaacaaatctaaagatgcagtggaaaaccaggtgcaatcaagtgaagaaactgttggattttatgccctannnnaaactctatttcaatgtaatccattttattcaacatcaataaagaaacagaagtatttttcattcatttgcgtatgttttggttcatcttatca

SEQ ID NO: 59325 - DNA, 1149 bp, Cannabis sativa
gaggaacagtgtactcctccgccttggatgggatccttgaatctgaactgggagccagagtatcggctctcctgggcttcttagacgcctcgggttccaccattttgcctttacgcttccggtctagaggggtgagaatctcaccctcctcttcctcttctacctccccgtcctcttcaatcaaaacgatttggctcaaggggaagctagaagagggtttcccggaagtcaccaccaaatcttgtaccggaggcagggccaggtcaagactgtaggtctgagtaagggcatccaaaagctcaaccattggcttagctgctttaagagacagacaaataagggcgtttgaacattatcaagaaattgtccatgcaaggaaaaagcaataaaactaatcctaccctaacaatctaattcagccctagcaaaatcatgcattaaaaggctggtgtcgtcatccccaagaaagttgttcgaggggaggaacaactggaagacaaataggctgaatgatccagagggacaggtgcgagaggaccagaccccatccgggaccggcctaaaaattgacctaagttggaaaaataaaaacccttggcatgatcgccccatcgggtaggggcattctaaatctaaggagacattcatcaaactctacaggcctacatcgagaataatcttgagcagaagggacatgatgaacaactaagggagacttaccggacccagaggtgctggcgccaggagccccagtgttgggaatcgagaacggtagcttaggccgggaaggtgcctgctcattaccagcttttacccaaagagccctcctggcagcggcttgagccttaatataagccaactcttgttccctcctaaagaggtacttcttgtaccggtcttccgcggaggcgataatgttcgcccggagtgccttctctcggagatcgaactctgtgcgaatgtgttgggacaaaggaccttggacaagttgaaatcatccaccgattggctctctgtgattagcttagccctcctgcaatttgcagttgtaactaagttctccacattcagcccgtccttgtcttacgtggagaagaccttggcatgctggaggatgagttgggtaggggcggtgcagtgcggtgcatc

SEQ ID NO: 59326 - DNA, 740 bp, Cannabis sativa
tgtagggcacaaaacccaacaaaaatagcttgctattgcagcaacatgtcataaagggaagttcaatggttgctggaaaaatctggtttccaacaacaggtactaccttttacctatcttggaattccaatttcttctaagaaaatatcaggaaaggattgtgaatttttggctgaaaaagatgactgctagaatcaagagctgaagctcgagaaatttgttctttgcaggtagaataactcttataaactcagtgctcatagctatttaagcttattggagtcaaatgatgattatgcctaagaagatcttgaagagcatagaggctatatgtagagccttcctttggaaggggcgggctgcttttcattgggctggtgctgtggcatgggatgatgtatgccaacaaaaaaaagatggagggttaggaattaaaagatcagaggaatggaataaggctgctatgtgtaaatacatatgggttattgcaaacaaacaagaaagcctatggttgagatgggttcatagtgtgtacatcaagagagaggaatggtggggctactcggcttctatccattccatttggtattggaagaagcttgtagctcttgaagacaatctcaaaaccatacaagaccctgctatattccaagaacaaaaatatcacatttcagcaggttatactttgttcaagcctagtcctaaccgagtgtcttggagccatgaagtttgggcaagat

SEQ ID NO: 59327 - DNA, 1399 bp, Cannabis sativa
gggggtattgggagaactccagagggatttccaccaacgagtgagggtttccatgtttgaggaagaaggttgagtcaagttgatggcttgttttgcaacatggtaaccagtcctaaccgaatagtgtcctgaagtggagtgctgccagaagtaggtgtctggttgggaaggatcagggggagggagggacaaaatgtcattaatggtgtcctgctggaaatgagctcgaagaaggggaatattccaatccccattgggagaaggagggctgatacatgagtcagggaagatggtatttgagaaggaaagactcgatggttaggaatccaaggatcaaagatactggtgttagccccgttgccaattcttttgcaaaggcccaatttgagaagagatttgccccaatgaatgctacgccagacataagagggataatggcccagggatgagtctaagaaaggtgttctgggaaagtacttggcctgaaagagctgagtaagaagaggtgactggtttgtttgaattctccaagcctgcttggcaagcatcgcttgattaaaaggcttgagagatcgaaaacctaagccccctatacttttggagttacacagagacttccaattcttccagtgaagtttgtgtttaccatcggctattccccaccaaaagtttgccatttctttctccacaaagttacagaaggaatcaggcagtttaaaaaccgacatggcatagctaggaatagcttggatcaccgcctttagaagaatttccttccctccctttgataaaaattttccatgccatttagacagaaaagaccagatgcgatccttaagggagttgaaggaagagcttttggatcgaccaaaacactggggcagtccaaggtatttgtcaaggtggtttgtcatggggatttgcatatagtcttggatgagagtttggtatgtgaggcttgtatttggggagaaaaacagtgaggatttttgaaaatttacttgttggccagagatgttttggtactggtcaagggcttctttaatagcattacacgcttgaatgtttgacctacagaacagaatgctatcatccgcaaaaaggagatgggaaatcttaggggctgagcgagtaatctttataccaaaagcctcaatcctgtctttcaggcacgtctaagagattgagagacccctcaagcacacatgagaaagagatatggggagagtggatcaccttgtctgattcctcgagatggggtgacaagccccagagcttggccattgatgttgaatttgaaagtggctgtagtaatgcacgccatgaccagcttgatgaacctgctaggagactgaaatttttccatcattttatagagaaatttccattccactcgatc

SEQ ID NO: 59328 - DNA, 873 bp, Cannabis sativa
  modified_base (348)..(352): a, c, t, g, unknown or other
atgcaaacataaatcacttcaaaactcttaaattgataactaatcagattgtaataggttttatttagggcacaaaacccaacaagctattctatgtgattattggtggacaatcccatagtcattagataagaaagtgttcgtttcaacaaatactacttttctaagtaaatgactaagtctgaaaacaaagtatcaaaatagaggagatattatttcttgattccaaaagtgttttattttcatattctgtattagatggtcccactgcctctgttgtcttgacacaaacgaagaggataattccacttatgttcttagactgaaagtcacagtaccttgtcgtannnnnagggtttcaaggaactcaccctgttatgacttggaagacacttgtgatgaaattcattgttaggttaaacaagtaatggattgtcaaaataagaaactaagaagtaaagccaagagaactatggtcaaaaccattcatatggagttaccaaagttttttattacaaggacaagaaaggaaattttgaaaataagtctattcaatagacttaacaaagcttcctgcttctggtattataggtttgagattatctaatcctattgcttgggttatatctagtaatttacttattctagtgcaagcaacttactttagtaagttgctagagcatttttctaatggcaatctatagaaacttcttgacttctagacatgcattttacttatctaaggaaaagtctcaactattctagaaaagataaaggccaatgaaagaattccttaggataaacaacgagaggtttcagatatgctttcctatgcattagaccaaacaccagctgttgagtgagagtaatgag

SEQ ID NO: 59329 - DNA, 660 bp, Cannabis sativa
taaaatttaatcaatataattttaaatttggccaaatggttcttagttatattatatgtaattaaataattaaatttgaatctagaatttataaaattaaagataatttaattatattgataaaattttatcaaaaaattttgaatttaggtaccaaatatgtatgtttttaaaatacagggtaccaaataaatattattgaaaatacaggatactaaacttgtatttcaataaaacatagagtaccaaatatgtatacaccctaaaattattagttaagatgatttgaatttaacatgagagattatgtttggaattcccttctctttttctaagtatatctacaattttttcttaaactaactgaagcttcaaactaaattcgaacttataaccactagaaaaaaaacgtttgttagactatatattattctacataaatttagattatcaagcttaccctagatctatatgttaaagtttataagcacaatttaacacttaccatactaaacatcttttagtattattgaatgtaattaattaaaatattttaaatctaacaatatcaataacttaaattaatttttaacaatttaaaaaatttgaaaaacaaaatgtagtacacagtgaaattcgtgaaaaaacttcttaattagt

SEQ ID NO: 59330 - DNA, 1602 bp, Cannabis sativa
tgtaattattaactattttgtcaacaagatattaagaattaatatgtaattgacacctcatattcaaaaacatcttgtattttaaaatatagtgtaattactagattgtgtaataattactaccctaataattaccactctagaattttgtttttggaaaattaccacatatactattttttaactttttctttttcaaatttatggtatgggtttctaatatggtttctatgtgggttgctatacgatttttggttgcgatttaggttgttcctttagttgcaatagtggtttctatgtagaattctagaagtgtaaaaattatttttatacttcaaaactgtattttttttttttgtatttttacggaattctacatagaaacatatattgcaactaacggaacaacttaaatcacaacaaaaaattgtatagctactcatatagaaaccactggagaaataactttaaaaactcaaactttaaatttgaaaaaaaaaaataaaaacaatagtacatgaagtaatttcatttttttaatagatttaattaaatagttactcagtgtaatataaacttcacaaattactcatatatgaataatatgaaataaacatacacaaatttttttaataaatttaattacacaaaaataatatttatctaattaccaaaaattttatcacaagatttatagcttggtagcctaattgtttgtattaatactatatatgaagactacaaaaggcggaaagcacgattccttggaatttctttatttattcgtatttaaatcaatgattaagacagaggaataactcaaactcacgttgcatgtagcaaaaaaataaaataaaaaacgattactgcgataatatatgaggaattaaattagtcaatatatataaaaattgttcaggtatacaaaccaattcattgttaaatgaacaattattaattaatatattttatagccccaagaggcaacatatatacatatggaaaaaaaaaaaattatatttttgtaatatttatatatgaaagtggaaatatgaagagcaaaggccacttgattgtttgttttgttgtgttgtgttgtgtcgctttgttttgaaccccactcgagaactgagaaccatgttccatgtcacagtcggacccgaattgaagcactattaaattttggatcagtctaaatatggcacccatccacaaatatatatatttatatattaatgcctgtgggatataatttaattttcttcagttctatttttttctaatgaaataaattaataggtatccataaatatatgtacacatacttcattaagcatatatatatggtttgattttggtcttggacatgatccatgatattggagtgagatgggagatatcgatattccaatttagtttgcaatgaatagattatattatactatactatattatattatatgatgtatataatctgtatatatttttatatagctttattattaattccacatctaagaaataaaatgggtggtgataattgtgtttggatttcttccctaattcggcaaggtcttaggtcaacaatcaccaatactaaac

SEQ ID NO: 59331 - DNA, 999 bp, Cannabis sativa
acagccaattccacagttcctaccaactagagcgctgacacccctactgtccagagtgtcgagcctcaggccccttccgatcaggtcgatccctacaaggagcctgggacccctactgtatgaaataataatttttttttcttttttatatctgttcggcccatgggcctttattagagacaaaaatgaccagccaagcagttttttaacttggaatatttcattttattttgagactactagctgaccgggcagactttaatcccgggtttaggtcgtgctttgttatcttttttcaatgaatattttcccttgttttggtaattattcatgcaaactgttattttttttagcttgttatttacttttaccaatgctttgtactattatagttgccccccaagtgaccgagcacacttatgactcttggtcacttgcattttacaagtatgatttttgtctattcggtgctttgggtcgagcagaccttttgtacgtattaatggtaaattcataacttgctaatacaattgacacaattagaatggaaataaacatattcatttattggtcggaacagttttgttaccgtagtaacttacatttatgaaagctattacatgatctactctgatctttagctaaatttaaacataaaataattgcacttaaagaaaaaacaaaaattgcacttttaaaggtggtcatctgacctgaatacttaattatttcatcaaaagctttgggcgggatctgcccagaaggccatctacttagaagtaaatgttctttgtgtacttaaggtggtcatctgaccttgtacatttactgttagtactctctcaaatgttctccattccaatacctttgtactagaatgagatccatatttttgtcataccgcccaagcttatatgcccccgactcaagaacttcgaccacctgatatggtctttcccagttaggtccgagcacaccagtcgtgttgtcttttgtgtt

SEQ ID NO: 59332 - DNA, 628 bp, Cannabis sativa
agaaacacacttttatcgcaaagactaattatatataatgatgtgtctttaattttaatcatacaaaaaaaatgactaatatttaatacgcattatcgttatgtctggataaaaaaaaaatacattcgatagagtaatttcttaaacgtattgtcgcatccccaaactctttacaaattttaaaatatttcttctttataagaagaaaaaagacaacaaattttagaatttctcaaaaatttgtaattgacatgctctctaaatacaatgaacaccaaaaatattttaagtggactatatcctcattggagtattttttattcttaaaaaaagttcattaatattataagacacataaagaaaatcattcaaacaaaagacacacattacactatataactaagttaattctgcaagtatataactaagttaattccgcaagtgaataaacattagcattattagtctactcacagtgagataatataataaataaaaaaaatctcacacacaaaaaatatcatgaagaacaataccaaattcagaaaaaacttatttttttaccactcacactttacacaagacgaagacaattcgagaatatagtaaaacaaccacttaagcaaca

SEQ ID NO: 59333 - DNA, 652 bp, Cannabis sativa
  modified_base (599)..(612): a, c, t, g, unknown or other
agtcctttttaccgcgaacaatcagtcggtccgagattggactatgctacgttcttatgccagcctttactttatataagcgtctgccttttctagcttgaccaaaacctccgccttaatttgagtgagcttcattggaaccttaaaaggcaacggtagaatcttgggcaagttggtctgaaggcttggtattggcttggatggttgggccaaggaagttaagccagatatggattggttgcttgaagttgggggtattgttgttaattgaatacatagctatttggattggatttgggttaaggtgttggaggtcacaaggaccaattgtctatcagtgttgttgcttcgtggttgggtcaagataggtgtgtgctggccacgagcaggaggacttcctactctctcagattcagagtgttccaaagcagagtgtttaggcctcttgtcctcccttctaggatggggagcagtgttggaaggcttcagcaaaccgttcgactttgggaacaccagtccttctgccaaatcctcttcattagacggaagcatggattccctgttgttaggatctgctggaatttattttaccaggatcnnnnnnnnnnnnnnaagtatgttgattaacacccaaaatatgaactttctaaaa

SEQ ID NO: 59334 - DNA, 907 bp, Cannabis sativa
gctctccaccataacaaaaggatgttgccttgagaccgtcgtctccatagctaataaacaggccgcaacttccccaataagagaatcagcaaactgaaacattttagaagccacccacaagataaactctgtatgatccctcgcaatcgccaccacacacatagaatcacctccgacacggacgtcgcagttgattttgacccaatccttcggcgggggggaccaaacaggagaaatagcatcttgaggcggcatggacaaacatgaactatagtctgcgtagcaacaagagatagagtcaatataatgaatcaaacttcccatagtgttggtatggactttgtcattacgagccctccagatcgtgtcaaccactatggaagcataaagaaacaaattgtctgtgtccacccctctggatctaaggttccagagaaaactaacccaatcccacatacgggctccagaatctataaccggcataacaccccacggggaagaccgccacaggtgggatgcaaaattgcagtagagaaataggtgctccatagtctcatccccgaccccacaaatggggcaggagatctcatcaatattcattctcttagcaagcaagaccctcaggggaagagcattggaaaggatgctccaccaaaggactttatgacgttccaagattttagaatttcacagtttgttccacatagtaggagcaacattcccaaaaggagctcttcccaaagcttagatgaggtaggcagacttagtagagaacacacctttagggtctcttgtccaaacccacctatccttaccctgaccatttggttttccaccctttaaggtactaccaacagtttccttgtcaaaaagttcattcagctttctgctgtcccagttcccatca

SEQ ID NO: 59335 - DNA, 957 bp, Cannabis sativa
ttcattctcagaggccgtttatttctgttttgaaagcttggaaacatctattcataaaaccctcatttcttgtgcttattgttttctcatttggtttaattatgaaaaagaaaaacttctcaatcattttgagtttttttttttttttgattgatgtaattgctcttaaacatctatttgattgacgcaattatttatgaacactataaaggtgttcgtttgaaaattctattttgaaaattttgtttccatacagagtcagattgcttctcttaacatatagaatgttagttagttaattatgatgtaacaaactcattaatgatcaatgaaccttattattctcattttcatcaaaatcacatcacctacccacattcattaagaccaatattaataaaaaaacagaataaaaaataaaatatttatttattaaaccaaatattgaacagtatgctacatacataataaattaatttcaaaacaacctacttttattaattaagatgagttcttaatgttttgacagtttctgttgagtggtctgccaagtgacttgcgatagttctttttgtacacatctgcccaatctttatttttatcacaacgacgtctcgttaacttttcatattcttgtttcaattctcttaatataaaaggtgacgtaccaagagggttctttctcatcgcatcgacaatatcatcaactccaagctcgttgtacaactttttaatacatctaagattttgaggtgttaagtaatcttcaatacgaattatttctgcgatgtcgatgttgtcgttgatcttctccatgagctgtgccacattcttgattgttgctttcacagactccactaacatgtcaaattcaaacatctcatcttcacattttaacataagtttttcgtatttgtttttctcagcatgcttgaaatagtactcgtcactttttcc

SEQ ID NO: 59336 - DNA, 850 bp, Cannabis sativa
aaataattttcataattaaacataattaactgctaatttctaaattaaactaaacggtctttacatatattttctttatttaaaacattttatcaaatatttaattttttaatataataatattatttatttaaataaattacatctttatttaatataacagttaaattttaaaatccatccactaattctaaaaaaaaaaaactaagcatacatacaaatcgtgcattgcacggaacatcgatctactgtatatattaaaaatagttaaaaaatatacataaaaaacaatgaaaaaatataaagaaaataatataaagtaattggttatcttaagaatgtagctcattactcttttaattattgggtaactaatcaccttaaattatttttttttacattttttttaaattcctgatttttttttgaaaaaattacttttgtaaactttgaaaaaaacccaaataaaaaaaatatatatatatttttaattttaagtaataaataagcgaaggaggaaactaataagaaaatactatcaagtgtaacaatcatttcaagtggactaaatggacatgaagttggcattatagaaaaacataatcaatagaactacttttcagaacagtagtaaacaatcacaatgtgagtgaaagagagctagaatagtaaagtaagatattaatattacttagggatttttttttttttatttatttttttccattttaaatcagttttttattatgtatttttacagattttacagatattaatattatgtattactaaatttacatagtaattaccaaagcaaccaaaattataaaaataaaaaaaagttaaaaaa

SEQ ID NO: 59337 - DNA, 1188 bp, Cannabis sativa
ttttttttttttttgaataattttgaatagtttactaagaaaataaaacataactacaaataaatagttttaaccacatacgtgtatatacataaattaatacttatgcaataaattatttattttttatattgtaaattatttaaaatttcatataaatatgcatgatatttaaattatacaataaacatcctcttgaaaaaaaattaaatttattaaaaacacctccacatgccattttgccatattttagaagttaatgtttcaataaatccaaatttaaaggaataagtgtttccctctatttatagtacactaaaataatatatatttaaattataaaatattttcttttcaaaaaaaattataaaatatttgagaggtaaaattagtccctctttggacatactatatatgataatatatattatagtatatataaatgaagtaatttctgtagtccatatatattattgtaccgttattgaattgtaaaagtaatattacaaattgatacaccacggattaagtaaataaatatttgaaataattttgtataaataaattcatgtatataataagagaaatggatagccaataatggaaagtagtataaatgaagaatctaacaaaaagggaatcaaatctagaatataatttacatttgagaaaatgaagtgtttaccaagttttcttttggtccatatatattggagacatttttttatttttatattaataagaaacctataaagttggaaaaaaaatattggacccagaatgttttctctcaatatagtattgggtaatacaaggaaagttttatttataaacaaatatacattgaaataaatatatgccctatttccaaatatttccaaattccatgaaagggaattttattttaaagtcaattatgtcttttgttaccggcaagtttaaagaaattaagctttacaatattgtgttgctaatttccaaataaatagaatactaataattaatatatatatatagtcatgtatatatgttgtagaattaatttcataagtatatatataaatatatattaggatatctatttgattttgacatgtactaacctcatgtgcacctgtcctatgtatataatcatcatcatttttttttctatagtaataagataagatcatgtgtaatcgttttatg

SEQ ID NO: 59338 - DNA, 1151 bp, Cannabis sativa
  modified_base (361)..(366): a, c, t, g, unknown or other
  modified_base (998)..(1003): a, c, t, g, unknown or other
aattagaaaaaccactggtgctctactgtggcaacagtggagtagtggccaactccaaggaactaaggagccataagagaggcaagcacattgagagaaagttccatctactaatagatataatagagagaggtgatgtgacggtcgtgaagatcgcatcaaaatataattgacatatccatcacaaagacgctacctgtgaaatcttttatgggtcatatgagtaagggagatgctcactttgcttttagggcaagtgggagattattggagtttatgccctaaaaagtctataaagacacttctgattattaataaagatttgaacattttgatatatgcttgaatgttaaattattannnnnnattattgaataatttatattaaatatcaaaaaatttcttatttatatatgaagaggtggcttgagctttacagagaactaagaccacttagttatgaacaaaataattagtaacatattaaagttatagaatctttaatcaatggttgctagtactgttcgttgatacttattctttggtgtaagtaatctcaattcggattacggatgtagtatggcatcaaagtgaaggtgttgtatattatagagactatatatgacaagaaccgacatgaatgaagctatattcatctaacatgttgtttactataaatacctaattcatattataataataatcaatagtagatcgacctaaatcctgagtaatcatgaactcatgttcatgttattagtttctttaattcactcgttaaaatttctcagagaagatgattcttacaacttctgttttgggaatctaataatgtggatggttggaaatatgatctacaattatgaaatcctaactttcctaacggatcaaatgttggttccctttatgtctaattctagtactagaatgttgtgcgcaaattcagatgggatctgaattatacttttgctagtgaattaatgatactaaaggataannnnnnaattagaagggtaaaacggtaattttaccaaaactaattgtgaaccaacacaaggagggctaatcacttgaattgattatatcaatggacactgcagtaaaacttagtaaatataattttataattactaagagattaattttatatt

SEQ ID NO: 59339 - DNA, 784 bp, Cannabis sativa
ctgaaatacatatttaatataatcgtatatattgtatattttttttttgtgtaatagatatatttcttatatcatatttatgtattatataggcaatgcacagaaagtagtaacaagaagagagaaacgttagaatatgagatcgtgggagcaatgctgaaaattagggcgagaaattttttttatttactaattaattaaacacgtttaaaaattgttttaataaattaattaaaaataataataatttataaaaaataatttttttttgaaaaaatttactcacactcttcacttctcatttttgtaaaatttcacaaagtttcaataatatttatgtatgaaaattaaatttagatatttaaaatacaaattacacttaaaaaaaaaactagtgtgatttaagcataggaaagaagataaggcacaagagacgcagaaaaaggaagaaaagaaaaaggagtggaagtggagctctttacgtggttttctttctctaactctcctcaactctcaactctattctactcatgaagtttctccctttcttcttcttcatcttcttcttatgttaagcatggcagcagaacccgcttttgtaagaaaatcaactgcttcagccacattgctaacttcaaaatgcagtaaacaattcaaacgcaagacttgctcttcttatattcaactccctttactttattctgctgccagagcttcatattcaatcgatgatgacaagaacaaggtctacaaacaactgggtcagctccactttctctgttta

SEQ ID NO: 59340 - DNA, 780 bp, Cannabis sativa
agaggcttgaaaaaagtttgtcctggtatccatggatctgctttacaattaacagtgaggctcgtaccaattctaaatctcaaaccttgttgtaatagctctttaccccaaacaatgctcctccaagttagagatggtgcacgtccctcttgagcattcaaaagtcctccatgagggaaatatctatgtctcaggatttgatagagaggggaattaggattttccaaaagtctccaagcttgtttggctaggagagcttggttgaagtgaataaaatttttaaatcccatgcctccatgcactttagctttacatagaaaattcaaattcttccaatgaatggaattacctgaagctgtagatccacaccagaaattggccataaggctctctatttgttcgcataatttgaccggcaatcaaaaacagctcattgcatatgttggtattgattgtacaacaaccttaagaagaacttctttacctcccactgaaaacaattgttctttccatgagttgagtagcttccatatccgatctattatgtcactaaaagcattcattttttcatggccaacaaaagagggtaagcctaagtaattttcatggcaaggttaacacaggcatggcaaaaatgttatggaagaattgtttctctgcgtcccttgtatttggtgagaaagataagccacacttatctaggttgatttcttgacctgacgcacggctctatagcccaagtgatcgttgaattgcaaaacatagatgagagatagatgg

SEQ ID NO: 59341 - DNA, 924 bp, Cannabis sativa
  modified_base (736)..(737): a, c, t, g, unknown or other
tatgcagtggtcgcagttgattacttcaccaagtggacagaagctgagccgctagcaaccattacgtccaaaaaactgcaagactttgttataaagaacataatctgtcggttaggattgccatacaaaatagtttcggacaatggcaaaaaatttgacagccagtcctttactgatttttgtatgaaccatagtatcatcaaaagtttctccgcagtggcgcatccccgagcaaatggtcaagttgaagtagtcaacaagacattgaaggatacactaaagaaaagacttgaggatgctaaaggaaactggcgggaggaacttcttgaagttctatggttgtaccgaacaacggagaaaatggcaaccggatagactccatttgccatggcatatggatttgaagcgatgctgcacgtagaactcgaaccaccatcccaaagaaggctaacatataaccaagaagccaatcatgtactcctacctgaatcactagatgaaattgaagagaagcgaaccatagcaaacttaaaattgaggcccatcagtaaaaagtagctcggtatttcaacaaacaagtgtaggcttggcaattcattgttggaaatatggtcctaagaagagtttttcaaacaccaaagagagtagggtaggtgtgctcggacctaactgggaaggaccatatcaagtaatcgatgttctagaatcaggggcatacaaattgggtaagtatgannaaaaaatgcaactcgttctggtaccacagtattggaatgtggaacatgtaagaaaatactaccaatagaagtaccaggtcggatgaccatatcaagtaataaacaaaagaacattttctcttaagtgaatggccttctcggcggaccacgcccaaaggttcggataaaattacaaagtactcaagtc

SEQ ID NO: 59342 - DNA, 1095 bp, Cannabis sativa
ttctttgttttcgatgtgggacttaacgtaagtgcatctctcctctcctccacttcagtactctactcaaagcttcccaagctttcgactttggatatttcaatagtgtcaaggtataataataattattaattagatttgttacttttcacaattaattttcaaaagttatatttacaaaatactaataataattatagagtgattaatatttatagagtaattgattttcccctgtcacttgctaatttacttgacacttaacgactaagttcctacaaaaattttaaaattataatttagttattattaatattaaaaattaaactaaaatatatacataaaattaaaagttaaatttaagtatttatattataaattactcatatttatatcattacaaatatcgttgttcttgcacacataaattcttaatagtaataaaagatatctaactctacaaattacttaagttctcttagaaattcagaaatcattttcttaaaacaaacttgcttttcaatcaaattctaatagagttgatggttttaaaagaatttcacattgttatactggtttcattcactcatttcacgggctctcgaggcccctcgtaagaaaatatattgggccttaaaatattaatgggctttgatggcccatctgtaatagcccaattgtgacacttgtgagaaactcaaaatcagacgagccaactgtaagcctccgaaaagagtccaattttagtcaacattgttcgggtacatgggtcccacccacccaaaaatagtacattacctgtctatgcatggagccaatcaaatttcacaatgtcttcaaatatcacagaataaacatgtatcaaattaaaataacactcctattcactcttgattttttctctgagaagctattaggtatcagtgatgtttataaataagtagatttgtaattattttatgattaatgtgattttttttataaaaagaaaaaaaaatagacattaaaaatggtagaagataattggataaaatcagttgcccgaagtagagttgttcatataatttacaatccgtaattttaaatcctaaccaa

SEQ ID NO: 59343 - DNA, 1193 bp, Cannabis sativa
ttttgtaagaatgtctgcaacctgatcacaagcaagtgtatgtttgacaagaagttacttgttgattacacgttctcgaacaaagtatagatccaattcaatatgtttagttcgagaatgcataatcggattggcagccattaagacaacactttggttgtcacaccaaattactggaagacgctgcaaatgaataccaatttcagtgagtaaagcttggatccaaactaagtttgtagtagcatgagccagacttcgatactcagcttctgaacttgatcgagagacagtcttctgtttcttagatgaccaggagacaatgttagggcccaaaaatatacataaaccagatgttgatctccgatcatcagcatccgaagcccagtcagcatcacaaaaaccaatcaaggtgagatttgaggcagacttgaggtgcagcccaaggtcaatagtgccagacaggtacctaagaattttttttcacaattttccaatgagattcaagaggggcttgcataaactgagaaacatgattcactgcataagaaatctcaggcctagtgatagtggcgtattgtagtgcaccaaccacacttctatcaagtatgtatttcttttggcacaagtggagtccctctgtagtatgagctacttcaatgccaaggaagtagttcaaaagacctaaatcctttagagcaaacatctgatgtagctgctagatcagagaagaaacagcggatgataaacttcctgtcactaaaatgtcatccacataaactagcaaaaaagtggaatgagcactagtgtgtctgtagaataaagatggatcaaccttggcacactaaaaaccaaatgacagtagaacagtttttaatttatcgaaccatgcacggggtgcctgccttaagccataaatagatttgtgttatttgcaaactagatgaggactctaagtgtcaacaaacccaggaggttggaccatataaatatcttcttgaagatccccattcaaaaatgcattgttaacatcaagttgtcttataattcatttttaagatagaacaatagttaagataaccttgatagtggctggtttaacaattggactaaaagtctcagtaaaatcaaaaccatattgttgcaaaaaacctcttgcaacaagcctaaccttatacttggcaatggtaccatca

SEQ ID NO: 59344 - DNA, 633 bp, Cannabis sativa
cgcggcacctaggaccaactcccaagttccattcaagggggcgggccgcggcatgctcagaccatgccacaactcctgggttcaaaactcagaaaccagcagcattccacacgaaaattcagcaacaaacgttccaaatcaacctaaaacttgatcaaactttcaaattaccaaataaagttgctaccaaacattatagagttaaaatatacaactcatgcattaaattccaacaataaaccctcaaaatcagattgtacaaacaacccaaaaatcatgtttaaacttagcaaacatcaagctcttgaacttgagcttcaacaccattcaaccccaattacctgtcagcaagtaaaggctgagcatgagaggcctgcagtgttactacaaccattgaacatatcatagtggcccagcggaagcgtgcctaactatttagggcgttacacacgggaacccgattatgaatatgtatatgtttataaactttactaattttacttaaagtttaaaattgacatgttttttttagaaaacccctttgattagcaaagaaggcacattaattagaaaatcactatagcgcacctaagtatcagggcgttacaattttggtatcagagccgccaggtt

SEQ ID NO: 59345 - DNA, 1902 bp, Cannabis sativa
  modified_base (26)..(28): a, c, t, g, unknown or other
  modified_base (1836)..(1856): a, c, t, g, unknown or other
atggtttgatatttttaaaattaatnnntatagttaaatttgtttagtaaccatgcatgggtaatacccattaagaaaattatccatatatttatatacattgttccaaaaaatacagttctctgttactaattgtttttgcctcaactttttatctcattacagtaaattaaatcatatagagagtcaataaacatgattaatcactacaagaaaaaaggatatagccacgactaaattagtgcctacaaatgcagcttttagtgcccatagttattttggcacgacttgtcgtgcttataagttcgtgcctaaaacaagcaacaggcaccacaaataatggcgtgactgatctaatggcacgactaatgtggtgccaagttaaaaacgtaaactttatttatcgtatatttaggcactacaaagtcgtgccaattaagttttatttaaagtaaaaaaaattcaaaaccaatatatatttaaatttaaatataaattatgaaactaataaaaaataattaataaaagtgtcttctacctcataaattaatattcaaactacaataaaagtattcaaataacaaattacaataaaaaaaaataactatttaaataaacaatacttatatcgtcatatttataccatcacaaataataatactataatcggattcctcatcgtcgtcatcattattctctccagaatgttgttctggaatatgcgacatttggggatagtaaggctgctgtgatacttctggcatttgaggatagtacacttgctgtatgtgagacatctgctgcattggtgacaattgctacatctgagttgttggtaccatatgctacatcaatggcatcgaaggcgtatgcggtgtctactgcattaaaggcatctgctgcaaatgtgacatctgatgcatatgtgtcatctgctgcatttgtggtgtgtgttgcatggaaggtgattgcatatgttgtgtctgcatggaaggttactgcatctgtggtgtttgctgcatcgatgacatatgttgcatggaagtctactgcatttgtggagcatgttgcatcgatgccatctgttgcatggaaggctgctacatttgtgatgtctactgcatcgatggcatctactgcatttgtggtggatgttgttgcatctgttgtgtttgtggtgtctgctgcatatttatcacttgcatttgcgacatcgacgatgacatccaaggaaaagaggacatttacagaggtgatgacaaaggatacataaaaggaagcagactctgctaggcttggggatattgggaagtcacaagctgtgaagatgaagcagaccctcctccagacatctgaggcattgccattccgaacaactcctcaccagtaggtagacgaacatcaggtcccaacctttgagacatgtacaacattagtcttgtcaatttttcaaatttttgctccactcttggatccacaggcatatcttgagtaggagtaggttgtgtgttccgcgacgaagattgcccctttaatttttgccccattccacgattatgaccaagcctttcaccaagtacctcactaagtacactcattccaatctcataagcaggtctaacgtcaggagtattggctcgtttttcataagctgaaacgggctcaccctattctaagaatataatttagaaagcattaaacatacataaaatagtattttactttgaacttatgagtaaatacttacatatttatgagcaaccaattgattaacaaatgtatttggcaatttcttggtgagaacttccttccaagttgttggaaatattttaccannnnnnnnnnnnnnnnnnnnntatgtttcattaacatcctaacataaattctaaaacaatgaaataa

SEQ ID NO: 59346 - DNA, 816 bp, Cannabis sativa
ctctttgaatttttgaggtgaatgacctctttaatattctaattaatttttatgaattcatttggaattttgtatcattttgtatgactttagaattttaccactttttatgacaaattaagttttaaaattcttttaggattatttagttggtattttaatgatttattctaaaatttggagaataataattatttatttcttctatgataatatctcaaatttaatttaatttagaaaattaaactttaagatattgtgtgtgatattatcattttagtttcctatttcaatgatataagggaaatattaaatgatatatagtctctatttatttattgtgcatattatactgtggtatggtatacgcccctcaacagtttgacacacattatactcgtaaccacatacaacacgtattgcattgttggcgcacaatatgttttttttttttcttttcttcgcttcagcatgaatatattaattatgaatatatattatggcacgaatgacactctgaaagaaatatatttaaggctcgtttcgtacgcaagatttgactggactggacaaaattggattatgctgaaagtactcctgtgtttggtttaagaatagactggactattttatttatttccttttagaaaaaaaaagatttaaattaaaataaaaatatataataataaattaaaattaaagtatttaataataaataattcgcagcacaaaaataaaataattcaattataaaataaaataaaataaaataaaataatactgtatatcctttataattaagtatatatcataaat

SEQ ID NO: 59347 - DNA, 644 bp, Cannabis sativa
acagttcattatacttttaaaattcagcggaagagaggtatggtcgtctcagaacaactctagcgacatagatgggcttccactacagtcttcagtaatatcgcaacaaattcaggtcagaatattatcgatctacttaccaactccacccatgcattagaatactacttatgctgcacaaatttttaattataatgggacactcatgtcttttgtgtattataaatttttaattattttcgtagctattacatataggaaaatttaattgtaggagacattttttgtctcttgtagaaaggtttctacttttagtaattagaaaaattatagtataatgattgggtacattttacatattttcataaaatttagaatatttcgagcctattattttatacatatataattgattattttaaattcaatttataatatcttaaattatttaaatatctttaattgaatgttttaaactcaattttttattttgtaaattagttagacttttttttaatgggtgagatgcttacatcattataattataatgcatacaaaaaaatctgcttattcaatgttttgattatctctcatataataatagaatttctcctgatcacaatgactctaataaatttgaata

SEQ ID NO: 59348 - DNA, 737 bp, Cannabis sativa
ataatcaataacaaaaattaaagcaatgttcaatatgaattttattcacatataaaatcgtaaatacataatcaattatggaagatatgagaaaaatattaaacccaaacatatttcaaattttataaagtttttaactaaatgatatatagtatcccgcttaggcgagagtcaaagatattactcgttaaacaaagtaatgagctcttctaaaagagacactatttaagcaacctttcagtcgatcaaaactagaatctaacgttgtctcatttaggcgagagtcaaggtcattcctattttatgagcttctaccattatttcatactcataaacttttttctaagtagtcatctttagggttaagtctactagaaaaagaatctataaagtacttatcttttgagatcttacagtgttaaattatctaatagtgaccatccattaggaggacgacaagggtctcgaagttccattagaataataaccatgtaagactaataatggagatcaaatgtcttataaaaataaagctcattatttgaagaaagtagcatatttattcaactatttattttgactatttattttaatatatatatatatatatgtatgtatattaaaatgactaacttagaagtaaaaaaattataaaattaattttatatccaaagcataaattttaatttatattactgataattaataacttaggtagttctaaaaataaataaatt

SEQ ID NO: 59349 - DNA, 728 bp, Cannabis sativa
gtatttcccccatcagggtacgtatgagtcctcgctttatgggtttgggaagaatgttggtgattcctagcaggtgatctccgttctatcgactgatttccaagatcctcctcattttcatgagggatttctcgttcatcaatttccagttgtctcctttctagctgttcatcctgattgttaggagtgtctcattttccctgagttgttcttcccgagccttttcctgtctcctagttggtgagcaacgtggtttccctcgtggtcttctcactccaagtttaggttgattttgagcattcatcccctgcactggcctgaccaaagttgcctctcgttctaactcaacatttcgacactacgcctcgttctaacctccatggttgagctcttcatccctcatcccgggattctaaccatttccacgctgagttctcctcgagcgcattgtccgcgtactagcaccaatatcgggttgatttttctagggatgtgtggtccgaacactgggaccatcctcagactgagcccccttcttgaacggatgggtccttctggagactgcggattggtgttgatcttctagagcccatgggctcctttccagaacgataattagtttccttatgtggggtgttaatattctttggatgtttagccataaagaagaaggtttttcttttaaaagaggggagggctttttttgagcctttttacagaggttctca

SEQ ID NO: 59350 - DNA, 626 bp, Cannabis sativa
aaaaaaaaaaaaaaacaatgtatccttcccatcaacagctaccattggttaggtttatcaaacatggtcttctaatgatttaaaattaacacatttgaaaaataaatagaaatgaaaattgtttatcttttctatctcatatttttctccactgaaacctttcatttgagaatcttacatggcataatttggaagaacaaaagagctagagtacggttagtagagcttttaaagttaactcataaataataataaatttaaaaataaaaatgtaaaattcactcctccaactaagtggatttatcttaaatacatgtttggctattttataaattaaattaaagatttagtgttaatctttgaaactactctccaaacattataaagattctgttccaagtgtggtatgggatgatattgtaagaagtaagaactaattagaaatacaaatagttctatttattgtctcaatttatttcttgttgtcaatgatattttaccctttgagatattacaaatttgttatttgtgctgtcattttaaatctttgatttaatttataaaatagccaaacatgtatttaagataaattgatttggttggaagaaattctgtgttattactag

SEQ ID NO: 59351 - DNA, 806 bp, Cannabis sativa
gttattagtctagatagaacatccacagcaatgatgaaaagggtcggggatagggggtctccctgtctgagtccacaggaaggtttgatggtgccttgaacatttccattaataagcaatcccatttgatgaatggaaatacacttttcaacccatttcaccaaatcgagatggaaacccaatcctttcagcgtattaagaatgaatccccaatccattttatcatacgctttctccatgtccagctttatcatcatgaaccccttttttcctttctttcttctcatggaatgaacaatttctctagccacagctgtattctccgcaataaaacgcccatgagtaaaggtcgactgagccggagagatgatggaaggcaaaaagggcttcaaacgcagcgccaagagcttagagatgcacttgtaggctacattacagagagctatgggcctatagtcactaacattagaagggcagtccttcttcgggataagcaccaggtttgtgttgttgatgaacgaggggagatccgcagtcctgaagaaataggtaaccattttcacaaagtcctgtttgatcacgctccaatgttgaagataaaaccccaccgacataccatccggacccggtgctttatcatgccccatagatttaaggcaattaaggactttggattccgttgggacttgagtaagcatatcgttagtttcttcttctataatgggattactaagaaaaagttcccccatagccgaaggagatgtgtgtcgggtgaaagtgttctcaaactttgaaatgaataactg

SEQ ID NO: 59352 - DNA, 1608 bp, Cannabis sativa
gcccacctagctcaggggcccaaagaaaatttgtccccttataaaattacacatttttttttatcaattttgataaataccacatttttttctaaatgagggcccaaaaatatttttttttccttatgacccactaaatttcaaggtcggccctaattggagttacatggtaacaacaactatttacctacttaatagaacaccatctatcatactcaatgacaaaacttcatatgaatttctacgtctcaaacaaccaaaccatactcacttaagaaattttggatgcatggcctatgcatctcatgtaacttctgcccataaatttgctcctcgagcaagagcatgcatatttataggatattcagaaaatataaaagcatacacattgctagacttattgctagacttgcaaactaattatatctttcattcaagagatgttgttttttatgaattaatatttccctcaaacactccaatacgaccagtagcattgataacttttttcaattttattctactactgaccatgtttcttcccatacaaaaaataatacttcacctaaaactaacattccagatgcttttcccactgctacaaaaaagtcccatggcatcaaaatatggcagatcaatacacaaacctgctcatctgaaagactacaaatgtgatttagtcatttcaactaatagcacagctcgaccacttgctaactttctttcttataactaaggtcatctccaatggcactttaagaacccaaatatgatgtaattttttcacctaaagcctccaacccaatggcagaatcatgttccatcaaaaactaacttaatagacattctaacaaaacctctcttccacactcacttcaatgacattatatttaagatgagtgttaaaagcttctacactttatcatgagggggcgtgttaaactacttagttaatttgttagttttgttagttaatttgaatttgttagtaattcggttagctagctcatgattaattctcttttcttgtttctttggttcacttttcctatataaggctcttttacctcaattgtaaataacaattcaaattaataataaagtttttttttttattttattttctcttttctaataaacatactaaaaaaaaactcatctattctgtaagttttttttttttttaaaaaaaaaaaacaaatctattggcaaccttatcttctttttctttcgtctttctctttattacataattagttaatagaatcattttttttttatagataaattcgaatcgtccactttttaagtataaaattctacttcctaatataatctcccaatatattattgtacatttagattaccaaatttcaaatactttcatttttacaaatatggaagttgaatacatttcaaaaagattaattttaataagataattttatattaattggaattttagagagagtatatgtctatgtgttgcgtataacttaaattcaaataattttatgcctgaagttaaatacagtagaacttctatttaaaaatattttatttaagaataatctttaatttgtcataaaaaaattaagtttcaattta

SEQ ID NO: 59353 - DNA, 1336 bp, Cannabis sativa
ttttataaaaatttatatatcaactcacatagcaaccaaacaaattagtaacctaaattgtaatttaaatctacatatatagcaacccacgtaaaaattattagacaactaaaaaaaaaaaaataaaaaatagaatataaattgattccctaaaattttatttttgatatcataaattaaaatatgaaattatatttttcttagtaccagttttttttttttttttttacaggtgtacaattctcagaaattatttttaaagtaattaatattggttaatttgaacagttgagaaagtgcattactaaaatgtagagttaccaaaacataaattagctaaatattattatctattttgagtttcgatattgggtataaaactatataagctggtctaaatttaaaaatatatatgcattatttgtgtttttatacaacaagaccccaaaatatagaaaaatgtcatttttctatatattagttagagtataacattaattttgtatatatatatatatatatatatataatagacttcacttattattatatcacaccctacatataaaattgaaattgatcactttgtaagagagatatggttcaatcagaaatttagatcatgtcatcaactcattaaaaattattaatagttaataattatgttaagtgttaattatatataggtgaagtgcaacaatagctaaataaataggtgacaaactattattgttgtaatttaatattagattttatcatttataaataatataaaaattattaactattcataacacaccacatgattcaatcataaattaagtaaacttctaaggagaaatttaaaaatatatatttataaaaaattgaggagtggcgagtccttggccctacatagttcagccactggtcaagtcgatatggtatttattgatcaccttaaaatatttaataacaatattacgcataataagacctttaatagttagggttttaaaagttatttttaagcttctgaaatttcaaaaacacttttcatcaaaaaagaaaaacgtttcaaaagcactgttgttacctaagagagtattattgtgccacatcatcccacatggaatataaatagtaaaatattgagttatatataagaatgtatattactctacttatcatcaagtgatttaagatggaaccccccataattctcaacgtagtatcagaaccatatccttgcgggtatgttagtgacaaccacatcttcctaagaccgactctaaaatataatagatcatagaaaaaaaaaaataattttcaaaccctcaattaaaaaaaaaaagta

SEQ ID NO: 59354 - DNA, 690 bp, Cannabis sativa
aatttttaacgtgcaaggaaagagagaaatttcatccatagaaatttgtgaaaaaatacatgaacaggagggaatgataggggaaccatttgtgtagccagtaaatctcatattccaaacatcagacagcatttatacaaataatatatcaatgctcctataatggttggtttagaaactaacctgaagtaacttgaaggtttcaaagtcgagatcagcatggtaccaattttcagcctcgtaatctaaacaatgtaattggaaatcaagtgtcagaattcgagccatttgtcgctgaatgcatcctagaatgttaaaactgaatttcttctattctctaaactctccctgctggctaccatctcatctcataaaggacacaatcatagcataggactcaagttcctcctgaagggtcttaaagtacctgacacaacacagtatttggaataacttaacaaaacaagaaaaggcaaacctaattgatccctagtgataaatttcaacaatcatcttaatcactttaaagacagagaccttcattaacctcttaatcttcttgtgcctcatattcatatcaaatattagtctaacatcgttagcattctagtatgtatgtagtatccacaagccaatcgaataagttgttttttttcctttttatatcaagtatttcgctaccaaagcttg

SEQ ID NO: 59355 - DNA, 1510 bp, Cannabis sativa
tttttttagagtgccctaaaaaaaattggtcatgttgtgcttgctctaagaaatatagatttggtgtgcttttctaatattttttaaagagtagacctattatttttgtgtcgtacttgaattttcattgtgctagtctgtttcttgtaaacagaccaatccattgttatatttaaactcgaattttgtattttattttttcatatatatatttacaattaattaatgggttaaatactaatatatgtacatgttatagtttcaactatatttatgtaatataatggagaaatttgattaaatatgcatctgttgaattaatcacctaaattaaagttaatatgtttaagttttgtgcgttaactagtatacccttaaattatccctttcatttcaaaaaattgaaaaaggaaactcttattctctttttccctctcgctttgtcaatttccttctcacccaaccaatcaccagaaaccaccccaaaattcaccaattgcactaccgcaccaccactcatgaccctccctctatcttattggttctatctggtgtgtgcatgatgacttttgaccactattattaaatggacagacgaacaatttatagtttttttttttttttttgtattttctgtttatcttttggtaataaattgagtttttttgtaaaatatctactttttatgtgattatttttgtatatggtctcataggtggtctgatgattgtacgatatgattgataaaaaagcacgatatggtttgatagtggtctgataagtgcttaaaatttatgttatagaagaaagagagagagtgtggggtttttaatataagggtaatttatggagatataaaaaatagacctacattgtcaatagtgatttaactttgatttaggttgttatttattttattttattgcctaatacaagcatgttttatcaaatttctcttttttaacattattttatagacatatagaaaactaattaaaattattagaattcgaatatttacttatattataaatactcaaattattttatatcacactttataaataattttataaaatatagttttagttttatattttttaatattttaattataaattataatattcaatgttatacttaagttttattattattttaacttatttataattgaaaaattcatataaatattattataattcttaaattattggttttttaatattttgtacagtgtttttaagcttgtcgtgtgtcatgttgtgctttttaggttagtttattcgtatttatgtgttgtgccttttgtgtttaattacatattttttgcgccgtgtcatgtgcaaacttatattttttttgtgtttggtcgtgttttttaagctcgtactcggtttcgtatcgtatcaaaaagttcgacctaatataacactagttattaatactctccaagggattcgatcctcatggagtattggcaactatattcaacaatgtaatagacttt

SEQ ID NO: 59356 - DNA, 2078 bp, Cannabis sativa
gaaaagctttagtattttcatttgtatcattctcaaggacattttcatttcagtccccaaggaaaaatatttacatggtaatggtattggcattctttaccatttacaaaattgtaacaatcatttatgttagtagttattatcaatctatactcatcatcagacatttaagctggaaacaagattgataaaagcatcttcactgcagggaattgttagagcacccattggatgatcaaatccgaattcttcttcagcttgacacagcaattcttggaatgaagaatggttcaagtatgatatggggatcacaaatcttgtcattttgttcttccctacataaactgccaaatacccttttggaacatcttttgcactagaaaaaggcttttgaataagttgcttggcatgaactacaccgggaaaacgaaaacccatgattgctgaagtttctaaaggtagaagaaggaagaaaatgtaatcaaagagagagctctcaaagttttcaaaaggaaaactctagtacttgaagttgtgaggagttgagatgctgaagaacccaatcttatgagtatatataatcaatgagttgtgaggaaatgaatggtagagactaaagaatcaattaatgagatggggtctagtgagtgacataatctttgggaaatcacatggttgtgtctttcctaattatttgaaagccacatgagaaaagaaaacttgttagttgaaggatccattaggtcatgatcaaatatgtcccaaaatggtttctctttgctacatacattttgtttaaagtggggctttcttgtaagttgttcacctggtgatgtctttacaatattcacaataggcaagtgtccatgtatgagtcagaagacaaagccatgtgaagctcaaacacttgtgtttccttgaaaataccaaacgatcccaattctttatatatacatgcacattctctattaacaaaatcatttgtgctctaaaatgaaaactctggaaagaaaggttaacatgggatttgaggtcattatctaataggtaggtttgctctctatgttgaagaagatcaaaagaatagttatataactaacaatagcagcactaaagaagatttagaaatcaagttcttgatatcgaatattgagcttctgatcttagtatagaataagaaaatggctatgccagagtctagaagagaaaatgatttcaatcaaataatccattcaaggaaaagaaatgcaatataattcatttgtatcattcttaagaacatttccttttggtgtgttgtgtatgtattcctttgcttaaatgaatagtgaacactaaagagtcaagtaattggatgcatggggtctagaaagaagctttgtccttgaacaatcacatggtattgtctttcaaattaaaggaggctaacaaataaaggtggaaactagtatatgatgaggtatttcatcattcatgacaatggtttttctttgttgcaaatcttattgctcaagtgggctctattgatgttttttttccttttgttaatggttggaatgatcacatgtataaagtgttaattacaaccaaactctcatatatgacttggaagacagagccatgtgaaattcaaatgcatatgtctcttgcaaatttgtcaaagctgcccaaatgtatttagaaccacttatttgggtgcctttgatatacattctaacagtccattcatctatataagggtacataaccacatagccaaatcaacaactcctcacattctctactacaaaatattgttgtgaactcaaatacttctatcaaagaaaatttacacaaaggaagatcaacatggcatttggattgactcgttttgttcagggtaagaaggctcttcgaagatcgctttcaggcatcaaagaagcaactttgaagtcttcaaccattccaaaaggctattttgcggtctatgttggagaagatcagaataagcgacatgtagtacctctttcgtacctaaatgagccttcatttcaagacttgctaagtatggctgaagaagaattcggatatgagcatcc

SEQ ID NO: 59357 - DNA, 1223 bp, Cannabis sativa
  modified_base (61)..(68): a, c, t, g, unknown or other
aataaaatatattctagatagttatttctagtaacaaaattatattttctaatatttaatnnnnnnnnaaaatatatttaagttgaaaactaattttagatcaacttaaattcgaatagttttcttaaatatcaaattagaattataattaagtttatttaattcaagacacttaattatttatttctagttttaacatttaattaaatagaaagttaatatttaagttgattttattcatgacacttaaatattagatattttttcaggaaatttaattagatagaaaattatatttaagttggaaattttatttcagggcaacttaaattagaataattttttaaatatattttattttattatattattcatttttatataaatttcaaattgtatttttaattgcatatattttgaaattttgaaaaatagatcaatgttgaaaattaattagaaaataagtaattagctaatgaaatatctagatggttattttatgagtagacttttggtatttttctagatatatttaattaaatagaaaattcatatttaagttgattttgttcaagatgcttaaatattagatatttttctcaagaaattaaattaaatagaaaaaatatatttgtgttgaaaattaatttattaattaattttagatcagtacaaattagaataatttttagaatttattttattttattttacgtaaattttaaaaatgtatttattttaaatacattagatttcgaatttagtcatttatttatagaaaattaaattaagttgaaaattaactttaattaattttggaccaacttaaattaagtaattttcataatttttattgaaaattcatactacgatagaaactagttttatttatgttcagatctatttaagtatagttttataaatattaaactaaaatttatatttaaagttatttaaattagtaatattaatgaaataaatatatattaatataaattgattaaaataaatatcaaatgaaaatactatactttaaaataatgagttttagtataagatatttgatctccattgtttgttctaaatagttcatgttttaatgagcttcatccctaatatatgttaattcattagcaatttaatgtcatagaatctcgagagataagtattattgtaagtcttttatttttagtaacgatcaccccaatagtgactgctaagag

SEQ ID NO: 59358 - DNA, 1393 bp, Cannabis sativa
  modified_base (824)..(829): a, c, t, g, unknown or other
taagattcttggtatttcagagtatgattattgtggacagcgtcttgcatctacaatagctttttctctagccctccatgctttttggtaagatatgaagacactataattatctgtcatgtcatccactatttcatttggtctatagtctctctttgggtttacaaatttggttcttattacactcccaatcaggtggcttgttgcattaggatggtctacagatgtgacatctattgagcatgtatgagaatgttgaatctttttgattttgaacatgtttgtttttccatgttttgatgccaagaaactccatttgcaattgtcatcgatgcaaattagcttatagtcaagtttggaggatctctttaccttgaagggctagttttttcttatggagtgtaggttgacagcattttttagtgtttctttgtttgcaaaaacttgtccaacaaatatgttatcaacatgagaatctgagatcacttgacttgtttcttgctggcttgtttcaattgcattttcaacttgattgattacgaagtctgccatgtgttgtgcatactctgtccttgttggtatcacttgggtgattttcattgtatgtttagagtagtcttgattgatagagctgctaccgatattttttgttggaatggctgccgaaaggttaaccatcataggggatttggtctcatcatcatcttttttttttttttttgatttattcataaaatttgcatccattgtcatctacaatcttcatgggttgtattcctgattttattttgaatcgaacatcaatgttttgtttatttctgtcnnnnnncaaagtagaacatattgtttgtgcaagtatgttgcaagaacaacttgatggtatcaatatccatgtcacttcataatcttgtagtttgttttgtccaccgattgtccattataaaatatcataactgttcttggatcttccatatcaaactgttaacaaccaatgcaaatgaaaaaaattatgaggctaaataatatgtaaagtgaatagaagaactgttcaacagttatgaacaaatgcatattttttcttgaattaaatatataattatgattatatatgtataattgtgttaatgaatagttgattatagctattgagtatagatttgtaacatttgttataaacaattttgaatattgtaagtaattttttttattgacaagtatatgtataaaaaattgattttctcacctaattaatgaagtatttttgtataataatcagttatgtatttttatttttataataacctgttttggtaacttttggtggtttgactagtaaaggcagaggaagacgatgaagatggacatgatgtcgattactatgcgaaaggtaaac

SEQ ID NO: 59359 - DNA, 1142 bp, Cannabis sativa
tatttatggtgggtgagtaagcagtggctccctgattagttctattctgtggaagtgtaggatgtctcttgatcctcagtgttgatattgtcatctgatggatgagaaaaattttcatgcgctttggcattttcttagtgtaatgtatattattttagctaatacaatatatatttgtaattaaatgttgtaaatattaacaaagacttagttttggttcaatggttaaagtacttcatgcaatataaaggtcaaaatttcaaatctcaatttagaaattttttttttaatttttaaaatttattttttgaaaagatagtttaaggatttcaaatgtgtttagcgccttaaccattaaaaccaacaattttgttgttacttttttactttgaattatatttaatactatataaatataagtttgtatcaactttttatatattatattatgtagaaaattaaattatgcccctcctaacttacgaaaaaaaaaattcacctcttgaacttcaatttcgggtccgccactactgaaaggtgatggggttttatatatttattccaactagatcctttttactttttagttccatgtgaaacattttttgactttagttgatttgttggttgtgactttttatcttggttcgtgcggactcggcataataatttgagactcaccttttgttgctgagatgagggtgtgggtcattgaccagcttgagagatttttggtccttccaagtgatcactagcagctgttcgccattcttgtattgattcataatttaaattggtcaaattactattttaccctcataattatctctttactgtttagtaccattaatttactagtggtagttaacttatgatcatatcacaaattcgtgtacaattttccagtactagagttaacacttaaagttaactaatattcaatctaatagaaaagtcaagattttatattgtaaattatgttcccaactatccacattattaaactcccaaaacagaagttgtcgattccctatctgagagattttaacaagtgaatccaagaatgtaataacatgaacagaagttcataaaaactcagggacttaggttgatatactaattgattatctttatgatatgaa

SEQ ID NO: 59360 - DNA, 810 bp, Cannabis sativa
ctctctggttagacaaacatccataagaatcatgatgactaaggtgttaagtatgatctagaaatggaccaaatggatgtgaagataatattttggcatggcatacttgaagaataaatttacatggaagagcctgatggatacaaaagcatcaaacctaactaggtatgcctccaacaaaaatcactttatgggctcaagcaagccccaagacaatggaatctaaggtttcatgaattcatggtcagtattgggtatagcagaagtgattatatgacccttgtgtgtactacaacagtgagcaaatttggttactattgtatgttgatgatattctcatcattggtgacaaaaggcaggctatagacaagctaaaacaaaatctaaatgcataatttgaaatgaaagatctagaagaagcaaagaggatactagggattgatataagaagagacagactagagagactatcatattcacaaaggagctacatacagaaattgattgacaaattttgcatgagtgaagcaaaaccttttagcactcctctggcttaacatttcaaggtaacacagaatcaatcacccaaaattgaagaggagaaattgtacatggatactgtgccctatgcttcatgtgttggaagcctcatgtactagatggtgtgcacaaggcttgatctggcttatgcacttagtatggttagcaggttcattgcagatctaggtaaagaacactggtctgcagtgaagtggatacttagatacctacaaggttctatgtgttggatatattttactaggatctaga

SEQ ID NO: 59361 - DNA, 1166 bp, Cannabis sativa
catataagctgccacataggaatcttttgtgtattcctttattatatatattgattgattatatggcttggacttgactggtttattattaattcatgtaattaattctaaataaatacagaataaagtaccaatgtaattaaatttatgtaattctacacactaattaattaaccatggatcctatccgctctttcagcctcttggataaggcaagagaggccttccgagcaaataagaaacatgtaaggcgagagggggtctccctgacgaaggccacggcttggctgaatttgaccactaatttctccattaatgagcactgagaatcaaagtgaagtgatgcagttcatgatcttgtccacccaccgtttgtcatagcccaagcaaagcatcattgcttcaaggaaactccaactcactctgtcatatgctttggacatgtctaatttgagggctatctttttcccattgtcgaaccttccttttttcatacaatgaagactttcaaatcccaatattgcattatcttgaatgaggcggccccgaatgaatacactttgattttcagatatgacttccttcaagctatctttcattctattggcaaggcacttggcgatgatcttgtagcttacgttgcataggcttatgggtctgtactcgccaactagttttggttgttttactttcggtatgagacaaaggagggttttgtttatctgcctgcagtcgccattgttgtttagtatttccaagcacactctagtaacatcctcgcctatgatttcccaatggttttcataaaaaatccgagacatcccatcaattcctggtgcttttagagcattaatttgggacagcgccacctttttatcaatttctgtgaactcggcaagcagaagttcattttgatgtcggctaagtcgtaggggaacaatgctttgaatggttgctaatgtagtttcttcatgatcaggtgctgaaaataaatctttgaaatggtcacatatagttcgctcaatgtcctccttagtattcatccattgcagattgttatcaaagaggccttttattcggttcttttttcgcctagaagtcgctttttggtggaagtatttggtattgcaatttccatgggttaaccaaatggctctacttctttg

SEQ ID NO: 59362 - DNA, 903 bp, Cannabis sativa
agtgatgaaagagatgtatcttgaccctcagaattactgtctagattaatacaacataaaaaactggctagaaacctatgaagcaactgtatacccaacaagaaatcaacgcaattgggaagaccaaaaaagaaaagaataagatcaattttggagacaaagacacaaaacaaatgcaccaaatgtggaagaaaaggacacaataggaggacatgcaagaacccaactctagactgaaaaaatagcatctacaaaacactagaacaacaaaaaaataacataaataaaacatttttatagatgcaaagaggaaaaaacaaaaacaaggaattttaaatagtgattgctattgaattaattaacagtgaatttggtggctattgaatagattaactatgaattacattttcaatgaattgatttgataatgaatggtttaattttgaatttcatcaaatggcttgattaatgttgcaaaaacattaaaatttaatgttaatgttgtttaaaagaaattaaagaacaaactcttaaaatagctagaaattggtttctagatattgaatgctttaaaaaaaaaattcaagcttaatttacctataatcatataaaaaaaacattagaaaacggataaacatgttgatttatttgttttaaaattgtataaaaaacaataatcatttaaaatacaaacaaacaaaataataataaaattttaatcacaactatatataaaatcaacattatataaaatagtaagattcagaaataaaccaacattgctgtgtagttcaggctaacaacacaaaaaaaaaaaaaaaatataaaaatagccatgagcaagaaaccaacatttgctttaagttctggctaaacatcataaacacacacacaaaaaaaaaa

SEQ ID NO: 59363 - DNA, 1293 bp, Cannabis sativa
attcgcatgatcatacatttaaatacaatctaaataaaacaacaaagaactaaactctaaataaaactaatatttacgtgactcggcacgtaacttttaactagtttaaacttaaatatactgtcaaaacaataccaaaagaatataattttagtgttaaatttttttctattccaatcacaatattaaaatttacactaaatttttttattattatattattttattaaactatcttacattataatatttatataaatataaaaatttaatcataaacacattattttaatattaaaaactaagaaaaaaatttagtgtagtctattgttttactatttttagtgtgacactatagactcccaccgtacgtatataggatgtcatttagagttccattggagtaattttatgtctaaattctactatttttaagattttagtatctgattggagaagccctaagatcttaatttttatacctaaataacatgggaaaaaaaaagaaaaacacttgaatagtgaattatagtttcgtactttgcttgcatttctagaaaaaaaaaaaaaagaagaaacaaaaaatctctcatcttaagaagaggatgatccaatattttctcattaatttttcttcccttaaaataattgttataaattattctaggactaagaaataaaccgcgattcggatgcggttatattttgtttagtgataattaatcataaaattattaaattttaaattttaattttgatatttttcatatattttatagtaatattgagtaattatattactaaatttttatattttttatttgaaaaaataaaattaatattgttgaaaagtttattatacaattttttatataaaaaattaatatatttaaaattattgtcattattgtatttcatttgtattcgcactatatttaaaatcgatgtatctcacttctagtggcgattatattcaaaattactatcatcggtgtattttacttctggtccttacctttaatcatttatagtaaatataatatgtagtaaattataaagattcttttagaaaatattatatagtgtataataaatatactatatatttttttttgaaacaaatataatatatattaataataaataaaactaatatttttttttcttttttaaaaaaaagtttgtaatcatatgtagtatacgattttcaaatcaattttttttttatttcttaatgtaatcgtatattatatagtacatttattttttttatgcactttgccaatttttgtt

SEQ ID NO: 59364 - DNA, 1158 bp, Cannabis sativa
caatggatataaacagaaagatcgtgggattaatgctgagtacaaagatcgtgggattgatgcagaatacactaatcatgggatcgtgtgtatgccatattcctgtaatctgatccccaagctatagggatttcattgatgactcataatgcgaaagctgaatttgctaagtgttggttgccctgtgcggattgctgattgctttgctctgggcatgttagcgaggcatcctgctcggactgttccctccgagcagatactccaagtggattccacgtgtcaccattatgcgatgctacgtcagagtgcaaaaattaggataataatgtggaccaataaaaatttaccacgtgtacaagtgtgtacacgtggatagtccactatgacatttaactgtgattttcggacggaggggtataaagcaaaacggaatgggagtttaggtagttttgcccctaaaaatcgatttttgtagttaagtgttaaataatttaaaatttaggttgtttagttgccaatattctttaaaaaattattaaagtaaaaattaattaataattaaaaaaattacgtaaaattaaattaaaaaaaataaaatattttttcaaattaattactgatgtggcgttaacatagtactcacgtggtaactagctaaggagtcatattatcattttgtttgttacgtgtgacaaaacttgatagaatggctaatttacaacaacatgaatagttcatggattatttttaacaggccaaaatattcaggagatacaataatatataagtcataattcagggagaaaaatcctaataatcatttaataccaaaaaagagaaatacttattctaagtatacatatcttaggtacatatacatacttgctcactaaaagaaataaaataataataacttactcacaaataatttggttattatatatagggtaaacagtgatataagtactcaaaattttatgtttgtaagtagtataaactcaatatttatttttagtggcacaagtactcaatatttataaaattataattttttttctaattttttcagtagagactctgttattgtcttgaacaaggaacatataaggctcagattctagatcattgagtctagatagaaacatgtagtatcagtta

SEQ ID NO: 59365 - DNA, 822 bp, Cannabis sativa
taactattctaattcataaaactctatataaaactaatcgttttaacttaaaactaaattaaaccataccttaagcttttccactcagagaattcgctatctcgctactaccatagcttagatcgctaggtttcgggttgaaaatcaaagaaaatgatttaaaggaaaagaggatttcattgcactgaaaaagaaggtttcgtttatatgttcgtactgtttataacttaacaaatacttttccttctaaaataataaagaggcaggtgcttcgtgcaaaaattctgcgttcattgccatggaagccctttagaaaaagaaggaggacaaaaagaagtcctacaaatgtgaaatataacttaacttaactgatacgtttcttttaaaaattaaataatacgttaatataataataataataatcttaaaagtaataataataataatatattaataaaaaaaattattaatagttatcctatcattttttagtcactaagaaacctctacttttaaagtatttggccaactccaagtacacccaaaatacctcagtatttctaagatcaacttacctcaaaaattctatcaatatttctaactaatatcattgtgacatttttggcctccaatcaggtttccaaggtcgttgaacttgaaaatatttatatttcacaaataactcatattatatagacgtattttaaataaatttctgtaattaataaataaattacgcttatttatccacttatcaagtcttcagagacgtcaaacctaaaaatatttttattccaaatatagctcatattacattcacac

SEQ ID NO: 59366 - DNA, 1868 bp, Cannabis sativa
tccataggagtaccagcaactgaaagagaatcagcaagaatctttaccttgccaaggtagtcagaaatggaaagattacctttctgaattgtagagagctgagacttgatctgtaaaatacaggctttggattgactggcatatctctgttccagtgcgcgccaggcagagtaggagctttggaattgagctagagaaccaagaacagattcagacatggacgatcgaagccaactgaggagaagttgatcctttctcttccaggttgtaaattcatgtttggtttggctattaaccaatcgtttaggtggagaaatacctccaagaagtatgtcatcgagaccgtgaccaattaaagttggtataacttgagatttccatgctaggaaatttgatcgatccaatttcacggtgagagatgagtgaagtgaattttagaacggattccatggaggattggccggagcttgagcagcggtggtggatgtttgagttgaagaacgaggtggattttcaggattacagggatccattggagacggtagtcaggggcaatctgataccatctaagagcttatctatctaaaaatctaacagaatccaatctatgagattgcaattcaagactagcaaaagctaactagccttatgaaatgatttcatttataaaggggagaatacaatgagtaagcaagaattaaagcaagagaaagttgttacaaagaaacagtgataactatttttaactaattaactaactaaacagttagtttaggtacaatagtagttgtatcaaaggctatgttttattcagaaaagaaaaaagaaaaaaaaaattggagaaaaaaaatcaattgaaatagtaataataataataaaaatatttgatatgtgagaaaagaaagtaggaaggaaaaaggtgtataaaaaaattaggtgggctcatgtatttctcattggagaagaaagtgagtggataactttgttcaaatggatgaaattggaaatgatgctgtacttctagagtagtatttaagagcatcttcaatagtattaaattggtgtggtactaacaaggactatttcaatctttggtggaaaacagtctggaacaccaaaaccctgcccaaaataaaatacttcaactggaaggcttttaatcacatcctcccttgcaacttaaatctttttcataagcatgttgtgccttcccctttttgtcccttgtcataatcaagttgagtatttttctcattctctcatcctttgtccaagagcaaagtctgtgtggaaacattcttcattctcgaatttctattatagaaactgtaattgtgatatcaaagaattttacatgagagaccttgatgaatttaacaaagatacttttacgatgttcattaatttactttggcagattttgaataaaagaaacaatgcacttttcaaccgaaccactaacactccaattgaggaggaatatttcattatttctttactgcaggactatcaagtagctcaagctatatccccttgttcaagtcctttggattcatctgctcaaaactcaaccacccctacacagcaggtgccttcagctcactcccttcaacatgtacagtatactcttcaagttgatgctgcattggacctgaaaaatttaaaaacgggattgggagctaccatacttgacagtcgatagaaccaaatagtaggtttttccatacacaaatagggtgcatcaacttctctttttgtagaagctcaagctctacttgaaggcatacattggtgtttggctacccggattctctttggttccattgaatttgattgccagcagttgatcacaaggataaataatcatt

SEQ ID NO: 59367 - DNA, 1170 bp, Cannabis sativa
  modified_base (146)..(148): a, c, t, g, unknown or other
gaagctctagcgcctctcctccggccaagaagtctaaaggcggtgaggggtcctcttctaaggaaaagaggcctttttgggaggtcattgatctttccgaggagctaactgctgcaaacccctctaccctaaaagctgctaagtcnnnggagtcttggggaggaagcttggataggtctggaccaccgaaggttgggtctaagctggtcagaagtgaacccgaacagatgagggcccctactccacctttgctggtgcttccacaggccaagaaaggcaaagagatgctggcccactacatgaaccagctggttcctgaggtcagtgagcaactggctggtgctgacaatgactcttctttggagctgctggtgggcggagtgttgaaggagttcaccagggtaagtctttctggacactttcctttaatcacctgtacttagctcaaatgctaaagttttttctttgtgtaggctggcctgaagttggcctacacttactcccgggctaagtctgcggctttaaggaacacggctctgtctgacaccatgagggcagaggttgacttggccaagaaggatgctgacatcgccagggaagaacttggagctatttggatggagctgggtgaagccaacaagaagctcgttactgccccaaagaagatgactaagctgactaaggatctcgaggtttctgaccgtcttgaagagaccatcaagaccttatctgctgaagttcttcatcgggtggaggaggagaagaagagtaaggaggaggagctttttggccgaggtggccaggctaaaagagacggttaatgctctagagacagccggtcttgagctcttcttcgacttttggaaggctaatcctcaggccaactttgactacttgggtgatgcttaggacatgtaccttgagttctgcgcgtcccaagtggcctatggtgaaactgaggcggctgcttcaacctccggccagactgctgatgtacctcccgttcaaacaacagatcctccagctccaattggcccagaagaaccaaaccaacagcctgggactcaagctttttaaacacttctccttatatctctttatttttcatatatcttattcggcaacaaggccttttctaagacatgatgacctgccaagcggtctttaaac

SEQ ID NO: 59368 - DNA, 1391 bp, Cannabis sativa
  modified_base (642)..(648): a, c, t, g, unknown or other
tttcttatcaaaaattcaatttctcgtttcaaattgttgcattcattggtgtcatggccataatctccatgaaaacagtaaaacttggaaatgtccctcttatttatgtcctttttcatgggagtaggtttcttgtacagagctactggctgagtagccatatagatgttctctaaattgtcagtcaggatagagtaagcagtgaatttggaagaattttctctaggggtctgctcggctttgccagaaagctttccctttttcccattgccttgcctattattattattagatcttttgccgcctaatcttgagtttctcggatactgggggtgttggacggatgttccaacagagggagcttgtgattggcctggtttaagctcgacttctactcgctgaatggcctcttcgagcttgatgatgccatttacacgatcgagtaagtcactcatagaatctactagtttgtccctgttgatgtccttccaaagttctccgagaactttgatgcccccagtcttgcagttaatttccctttttcggttaacaatgtaacttttgttgccagtcgtcatgaatctactaatataggctcagagaggctcctttggcctttgcttcacttcgaccaggtcctcnnnnnnnaatgggagttggggagaagaagagaattgtgcatggaattccgaggagaaagctttccaagagttgaaccttctcggtgttaacttgaagtaccattgttgggcggcttctgagagtgtggccggaaaaactcggcaagacacatctcctcaaactccttgtgcgtccatttgcgtttcaaaatatttgagatgtgacaaaggatcttctttcccattatacatcttccaggtcggcatcttgaacttgtggggcagctccaaaacattgatctctttagtaaaagggggtcctcgcgctcggtctaactcgagatcattgtgcttttgaccggccagacattggaacatgtttttcatttcatccaactgtgtgtgcacttatggatgaaactgttcggccttttggccgaccaatgccacatcaagatctctttgaactagatcttgagcgcgggctccgggctgagtggctggtggaacatattgttcgtctaactctctccttctatttagatcatctctgagatcatgagctattccaagtctattaaatacagacgcaccaggttatctcaatgattagttagtttggccaagcacttggtcaaaaccgctagtctgggtggagttataaggtataacccctctgacgaattttcagataaggtctagctgcccaccgcttggcccacaagtggaacctgtgatcgaggatttgacggttgaccgttcagagtttgg

SEQ ID NO: 59369 - DNA, 1212 bp, Cannabis sativa
aaaaaaaaagtctttattctttttttttttcacttatcttttatttctttctttgaaaatgtgagatttcttatttttgttatggtattaggattaattagataggaatcctaatcctggttgaacatgccattcgaaattagagagagaaaggaagaagtgaaaagacttttgggccttttgcttatcatttatctttttgttttgatttctctaatttgttattaatcccaatagcatatagaattgttattaccttttaaatttgtattcatattcctagttgtataggaatttcgaaatacacttaaaaaggagaagggaaaagatacaattatatctttttcttatcatttacttcttccttagacaactttaaatttaaaagactcaaagtagatttaggattagggtattggactcaactataaataagtgagttgagaactaattttttcactcttctcattcaattccacatgcctatagcagttagtgagcacctcaggatttcatcttcaccaagccttcaagccttctccacttcaaggtagaagaaattttttttcttcacgccgattttttttttctaattttttcttcttctcttcctttgctgatcttactccaaggactccttaactccaaaactcccttgaaatagtttccccaagcctcccaaaaatccaaaactcctttcttttgccttgaaaaaactcctcaaagctacttagacttttcccaaccaagtttgactttccttgagttgtaagtagcgtaagttgttgaatttgagatggttaggatgaagagaagcagaagattacatgatgagtatgatcaccatgttgcttagttcatcagagctaagttgacattgtctaagtctaagaacttagacaaggcttgtggtggaaaagtgatggcaactaagcttctcaaagctgtcattgagagtgatgctccgagagatcgaggcttcaagcttaggccccttgtgtctagtacccttaccgagcttcaaactcaaaccattcaagatgattactatcttcttgaaattattgttcgaaaacctcaacatggtgctcccaagggttcttagaacacttgttgtagtgcttggtctagattccacatgaatgcgggtgcttacttgcccttgcatccatggtttatatctatagttgacttcttcagtgtatgcccgta

SEQ ID NO: 59370 - DNA, 866 bp, Cannabis sativa
agtattaccaatagttgaaaaaaagaagtttttgtaaagtaaatttgtaccggacaaacatctgcaacctctaatccaaagtttgtaaaactgagtgacctaaaatcgaatttcatgtcactcaggggggtagtagggcataccgcacgaacaaatgtaaacagatgtaaacagaccaaatttaacaaagttaaaagctaaatatgtattcaaacgtgaatataaagtgttcggatcccaaagaaaagctcaaaaataaaaagataagggcctggggacgggccttaagtgtctccccttaaaaaaaaatatatatacaagtaaattgtcttaaagaggggagaaggattaaatatgtaaggagaaaaagaaaaaataataatatgatagtggtagtggaaagccggtttaatcaatctgaggcaaaagacgagtacctctgagctcctccagcaaggcatcaagtctcttctttttctcccagaagcggatgaggacctcctcaggcttgggatagaagtcaagcttaagttctgaccgttagtctaccaggccatgaagacactgtcgtcaaaatgtttgttgcactgctggcaggtaacgggggccaggagctcatcactttttgctttcttttgagcctgctccctgaagtcacacagctccttcacctcaacggtcaggttggctgtcgttttcaaatcagcttggtgcagcttctctaaggactttagcatggcagtcagttcctcaactgcctctttggcctctctaagctcacgccttgccttggtcatagtctcatccctgaccttcaaggcttcgtcctttgccttcaactacgccttggcctttaacgcctcctg

SEQ ID NO: 59371 - DNA, 675 bp, Cannabis sativa
tattagaatatataattaatataaatataaattttaataataaatcattttattcacttacataatcttttgcagcaacttcattaacgaaagtgtcaaacgactttttcaaatgaatctccttccatgcatcaactgcatgctctctaggaggaccccctatacgaacataaacaattaaattaatttattatacattttaagaaaaatcatatttaaaaattaaagaattaatagctaccattctgtgtcgtatcgaagccaacgattttgtgccttgcgttgttggatatttcatctgttgccgattcgctttgtttttacttgagcaattcgaaaaaatttcgctggtgaacaattcgcaaatcgacttccaactctccatattcaagtggtgaggaggcaatccaagaactttctcctaatcttctggtttggtgtaatgttgtttaaaatgcttgtgtctgattgtgtttcgctcactatacctctcccccatctccgaatataaaatccccataagtaggtctcgatggggattcccatcaatttcaaaatagtactatgtaattaaataatttaaaaattatattaatttacaaataaggatataaaataattacaaccataaataattaaaaatcactcactcttattcgattaagcacttgatcc

SEQ ID NO: 59372 - DNA, 796 bp, Cannabis sativa
agtcttcttctcttcttccagccgtcggaatatcgtatgaagaactcccctttcctcttgaaggctattcacttctgccgacagggtgccaatggtagcttcaagttggtcggaggcctcaaggtccttagtcaactcgactatttgcgtctcagcagtaaaaagcttcttgttgacttcacccagatccatccggacagctccaagttccactctggcatcatcagcatccttcctaaccaagtccacctccgccctcatggtgttggacatagcagcatttttagaggcagtagatttagctcgggaatagatgtaagccaacttcagactagcctacacagagaaaaactttagagtctgaaccaagtaaagaaggactagaggaaactgtcaacaaagacttaccctggtgaattccctcaagactcctcccatcagcagctccagggaagactcgttgttagcaccagccagctgctcacttacctcaggaaccaaccggttcatgtaatggcgagcatctctctacctttcttggtctccagatgcactggcaaagttagagtaggagcccgcatcttctcagatccgctcatggccagctcggatccaccctttgattgctaaggcctgtccgagcttcctcctcgtgaatctttggacttagtaacttttggagtagaaggatccgtaatagttagctttttggaaaggtcaataacctccccggccggtgcgttttccttgaaaggggtcgcctcgccgcccctagatttcttggccggaggagatg

SEQ ID NO: 59373 - DNA, 966 bp, Cannabis sativa
  modified_base (544)..(547): a, c, t, g, unknown or other
aatacatagattattataaattctattaaaaaatttaatagaatacacacatcaaacatggccaatatactatatatacaattataataattctatacaaataaatgtatatacaaacactataatataataggggtttttacaccagatattgaaatttctaacttttttttactgtggggcggaatttttttcaaacatacagtgtactgtgttaagttttcactattgttccacggttattttttagttgttccgttgttgttttaattattttattttgttgttttacgattattttataaaaaaataatatttttgtaaaaactcctgtaatatacatactcatcacagaaaataggactaaataaaagtcataccactaatgaattcactttgatgaatttgcctatcaagtcaaatgttaaaaataaataatccttttaaaaaaaaaaaaaaactaatcacctttaaatattacatttagatatatgattatctatattatatataaattttattatagtaataaagtaatataatnnnntattaatatttaataataatgatcaaaatatttatttagtgtgattttcttaagatgattggaaatttattcttctaattattgtatgttgcaattgaattaaaaatttgtaccattttaaaaacaaaaaaaaaatataatttttattaatgtagtataattaaaaatatcaattaaaaaaaatataattataaaaaaagtttaaaattgtaatatgacttaaaaaatgaatttgatatttttaaaacaaataaataattatttatgactaatttagttttaacaactaaaaaaagtgaagtgattagttaaaatagcataagtgtaataaaatatcaaaatagttttttaaaagaaaaataagtgttttaatttattgtgtaaatttttttaaaaataaagaaaaatgagtatttttt

SEQ ID NO: 59374 - DNA, 872 bp, Cannabis sativa
  modified_base (156)..(157): a, c, t, g, unknown or other
ttttcccatttataaattttttggtgagagcacgatatttatttgtttttgctaagcttctatttttgcagtatatgataagtaaatgttttgttttattttaactatttggatgaatattatatggaaattatttaggtggcgtttggttggagnnaatgaaatggaatggaatagaaaagaaataatcttattttcattcatttgtttggttacatagtaaagtattggaatgtcattccaatgcaatagtcttttactattttgtgaaataattattttattttgatgaaaggaaagactattataatgcatgataagaaaaaatttaataatttttttaggacttttttctataatggatatttaagacttttaaattttatatttttagcttgatatggaaaatttttcaaaaatatggactgaacagtctgtatcttcttcctccttcattttgagccacaccaaaagtggagaattaatatcaagagattacacttatgttgaattagtgcagataatattgcaggaactagactacaattctaaaacaactcaaatacaactgaaataccaattgaaggaaagttgccaaccactctaaattaaggatgacaaatgtttatcattttacataaagttattaacaaagaaaatcgatttcacacgatatttattgtgtgtgaacacattcaactacacagaaaaatagaataacaatccttttaggtagctacccaagcaatggtgtgcaacaatatgacagtggctggaagtgaacatcccttaggacactaaattgtgcagcaacctgacaacaacacaacaacaacaactaaacaacttttatctgctccaaggaggggatc

SEQ ID NO: 59375 - DNA, 1159 bp, Cannabis sativa
  modified_base (1122)..(1129): a, c, t, g, unknown or other
tagttcagggggtatttttaacgatcttaaaagtttagggggcatgatttggtatatgtcaaagttcaggggtcaaaaatcctaattagtctatcttattttatgatgattcatcatttaagaactctaaaattaagtaatctcttgaaaaattttcaagaccttacaatattttttatgtgtaatattcatctctttatctataagatgataagtatgtttgactatttaattattcaactattgcataggtaattttctacatttgttaaatataatgttaagacttgacttggtatgaatttatctattttattgatggaattcttttgtgataacccaacaaagcactttatgtgtcatggttaaaaaaatattatcctaatattcctataatatgaatgaatgttagtacgagcaacaagtaccatgaattgattgctttaaaaaaaaattggaggaaaaaatacttatacaattggcgcatgctaatctttatctataaaatatgtgtagaattagttgtatagaattagttcctactagtctcatttattttttattagtcattatatagatatttcattccacttgtaacataagattaaaaagagaagaactaaggagaaattttatctagtcaaaacttaaaaaagtcattttgcaacaatcaaactatgagagaaggagatggctttagaagattgtattgagaaacacaataaagttcttacttaagatattaagagaaaaacacttgtgagatttgagtgtttgatccaatattgctcttagaatcatgtttgatgttttgtactagtttttttatattgggaaaaaggatagatatttttttttgtaaaacaaaaatgtgaaactattaaattatgcctataactcatttttctattcaataaataaatagataatagttcttaaattagagtaagataaagattacattaatcttgaaatttaactagtataaatcatttgttgattcttttatacttagtttattaactattttgataatacttttgtgttatattacctaataaatagattaaaatgtgatatatatatatatggaagaggttttaatggttacatttttattgnnnnnnnnatggttacatttttttaagccattggatta

SEQ ID NO: 59376 - DNA, 1035 bp, Cannabis sativa
atggatagcctctttatcccaatctccttcattatttaagatcttgtgaactgtagagttaggagcaagcctcaggtggcggtataagattgttccattgttttgggggatccacttatcttcccaaatttgaatatttctgccattgccaattctccaacgggccccctcttgaattatttgtctcccccaaacaattcctttctatatacatgacgctccttgagggcatttggccgtgagaaaggtcgaatccgggtagtagcaactcttcatcaccctagtcaatagagaatgtggtttatgtatgaggcgccaaccttgttttgctaaaagggcttggttaaattctgtcaaacttcggaagcctaagcccccctcttctttctgcttgcatagcttgtcccaagtgctccattgtatctttttattttcttttgtgtgccccaccaaaaattggccgctaaggagtggaggcttttgacaagtttttttggaaggcggaagcagctcattgaataacttgggatagcttgaattacagctttgatgagaatttcttttctggcttgggagaacattgttgctttccaacttttgagtttattccacactttgtcttttatcacctcgaacacctctttcttcttcttaccaatgaaactaggcagccccaagtatttagtgtgatggggaactagctttactcccaacctagaagcaagaatttgacccatttgtttagatatttggcttcccatacttacttccgattttgctaaatttatttgttgccccgatagccgagagtaacgattcaatatttgtagcaaggtatcacactcttcttttcttccatcaaggaacacaaagctgtcatctgcgaagaagagatgagacattttaaccccttccttgtcaaaccgaattccttggatttttccagccctctcagccgcttgaattagacaagaaagaccttccgaacaaataaggaataggtaagggatcatgaatccccttgtcgcaaacctc

SEQ ID NO: 59377 - DNA, 1256 bp, Cannabis sativa
atgatgcagagagagaatgggtgattgtgaggggagtatttttggggttttgaaaagtaatgtcatagtttttttagggtttagagttttggtttaataataaaatattttaattttttaagtatataaaatcaaaattcccaattaatattacaaagaaatcaaaattggggcatgtcgtagcgagaatactgtctcatttaatatttggggataaaaatttatttatgttgcctccttatttcatgtttaggtcggatttccagccctataaataacaggtactcactgggcatcctatacacgattaaaatttgagaagttttatttgcaccccataaaattataaatacatccaattattaaaaaaaatatataaacttaaaacaaatttaaaaattactctttaattttttttaaaaaatgattttgaatacatttttggatacagttttgaaagaaatccccctccactgttacatggcctaaaaagaagatacaacacaaaaatccctaatcaaatgttaaaaaatgattcaaaaaaaaattgttagaaaatgacaaccaaaaaggcccaaaaaatgcaatgccaaaaaccaattaaagctcaactactacacttaccctttctctataatcacactgccaatgccaatataacatcagtatcatcaagcaaccaccatttcatgagcaatcatacagaacccaattcatcgacagcgatttccttgggaaccttaagattcatttcattcgtatcccatccagtctgattcagttgttggatgaagtcgccgaagctcttttccaacttcgataggcttcgctcaagctgctccaaggtgttatctaggctgttccagttctcatgcagccaataagcctgccaaacgcttcgtaagactgagatattggttgctccaacctgcattggcatttaggatttggtgattgatatggtcaaggatagttttgggttacatgatggttgtaactagtaacttgtttcgtaccttgaatgtaacaaagacctcaaagtcactttcttgtttgttcaccacaagaatgtatttctcattctcatatagcttcagaagtgactttaactaataattcaaaagaatgaataatttgttagaacaaggcttaaaggtcaaatcttataatggtgcaaatgctttcctctctctctgcactgtagctaacatgtcatgtttaattgagtaattatacatatgtgcacccaaattata

SEQ ID NO: 59378 - DNA, 1686 bp, Cannabis sativa
actttgtcttctcaaaggagctttgatctctagactatatggttttacaatctgattggcaggtatatcatagactttatcacaaaacttctcagcatggcccatgattacacagatgaaacaaaaggtgggcacccgttcatacttaaagtatgcataaaaccagtcaccattcctgctgcgaaacttcattcgtctttttagtggttcagccacattgatattaacacgcacgcgtaagtaatcacgccacattccttgaaaattatttggatcatagataacaaacgtaccaatgtatctggctgcttctctaagagcctagtcagttttgaatcccgacctcaattcatggatttgaacccatatatctatagaattcagagctaccattctaggatttttgcctggttttagtctttcaagcagcagctgttttctatcataagtccacggactgccatcgatcactcgttgaacatctatctcatgataaaactggaataaaaatctgttttgatcaaggatttttatcgtaatcccttttcctggtttccataaatctgccataatattttggaaaatctgaaagtctgaaactttccctgataataaccggcctacaaagcaccccctatcatcaaagctggtgtcttcttcccctatacattcatcatcaaacaatacttcatgatcttcttcctcctccaaacaaatatcagcccattttttagtgagatattccccattgctagatgaagccatttgaaacgtgcaaagaactaagtagggacagagcaaaacgtgaaaaaaaatccaaacaagaacagaacaaaatagaaatcagaaactctcaatcatgagagacagaacactctctaccaggagagacagaccgaccctgattataataattagataaactaaagaagattgatgaactaaagggataaaaatagaaaaaacataataataataacattatgataactattaaacagctaattggcaatcttttagattttgtttaggaaaaataatataaatagaatgcaataaataaatcaaaaggataaataaattagaaaactacaaaatatagaaaataagattttgaaaaatgtaataatatttatgtgatatatatacatataaaaataatacaataaaataaaactaatttaattttaaaaagtccgtttatgctctctcttggagaagagccttctgtttgaaatgctgcaaaagcctgaaactaccatggatgatcttcttgccaaagcctcgaatctcactgtgttggatgaagatggttgggaaattaatgaggctgggggagctgttgttgggggacactgtgcgaaggcaagattttgttccaacagaccgatgagtcatcctctgctgaagacaattttagggcgcgtttggggcatagctgataataaatggggagtagatattaaattcagcaataacaaatcaagtttcttggtcttttccttcaaatccgctcaagatttgaacagaattttgaccaagagcccttggttccttaattatgggactttgattcttgaaaggatggagtctttgcctcaagattgggaaaaggaattaatgtgattttcgatcagtgggcgcatccttcacttgccttctcgctcgattactcaaggcaatttg

SEQ ID NO: 59379 - DNA, 1585 bp, Cannabis sativa
ggtataagtctccaagttttggaggcttaaccctcgtctcgaggagaccaacaagaccagccttttgaattgcaataaattgcttaacatttatttgctttttttggttgttgatccctcgaacgttccaacagatgattctatccattggcaagagagggttctcccccctctcttgtattacactcttgtagtccatctgctatacttccatctgctaccatatcctctttcccttctccttcttgctcaagaacattgaaagaatttgcagtcactatctgctttggtggctctttccccttgactttccaacctttagtaactggttggaagtcatcctttttcccttgatcaataacagtacattcagttggcttccttgcattgttttttatcaccctttgttgctgaaccttgtctttcttcctacaatcaattgtctcatggcccattcccttacaattcttgcaaagaattggtttccattcaaaagatattgcaactggaacattcactccatgctcattctcaaaataaatggtgtgtggaaactcctggtgtatggacacctcaatgagcactctagggtagctaagtttatctcgttcctttgtcaccgcatccaccattatcgggtctccaatctgcccaataattttgaaaagggatttttcaccccaatacttcaattctagatcatccagtgtaacccaaattggtaccctgctcacatcctccttcttggaattcacatttggatcccaagctttcattatgactagacgtttattgaaaaaaatatatccacctttaagaatagagtctctatcaactgcctcatggaatctaatcaagaaaatgccataggaaagtaatcctaccttatcaatcttatccttccataatctcctcacaaaaccatctagcacattcaatggtggatttgctccaagaatatagcagaccaacgacgagttccaaaaggatatctcctctgctatatcatcaagaataactttaacctgagctagtttttttgaattctcaaatgaatttgataggtttcttactgcacttccagaccttagtactggaggagtagcatgactaccatttgctacatctttcgaacattcatgattagctgctaggaaaaaattgaaatcacgttgtacctcctcttgttgcagaatcgcatttagtgaagatctgagagttaacggctttggaaaaaaatcattcagtgtggctccctgatgtgcgatttgacgatccccttcttcatcagtaagttcgaaaggctccactcatagcacctcttccatcgattttgttttcttcacctcagaggaggaatggcctcgtttcttcttcttcacaatcacctttttcaattaattttagcttaccctagtgcttagatcttgtcttagccatggcaccagctcagagagagctgcaaggtcgaagagagagaaagctttattttttctagttatccattgttataatcccaacaagcaatgatcctctatagatgatttacattgagtatggataaaattactgttacacccttcaa

SEQ ID NO: 59380 - DNA, 1248 bp, Cannabis sativa
ttgattgatgtgataattcattatgcagctgtcataagactcatagattagaatataatcgccgaataatggatttataatgcctctgacacgtcttttcagaatcattcacggacatttctcccatgctgcatttaatgcgcctgtacatttcacatccgagacctaacgaacggtcctatatgttttacctagttcccggagatgaacataattccttgatagcatggaagcgattgaagctcacagaggggcctcccaaacatgattaccgaatctcgaagtgttctcttagggagtttatcttaagtattcttgacctttagaccttcttgccacctagccaactctgggactgccacgtagattggaaaaattaaggcaacatttaccctccaagtctcatttctcatttttgcatctttgtaaaatgagatttactacttgccttaaggagtggcatatatagtcaacattctgtacgcgcatgaattatttattatttataatcatttctcctcaattttaggaaaaacgattcgattcccgcctattcaacagagtccttcattaatatcactattattgaagtactcgagcattttaactatcccttttccttcatttttctactaggatggcttagccattggatttttagaatttggacgatttgaactttgactgttggatgacagccaattggtattcaacttcgagggcctataaaagctcgtgcctttccttagtaaaatttttacccacttaacttgttgtagtagaactggtgtagccattacgttgtatacaagctacctcttcccattcggagtactaaaagttataatcacccattgtgtccttttctaatattcaagagccaaacatgtcaaagtaccatgaggctttctacttagtgcatcagctactacattagctttctcaagatgatactcccaagtgaattcattctccatataatcaactcatcttctttccctcaagttcaagtacctttgagtaaaatgatacttcaagctcttatgatccgagcataactcaaactttgcaccatacaaataacatctgcagattttcaagataaagattaccatggcatgttctaactcatgcgtagggtaattttctcatgtggtttcaagtttcgagaagcataagcagccatcttgccatttgtaagagaataccttctaacccagtacttgaagcattagtgaatactacata

SEQ ID NO: 59381 - DNA, 852 bp, Cannabis sativa
aaggattacaaactgatgttcaaacgaactgacaatctagaagtagttggctactcagattcatatttcattggttgtactgatccatgtaaatcgacatctagttaagtgtttatgttttctggtggagatgtgtcttggaggagtaacaaacaaactttgactgctacttctactatggaggtcgagttcgtttcttgttttgaggctatatctcatggtgtatggataaagtatttcatttcaggccttagagttgttgattctatagcaaggccgttataaatattctatgacaattcaagctattgtttttatggctaagaacaacaaatgtggaagtcaaaacaagcacatcgacattaagtacttaactattagagaacgtgttaaaaaaatcaagtggtcattcaacacatcaacattgaattgatgattgtcgatcctataacaaaaggcttgccacctcattaattcaaggatcatgtagaaaacatgggacttggttcccttatgtaatttgtacaaataaagttattattaatcaaactcttatttttatattttctcatatttatgcgcatcttaattttacatttgaaaaaattttagaggacctaaataaacataagatttagagtttattcgcttaagtacattgttatatagtaaatatattgtaatacaccgaagataatactcgacttataatgaggacatatcgctatgattcatatgtttattatataatgaggaacgttggatttgaatgttttagtcttatggaataaaataaaagtaatttattttgagataaatgaatattttatattcattgaatctggacaaaat

SEQ ID NO: 59382 - DNA, 1128 bp, Cannabis sativa
taattaaaaattataataaatctataatcatttttttataataattaataataatataaacataaaaatgttatgttttaaattatatcactcattataagtagaatgtatatttatatataaagattataaaaatttgagaagaccgcgcaagacacgacttagttccctagtaataataataattaaaagttgacgtaataacaattgttgaacgctatttacgtggagaatgatttgtgaacagcagccggcgagtatctcagtaaagtcaaataaattatgaattggtgtcattgattagttataatgaaaaatgtttttattttaaatatgagaaatgttaaagaacaccagcgatgtttagcactttcgctattggtctaattaagtagggttatatataatttaatgtaataatctttaaggagtatcgttaactaattataagatgatacgtctagaaagcactagacaccactagtgcttaataacaatactctttaaatatatattttgtaaattattttatatattaaatgacatgttcttcgttgttttagtaaaaaattaatattttgtacaatgtgtagatggtatagatcttaaatttataaataaaagcaaacattagggagcattatcataaaaacataaagagatcaaatgtataaaaataaaaacatgaagggatttagccgtcaataattttaatacaaattttatttgcagctcaatctcttactaaagtactcaattatattatttttattttgtattaaatataattataaatttatactctcagaaaaaaaaaattattactccttatattatttttctaccaaaaaaatacatattcaaattaaaagtaaatacattctaaatattaagtgttaggctatttttagcctaagtttcaagtcattttttatagttgtttttattttttattattatttttgggaatagaattacgttttctttaatttcaagtttctatacgcttggaatgtatagattggacaaatttgatctataaaatagagaaaattttgaaagagaataaagctgaaacttcaagcctaaattcgactatgttctgatcatattttggaaaaagtcaaa

SEQ ID NO: 59383 - DNA, 1532 bp, Cannabis sativa
gtgataattatttcctttaaattcttatcaaatttaaaatttattaataaaattaaaattaaaaaaacgataaaaaaaatctcaccagcatgggattatttatccatcggtgggatagataatcccacacagatcaagttagctggattagttatcagacttctaacatgcccaaacactaaattagacaaattagtctgtctaatccaatcaagtgagtaccaaacgagtcccaaagaccaaatattatccctcccgaaaaggtgtggggaacatttgacctctcaaagaaagaaagaatggcagaaaagacatcctgctatacaatttaaacccttgaaaaataataaaaaatgcatatattaattgtacgtactgtaggtacctacctgaggggcaactagtataagtccatgggaggatatgtggtggagtagatcttcatagaatttgttttcgagtaagaatccatggaaaaacaacactacaggataagtgccctcctttgttggactcacgatgaatagttgttttggaggtgaaaaagtagcccacgaaaccagtcttggctcaaaaaaattggatttaatttcaaaacaccccttctcaaaaacatctgtgctatttgagatgataatgctactttttttttcagttcccaaaattgtgcctgccaatgccatgattctatattaattccttgctatatatgtatatatttatatatcctcctctcaactcaaatactatatttattctatttatatagaatttcccatatgtatagcgatcttgtgtataatccaaaagtactgttgaagatgtttgtaaattttgtccctttttttatatatatatgaaataagtattagtaaatgaatttcactataaatattaatttttaaaaatattaaattattagattttgatgaataataaatgaataaaaataaatttaaatttgtatatttaatttagctatttaattaaaaatatagtaattagtagcataaatacttaaaattttaggtttgtaagcggcataaatacttaatgtttataaaacggtaattttcctccagtttcatcagtacagactctgttaaagtcttaaacagaatacatataagatccaaattcaagattatttggttggacagaagtatgtagtatcagtttttctaaattttcttttaataaatttaaaatggagcttgtattgacatacgaaaatagagaaaaattacagttttacaaacattgagtacttatgctattaaaaaaaattattaaatttatcccgcttacaaactcaaaacttggtatttatgccgctattaattacccttaaaaaataggggttttacaccacatactgaaatttccaacttttttacatgtttactgtgggcagagttttttttttttctttcaaaatactgtgttttttttcttcaaaaatactatataagttttatactgtgtactgtgttaagttttcacgggtgttacacggttattttttagttgtt

SEQ ID NO: 59384 - DNA, 788 bp, Cannabis sativa
aagcccttttgaacatgaagtcacccacaacaatcaaggaagtacaaagccaaacaggatgcactactgtactacgaagatttgtgtccaagtatacagacaaatgtgtacccttcttcaacatgaataagaagcaacaacaaatttgagtggacaaaggaatgtgaaactacattataggagctgaagaaacagtttggctcagccacctgtgctgcccaaatcccttgacaaagaagagctaggcgtgcacctagcagtcatagaacatgttgtgagtgttgccctcacaagagaagaagatagtgtacatcccctaatatctcttgagtaaagaattatttgatatcgctttaagcatgctttttatgaaattgtgtttcatttaagttattgtcttttagtttgtaaaattttcaatgttttatatttatgtgtgtaatttgaaactgttagttagaaatcaataacatgtgtttataaatttgcaaagaaaatagcaagttagtcgagttgttaactttgctaaaattctgtgaagtttttgctgtagctaacatgtaaagccctgaccacttaggcacgctacccaagatacttaagaaaccctaatcccctaaatgagattactaataaaattagcgggaaaagtaaacattaattacaaatggtagaaaagtaaacttgtaataatttaaactttataaacttaaagtttcacgtatcgagatcctaaaaaaattttaaaaaatactattacaagttcattttcactacccgacctaggc

SEQ ID NO: 59385 - DNA, 1569 bp, Cannabis sativa
aacaaggtagctcaaattaaacttcataataaaatttttattattgcgaagaacattttctatcacactctctagttaatttaatgacaaatgtcatcttttcaacaagacttagttttacttaataactagtcataaattcataaaattatacttttatttcaataatggcattcccactaatttactcaaatcatttttgacttattaaaaattaaatatttttaaaaaagtaagtgatgataaaaataaataaataaacacaatactcatataagttttttattattacatatgttttattaattcctcttaattaatataaaagagctttttcaaaaaatttaaacacctcataccacacctcacatgagtatactatctatataaacataattagtattgcaatataatatgtatgtaaaattatattattgttgattatttttagagcaagttgaatatataattatacaaagttacatgtgcacatatttacatataatctttttttttttattttttttagaaaatatatctatgttattataatagcagtagataagaaaaaaaatactcgtgtctataatattctcaaattcgtgacatgatcaggtattaatttataatttaatgtgtatatatagaaatgaaaattagtaaaatataaacaattaaaattgaaaaaaatgaagaggaaggaaaacaaaaaagatatattattatacattatatgtattaattttttgtgattggttttttaagatgaataatttattttttaaattttgtgaaagacgtacatttagtagagttatattcattaaagttttgattataatattatgactaaaatttgtaagtggagttccatttatactcaacaaaatgataagtacaccccaatatttaagaaaatgaagtttaaaataatttttacaaataatttttaatatattttttttaattttttcttacattactttgtgttaattttaatatttattttcataatttttctaaaccgtgtataatttttttttttgctaataaaattttatataattttttatgttaatttttttggtcctaatatttaaaatacactttatttttatttgataggtatattttttaaaaatatgaattagaagaaaaaagttaagaaaaaaacttagtttcattaaaaatataaattttatataatataaaattattaaaataaggtgtctgtcttcagaagttttgggatgtaaataaaatttatcattttctaaatatatatgtaacattataaaacttaacttatttttttttattatggtttttttttaaatatttttttcttttcaataagtaaaagttatttgagtaaattagttaaaatgacattattgtaataaaattataatattatgactagttattaagtaaaattaaatattgtttaaaaataaaaataaagtaattgatatgccgatcatcattctaatcactatttattgttagcacaatcacatagccggctaccgaaaccattccacaagttcactacgctggcagagatat

SEQ ID NO: 59386 - DNA, 621 bp, Cannabis sativa
gttatatttaatataaatcattaaaaggcaacgtcaataatatacattatttgatttgaatattgaaatatatgggcatcgctaataatgacaatgaataattatatgatgatttgacaataattaactctacatatatacatcacccttaatgttttgttacgtactatatatcataaaatatgaatataattaaagtattaattaagaaccacaagcttttattaatgatttaatatatatatatatatatatatatacgatgaaaactttggtatatgtattgccttaaaagaagcattgttatacttaaagaaatagttacttttgacaattttttagtcaatataaatttttttgtaactaaaagtaatttttagttaccatacaatgttacttatgattaaaatatagtatttaaatacaagtggtcactaatttaattgtagtcacaataaatattattattattaaaaatatatttattagtcacaacaaattataaattttatgactaacttttattcactataagaatgataatttatgattaattataatttttttacttttaatgacaaattttattattgtcagtaaaagcaagagatttcgtagttg

SEQ ID NO: 59387 - DNA, 3091 bp, Cannabis sativa
  modified_base (463)..(463): a, c, t, g, unknown or other
aaataaaaataaaaaattacccataaatttctcataaaccaagaattttagttatatatgcacactttatatagaatagatataagtttgaaaattttagcagggagaagcatgaaccttatctaacaatatataataatctgggtgtacagtactattttggtcctctatttcaactttgtccatatatgtgcttctatgatcttattctctcttcgagcccgtgttgccaatttttcgattttgggctcggtgctaggctaggttgtaattgggccttttttttggggacaatttacattgcccaccctttttcttatcattatttcaaaactgatgtagagggaaacttacaaaaataattttagttaatttttacaaaaatactgtcacacggaaaagttttcaaaaatactgtattttataaaacactagtaaaacacaaaatagaacaactcaaaanaacagtagaacaactaaaaaatacaagtagaacaccagtaaaaatttaatacagtataaaaaacacaataaaaaagtaaaaaatactgacagtatttttataaaaaaatgacaaaagttagtataccatgtaaattttcctaatataatagcagtttttacaccacttactcaaaaattttagagtgctttcagttttttaaattgtatttttaaaactgagaatagaaaataatttttgtcattttaaaaattttatggtatctaacacaaattttttaaaattatttttaaattttttcttactaaaaaaatcaatattttaacactatactatcacatgaacccatccgggttcgagttcgggtatgtatccaggtctaggatttgagtatgtgagcaaatatataaaatataatatgttagataaaaaaaaatatatgtttaaaaaattgaaaacaatatttttatattttctattttaaaaaactgtttttaaaaaaatttaccaaataactctattagtttttaaaaactgttttcagttttaaaaaatagaaaccagtttttgagttatgaaaccaaacattcttttaatttttttttcactttggggtgaaattttttataaaaatattatgtaagttttatattgtgttttgtgttaaaattttactgttttttttaattatcttactgttattttttattattttacggtatattttataaaaagagtatttttgttttccagtcaacatgataatgtcatgttaataagtagttgatgattatagtagtttgagtcacattagataaaattgttggatatttttgtttgttttactttttttgaaatgagataaagacaaactttccactaacacttgcagactattatcattactttttttttaatgaagaaataatctatagtacactaattttttttataaaatttattcaataactttttttaataaaagatcgcatggctcatcgttatttggctgcctaatgttatgtatctttctttggaaatatatttttgatttttttttaaaaacaagatcaataacagaaagaagggtaagagagtacaagttacgtgatctaatggagagttggaacacaattgttccaaacatacaggggtgagcaaaaaatccaagaaaccgatcaaactaagtacatcgactgtccgaacaccgaaaaagccaacaccgaaaaagctaaaaattgaaaaaactgctttcagtcaaatctgcctttgcacggtcggttttagcgtcaatgacaatgaccaattaaatcgagaaccgaccgaatatatattatacactatacatatataatataattattttttttacatatttaatatacaaatttactaaattagttctaattcttttctttttaatttaaagtctcaattattcattactttattttactataatttgatgtatttacgtattatatacacacattcataaaataatacgagttttttaatatattcattaccatattagtagcacagcaaatttaaaaaaaaaaaattattttacattatttatttaactaagaaagtttttgttcttaaattatatgatatttgatagaatactctaatttttttagttttcaaataattatagtaaatttaaagacttatttttttaaaaaaaaaatgaagctcaatttggtcgatttaaaccgaaccgtgaattaaaactgtcagatttttttacatttatataatggtcggtcggttttcggtttataaccatgaaaagtgaaaatcaaattttggatttttttatgtaaaaaatcgaccaaatcgaccgttgctcacccctaatctattcctactacaacttgagcaagattatgtgcaaatttattgttgcttctgggaaaagaggacaaatagtcaattactttccaaactaggtcagacaaggttgaatgatctttcatcttttaaggattcttgaaactaaaatttggcaatccgagaccacaaggctgatgggaaagtggactgctttgcacctgattaaagcttggagaagaacctcggctttagcaaagattaaagcttatgactctatcattcgaatcttgaactacaaccccatatccatgtttgttaacctgacttcttattgcagcatctacactaagcttgtattgccctgaaacagacaataaggaagctggtctcgactgagctacctcttggctttggggggaactatctgattggagaatgatccttgcttaggctgttttgtagtcctgtaaataagaaataataaaaggttctatatccatttaaacaggcttcttatctgcaaacaaaaacttggtatggtggttccatatagcccataaaataccaaaaaaacacagccaaattgtctttctaaaaagcatcagaacctcctaataaaaaaattttaaatcacaattcttgttattatggaaaaaattgagaaactagtgtacttctaacatttacatgccctggaacactctaaaatggaatgggagttagaattgttggattttgtaccctaaataaaatctattttaatattatcagatttactaattaata

SEQ ID NO: 59388 - DNA, 599 bp, Cannabis sativa
ttgtatatgctatattacatacactatatatatagtctaacaatactatcatgcaattaaaaaactcttttgaatgacattcttgaaaacttgaaaaaaaaataatgaacatgagagatcaagattataaatatgcagttaaaaaagtaattatgatgaataaagggaatggagagtatcaacaaatgagaattagatcattatactcacttgtaaccaaaaataacacatagcaaactttatgtgttatgtgttagatcattataacacataacaaaaattgacatcatgcatgcatgacctaaactgtaacaaaaaataaaattttatagtcttttaaaagtggttttatactcacttgtagctgccacaatttttaaattttgtagttaatataacaaactttcactcaataggtttttaaacttaatttttttttcttattgttgaatgcattagatttttctatagaataaatgatagtcatattaaacaaaaaaatatgaataaatataataatcaccttctcataaataaaaattatatcaagagtaatcaattattcaatcttcttacttcttaatattatgagactttta

SEQ ID NO: 59389 - DNA, 603 bp, Cannabis sativa
atatttttactggttatttttttttttgtattgaatttgtaatacttggttgtttgtacatctattttcatgatattttgttttattttattacttgacaatattattgttttagatattttaaacttttcattgcattaaatttgtaagaatgatatccttataaaatatcaaacttaaatgaagggtggtatatcgtttttaagtatttttcttcacgttttaagttaatattaaaaattaagtgtataattagatacctaattaaaaaacctaaataatccaattagtaatttgatttgaatttgaaatttaattggattggatcagatgatgatttttttaaatccatttaatgactggactggatcggattatgagaaaaatattggattagattgaatgttcaatcctatcgatattagtgaaattaagtatcaagtctcatataattttaaaatttgctaaaaaacaccacaggtgtctaacactctcctcggtgtcatatcgttattggtataattaaatatcaagtctcatataacataagaaaatagcttttagtgaatatcgctaactaatcgtgaaacaccacttataaaa

SEQ ID NO: 59390 - DNA, 2352 bp, Cannabis sativa
ttcaaatcttaattgatatttttttgggggaaatctttcgtttcttttatttttttttaatttttgtgtgtgctctttaaatgaaaaaaaaaaataagaaaaggaaagtgtttatatgggggtcgattttctttatttttttgcttggtgggtaagttttattttattttctttctcaaatcggtttctctttaaattttacattatacacataccaatttgattttcatcacctcgagctctctcttccctctttctctcttcttcgttttcttctttgttctttagaaacaaccatggccaaagcaaagaatcttggttggccaaggaagttggttgacaccgaggctgctatggagggggttcaatcagatatgtccaagaaattgtggtcattagtttgaatttttgaaccccaagcttagttccctttcttttgcgttgtttttgtttctttctattgttgtattacggttaaaccttatttatcttattttttctttggcccttaaagataaacaaaaagggggagtaatatggtttaatttttggattgtaatctctggaccttttttcaaagggagttgaatttggtgttttgtgttaaacctatgttaaagttagcatcttattttgatttaatggtgtgtttctcaaggggagtttggtttggtttcattgctaactttattttgtaggttgttgaaaattaataatattttgattatctaaagtgctaaaaggagagattgttaggtctattttggcaatattaactgtcaaaatattgttaatttagtgtgaatattttatgaggataaaatattcttttcttgtgcttaccacccttttatggctatctttttacatagaaaactttgcataaaagagaaagaattctctttatggaaagtttgtttaaattgacctattttttggtataattgactctaattgtatttgattgatctcaacgatctttctatgtatatagcactttttctaacatttttatggtaggaaatatagttcaaattgtgatcttggacttatatgaaaagtttcctttttcgattcaatctgtcactgtggattctaatcgtgttgctacaaattagggattagtttaggaaacttttgtacagctgtgaaaacatgtttgtggctgtctctagggtttctatgatctatatataggatctagagagcagccaaacgttctcacctcattgagcttcatttttcatattttcatctttgtgaggagagaatttctttttgtgaaaacctagagtgttcaactaggttttattctttgtttattgttcgtatattgttcttagaataggttgaaaaacttcattgagtaagagaagggtcttcgggagaagatttgtcaaagccttacttcgggaggaagtaagcactcacacatcaaaagacgaagggattctatttggtggtgttcaaaaatcaaattggcaaagtaaattataaaggattgtggcaaaactttagagggagtctaaacttgtttaagttaattgaatttagtaattatttgagactttttactaattgattttattctttaggcgtgaccccgtggactaggagtgtttgaaagaacactgataccacgtataattctattgtttcaagttttacattctgcaatgttatttccattttacttttacaaatttgtattctgcagcaaaaattttccattctgttactgtagatcgcaacaattgtgtttttaatcactagaatttaataaatatattagcatttccaaaaacataatttttcactgtaacagtaaggaagaagattaaaacagagagtatctaaaaatcaatctcttagctagaaacagtggcattaaaaaacatactgaactaactagagtaagcctttatttatagaagcaaatgctaagtacaatgcaagaaaagaacaaaagcataacaagaaaatctaatcgcttacatgtaacagaaaaactattattttagttatctatcctaacatcccccctaaaacgaaaaggggtaattcccattttgagtttggactttaggtatagaaaacaatttgtggtgagagcttttatcaaggcatcatcaacttgatccaaggcatgaacataacgaactgaaagtttcttggccacaatttgatctctgacaaagtgaagatcaatctctatatgttttgatcgagcataaaaaactgggttggcagccaatgctgtagcactttgattatcaacccaaatgattacacagtgaggcaaggaaacttgtagttctaagagaagatatttgagccactgaatctctgctg

SEQ ID NO: 59391 - DNA, 1459 bp, Cannabis sativa
  modified_base (998)..(999): a, c, t, g, unknown or other
gggttcgcttccagttccgattccaatttcgggtgacagggtacgatttaaggttcaggtgtgggtctgggtttgagtccgtgtctgggtctaggttcgtattctggttcaggtctgagtcttggtcccaaattcaaacaccaccacatgtcgagtctagttcgagttctagtacgggtaggagttttgatttgggtctgggttcgggtcaaggtccaattcccaaatttaaacaccgactatggggtcgggtccaagcttctggtcttggctcctggatcccaggtccaaatccagatcgtggtcaagatctagctcatgtcttgggtcgcagtttgggtctcaaatcaaggtttaggtcttgggtcctgggtcatgggtctgtgtccccaattcaggttaaggtcttaggtccttgtctgggttagggtcccagtcccagtgtaggtcctagtccgtgtttggtactagtccttgtctcgggtcttggacgggtctcggccttggtcacagttctattctcaggtcttaggtccgagtatcaggtccaaggtcccattcccggtcctggttccagtatgggttctattcttagtctatgttcaggtctcggttgtagtccgggtctgggtcccagtcctaatctcggtctgagtcctagtctttggtttgagtctgagttttggtacgagtgtggttctaggtccaggtcccgagtcacgggtcctggtttacaggttttgggacgtaggtcctggtgcaagtttgcgtctgcgttcaggtttgggtccgggtatcgatcccggtctaggtccgggtccgggtcctggtatgtgttcttgtccaggttcctctcctagttgaggtccggggtaggtttcatgtctgggtctgggtctgacttcagattcccgggtccaggtcaggtcctggttcaggttcaagtctagaatttacatcatggtctgggtttcggggcctaggtccctggtctaggnnccccatccaagtccggttcctaggtcctagtctggttccaatttcgggttcaggtcatgagtcttggttttagtcctggtcgcggtccgtgttcaggtccaggcctcgatccctatctttgtgggggtttaggtttgggtccttttcagggtttagatcgtggtctgggttgcgagtgtcaggatccggtgagggtttaggaccaggtcccggtcccagtcctagtccaggttcaagtcttaggtctcaggtcccagtcctaatcaaggtctcggtccaggttttggtctgagtttgagttatggtttgggtttcgttaacgtcttaggtctgggtcctagtcacaatttccagtttttattctgggtctgagtttggtttcgggtccgggtctgtgtccaagttggtgtcagggtctgagtgttagttcgagtcggggtacgggtttttcgaatctcgg

SEQ ID NO: 59392 - DNA, 759 bp, Cannabis sativa
tttatcatcttcttcttctttaatttagcaaaggctttatagatttatgatttagggttttctatattaaagcacttttaggcatacgtttggatctgtgatttatatatttctttgagtgttttataaatcctatcaagtggtaccagagccacctttgttaaattgattgaagatctgatgatttggtttatgaaatttggggattttgaaaattaggtttttcttttttttttatcttcgtatattgtatttttgtttcaattcggcgttgaaattttgattgagtacatatattatatgtttcaatttaatgtgtggacgacttttatgtatatataatgtaattgtcgattattgtgtggattcatacatatataatcatatatttgtcttatatactgtactatatatacgtatatatatcaatttttattcgcagcagagagagatatattcgattgtttcaatgagatgaataattggtatattgaatgtttcagtcgtgcactagttgtactttatatatataatcatatatattgttttctcggttgaatgtgatgattggttatttgcttcagtattatgtgtcatatatattatagtatagtttggtaaaaaaaatatatatatatatatatatattggtttaaacaatttattttaaattttggtgttggtttatgactaatatttgagtaaattaattgaaacaatatgtcgccaaagtgacctcttttgtattctggagatcgg

SEQ ID NO: 59393 - DNA, 1988 bp, Cannabis sativa
aatatttagtggttggtttaacctgtgtaattttaaaccaacatttattaaacatacgagacaatagtaaaacaacccaaaaacaacattagaaaaactatgacattcccagtaatggttttaatgtttttgcttcatctcgccggaattaatatttgtttttcggctgctgtagtgttgatgtggtggttttgtccgtgggtgtagaaaatggtagccccatttttttttattttcggtgtttacagtataaaagaaaaaatatagccaaggcagtaaaaatataaatttttctatgaggcaacaatatttttataaaatctcctattcatccaaaatttataaattttgggctttgtcttctgctgagaaaaagttaacttttcagacacagtgatacaaaattatagatattttttacgttgtttaagattttatttaaaaaattataaattttatatttttatattatttttatgttataattttgtgattgtattgtcgttggttttttttattatttatatattttttttttttgatattatttttctgcattatttttatcatttattttttttttatttttataaaattttgtaagaatgtaaataaacaatttaaaacataaaatgtaaaaaatttatattttccttaatatatactgctataatcattagctatacatatctacattatagtactactaatctatgagcctatagtcattaaatcgtctgatctatatatatataattatgctagactgcttttgtttaatgtataaatagtctcatcacattttttgttgacattatatactaatcaatgaataaataagttttcgcagctggttggaactactcaaccaaatactttcgaaggagaatgtgtatagtgttgcaatgatttgttgcgcaaatatggaaggcaagaaataaaattgtttggaagaagaaaagctcatttgttatggaagtaattgcatctgcaagagcagctcttgatcaatagaaaaaatgtcaagataaaatcgctcttaattcaccgtgtctcgaataaaacggtgatggagctgagctatggtccaaacctgaagaaaactcaatcaagataaatgtgatgcaacgactttagaacaagaaaataagtatggcttcagcattgttgctcgtaatcatcttggcaaccttataacagctctctctggctgttatggtgctaattttgcagttgaagtcattgaagtcatggcaatcaaagagaccctgatcagttgggttaaagacaaacactgggaacgtgtagtaattgagactgatagcatgatatcggtgcaagctttacgcagttagcaaaaaatgttctcaagttttggcttgttagttgtggattgcaaagctctactctctacattactgtaatatctcagaaaatatatttatatttaattagacatattttattaaatatgtgattatgctgatacttgaataagattatggtcttacttaagctaattatgtgacaattagtgtaaatttaataaatgattaaataaagcgtaatttattaattacagagattttattggactataggggtatcatggataccatttttagaataaaatattttcggatttggcggccgtggaaaagtcgacggagtggttagaaatgtcatggtggttgaaattgtgttatattagaattataccggactaggttaaaatattgaaacgtaggttaaatcgggaaaattagaaataaccaaatacccctaagttttgtttaacctaagtgtgtggtgagagggtagaataatcatttcataagtttaatactattttgtcttatttaagttttacggctgaaagttaggctttaatattagttttgatatttatttattttgttttatttttttagtaaattaagaaaataagaagaaaacctaaattaagaaacctctctctctctctctct

SEQ ID NO: 59394 - DNA, 839 bp, Cannabis sativa
aaactttatagctttctctgtaatatttcgtacaacttcgtggtttatgacattctgccttaatcttgcattgtttgattttcaccttgctcattcgaagcttcgtgaaatttagcctttaacccaaaaaattcaaaacttttaggttctagcttattctttatgcactttccatctttttagtctgttgagtaatcctggtcggcgtattagcctatttattgtttgatatcccgaccacacactcatccagtgtgttgtcttttgcagatgaaccctagtgagttcttgggaggcaaacaccgaattgactaggatttgcttcaacttctgtacgaggattaacctcgtcttcgtgctagtctatcctcctcgagtgacggactttctaactcgagctttgaagattgggaaatgagtagtgatcgttctcctactccagaacccgtagtgcaacatcactcttactccaagtagattgcaggagaagggtatggccgcttcatttgggaattgaagaagggttggaggcgttatcttccgtccaactggacatacattgttcggccaggtgttgctgatacccttcctattggccgtccaagttctcgtaacttcggcatcccaatagctgtccccgccgttactgttgcacgacacacacatcagtatccatctaggagaagaatgatggcccgcacaaagcagacgatgcggaaagtcaacgcatctgatcctcacgtgtcttagcttgccacgttgccaagtgccgagtaggatccgcccgccatggaggagggagatcatgagagggacattgaggtccaagagatagagga

SEQ ID NO: 59395 - DNA, 732 bp, Cannabis sativa
aaatttaatcgaagtctatgaggaacgcataaggcaactatacaaaactttcgtaaaaattaaaataataattgtagtactaccactaatacgccctggcacttcaaaattgctttttttttttataaatccaagagctcatactgagatgacaagctttcaattcctacttcttcgattagcaattgttgagcattgattcgcaagaccaagttgatatgatcgcaaatgcttcaattaaacctaaaaacattatctgaatccattttcgaccttcccagcttaatttccttattgtgaactcttttgacaaaagaaattccaattagattatgcttagccgtgtatttcttctctcatctttcctacaaacccaaacgtatatgaactgagtttcaacggacgggaaaaacaaaattagtacacaaatacacaaacacaactaaggcaaacatcatcagggaatcaaaatatagatacagttactgtaaaagcttacaataagcaacgatttaacaataaaaagcagaatacatatttctattatagcaattcaaccatttccaagagtaacaggaaaaacatgaaacaatttctgtgttttaaatatcttagaaggatgcgttgttgattgtcaatgtagaggccaggtacaatttttttcaacattcgtagtaaaagtatagtcaaaataaaagatggaacaatatagccgcatggttttaaacttga

SEQ ID NO: 59396 - DNA, 652 bp, Cannabis sativa
tttttttttttttattttcttatagtttcacttatacatatataatggcttggctttgttccatgccacatttctcctagatggaattctcatagggaaccatatgagatgtcatttcctttttggcaagcatcctaattataatgttcgcattatgtatgaatataatacaatcacaaatataattttatactcacaactattaattacaatctctattaattattactaaatagcaataatgagataatttacacttatatatatacataaatgtgtgataacactataggttgactaatcattaaagtatagttgaccatctctaatattataaaacttcaatatatataatatattattaattaggtttattattatgatgcaaaaaggatttgctaacaatatttttgaacatattcatggctgaagttgcaaggtattccttattcaatacatgatattacatgccctaaataaaatgttgttctcgaatgccctaaataaaatgtttgatctcgaattctccatagtacatgagcattgaaattagaatctaacactacactactattcgacatatcacgtaattaaacaaatttcataatctgattaatctaacaataaattcttaatttcttaagatgtacaa

SEQ ID NO: 59397 - DNA, 1053 bp, Cannabis sativa
gtgcaattcaatgggattgttcattaaaattcttgtgtagacacaccacaacaaaatggtgtggctgaacgcaaaaatcgtcatttactagaggtagtccgatctttactcttttcatcctatgtttagaaaagattttggggtgaaagatttgtgccaaaaataaataaaataataagaaatgcaaaaaggcatcgaaagccattagaaacaaaaaagaaactaagaataacattgaaaactaaatcccaataataagtaatcaaaagcgttgacaattgattaaaaaaaataataaatatggtaagaataaatggaataattaataagatgaataatataatataaaaattgacttaaggaataaaacataaatttacataaggcagatcacgggaaagggttgtttttatgcacattaacacttacccaattccaaagccaataacaatatagatcaaacaattaaaacagaaaaatcaaacaaatattaaatgtttaggggagtacataccagtactaatttctttctcactgaaaagcaaattattaatgataataatatcgattgaggatcatcagtgaatcagctatggaaaatggcggcacaatgggagatcggaaccaaagcattttctggaaggaagagaagagtttgtcttcaagttccaattccatgaagatccaaggccaggacggacccaaaattgatcttgacgatgaacacaagaccgtgtttggaagaggtttcgggatcagtacggacgactgatttgctctcggatcactatattatatggttgttcaacggagcttgagtagcggcgggagtgaaaagagagataagagattgaaggaggagatgagtataataaagacaacattttagtgacgatgaggttaacttcaatttcatttttaattcttatctttttttcattcatggtggacatgttttttttgaacaggtaatactgaagaatttgagatttattatttttttgtaatttaaaattaaattgataaataattttataataagaaaagccaaga

SEQ ID NO: 59398 - DNA, 1245 bp, Cannabis sativa
gtaatgaagtggaactgaaaattcagttatggtctgatcggtttgatggtcgatttcagtttattggttcttatgaacaccccccgggacccggacccggacccgaaatccagacccggactcggacttggaactcggacccggacccagaacccggactcatacccgttctagaacccggaacccggacctggacccagacccgaaccgggaccgagaccaggacccagaaccagacccggaccgagaccgggacccaggacctgaacccaaaatcagacctgggacccggacccgtagttggtgttgggatcgagtgtattgaaaatatattataactttacacaattaattaatacaaatcaataccaaatattttattgtattaaataatactaatacaatacaacacaatccaacacaatacaatacggcgtaccaaacgaacccttagagtataatataagtagaatgagagattagtaatggaataataattaaaaagaaaaaaattatggagataaatgaaagaatgtaaaaagctgtagagaaatatatgtagttttaaaaaaggataatttatttaaaacttttaaatttaactttgaatataaaaatgaattgggtttactcttttcattattgaaatttgaagaagacaattttgttgtgttggtctaaaacaatgatacatgtttagagtttgcataatagggtttttgaaaacataaagacaatgagaataaattccactccctttagttcagtgtgtgatgaggagaatcaattctaaatttcacttaaaattgggaaacactttacattattaataataaaataaacaaagaattaggttgaatttgagaggaccaaaacagggacagtgcttgaaagcatggatttgcccataatgagagaaataaaggaagtcagtctaattttgcataatgagaaataattagggcggtggtctgccacagtcaaccccttctataacattcaaattcaatcataaaacattccaactcaccaaattaacaataacacacaaatcatcatcttcattttcaaataaataaataaataaataaatactatactaatttatattgttctatttcctttactataatttcactattttcttttagaaaaaaaaaaaattatttgcacatcctaattattttgataaatagttcaattagtcttctttatttcaacttggtcaatatattgttaactatt

SEQ ID NO: 59399 - DNA, 1062 bp, Cannabis sativa
acgaaaatataagaaaaatagtacgctcatatgagtacagaacaaaaaaatacaaataatctaaaaaccccaattcatatttttatatataaaaaaaaaaatacaaaatgtattatcttcatcatcatcagggtcaaaaaaaaaacctcccatataccgaaaaaaaatcctaaatgtacataaaaaaccaaataagtacacaagaaaattcacaaaacgggaaaaaattgccataaagaaatgtatatatatgaaagaatactaataatctaagaacttcacattattgtaaaacaaaaaatcaaaatttattatcttcataatcatcatcagagtccaaaataaatcccatataccaaaaaaaaaccaaaaaaagtacataaaaaagaaacccaattcaaattttccgaaatgaatgtagttgtatatatatatataaagcattaagaaagaaattgaagaaatagctgaccttgtgcctgaacaacaaattatactcaggttgcgcaacaacaagaccaacgagatccaatctattagcgatcccccaagaattatcaatggataggtgcaaaaattaatatatttgtaatgaatatatataatacctggaatcgatcgcagcaacgaagagggttcagcccgttcatagacctttgcccgtttagtcgcacccattgtcgtagctggagtcgatcgcacctttgggtttctgatttcatatacctctgctccttcagtcgcacatattgttgcagcagctggaatcgcaccttttgatagggatttttggattggaatcgataacaaatttagagaagaatgatagagaaaaatggttaacgatgattcgattacagaatttgtgcatttgtgcaattctaagttaggccttgttgttgtgggtctttgttgttgtgggtcttcgtgattagtatcaaatatactaattaacagtgttaatttaaaactgtattttgttcttctccgttaaagttaacagaatattcttttatttttaaagtatattctgttaaaccaagaattgccgttagataggca

SEQ ID NO: 59400 - DNA, 1023 bp, Cannabis sativa
tgtgtgagatttactacttgattgcgtatacttgcgtagtgtttaaaattatagcaacagcaagcacctcgtgcttggtttcaaacttcaccactgcctgttggatatgggattcgcctcatcaaagtctgatcattctttattcattcaacacacacctacatcaactactatgattctcatatacgttgatgacatattgataacaggcagcaaccccacaatcatcagcgacattgtcactgccctcaatcataaattctctcttatagatcttggtgagttacattattttcttggtgtggaggttcatcatacctcatctggtttacatctatcccaagctaaatatgttcgagacttgcttttcaaagcacaaatgcacgatgctaaacctgcccccacaccaatgacaagtggccttaggttatctgcctatggaagtgaacctgtataggatcctcacttatatcgttcaattgttggtgctcttcagtatcttcttataaccaggcctgaaatttcatttagtgtgaataaagtttgtcagtttatgcacaatccccttgtctctcactggcttgcagttaagcgtatccttagatatctcagtggcacaatcactcatggacttcatctcaccaaagctcctcttgatgaaattgttgcattttttgacgctgattgggccactgaccccgatgacagacgatcgacatctggattcaccattttctatggtcctaaccttgttgcctggcagtgcaaaaagcaacataccatttctagatcaagcacagaagctgaattttgcagcctcgccagcacagttgctgagttaacttggatacattccctcttctctgagctccacatcaaacttcctcagccaccaatcatttggtgtgataatctcagcattgtgttactcactgcaaaccctgtgcttcacgcacggaccaagcatatcgagctcgatctctacttcgtgcggacaagatagtgctgttgggttttgtgccc

SEQ ID NO: 59401 - DNA, 961 bp, Cannabis sativa
  modified_base (663)..(667): a, c, t, g, unknown or other
aaagaggtatgttttaaataaatataaaattagaggtaaatttgattaattgataaataaaagaggcatttttcaacttaccccatacaaaatcaagtaacctcgaccaccagagttgagcttgggctaaggcgcgcgggctaggcctgcgcctagagcccacccaacctaggggcccaaaaaaatatttttcattcaaaattatacatgttttataatagttttcgaaaaagacaacatatatatttttgagaaatttacggtcagttacgaaaatttgaaataaatatcacaattaccacgctagtaatttaattgtgaaatatagcgttaattttcttattttcttagacatgtatatacgtctgcagctgcctattattttgcttcagatttttagtatattgttttgttttgttcctcctcttttacatatacggtagtttttgtttttttttcttcttttttttttgatccgttttttttctttctttctctttcatctttttctgaaacaatttatctatctccttcttcttattttttatttatctcactgatatattttcaagctatatatatataattttttcaataacctaatgttctttttttaaaatgatagatacttatcaaattttctctctttctttctttctttcnnnnntttttttaaaaaaaaaataattctaaaaatattttccaactatatattggtttggtaatgatttggtttcataccatcacaacctactctttgatgtgattaatttaatatgtgggaagcatatatttttttatcaaatgataatcaaaattaaaaataacattttagtttctttaggtgtaattaacacaaaatcattaaaaatttaagtttaaacaaaataaaatataccaaccaatttcattagttatcaaaacaagtaatattgttctttcaaatatatatatatttttt

SEQ ID NO: 59402 - DNA, 1581 bp, Cannabis sativa
cacgtggtgcagatccctttattctcactcattcggttattatattattattatgaagtgtaatatatgtattttgtagtttgcagaaaataattaatatatttattatgaaaaattttaaatgttacaaaaaaatatatgatgagagagaataaagtagtgttttatgattttaattttttttttttttttttgagttgatgattctctatgtacttagatatgttaaacagtggttttcaaaaaaaaaaatatatatatatatgttaaacagtgattaaatttatatatgaattttctcaatttttatttgtggaaaagagtttgtaatattacactgaaaattatatacattatttgcatgaggatgcctgatctaaaattttgagttttatagacctaataatttttaatatatatggtaaaagtgtaattacgttcaaattatcttttaataaattcaaaaaaaaaaaaagtctctataaacaaattaaacaaaaattatagttttaccaaattggatatgctactaaaaaaatcgttttacagaaagaaattaatgcagtaataaaagagtatgttaaacacagaataggataaaaaagttaaagtagaagatgcagagtgatttttagcttttatgcttaattaatttttctatctaattaaaaaatctctcatttttatattatatgccctggagttgtttcattggttgtaaaaacaggtagcataaaaaaagatattttttgatttttttttaattaagtagctaaattaagcatatataaatttaagtttctctttttattatttgtattaaattaaaactaatggtttaatatttttaaaattaatatttataattaaattagtttaataggcaatacttcattgaaaagtgttctatatataacaataaaaaaaatttagtgtgagaaaaaaaaaataaaaaaaaaagaaagaaaagagagaaaggaaaaaaatgaaaaagaaaaaagaaagagagagaagatagaaaagaaaaaaggtcaactcaccttattggagaaaaaaaagaaagagaaagaagaaaataggaaaaaaaaacagctttataaaagcttcaataaacaaaaaagaaaaaagaaaaaaaatgaaatagtataaatgtaaaattttctatgtcacaatataaatgtaaagtttagataaaaattagtattttaagcaaatttttttatataaaattgtactccatctcgcccagtaacggacctagaatttttaatttgtgggggcttaattgttataaaaatatttattatttattttacattaaaattataattattttgtgggggctttttactattttgttgtataattatttaattaaatagaagatatttaattttattaacactatttttttatagcccccacactttctttactgcgtccgtccttgttgacacgtaactacattttgcaggcggatttattcatagcaccccagctttacaatgcaattataaggttcaaacttgatatggtactgcttctttccaaatcaccttgggtttgaatttgatgaattag

SEQ ID NO: 59403 - DNA, 1651 bp, Cannabis sativa
ggtaaatgttgatgcgttaatgatcctttgatttcttcagatttttctggatttgtgttcttgttgaactggggatatttcttttttagtaaccattatgttttgtgttcgttaataatgtttttgcgaccattatggcaattcaatgagacgaggtctctgtgtgcagggacattcgtggtaacagagctgctctttttgatggcattgaggagggtggaatcagagcttcatcatcatactcctcccacgaaatcgatgaacatgataacgaaagggccatggaaggattgcaagacagagttattctgctgaagagagtgagttttttcatcttttttctttttcttttattggaagaaggggcttctttattttcctcttgtgtatatgtgtgtgtcttagattcttagctacaactttcatatcattaagatcatgatttgactttgtttgaattgtttagattcattgggaaagagtaatctatgaaactttttaagtccattcattttccttgtctcctttactaactctaattgcataggaattgacattgtagaaatgccaatggtgaaactttgtttacaatacttatctctttttttttttttttttttgtgaaaccgtagtatttgattaaactttgtacatgttttttcagtcataataattgacttgaaattctgaaggtttaacaagtaacggaatgatgttcaaaacagaaaaaaagaaaaaagaaaaagtaatggaatgatgttgtagattagaatctcttctgttatttcatgtattcacgtccagattttccttttgtttgtacttaaggaaatactaacacatgtattttcaacagttgtcaggtgatatcaacgaggaagtggataatcataaccgcatgcttgaccggatggtatgtagtatgtacgacaccaacttgtttttctaatgttttacggtgttagtattgtttacattgttacaatcttggcctagggcaatgatatggattcgtctaggggagtgctatcaggaaccatggatcgatttaagacggtacttatagacttatcattaatcgaatttttcatcaaagtactctattttgttggatcatttatttttattttcctgggtgttgttttctcctcaggttttcgagaccaaatctagccggagaatgtttacgctagtggcatcattcgtggttgtttttctagtcatatactatctcaccaggtaaaatccatatgatgaatttgatgcacaacacaactactagattcatattgaagctaagttggagaagaaaaaccttacctcttttctgtttgcaaaaatcaatctttaccatccttgcttgtaagataaatcattctggcttggcatatgtaaaaaggatatttcacaatgtaatgaatggatttgaatgaatgcataaaaaaaaaattggtattgagttttttctgctcgtcttctcaactcccccaaagcaaccaatcctttttacttggagtgtttttggttgctttttgacgctgaaaatacaagcattagttttttggtcaaatagacaggcttatgtttaaggcaattttaataaattgatcataaattgtgcttatgaaattgatcataaattgtttaaagg

SEQ ID NO: 59404 - DNA, 2344 bp, Cannabis sativa
atgtactaaatcatgctctttgaattttttaggctgttaaaaattctcctaaactatcgagattgttaaataaaagaaatttcgaccaactttaataatggatacctgacgttgatgaaagttcatgagacacgatttgatacatattaaagtttaggagtataatttaataaatatgaaagttgaagaggcataatttagtacaggaacaatcactatgttagtaaaattgagtgaaattgaacaaaagttcttgaatctaataatctcaatagttcagagagaatttttaatagcttaaaaagtttggaggcatgatttagtacatgtcaaaatcataagacaaaaactttaattagccaataatttttcaaaatgtattaagacaaaataataaatactggagagtctccgtatgaaaataatgttcaagtttgagtccctagaaaaatacttttttacaatgatcaaatattattatttaaaaagcaattctttattatcaaataccaaatattattatcaagtttgaaattccttgacaattatttgttgggtaatttagggtgcaaggaacaatcttgtttggaaggagacggaggtaaaagctaagaacattgttgtatttgttaaaacttatcttgaacaatggaagaagactcaaaaaatcgatatggatgcatcacatgctgagcttcaattgggtcatggaaaagagcattggactttaccagaagcaaacattatcaagattaatgtggatacagttatgtttgagggtggtcatagttacggtttgggcttagttgcaagagatgccaacggtatactaattgaaggccgtaccattatcttccatggtcaagtggagcccgccctggcggaagctatcggagttaagaaagctcttagttgaataaaggatttaaatgtacaagaggtaaaggtggacaccgattgcctgtgtgttgttcaagccttgcataatcccttgtttatggtatctttgtttagtatcgttattaatgattgtataaaaacttgttagtaagtttcaagagtgttttttttttttttgttaaacgatctattaatttagtgtcccataatttcataaaagttgctatgttataccttgattctcgttttaatttgaagtctgttccaattaatttactatcttatttagtagccgaagttgatgttaataaagttgattattccttttaaaaaatcaattctttataattaatttttttcaaaaagaaaaaaaaaagaacccacaatgaatcacccattcattaaataccataccaagaaaaatctttcctttttcttaataataataaaaaaaagttttcttctttaatgtgttttcttttttaacaattttcttttataagttaagataataattcaaaagagtttctcccactattgacctttgacttgtcaaaataggggaggtcaaggtggcaggaaagtagtgatatgcacgtgataatgatatcacaacaacgacttgggcccaattgagcccaaccatatgggccatgggcccaccactttttctcagccgccaatctctctgctctgcttttccaatctaagccctacgtcattactactactcttctttctcttactcaccactttgaacatttcaattttcaacttcatttctctccctctatcactttccatttaaaaaaatcttcaacatttttttttttgaaaaaagaaaagaatttaaaactaatttctttccaaaagaaaaaggtaaaatgaaatatctcaattttttttgaagaaaaaaatataagaatatccaaacaacattattataatcacattattacaagataatatttttaaaaatcacttaatcaatattgtttaagttttctctctttccatattaaaaataagcaagaaatcacgtgtatttaatttaaaaaatgagataatattatcttggattttgggtgtctaaactttacccattttccatttcaaattattaaagccaaaaggaaaattattcaattatttaaattttaactaattggattataacatagttaaattcagaatagaccatacaatgtagttcaagtcaagagatatatatatatataattctagtattttactattaataatataaacatatatatttttaaccaatatgtaacgaactaaaaataaccttttttaaaaaaattccctgcaaaaattaatattgttgcaataaaactatttaaaaaaactatgatcaactaaaaatatataaaaaaaaaaaaaaaaaactataattaactaaaaatataaaaagaaaaaaaaa

SEQ ID NO: 59405 - DNA, 864 bp, Cannabis sativa
  modified_base (683)..(698): a, c, t, g, unknown or other
gtttttagaagtaaaggtgccaaaaatgatatggaagaaaaataaaataaaatattatattttggatgatgtggagatatagaacatcttcaaagaatgcttgagatgtctaaggaagtttttttcttatttatttatttcatgtaattgtgaatagctgtgcgtgaatgaagatgcgatggacatggacaatgatgatgtcattgttatcattgtaaacatagattgagaagctatattgaaaaaaaaaataattattttaaaaatgttataaaaaattgtatatattaggtattaaataaaataacaatatttttgaaatttaattgcttttaatgttgtaaaatgtaaattttcttaaattatatctataaataaaataaaataaaataaaataatggtatctgtaagttagatttgtaaataattatttagtctaaattataattgtaaataaaataaaatgttgatctctatgagttatatctattatctataaataaataaaaaaaaaatatcactacaaaaaactactatttttagtgataattttttattcacaacataatttagtcacaacaaactgtaatttttgtgagtaatatttttagccacggaccgtcacaacataggaatcatgatttataattagtcataattttttcacttttagtcacaagttnnnnnnnnnnnnnnnntaagattttttgtagtgtatatatgcgtacataaattaataaatgaataatattatgatttaaattaattgaggtgacgtttagtaacacttttttaatcacttttctgtttttaaaattggaaaagtgaaaacatttttcaaaaacatgttctataaaattgttt

SEQ ID NO: 59406 - DNA, 1434 bp, Cannabis sativa
atagttgcccaggaagcatggatcttggattgaaggtgtgtgtaagtgttatttgtgtaatttttttttatttgggcggtatatttgtttatttgtccagctggaagtatttttgtaatattgttactttttttggttaaaacttaaaaaagttcaatatattatattattttattttttttcaacattattttaacacttttttgttctaaaataatttagtggtaagcacctttaaaaattattaaaataatattatattattatttaatgtatatttaataaataaattttgcttatgataaaataataataaaaaaataagaaagagaaaatataaaagatgttatggtatgacattcttttcatttcaatggtaagcattaattaaaaaatgttaaaaatatatccatatcatcaaacatccttcgtagcgtctctattgaaaatgctctttatttttagtattttttatacatatatttatttattaatttttatttgttctagaatgatttatttttatttttatttttaaatcaattatttttatttttaaatcaattatttttatttttttgtacttgtttagagagaccaataaaattgtgctacatgaacactcaatcatgacacttaactgccaaaatttgatgaaaatgataaactattaacataatacaacataagagaggtcttactactaaaaaataaatttaggatagttgctagtgagtagtgaggtaaaacttttgaaggttttactgttattcttttttttatatatatataaatatgacaacatatactaatcattaatagttggtactttattaatttttgaatttttttttaattaagatgctgaaaataaaattatctaaacagtttctatttactgagattttttgaaactaattatattataattaagcttaagaaagagatgattaaaagaagaagaccaaaattttacgtggttcgagtattaatgagtttagtccacgagtcaatattattgagctaggaaaactccaacgtattttttacaaacatttttttccctagaatatgaactttaattcttatgacttgatcctagaaattgtttttcaaccctttgtatgaagaggtaatattctatttataagtgaaatttgaatataggtaaatccgaacccagtagaatttaaaagtgtctactagactcactagtgggtaaaatataatatatattgactttgggccaatcgagtgaggcccaattcatgaggcacaaccgtctatacgagggggaccattgaggatgtcaggtatcatgcacaaccgtgtaggggtgcacacgggtcggattttcgggttttcgggtatcgggtattgtaaatctacaaccgaacccggtgttcgggtttacgggtgtatcgggttcgggtc

SEQ ID NO: 59407 - DNA, 823 bp, Cannabis sativa
agggcataaaacccaacataaagccccttcgaaaattaaacacttcatttggagagtcgtgtctcacacccttccagtggcttcctctctctttactcgtcatattattgattccccacttattctctttttgtaaaagtaattctgagacggttcatcatgctctgttagggtgttccagattgaaaaaggcttggaaatcctctaggtttactgatcattatcttaaatataaacatcttgatattactaattttttgttgacctcttttgaagtgttggataaggaatatattagcattttgttttgctttctttgggcattatggaataacagaaataattacatacatcataagaatgttatacctgttactgatatctttgattggagtatcaattacttttttcagtatctggatgctcagcaaaaaattcagcagaatcgtgtgtcgaagcaggtttcaaatagggcctcggcagctgcttctggttcttatttacaggtttttactgatgctgccattgatgttcgtggtcaaaagcatagttatggtattgtgatggctgatgagtctggtgttgttaaagctggtgtggctaaaccctgtattggaagtatccctgctattatggcaaaagctaaggccatttatcatgctcttttttgggtgcagctacttcatcttccagtggatattttaaagacagattgtgaaactattgtggataaacttaattcttgtaattggaatgctagtcctctggatgatgttttagtgggtattaaaaacttgttattgaacatgtgtatagagagtct

SEQ ID NO: 59408 - DNA, 1326 bp, Cannabis sativa
tatttattatgtctaaaccactttttcacaagattgacgtcttaaagttactctttcagttctacatgtttactatggatagcaccccaagaaagaacccaagcaaggtctgcaaaacttggtgaatagcaagtgaccaagagacatatctacatggtcactttggagacacccataccgtacaatgcattcaactagcataaagaacctatacaaagaaattttaatgcctagaataagctactaaacttacatctaagtcgtcgaggcatacttcagctggaccaagtaaatctggacccttacttgtcaaggccataagaagatagccaagatgaaagaccgccaggtctgccacacaatccatgataaaaaagcaacaaggccaaacaatagtagtgttaaaaaacaaagggcctataggctaaagatacgaacatgaaggccctggggctgaaaatagtagtgttctaaaaaggccacaagccacatggaacatgaaaacaagtagtgttctaaaaacaaaaggtcacgagccattcagaacatgaaaatattgtttatactacacaaccatgatgcaaaatactactaatgagaaatactatctatgtgtgtaggggcaggtggagtcaagtttgaagccgcgagatcaggatcgccagagtcgaggccgggcacaccatcaccaagctggccaacctaggggttagtgtccttgccaaccacctcctcagcaagtgggcttgccagcccctcatcatggttccctgatgatgacccctctcgatatgcagcgggctagtctacttccaactggctctcaaagagcactcttcctcgtgcaagtgtgcgctttacaaaagcctcaccacccatgtatgacagattagctctagggttatgtaacttgaacttataagtgagttcagaggacaagtcatcattttcctcccttatggcctgctagccctcaatagtcactctcagtctctcctcctgcactaagaattcaaactgtagtctagagataaaggcatcttgtgaggtgttctccttgtttttggcaccgagcatggtctccaagccagaaatcatgctctgtctctcaataaggagggcctccatgtcagacatggctttatcctttgccagagggaagcctccaaggtcttcacctgctcccgttgaggatctgaggacccccaggaactatcacgtactgagctcaactttattaaggtctaaaagaaaaacaagacaacatcactgtaaaattagaacacttgccagccagactctctttcggactgctatggctggcct

SEQ ID NO: 59409 - DNA, 837 bp, Cannabis sativa
  modified_base (782)..(783): a, c, t, g, unknown or other
ttaaattattaataaatattattggagtcaaattataatatttgtaattggtttaattatatttaaattattatttatatatttatataatataaataatcattagtttaatataattattactttattttttttatttttaaaatttattagcgacaggcattagcggcggaatgtcctctgtcagtattaccggcaggacccacaagtatggaattccactagtaataaaaaaggtcagaattccctagcaataccagcgaatctcgcccctaataatctgctagcattgctgttttcaaaatttgggcggtaaaatttccaccctcattaatagtggtggattttctgccgatatttaattttttccatcggtatgaatatttttatttaaaaaattacaaattaaaatttattaactattaccagcggatggacttttctgcctgtaatacctttctgccagtaatatatatgtaaatttgttgtagtatatatatattctcttgtagacacaaattatataaaatatattataaataataaaaatagataatatatataattatataataaatatgtgaataaatatataagaataagtacataaacacacatataacaacaatgataaaaaaactaaaagagtttttgaaaataatttcagtcagatgagtatatataaatatatatttagagtaccacgactttaaaataattcaagaattttaataaaataatatttactatgggcagagactacaaaaaatcttacttttagnnacaacaaaacttgtgactaaaattgaaaaaattatgactaattataaatcatga

SEQ ID NO: 59410 - DNA, 699 bp, Cannabis sativa
tttatatagtgtttaggatatcactatttgaaattcaaactcataacctccatagatgttatggactcaaatgtaactcctacatacatcatactcctttggcattaagaattttaaattaagatgtgtaacatcttcttacactcttaatattggtgataatggtggaggttactcatagtaacaagtaactccccaaatattacaaaaatatgacaactaatatacattgtcatatgctacatactattactttattacacatatttaatctatatattatattattataaataatataacgtatacattttgtgtactaaggcttaacattcagcaaaataaaataaaataataaaatttggattgtataaaaatatattcaaatcttaacataatatactattgtaaaataaataatatactagtatagtaaaaaaaatatatatgtatatatgtacaatcttaaacatagaaataatataccctaatcaaatatatcaatatctcaaacttaaactaatattccacgttttttttatttcactcgatatatactatatcacataaaagtgatataccttacaacaataagaatataccacaaatatcctctaccgaggattgatgaattatttgatcaacttggtggttcaaagttcttttcaaagattaatttgaggtcaggctaccatcaat

SEQ ID NO: 59411 - DNA, 1035 bp, Cannabis sativa
ggattcacaaataggattaatcactaaatcaactctcacataattacaaatttagcattcaaaatccaaataagcatatagagctcggaacgagctttccaacgatataaagaacctcccaaatggagttctgagtcaaaagttatgaccaaaatcaaatccgaaataaatataataaactaccaatgtcatggtcgcaacgagacttccaatggtcgcgactagagcccaaacaggggctcaacctctcttgttaagtgctaggtcgccactactgggtttaaaaacccagaaaatgcccagaaaatcaatatttaacccaattccaacataggccaaattttccttaacttaccaaataattagaaattgtatttcaagtcataataaggtattttccaaacatttacactacaaataaacatgttcaatcacccaaacacttcatacacaaactcaattaccaacaaatatactcatcaaaatctcaatatccatacacaagcccaatgattcacatcaaacttccagctctcaaaaatcaaactgaaactaagaattacacatttaaaaatcacccatgctttccaatatcaaaggaataaacaagaataacttcactagcaaaaacctagccaaacacaacaaactaaacaattttaacacatgtgcactcaagagtatcatcaaacaaaatattcctttaacaacttcaaatatcagaataaaatttcaacaagaaacttaggagcctaccacaaaattaaagctccaatcaccaaaatcaactccaaaattccttccaacttcaagcaaaatttctcaaatcaagagtttcaaaaagatgagtaaatgagaagagggaggggatttggccaagtgcaagggaaaatcagaaatgaattttattattgccaaaaatctcattttgttgcaaataaatcaaatggtcaaaaagaccaaaatgcccctaagaccattatatcacataagcataaatcaagggaaaatttgtcattcttcacataccacatt

SEQ ID NO: 59412 - DNA, 3263 bp, Cannabis sativa
  modified_base (2844)..(2852): a, c, t, g, unknown or other
agatttcattatgaactttatttgaaattttgcttcaaagttccaccactactaatacctcaacttccacaagaaggtccctgttagagaatacttcttactcctcgtattataaatatgataatttggagccttgacgatggttttgttattgcacctataatgagtaagttgttgattgtattattattgttattattgttgttaattgacttcctgcttgtgtatttatttttatcatctgtttagattttattttctaaatagatccctctctatttatatttatacataaaatgtatatttatttacacaatgttatattttctttgattcagattgcagagcttatagtatattctttaattggtcatagtgaatttgtatatcatttctcttacaattttttatttttatctgctccatttttctttttcttttaaatgcttaaaataaaatttattatttagcaaatacaataaaagattgaatttttaaaactttttatattgtgtcatggtaaaattcttttacgtgtctccaaaaacattttggttctgatagtcatttctccatatgaacttttttctttgtttgaacaaaggacattttatgaccaagaaggaagtatctccaaggccttttttctttgtatttttaattaattttttttaaattaaacatataactaaatatacgtgcattgcacgtaacttctgcctagtatagggttatgtcttgatgaatatgaacaagaactcgtggatcaagcaaagcacatcactaaaattataataattatagttatctcaaagtacccttttgctctttgctttcttaattttcctagctatatactactttacctatggaaattctctatgttttttttttaatcttttttaaagtaattaatggtgtttgattgtaaatcatgtgctacacttaagtggagggtaaaggtatattagacaattcactcacaaaagtgagtagattttaatgaaatataatgtaatgatattttttattaatgaatacaaaaaagaggtattcatcaccttatcccgctatcttttgtgctaaatttggcataatttttagcttatgctaaatttaacacacattttatatcacaattgaagttaattttcaacaaaatattctaaaaaataacaatatactatagttataggtctctagagatgctcttagaactattttctttatttatatataacctattaattacattaataataaagagagggctagttagtgttttttagcattaatttttcttataataattaaggccacacgtgcaggctgactcagaaactcagcaacgcgtgcggttgagtatgttggagacttggaggacttatatatatttatgataaatcctttcataaaagacaaataaaaaaaaaattataaaattaagtctaatcttatcataacttaattactttaataaggtagggctttaaattgatgaatatatattatatacattatacatatgtactatgtgtttatatagctggctatatatatgcatgttaaaataatgaataatgagaaatgttaaagggcaagttgtgtttaagattattacaaggtatcataattatattattatagaacatcactaattattaattttatttgattaaatttttagttttgtttatagctaaaaatataagtttaataaaagatttgacttatattttaactatttgataattatataaaagtttttttaattaaaaattcttctaatggtgtttagatattataaaaaaaaaattaaataaattagaaagtatgtaaattattataattttaaaaatagtttcttaaaagtaattttagaattactttgtaaattaagggcttctaaattaaaatatatatatttttctatctaaattctcttaaaagtatttttttaactgtaccaaaatagaatttaaggcgattgtttggtacgtcgtattatattgtattgtattacattatattagtactatttaatataatactatatatgtttggtattgacttgtattaataggttgtgtaaagttataatatatttttaataaactagaccccaacaccgactctgggtcgggtctgggtcctgtccgatctggatcctgtacggtccggttcccagtttggggtttagggttcgggctccagtctgggtctgggtccaagtttcgggtccgtcttcggagtagctgggtctggattcggatcgttacttttatgtagttttcttgttatattgtttaaagaaaatagtgttttatgtaagtatctaaaataaataggtcactggacatgttagggcccaaatgaagcccaataacaagcccatggttaagatttgcttcaggccatcatctgattattatgataatcatcatcttcatataaatataacactttcaagcttattatttattattttatttattttttaaaaaagttgaagcttatctttgaattttgaattggttatatttttaattggaatattaagtaaaaagatatttcattctatttttttaaaaaaattaaatttattgttaattactattaataataagtagacatcgaagttagctttatcattgtatattgatgactatacatctatatatggtgtttaacaaagaggccgaaaagttgggccacgatggtggtgatggactgggcttaataccaaaacaaaaaaaattgtaattgggccttaaaggtatacgaggaaattagaatgtataaaaggggtaagttgaaaaatacctcttttattaatcaattaannnnnnnnncctctaattttatatttatttaaactatacctcttttatatgtattgtacccaaaatacactgacataagagagatacatggagagtatcttgaagtgacaggggaaaaattggtacaatgtttaaaaaaagggataaaaatgatagactttaaaaaaaaaaggtaaaaataaaagaggacaatataaaaagggtatagtgtaatttcatctactttatatagggaaacttacaaaaatactgaaatttggattaatttttacaaaaatactgtcacacgaattttttttcaaaaatatagtgttattataaaacaaaagtagaacacaaaacaaaacaactaaaaacaacagtagaacaactaaaaaaaaacagtagaacaacagtgaaaacttaacacagtacacagta

SEQ ID NO: 59413 - DNA, 907 bp, Cannabis sativa
tataagatgaatggactacttctctcattgtcaattagttttaagatagaatctcattcatcttatcccaaattctaacatggtatcaaagtcagactaaactctgatgagtatttgatttccaaaagagtctcttgttatcagttgtgagcacaaagtgtcgccgatccaaaaagatgagccttaatccctccatttaagacatttcggtcaatgtgtgtcagtttctagtgttggggtccacactttttatgcctaaacgcgaggagagtgtattagagttagtcctatattgctagaaataaattatcatatataagataaatgaactactcctctcattaccaattaattttaaaataaacttcattcttttaatcccaaattctaacacaatgcatcaaaaaataaaataaaaaatatctagactctagagggctcaagggtcaggcaataaaattatcatggcatattactattttcgcatgatcactaggcactagtactattgccattttctttatttaaaaactaaaagatgcatgagaataaaagctccacatggctatatttccatattgagataggtaattatggtttgtaggataaaatgcataggtaaaattaattacacttaagggaagtgaaattttctaacagtactcttttaagtatttttttttttttttactttgattctattttttggaaattattgctctactttttgtttataattagattgattttttttttatcgaatagttgttaatttttttttttttttttgttctcatgtcatgtttagaatgtaagatgcatggatgagattctcaatatgagactctaatatattatgaatatgaaactctctaataaattcttagaattttatccaaagatttct

SEQ ID NO: 59414 - DNA, 952 bp, Cannabis sativa
aaagggtgatttgccatctaacacggctgtagggagtatttattaaataaactgaggtctgaaatgcatcagaccaatactttaaaggcatgtgagcttgagctaggagtgtgagccccatttcaactatatgcctatgctttctctcggctctcccattttgggctgaggttctcgggcatgtgtgttggaattcaattccacttttgatgaccaaatccgagagagcctcatactctcctccccaatcacacctaatcattttgattttcttttcaaatttattttccacaagagctttaaactgtacaaaggcagccaaagcatcagatttttgtttcaatggaaagagccaagtaaaccgactatgatcatctataaaatggatgtagtatttatagttagtatgagatgcaattggtgcaggaccccaaagatcagtatgtatgatttcaagcattgttttggctctacttagagaaatgttaaagggtaatgcatgagatttgccatactgacaggcatcacaaaaacagagtttttcattgattgaatcggttacattggacacttttaagactcgatttaaaacagatatagatggatgtcctagcctcctgtgccaggtatcctttagggaatgggaaatgacatttctagttggttgaacttgaacagaaaacagacacggttgaagtcgactggaacagtgaagagaattgttgacagatgttcctaagctgtagagaccatccttaagtgttcctctcagtatcaccttccctgtttgatccttcacacaacaaaaaccagcaaaaaattcaattgaaacattattgtcttgagttagttttgagacactaatcaagttttttgcaatagatggaacatgtaacacatccttaagaactaatggtgcagcagtgagtgtagtaagagtactatttccaat

SEQ ID NO: 59415 - DNA, 824 bp, Cannabis sativa
  modified_base (421)..(429): a, c, t, g, unknown or other
  modified_base (501)..(501): a, c, t, g, unknown or other
  modified_base (613)..(616): a, c, t, g, unknown or other
  modified_base (786)..(799): a, c, t, g, unknown or other
ctttctgtcacagagtatcactaagatctgagcccgacactcttttagttgtttggattcttcatattcttacacactatgattgaggactaccttactctgggtgagcatgcactcaatcactaaaggcttgaattttaatggtgaagaagactataagatttcaaattagaagaagagaaaagaagaagaagaagtctcaaactctctagttgtctcacaagaagaaaactaggttaagagtcattagttggattatgagaccattcttttctttttatactaattcacatagggttaggtttgaattatttggaataaaaaatgataaaataatggcaaaaaaatacacttagtggccgaccctatgtgggtccgtaactagttagatttttgccatttttctcaaccatttatctannnnnnnnnaataccactttttgcaatttcaatcctataaatgctaaaaccattttataattaaattaattatcaaataanattatcatttatattatttattaattagactccacaaagtcacttaattaccaaataaaccctaaaattctatttctttacaatcatgctatatcttagtgaaaattcatannnnagacatagtctaattttagatttataattgattaactaaaatcaattaactgagtcttataaatagtttgtctcaactagtatggggaccatggcctatatatatagtttgtcttaactaaaatcaataagcagatctagaattgaccatgtaaattctctaacttattnnnnnnnnnnnnnnccactatagatttggaattgcactc

SEQ ID NO: 59416 - DNA, 552 bp, Cannabis sativa
  modified_base (51)..(52): a, c, t, g, unknown or other
ttagtcacaacaaaaaattatttagttacaaaaaattacttgtgactaaannatagtatttagttacaagttgccactaatttatttttagtcacaacaaatattgtgatgtttcacggaagttggtattggaagtaaatagttgcagccaagaaccaaattaaatgtctcacagatgtacatcagtttgctaaaaaaaatacaagatttcagctggctataacttgatttgtcctgtacggaatcgagttgcatggggtaatgaggtttgggggaggttcaacacacccaagcatagttttatactttggttggctgtgcaaaatcgcctcaagaccaaggaaagactgcagcgtttcaggttgcttaatgacccgacttgcagcctatgtatgatgcaggctgagacacatgatcatttatttttcaactgtcccttctctgaatattgcttacaacaggttaaaacatggctgtcatagggggcacgaaccattgacctttctcagctactcaaatggattcacaaggcaaaaatcagcaagtttagaa

SEQ ID NO: 59417 - DNA, 687 bp, Cannabis sativa
tgaaaagtgcaaaataaaaatattacactattcttttaaccgaagtaaaagaagatcagaaccaactattatagtgatctttagttttcttttttatgatttttacagttacatatatagcgactaacataaaactatgcatacgtgccttgcacgtaactttcttctagtcttatatatattttatttatttattgtgttttatgtgtagtttattattttgagtcgtaattcttatcttcatatttatattctttattttgtgtgtatattttatttaatattgtaacataatttactctataattttgtcttttatataatttgtcatagaattataattttgttaatttagtattttttattggaacacgacaatttccactagttgtcccctcgactctcaaaaactttgctttataataatatatttagatatttagatatataggatgtactagcactcatgacccacatggtcattacggcggatacgggtgctctttttgtttcactaagcctgttaacccggtagcatatgtacttgtttttttttcacggaatgtattctgtggtacattagatgaaactcagagtacattaaatgagtgtcaggatacgtttctatttttcaaccctaattacctctagatcaatctcagttgtcagatcaaataactccctcat

SEQ ID NO: 59418 - DNA, 946 bp, Cannabis sativa
ctctccttttatagggaaggagatcttattaaaataataataataaaagattctaaaaattatggagaaatacatttaggctattttaaaccgttgatgatgatctaacggtgaaattgactttggaggtcggccatcaatttctatctagaacttgagttgtgtctgtctgcgggacccactttgggtaagttgtagcttaaatttgtaactctctcaagattaaaatttagagttgataactttagaattatgattctagtgtgagacaagacttgatatagattgaaataactacgaatcgcaagttaaatttagtcaatcagatcaatattgagtaagttatggttgttttactgaaggctgttctactcccaacactcaggttgacatatgatctcaagtggtgactgctttacaggaaaggggagctatggaatacactattgtggtagctgaaatggtggattttcgagccacattacaatacctcgctccttacacaagaggatttcttactaaactttttatgtaccgtgaacaacacacttaaattatttatgatgacccttccaaacaagtgcaggacgttgggccaagggaaaatagtgtctgggatgtacttttgaaggctaagtgatattttgacatcacttagctaatatttgtgttctagtggagctggtcaccagttctcggagatgttgctattttgtagaaatggaagactcgaaactacctaattttcgaataagtcaatttgccagaaaagtaaaaatatgaagttatgaatatgactcttctgacttcatagctctcagtcattatgaaaaaatagatgaatggtcaagacgaaatcaaaatcggataagtagaacctaacgcaccaggccatatgtcaacctggcattgggtgctcttttcggagcttccaggttgtcgtttc

SEQ ID NO: 59419 - DNA, 1438 bp, Cannabis sativa
aaaaaaaaaactcaaaaaaattgcatacaaaaagtgagttatttcatattttatttgaacgaaacgaatagtgtgcttctccataggtagagaagcattatttattactctaaatttattttattattatttttgtttgttttatatgtgtatatatataaattaatattatatatttaaaatataaatatatatttgaaatataatattttagtgatgtggaaaaaaaaaataaagaatttgatgtaaggtataatgtaaaagtttgagttaaaataaaaaaaataaaaaattttatgatatattttaaatgatagagttgtgatattgatgttagtactcttagcaccaagagtgttactatcccagccacaattcctttgaagaaaggaaaagaaaataatatgcttttgtggtaggtactttataatctacaatgaccatacaaatgacagtggggcctctttcactcttacccacaactacttaagacttctaatgtagttgtatcacaacaactacaactttaaatgattcaactatatctaatttgcatgaataatttgtcttaaaatttaaaaccttgaaaatttcgttacgaaacaacttacccatcaactcaataatacttcttattctcagcaatatacatatactcattattattattattatttactaaaaaaagtgatattaattggcaatagagttgttcattcaaattggtcaatagcgatcaaaatttggaccgcaacaattcaaaccaccgtagactgtaattagtgagactgtcattggtggtttggttaatttggactacttattgctgcttagtttggttgtggttcgtaaaaaataacaagcagttaaactggactgaaccgcttagatatataatttatttgttatatatatgtatatcttataaaaaaaaaactagtaatttaattactcaaaatatttgacttctcaaaataattgaattgtctcaaaagaaaatagttatggaatatattttttttttttgcttaaatgaaaacttttataaaagaaaaaaggctcctaaagaccagagcccaacccacaacgtttgtggtggaaacaagaagaagttccacctccttagaagaaaaaaaaaatcgaacaaagagaatctagttgcccatttgccaaagagtgtacaccaaacacagtagcattaacaggagaattaagaatatcaaacaactcaataaaaatactcttgatttgccaactaggcacacttctatgaaaaactgctttggcaagcactttacaatctgtaacgagaattgggaaaactcaaaaatgaagccactctcgttgccaaatgacctcctactttcccaagtatgaattaaaaataaggaatcttaattgttctaattgttgacaaagaagatacagaaacaaaagc

SEQ ID NO: 59420 - DNA, 1056 bp, Cannabis sativa
catcaagaccagatctatggatgctattcttggagtacaggaactagaaataccagagataccagattcaatggaacagtaccaggagcattgctcttcacctgatgcgactgaagcaactcgaagtgattttcaacaggaattttcagcgtggattgatgctgcaaacaaggtttctcaggaggtaagtattggaaagcatccatctcccccaatacttagatctaacatagttcggaatttggatagtgcgtttgaatgttccaaaccgaagagtgaggtgaaattacagggatcgaaaagcaaggtgaagattgattttactgatattgaggatgaagtcaattattggcaaccttctattgtttgttatgtcattggtgcaaatcctcctgtcaatatactggatggttttgtgaggcgtatatggaaagattcagtggtgaaggtcggactttttgctaaggggatattcataataagatttcaaaacatggagcaaagggacaaggtgatgcagcaaggatatgtgttctttgataggaaaccgatggtgatgaagccgtggaatcccatagacgattttacgaaggaagaggttactaatgttcctacatggattcaactgaagggcttggacatcaaatattggggggagactgctctcttcaagattgtaagccaaattggggaaccattacaagtagataacatcacgaagaacagggacagattacagtatctcaggattcttgttcaggttagcctttcacaggactttcctaactcgatttcttttactgatgagtttgatcatgatattgagttggaggttaagtatgaatggatccctcttgtgtgctataattgtgctggtattgggcatgagactgataattgcaggaacaaggagaaaggaaaggaaaaggggaaccaggtttgggtgccaaaacaacagcagagtaaagtcgtgaatgaaacagatggtgatggttttcagagggtgatgaaaggaaaaagagttgtagtggatgaggaggtggttccaactgaggt

SEQ ID NO: 59421 - DNA, 980 bp, Cannabis sativa
  modified_base (942)..(944): a, c, t, g, unknown or other
tatattggatacacaagcaagtatgactcatgtgtgtatttaattaatcaaacctatttgctactctatgttaatgatatactaatctttagcaaaataagtaagagattgacaagctaaaagggaaactcagtgataagtttgagatgaaagatctgggaaaggcaaagagaattcttgggatagacatacaaagacctagacctagcatgatagtacattctcaagctgcctacctaaaaaaagtattgaacaagtttgccatggacaagtgcaaaccagttgcaacaccacttgctcaacacttcaaattgtctgcatctcagtcaccaaaaacagatgtagaaagagccaagatgaacaaggttccttatgcaagttgtgttgggagtctcatgtactccaggatgtgttcaagacccgacttagctcatgccatgagtgtggtaagtaggtacatttcagaccctggtcctgaacattgggaagcactgaaatggattatgaggtacttgaaaggtactttggacagtggtattgtgtttagtaaggggaaccagtacaaggaagaaatcactagttttatggactcagattttgcagcaaacctagacactagaaggagcctaacagggtttgtgttcactgctcttggggtctgcatcagctagaaatctaacctacagaaagtagtagccttgtcatctataaaagttgaatacatggctactacaaaagccatcaaggaggctatatggcttaaggggttgacagaggagttaggtttcaaatatgagggtatcacagtttattgtgacaatcaaagtgctttacatctcatgaaaaatctaatgtttcatgagaggtcaaagcacttggatatcaagttacacttcataagggatattgtgtcatccaagaaggtgcaagtgaagaaaatannnacacatgataaccctgcagatattttcactaaaagt

SEQ ID NO: 59422 - DNA, 5280 bp, Cannabis sativa
ataacacttatccaaggtataagtataccttagattacatatcttcaagtgtatttagtgaaaaatacaccgtagatttattaaaattaattaataacaatagaaccaaaaaagaagcaaagaaatgtgcattcataaaatagtataaaaaattctaaagccaatgtcaaagttaaaacacaaaaagaaataacaacacaaataacaagtagagcctagaaataaaataatattaaattagcataagaatattttcataatttagctaaatcataatagaagtccaaagttcatattatcataaatatatatatcctcacataataactaaataatcatcaataatatatttattaatatgtgaaaaaaataccaggttagatgctttagaatatataaattaaagagcgcaaacaaaaaagaacatgaccggaaaaaaacgcggcataaaagaatactatcataagcgaagaaaaagtgagtagttaatggaattgaacgagatactttatatctaattatgtttttttttattctttaacttatataatagggctaaaaaaccttccacacaaaaaatataatatttttttggaatctaattttatttaatattataaaataatataaaataaataaataaataagaagaaaaaaaaaagaatatgaagagaaaaaaaaagtaaataattttttttttcggtaatttatattaatacggtgaagtcttttttttttcgaataaaagcgtaatatcataaaatgaattagtcagacctcatagttattacaaaataagttctccggtaaggaagaaaccagatagagccgtacaaatggtggataaaagcccacttagtcacgttatgggcaacaaaattacaggacctactaacattaataaaattacaactaataaaagagggagaagacttagtacaaaatgagacatagctctcaagagcccaatgggactccttcccattgagagcattgataactagtctcgagtcactctccactattacaaacttagatcctagttccaacgccaccgagacggccaaacaacaagccacaacctccccacaaagtgcatccgagaaattcaaccgagccgagtggattcgaatcaccctaccaaggtgattccttgctacaactgtagaatacatactctctaagcccactctaacgtcacaattaattttaatccactcctcagaaggaggagcccaagactcccgcaatatcggcgcaggacaaggcaagaaagtagcatgtatatctgcaaagaaataacaaacagagtcaatgcatttcttcacatgaggtaaattattgtgtaccaattcgttgcgcgtcctccagatggtgtcaacaataattaaagcataaagaaagacctcctcaactcttatacccctgtccttgagattctaaatgaatttaacccagtcccacatgcgaatgccggtgtcacaaactgggtaaatgtcccaaggcgaagatctccaaatatgaaacgccatatcacaagaaagaaataggtgttcaatagattcctccctcagcccacacatcagacagctcatatccacaatttgaaacctgcttccgattactactctaacagggagagcattggataggatactccaccaaggaatcttatggcgctccaaaattttgctgttccaaagcgatggagccacctcgcagtgaggagctctttccaaaacttgagttgaataagccgatttttaagagaattgcccattactttccaaggtccaaatccatctatcctttccctgacccgaaggattgccaccttttaaaattgcggaaacagtctcatgatcaaaaaggctgtttaacttggtaacatcccaattaccacatgtcatcaagaggtcggccacattgttgtgactcagagtaccatcaccaatcggtttcggaatgaaaccttttaaatgaggaattcaaggatccctccaaatgctagtatccctaccatcagctaccaacttacaggcccctttccttaatattgcattggttttcacaacgttttttcaaaaccaggaatcagagtctttataactgcaactgagaaaatcctttccttttagatacttggcttccaaaatccgacagcaaagagattgacatccatttaaaagtttccacccctattttgccaggaaagcttgattcatttctctagattttcgaaaccccagtccaccccgagacttaggaagggagagtttgtcctaagctctaagatgaagaccatgattttctttctcaaaaccccaccaaaaattccttaccaaaccatcaatcctactgacaaggcgattagagagtttggtagttttcatggtataaataggcaaagacaaacccacaaatttgataagtgttgcatgacccgccttgcataacgtctttgccttccagccctgcaactttgaagtgaggttgtcaaggatgaacttgaagtcaacattcttttgtcttgatttgaacaggggcaggcccaaatatttgataacaccctccggagaatcaatcccccaagcatccttgatacctcttcttataccattgggagtatttttgctaaaaaagattgacgttttgatcttattaacttgttgtctggactaagatcaaaacttttctagccaatcctaataaccctttacttcattcagattggccctaccaaccaggattaggtcatctctaaagaaaatatgggagaggaccggaccacctctactcaatatagtatcctctatagtgcccttactaagagcctcttccaaaagcctcgataaaatttcaacaccacagataaaaggatagggtgagagcgggtcaccctgccgaagatcacatgatggattaattttgccgacctgacccccattaaggcagatattgagagtagtggtagatatacactgagacacccaactgtagaacttttgaggaaagccatagctagtgaggacatgatcaataaatctccagcttaatctatcataggctttgataagatcaatttttatagcaaaaaacccctctttgcctcgtttcttgttaaatgagtggatgatttcttacacaattacattattatcttgtatattcatactcgagacaaaagcaacttaagtggggcatatgaggttgggtaagataggtttaattctatataaccttgtacaacacattacaaagggatacaggcctaaagtgattaggtctcttcaggttctggatcttagggataagaacaacatttgtagcgtttatgcccttatgcatattgccattcagaaagaaatcggaaactgcttcacaaaaatcatcaccaatagactcccaataatgcttgaaaaaaagcactgacattctatccggcctcggcgccttatgattgctcatataaaagagagttcttgtaaattcatcacgcaaacgggtcaggataagctcttcctggttcgcttgagagatcctctcttggaacaactgactgcaattaatcgcctggccatcatcagaccccataaaaatccttgtgaagaaatttatgaattcacgaccaattaactctcggctagtaatccagacattgttctgatccaaaatactctcaatggcatttcctcttcctttaatagcagtcaaaaggaaaaagaatttagaacacttatcaccttccttgagccaagagatatcgacccgttgtttccaatagatcacttttcttgccaaagtctcattcagggagctccgaatatcacgttccatgttccaatctcgggctcttgtcggtaatctctgcaaccaatcaagcttttgttccaaatcttttatgatcgagtctatcttaccatattgcatacaatttcagctaagtagagcaacacgagtcgctccaagtttcttgtagactcgagctggggcccaagggtgatcaaccgaaacccacacattggcaaccaccaatttgctcatttcatctctcgtccatccttcttcaaatttgaagcatcttttaaatttatgctccaaaccactcaaaagaagacataaaggtctatggtctgaattacacgtctgggaagagcatagaataactttaggaaacagattcgccaagctccattaattaatcctttgtcaagagtagatttcacatggctcctaccagaacagtgattatcccaagtcatcttatcaccttgtataggcatattaataaggcctcgagaatcaacaaggttagaaataaaagggataaaggggtcccttctggaggacccttctcattccgagtcacttaaaacaaaatttgtatcacccaaaatcaaccagggcccaccaaaactatcccaaatgtccattaactcagcccaaaactttttcttagcattaaggtaaggaggtccatacacacacgagcggagccaagggtgtgaaggaggatctgaataaacaagaccagagataaggttatgagaacaagagatacactcaaaatcaaagccaactttccacgccaagataatccccccaacaataccaataggcggcacattaatattaaagtagaagtggagggattttagagtacgtaccaggggagtagcatctactttaagctcagttagaaaaacaaaatcaggagagcgcggtctaatcaagggcttcagttctcgaactatagaggtctgccctaaccctctacagttccaggcaatgcctctcatggctcctgtggaggagatttgacattctcctccacaggggtatgagagtgagcagacaagctggagccagattcttcaatcaaaaaagaaccaactagagggttcttcataactccttcagtgcggtctggggaactaaagatatcatcagagggttcttcaaaggccaccttagattccaagtcctgatccttaggatcccaagggaagtcccgtacaacacccgagtgcattcggagtattttctgtggtctggagcaagccgaataaggggcatcatacaattttcttttcttaaatggtgtagttctttcagttgtttccgacgtagtcaacacaccaatatcacctcccaattgcctaatctcaaataaatccatcttcccaaaatgtttaagatcatgtaagagagtttcttggcccttaaaaaagagagacaaagccttttcctcatcttgactattctcggccacaagcccac

SEQ ID NO: 59423 - DNA, 768 bp, Cannabis sativa
ttgtcatttaacaaaacacagggtccaattggtaacttttacaaaacagagggtctaaaatggtatttacccaaaagaatatgatacatacctcaaatatctgaaaacaaataagtagagatagtgatatttttctccctagagagagttatatatatacataatattagccatatattaatatggattaccttttacatacttataagaatataaaaagtttttataataataatagtaatggcaatagtaataataatatcgaatgataaagaattataaaatatgaaaagttactatatacatgctttaataataatagtattattaataatatataatttatgttgtttttcctttaacaaaatgtgagagtcttagaaaatagtaaaaatagttagaaaaaaagataagatgtcacgtaaaatcttttgtgctttcctttatctgtatatattgatattgataatagaatataatgcatatgacacacatataacatcaattttctataattaactactaaactcataattgtctattttttataaataggtcttaatttctaattgcacatataattctatatcccgtagaagggaaggtcccatattacttatctagacttctccccagtttaaatatttttgggcctgggctttaaaatcctccaagttggttgtgccttctcgttgaaggtaggaccccactctaatcccatctcctaaaagaacaaacgattaaccttcatcaacatttttgttttat

SEQ ID NO: 59424 - DNA, 628 bp, Cannabis sativa
tttaaatagtatgctcttaaccaattgatgtcatatcaattatttaatagaaactaagacaacatagccacttttctgccgtggttttaactatttgagttttttttttttcagaaaaaagaataaaattaacttaaaaaataaaaaataaaaagtaaaaaagaagaaaatttcactagtacaaatcaacttaaaatgatatgtttgatttataaaaactttaatttaaaaaacaaaaattggaagacaatatcaattatataaatttaaatttatattaggtgtgtataaattatttaaatattttaatttaatatttattatgagtttgaaactatatatcataaataattttaattaatatatgttaaatttagttaacaataattttttatattccttatgttaatttacaaaaagaaaacatcaaaccaagcaaaaaaaaaattatttagttgctttaaaaaaatttatttagttaattaattctataaaaataaataatatttaatttcaaaacctatttaaatcttaaattaaaaaattaactactacaaaaactattattcccatgatcctcaaattaagagagtgtttaaaaatgacacatatatttgagattatctgt

SEQ ID NO: 59425 - DNA, 1366 bp, Cannabis sativa
  modified_base (113)..(141): a, c, t, g, unknown or other
  modified_base (251)..(254): a, c, t, g, unknown or other
attggtactacctatatcaacaaggtgcatcttgttttttggtagcccatcacgaaagaacttcgcagttaaacgtgcttgagctgggtcaattttaggatgggtgacctccnnnnnnnnnnnnnnnnnnnnnnnnnnnnngaggacaaagcacgctggaaacattcgtgttgatctgtagggttagtgatcagtccatgaagcagccagagtgatgtagtcgtgcataagagccattattccgtgggtgnnnnggcccaatggaggcttgaagcgtggacgttacacaaggggtcagatcattgagttggagtcccatcttctcatatggtgtcttgaacatgatatttgaagaggctccattatctatcatggtctaggccactgttttatttactatctacatttccatgaccaagggatcgttgtgtgggaagcgaacgtggacaacatctgcttcagtgaaggttatagggggttcccatacccgtggcattttcggctttctctcttctacggccaggactacttccttttgcttgtgctataaggttcaggcatacctttcctgagctttgccccagtctccagctaggtgtgggcccccaataattacttgtaaatgcccgtccactagtagaggtattagtagatattgattattgtctatttgggagcctgttgattctgatcagcattgacgcatttctacaagcgcgtgttatttttttgattaagaattcaatgtcccgctttaggttgttgcacacattcgtgtcgtggacgtagtttgcatgaaaacgacagaacttgacgtgtctctcttacctacatccttcttcatgggagcaggttttttatacaggaccatagactgggttgtcgtgtataatgtctctaggtcatcagttaggacagaaaaggcagtgaccttggaggcattttctctaggggtgtgctcggctttgcctgtgagctttctcttcttcccgttgccttgcttgccattgttattggacctttttccactcggagttgagctactagggtattgtggggtctgagcaagtgctcctgtcgatgggacatgtggttggccctactaaggctcgacgtttgctcgctaaatagcctcttcgagcttgataaacccgtttgctcagtctagaaactccgccatagaccccacagggccacatcttttaatgtccttccacagttctccgagtacctcgatgccccccagtatggcggccagcctcccctcttcagttaatcttgcgacttatgtaggctttgtatgaacctgctgttggaaattattttaccaggatcttagatcgactcacaagtatgttgattaaca

SEQ ID NO: 59426 - DNA, 759 bp, Cannabis sativa
taaacttaccgtaatattttttttaagtcaatatcactatgttgatcttagatcgatgatctcaatcctgagatggttaggttctgacttaacagtattgcacgtgttccttaacttgttcgttataagcttatttgaagaatttgcccatacttatatcttggcaattcggtagtgcaattgaatgggagcgctaatcatagatataaaatttatagcttctataaatagttagaagtaaaatgatagttttcttagagcttggttaaataagtttaaatggtggagtattcattttgataattatattagttttcttaaatatcatttacaagtagctaagtattttaaagacaaactacattgagaggtaaaacggtaattttgtccctacttgatgtaaatcatctatagagagaggatcgttgattgtttagattgaaataatagataaatcatagcgtatctattcttggtgaattaagtattctacataatcaaaagagcaattttgaatctatagtggagttaggaggaattaattaataagatagagaatttactcagtaaattctagagctacttattgaaaggttgattatataggcccatggtcctccacaccacctgagctaatatttatctgtagactcaactaattgattttaaataatcttttagaatttcaagtaagactatgtcttatatatatgagttttactaagtaaaggcaaatttaagaagaaaaagagaatttag

SEQ ID NO: 59427 - DNA, 3151 bp, Cannabis sativa
aagtgtgtgtgaggatagttgaaatggagaggagagagagaaagattaattttgaaatagtaacaaatgagacaaagtagcgtgtagaggggagagataagatgtatagattttaattaactatttattactaaattgatttaagaaaggataaggtttagttattattttaattatttttctataagaaaattaatttatatgggtcaacctagctacatatgcttttagttttatataaaaattgatcaatgttttttgatatatttatatttatcatgttaatttaatatgataattaacatatcatataaatataaaataaattaacaatatcctagaataataaaaagtttgatattaaaatttgacatgaagatataaaatgaacagtaaaagtaattacaattacaatttaataaaatgatataaattatttttaatcattaagtaagtagttttaattttaggtatactataaaacatttctcctcaattttctcacaaagttttgaaagaagaaatttggcgagtccactaattttttttccactcatttttctctttcactttattttctttctaccaaacataaaacttcttcttcttctcttcacttgtctctacaaagttttctttttctccactttttcttctttaccaaaacatgtaggattagtcaactctctaacatcatcccctctaatcatttttcattcttcaaatataacatgttggttaaaatttataaaagttatatattatccaacttattgagctccaagctcatcttaactctcacatggtatgatattttttactttgagcctatagcttgcacgaagttatttttgagcaccttcccaaaaatctcatactaatagaataggtggaatgtatattcaaggcaattcttacctatttctttcatgtgggacatgagttgatactccaacagatcttctcttaaattaaggacctcgtactcttagactttccctccaaatcttgtactactactaccaccaataaaacttgccacctaactatcaacattgttaggaagactttcgacacaaacatagaactctatttagtttcgctgtaatcaccaaataaacacactgcctgaccgctataaattagaatttcgatacaagagaccatacagatcttcaatcgtaagttcatattgagggcttctcccactcaacgcaaatgtagtacactatcccaactcttgaaatggctttgatactaccacttgttgggccacattcattcaacttgtcagatcagcaagctcaccttaactcctacattagtatgatattgtctactttgggtctagcctacacggatttatttttgagcatctttttaaatgacctgatactaatgaactttatgtgaaacacttatatttaagacaattcttatcttgatgtgtgggacttgggttgatgacccaataaaaatctataatgaaatatagttgttgaggacttatagatttatcatttataaggtgtatacatgtgtgtgtgtgtgagagagagagagagatattaaatcaaataggagtgattttgaacgttttggagaataattcacaaaagctgaaaaaaactagtaactactaactagtaccatattttcagctttatttttggggcatttttgaatgttggaatacttacaacaactttcataactcttaaatcacctatttaagttcatttacactcaatgaagagctcgtaataaccacgaggtataagatatgtgtgaattttacagtatgtgctcttaaacactataactagattcttaaggtaattatttcgacaactagctttctatatcaaccaaacacttaatagaaaatatatggcttgataattttcaaaactatttctatgagagttcttttaatgcttaaaagtaaagaaaataagtttttcagacaaatgtgtaaaacctgcttgttattttgatgattcttactaatcgacacactcaatgttgtaaatatgtgttctttattatacttttactttgtgttgtaacattctcttattcttctctatttctataagttatgtgcaacttttgttatagagttgtaatttatttaatctcttttgtttgtctttctaatcataaataatttacttttagtacaattgagttgtaagtcttggttttcaatttattttaataatagctctaacacatatgatgtaaagatttcttaaaaaaaaaacatatgatgaaaagatcataagcacattttattaaaagggtggaaattaaacacaaacctttattaaaaaaactaaaattaataggaaaaaacaatcacaattttataaaggtgatagaaaatatagaattgaatagagagtgatatagtaaatatggggaactacacaacggttgcatcggtcatctttgtagggagtttgaatgaataggagggagagattgcatgaacagccttgttgtcactcactcgaattattctgtaagcgccagagcccaacaacgttcctattactgggcccactatatacacccaaatccctttgtattgcccactcgctattgctgggcctagtgttcttgctgggttcattgatccacctgatatgggcctgcatgttgtaaaagcccatcccagtaaatttcaatttaaaatcaacaaattaattagaactcaattgtcctatactgttaaaatttatttgtactcgaatactaataaataaataaaattttggtactgtatttaattagttaagtattccctcgtgttattaattactattgatgttatatctatgtactagtaacatgggatatactaaaaattattttagtgaagataaaatttgtgactaattataaataataagttttatgttgggattaaaaaatctgtgactaattgtattaattaccaaaatcataatatattatgactaaatttattttttagtcataatatttgtcgtgattaaaattaaattagtgacaatttgtatataaacactatattttagtcacaagtaattttttattatgaataaagtcacatttagtcattaaaaaaaattatgttgtgactaaaatattgtcactaaaagta

SEQ ID NO: 59428 - DNA, 1361 bp, Cannabis sativa
cgtgtggactatgtggctttcagggatgtactagggtttgataccacttacatgaaaaatgaatacaataagcctctcactgttgtcattggcgtcaaccaccatttaaacacttgcatttttggtttgctctcctcctccacgagaagcttccatcctatccttggctacttaaaaaatttcttgaatgccatggacataagaagctaaatgttgtagttacggaccaagatgtgtcaatgaaagaaccctcatggaacacatgccagatgttacacaccgtctatgctcttggcatctcaaaacaaatgcttccaaataggttaaagatttgatctacttaaaaacttttaaggatacgatgtacaactactacgccgagcaagaatttgaagaaaaatggttagatgttattgataggcttcaactaacagataatgaattgtgcccaacaatatttgatacaagaaaatagtggtagaaacttatttaaggggctcattagacgcaggaatgagaacgacacaacgttgtgaatcgatcaactgcactctaaaaaagttttagagaagaattattggttgtatgaatttctgacaaccatagatatgatagtctcaaagctcagacacaataagactataaatgacttcaaaagcaaatgcactcaacctcacccacctaatcttacatgcttgaccacgtactataaccaatgagtgtaattctacacaagaaatatgtatcacaaggttgttgagcaacttgctttggagaataattattttgtattaggtcatgaggacaaaggagagttgcagatattcaatattagaaagttttagcatctgaaagtataatacgaagttcattactctgaaggtcaacgaacgctacagtgtagctgcatgctatatgaaagtcaaggttacccttgtagacatttatgggctagaatgaaaagattaaaaattagaagaattcttaatgctcttctcatgaagcgatggagcaaaaccgaagaaaaatctccacctgcattttcaccagccagcaccataacaacaacacatttattagatggctaggtttggatgcctcacttcactaacttataacttgactttctatgcagaaaaattatagaattcatataaccatgccaaggaagagattgagcagctaacactaatgttcaaggaagaatttgagttgagctccaatctaaaacgagagacgccataacctggaagatatcgtaacaaccttaatattattaaagacccagaagttgtgagaaccaagggtacgggaaatacaagggaaggaccaaacgaggagcaaatcccaagaaactcaag

SEQ ID NO: 59429 - DNA, 1023 bp, Cannabis sativa
cggtaccagtaccagaagagaagtacctcttcaagagggaacaggagctgacctacatcaaagcccaagctgccgccggaaggactcttcgtctggaggcgggtctaggtcgggtgccttctaggcctaaaccgctggccctagtccccaacacaggagctcctgacgccagtacgtccggctctggtaagttccctttaactattcatcatgtcccctctgtccgagagtatacccgatgtagacctatagaatttgatgagcacctttttacgtttaggatgccccccactcggtgggaggatcatgccaaagaattctatttttcccacttgggtcatttcttaggccgatcccggatgggctctggacctcctgcacccattcccttggatcatacagcctacttgtcctccagctgttttcttccctcggacagctttcttggggatgacgaagttagcactgtagttcaagactttgctagggctgagttagagagtcagggtaggactagctttatcgctttactgttgggtgcatgccatcttatagttattctaacactttttttatttctttgtagcagcagccaagccaatggaagatcttctggcgactctcgccgaggcctacagcctggactcttctctacctcctgctcctacccaactgatgacccctgggaggtcatcttccagtgccccttaggcacaatcgtcttgatagacgaggaaggggaggccgaggaggaggagggcgagattgtggcttcccttgaccgcaagcgaaagggtaagatggtcgaggtcgagtcttccaagaggcccaggaggagggacaccccggccgttagcttcaactcagggattcctcccgaagtggaagagtacaccgtgctgcatggcattactctcaccccggtccccgcagatgaagagaggcaactactccaaatcgccaaacacaactacgccctggacgagttcagccggggacatgctgaggtggaagccctgaaga

SEQ ID NO: 59430 - DNA, 865 bp, Cannabis sativa
  modified_base (307)..(327): a, c, t, g, unknown or other
catatgtgggccctacactaattatatttttgccatatttcttaaccatttatctattatttcacaaatgtcatattttctaattctaatactataagtgccaaaactatttatataataattataattaattatcaaataaaattgttatttatattatttattagttaaactccacaaagtctcttaattaacaaataaaccctaaaatcctatttcttcacaatcaagctataacttagtgaaaattcataaataaggcatagtctaattaaaaattagaattaattaattaaaatcaattaannnnnnnnnnnnnnnnnnnnngtctcaactagtatggggactatgagcctatataatcgagcttccaataagcagatctagaatttaccactatagatttggaatagcactctcaattatatagaacgctctatatgttctacattataggtacgctatgaattatccatttgttataatccttgaaagaacaatttagcctaattacttgattcagattgccgagtttcctaaggaatcaactatcaattgtaactttactattcaagaaacaagtaaatgatcaatcaataatgaagactgtaatttacaagcttcatctgcactgagagaaaatttcagctgactaggcttgagttccccgaaccagggtaataacatccactatattcaaagattcatgttacaaacacctgttcacaattaggtattgaatacaatctcatataaaatccagtaaaatattaccaacaccaacccagatccttggttgaatatataagatcccctctgcacaagttgttgggttttatgtcctaaataaaattcatttcaatat

SEQ ID NO: 59431 - DNA, 1145 bp, Cannabis sativa
  modified_base (1079)..(1098): a, c, t, g, unknown or other
aatatcaaaccatcgaattttgatgaataattaaatctcaaatttaaatttctatgtttaattaaactacgtaattaaaaaaaatatatcaaaaaatatatctttttacactatatcaaaaatataatcacacaaaaatatttaactcacgctctacttttttttttcttctttttcttgctaaaaaacttttttttttaaaaattttttattttaacgatggaacaatctcagtctatacgatataaaaatgagatattttttgaaatagatagaaatattaagtataaaaactcaaaattttctaattttatccattcatgtgtaatgcccattaagagttcacccttatatatatatgtttgaagagttttaaaatcttacttgcgtggagatgattgaagtattgttcattatattttatgcatttgaagtacactattatttaaactatcttgtatatatttgagttttgaatatcagagtatagtgtcaacaatttcagccatggactttcaaaaataagaccgagagggattaacttgagtgaagaacagaagcaaagcatccaacttgccagagctgtctataatgatgcagatatttatctccttataataacccctaaagtgctcatactgctgttattcttttcaatgtaagagagcagaatttttttttgtagagaaaccgatacaggttaaaataacaaaggtaacaaagttacgcaatcagaggaggactttcttccatctataacagttcattgtctatcctaagagcatgtagagataccccatgagaactagacaataaaatcataatatcagaaaagaaaacttcaaaactgagaatcgtcacttccgatccactagtagaacacctgcaaaataaagagaaaaaaattaatacataataaatatttaataaaaaaaagaaatttcccttacgagaaaataaaataaaatatgaaattttatataaatagttgttgggttttgtgctctaaataaaacccattttaaaaatatcagatttattagttaataaagaccagaaataacattttatgttgcatnnnnnnnnnnnnnnnnnnnntgattatatataatgtataaattcattaagtccagaacatatgtatt

SEQ ID NO: 59432 - DNA, 519 bp, Cannabis sativa
aacctatttcttgggatctctagtctataggttaggtttccattataagtgattcatcaatctaagggcaatagtgccattcctttcgatattttaaggactttctctcttgctaaaccttttgtcaaaggatcaggcaaattatcatcagtgcgtacatgatccactttaacagctcctgttaagagaaactctctaacagtgttgtgcttacgacgtatttatcgcctctttctgttgtaataacggttctgaacttttgcaatagccgcaatactattgcaatggattaacacggttggaataggtctttcccataaaggaatctcagctaccaggcttcttagccaacatgcttcttcactagcactagctaatgcaatcatttcagactccattgtagactgagccaaaatagtttatttcttaaacttccatgaaacagctccaccatctatgctaaaaatatagccactggttgccttggagtcatctgataaagtgttccaatcagcatca

SEQ ID NO: 59433 - DNA, 2640 bp, Cannabis sativa
aaatggcacaactcttttcgtgtcatttccaaactgatgtagaatattataaagaacattttatatttttagtcggtttcaaaatgacgcataaagctttttctgtcattttataactaacgcaaataatatactatttgcgtctacaatttatacgccagtttcagagagcgacgcaaaatctttatatgtcactttgtaagtgacgaaaatacttctttttatagcagtgtactacgtacaattctgttgtgtcaagttttaaattctgcattattaattctcgtttttttctttagcttattaaagaaaattattaacatttgcaagaacaatataataacactattcaaaacctataattttaataaaaatctttagcaaataatataatttcacatcgataaactataatacccccacatacaaagtttcatgtaggttttagtgtccctcgtattaccacgatgataataatgatactcaccaacataattagttgaggaaaattttcccttcaaaatcatgatgtctgccaaatttaacatttgaaaatttcttcctttctttttcattttttattttttgctagtactgaaaagtggcaaaaagctgggtaccatgcgcagtccttcaatatataagtgactatggctacagagtaggtaaccaaccacccgtttgatttttctttcacctctccagtcagttcacataaattttcatactaatttgaaaatgattaaaaacaatagtctttttcctttgaagttgtgatagtaaggcgtaagataagtttcgaacttattgccataagcattttcgattcttaattatgttgtaatgtatatagtcgactatccaaagagattattgttttaagaaataaaaattacaaactcttcattcattaaaaaagttaaataaacaaattaagttactttggatgtttattgttattatatattttttttaattatttttaaaatataaagcaaatcatcgtacaaagtgggtaaatgaaagtagaaaaaaaatcacaaaggacatcgttttatgattgctaaattggacttcctttcagaattaccgtgaggactgtagtatttagattatggtgaatcaacaataattctgtccttttaaaacttataagttctattagtactcgagtatgcaccaagtgttgccatataattgagcgatcaccgtacattttgagaacaatgagaagtgccaagttcaaatatcattctttagtgtccttttcagcaatttgttgtcacaaaaatcatttgttattagataaaaatattagtggtttgtaaattgtaagagcatctctagtgtgaacaatctttctaaaatttataataaaatataatattttattttctcattcttttacattatttttagtcaacaatacttaaatactaattaaccaactttaaaacttaccaccataacctcacacattattatttaaataaactttgatttttagcaattgttcatttcagatttagtttttttatttttattttttgttttttgaaaaagaaaggacagactatattgttgcccttgataaaaattttctccaatgcattagccactcataaaaacatttcatattgagcacctgtgctctttcatattttttataaaaaaaaaaaaaaaaaaagaaagaaaaattgtgattgactaaaaaacaaaagtggggttaattgaacaattattttcagttgactcattggagatgccctaatagtctaatatccctataaattgctatcaaacttcttgttattaaattaaaatatatattatttaatatcaaactatatcaatgaaaataaaaataggtcctaaaaatatcatttagcaattaaaataaaaataagtatacttcttttttcgaagtaaatattaaaatggatctcattaaagtgactagatatttgatactaatggtcaagttcactcttgacttgtacatatttccatgatcaaaactaccctaataaagttgctcattgtgacttatgaggtgtgctagcgtcattgcggactctttaatcatagattgcacttatatataaacttgctttagataaagagtcatgagcttcaactgaaaacctcaaagatatctcattttatcatttattctttcttagaattttttaacaccctttgaactatatataatggaagttgagaggactccagctactaaagaaagcaaatatgaggtaagtttcaccaagaaacatattgtgaaagcattaaatatttcctcattaccaaaatcaagcatcttaaccctttccaatttagatttactctctggtcgatttcccgtaacatacttctatttctatcaaaactcacttgggaataacattttctctataaacaaactcaaaagctctctagctattactcttgagcactattatcccttcgctggtcgaattgttcaaaatccatttactagtgagcctcaaatcatttgtgataattctggtgctcttattatagaagcagaagctaatattccattgaaaatgttggatttctacaatctaaatgagtctctagaaggaaaattagtttcaatcgttcctgacttcc

SEQ ID NO: 59434 - DNA, 919 bp, Cannabis sativa
tttttttttaatttcttttattttattacattttctttttattaatttttaactttctattttaactttagtcatataataataaaattggctctctattttaattttttagttaaaaaaaaaaatagagaggatcattggagatgctcattatttaagcaataaaatataaaaaaaataatgttgttggtatattttcaataaaataataataattatatttttttacatctttatattagagtataattgtaaataatgggctaaatataacacaaatttattttttatgtcaaatatagcacaaattttttatcttgcatttgagatgatctatgatgcaaaatttgcatcaaaataaatattatgcttatatatttattattatgtcattttaaacattttattattaaattttaattaaaatgctcttttacattatattgcaaaattactttttatgctaaatatagcttcacttttacatctctcatcaaaaatagttttatgtacgtgaaaatattactttttttctcttaaaagattgttaattagttaattaattattcttaaaagaaaatatcataaaattttattaaaaattactaaaagacactattcgtgcttagtaatttctttggtgttatactactattaatgtaattaagtatcgagtcctatataacttaaaaaaaataatttttaaaaaatatcaaatgccacttataaatacattggaattgaactagacaatatcgtatacattggaattgaacgagatttaattagctaaattacactatttttgttaagatagaaataaaaaataaaaccttattttttttttgaaagcaaaaaataaaaccttattaattacttataatttaagaaacatttgttagtttgccaatatcacatc

SEQ ID NO: 59435 - DNA, 898 bp, Cannabis sativa
ttttttttaaaaaaaaaatagagaacaaaagcaatttaccccgagagttctttttctttttcatacaaatgtaataacgtaaaattttacacaaaatgaaaggacacaaattgaaaatcttaaagagttaatgtacattcaaaaatttacatatatagtggactaaattgtaagaatattgcgcgtaatgcttgttactcgacaatacgtatttttcatcttcataatttcccttactaaattgttagatattgtaatagctgttactttaatataaaatgtcatattttcattaaaaaaaaaaattgtaagaatatattcattgttcaaaaaaaaattgtaaaaatatctataaattaagtttcaattttattttttacttttttttttaaaaaaatcaggtagaggtagctacccccttgtcccatgtataggttgacactaaaggtaagtattactataaaaaataaaatttttgtcagtatattttttatgttggcgaaagctaggtattgcactgataaaatagaatctactttctgccagtacatttttccgctggtaaaagagattggcaaattcgcattggtattagaacttttgccaacacaaaacaaaaagtacaggcaaaaataacttatcctagcacataaatgcactgaaaaaagttagactttttccaacacattattacactggcaaaagtcttttactagcacattaacgcattgggaaaaatctaacgcgttgggaacaatcttacttttaccagcgtattaatggcagaaaaatctgtattttaaaccagctataggcgatggttttaaaccgtcgggaatgtaaaaaaaaaagagaaaaaatacagatttttctactattaatggcagaaaaatctgta

SEQ ID NO: 59436 - DNA, 928 bp, Cannabis sativa
atagttcagggggcatttttaacggccttaaaagttcagcgggcatgatttggtacatgtcaaagttcagggagcaaaaatcctaattagcctaataattaatataaaaaattgtaaaccactcactacatgctacgtactagggtgtttatccaatttaatctgtattattttgctcatagtgcatttgatccgcattaagtgcaaatttcatattttagatcaaatctaatatgcataatagtttaaatccaatcaaatctaatccacaaaaatacagatgggatcggttattttggattgattactttttaatattaacttatttaatattatgaagaaaatatatttttatcactagtaacaaaataaaaaaaaattattattttatgtctccaaataaaataaattcaaataaaaagaaaaaaatgtatatataaaaaaatatttaatgtttaattgtatatataatctttttcttttatatatataaatatgtgtagattggattggattggatcatttacttttacaagttaatcaacattcaatctgcacaaagtgtagattttaaattttctaatccgatccaatatctgcacaagtgcggatatccacactttgcgaatttgattggattggatcgattattttataaacactttttctactattattatttttaataaaataataatatatactatttttttttttgtttattatcacattctaaaaaatacatatataagcaaatatattttttacattaaagtaaaaatgaaacaaaaatgttaaaatttttaataattacattattatggatattgcatggttattttgattgatttacaatcacaaacaatttttttaagaaatataacaacgtatttaagatgtaatacaaatttatctatttaaaaaaaaa

SEQ ID NO: 59437 - DNA, 1137 bp, Cannabis sativa
aagaaactaggttcccaacctataagtgactcaaaccacatgccttacaacatttgaactacctctccctcttggatgtagcatgtgatgacttgctatccaaattatttaaatgtaaaatgtcttcattacagtaagtctcttcagaaaagcaaataccataaatatatgaaacgatgacaaattttcacaaaaactaacctttgctaaatcacggcttaatttctttgtagtcattgccaatgaatcccgttccttagagagtctcatctgcataaaaaacattacatataagcaaagctgctccaagttcttaacattcattacaaaaaatatcttatctttatcaaaggcaatcaaagaacaatgcttttatgtataatgtgcataaattgaagtcccaaatatcttcgaattccaaacaatgtagtatcaaagcacagaaaattttccaaaactaacttcacgaattcctttgagaaaggaaaaaaaaaaaaaacctttaccaattccagttcaaaacttatcctcccaaaattcaaaatcaaccaaaccctaaacccctccccaatttgtattcttcccctttttaaatttcaatctcgaattacacacgaaccaaattcaaaatactaaaccctacctagctaaatctcctcatttctcctctcagaaaatccaataaaaccctaaatatatcaagactcatgtcgtaaggcatcgaattgaagaaggaaaaaaaaaacaaatctttatcttacattgtcatcgagggcagccttcaaacgcaaatcagcatcattttggttgagttggatacgagaaagcttatcctcgaggtcaaaaatgattttatccttctcgtaaagcttctgcttcatcctccccacatcggtctcaagtttcgatactctcgaagctatagccatggaggtaatcttccgagccagatccagctggtcataaggatccgtgggtatcaccgccaatatctcgtccgatagatgaaaatccggtccaccaccgccaccgccgttactacttccactgctctgcgacattattcccttgtctctctcttcccctttctctctctaaatatatatatataaaaatataatatagatcggaagagcg

SEQ ID NO: 59438 - DNA, 1172 bp, Cannabis sativa
  modified_base (29)..(39): a, c, t, g, unknown or other
tttgccacaaaaaaaaaagataagggggnnnnnnnnnnnaaaattaaaacataagggggtttcgccgcaaattgctctatattataataatatacacgagtgattttacaatgcactctttaaaagagatttagcgatgcacctctatctattcaatatttgagagaatcttttaatttaatttttttatgggtatttacgttctacttttttaagatatcatgtaaaattttgatagattcgaaaaaatttaacatgtcgaaaataaagttcaaacaatctgttacagcgagaattttttcatttgtacgcgtgtgaaataaactatttgaatattattttcggcatattaaatattttttttatttttttaaaattttacagattatcctaaataattaataactataatataaacggttataaaaaaaaattaaaaaattcactcaaatactaaaatagataaatatgcattagtgaagatggtgatttttctataatatttagcttttttcttctttagataatatatataaattaacctatgcatgtgttcaaaatttatcttgtaaagtttttggttgagatagttgataaaaataataaaaaattaattatgaatcagaatttcaaatatatataaaataaaatgaacaattaggctgatgcatacagctgtttttaaagataatattaaaataaaacttgcataaatatccattctaatttttgagaatttttaaaggatttatggtttttaacatgtttatgtggtataatatcatcaaaaattattaactaattatatgactccattttattgtgatgttagtgttctatatttgtcatttctattattaagagtaaatattattatgtgtggtagaataaataaataaaaaagataaatattattttaaattttgtgttttacaaaatttattttattttgttaaatgataattcaaatattatatttttcaaaatagtataaaataaaattaaagcttaatttttgttaaattaaaacttaataacttgatttggagatgttacgacaagaacgattatatttttatatttgttcatgttagaatctggtttcaggttgtttaaatttaaaaaaaaaatgacgaaaaattgagtttaatatctattttgtactattttaa

SEQ ID NO: 59439 - DNA, 1483 bp, Cannabis sativa
aacgaactgaaacattacataaccaatatcgatatcatcaagttccaatgcttctaataccttctcaaagcgattctactgctaagtcaaaagttgttatgtcttatgataaacgattttgtagctcttcaaaaggttgggtgattactgtaaataaagattggacagtaacactatataaaccttattaattctatgcttcaagggaataataataatactggagatcataccttcattattcaatatcataccttattagacctgaaaatataaataaccgtgacctaacttggactaaaatacagcctacaaactattttaatttaaatgatagtctgttttataatgagttattttatgctgtcacagtccatggcacattgatatgatcttttaaccttagagactcttgtgtcaactcaaccataaaagaacttggtcataggatttcaaatatccaacatttaactagtaagagatattttatatagattgagattgttcctttagttgaaaaaaaaaaaataataaaataaattctttactaaaaaaaaataaataagatgagtttgacttaaatattttttatataatataaaaagagataattttttatatttttttttattaagtaattaaattaaatataaaaatttaaatttttctactattatttgtcattggatcaaaatggtaacacccaagaaatgttccatatatagatacattaaccaaataatgacttaggaccaaaaaattaaatatattaacaaagtaacagatgtactaacttatcataaattgtttgatttacgattaaataaaggggaatcaaaagatggaactatagtttgtaaaatattacttagaattataataaactatcaattattctcccacatcaacaacatcaaaaactactactactacaacctatataacatcattcatcttctactaggactactattacttatcatatatttttacgtgtacactacaacatatcctccagaggtttgaaagtttttccgcattgtgaacattttgttttgctctgcattttaaattgagaactggtcacaagaagaaaatatataaataattgagaaatgaactaaaaaagtgattaatatatataataaaacgaaaatgagcaaaaagacatatctagaggtttcgatgtaggaaaaatactaccattgacattctagaacacatgaaacacatgatatgcatttcacttaaatttatgcaatttttttagtgtataattgtcctttgacaaagtcaataaacatataaatgtgatttttttttttaatacaatttccttttatgagagtaattattatatacaatttcctcctattttttttttgagctgaaaatgcattttatattaaatgaacagtcataatacaaaagcatttaacgggggaggcatttcctccaaccaagaacaaatagagtccaccga

SEQ ID NO: 59440 - DNA, 697 bp, Cannabis sativa
agggcgcataaaacctaaaacagtatagtggggttgtaccctagtatggaacattcttacccatctaataagccttgtaaataggtgtatgggtacctagatacaagtcaacattatatgatatgttatatgcttttcttattgagtttttcgactcacagttctactttcatgtgtaggtaaaggaaaagtaaaagttgaacatgagtgagcttgagctgggattagattgtatatgtcatggcagcgcgatcgggaatgttcggtctcgggacatctagagtttccattttgtagtcactttgtgacctgagtattgtattttgtatattttgtaagaagtttagaaaatggatcccgacacttgtaaatgttttgctatagtttataaagtattattatcaatgcaaaagttttaatttgacacgattttcaaaaaagttctttgattagcaaagatagtactgcaattgaaaaatactgtagcatgccttagcattagggcattataattttggtatcagaaccaccaggtttgtctaccgaaactcgccaagacatgtacaatcttcatcagagaaggctcgactcacggtctagtaagcctatacttatttagtattatatgtgattatcaaagcatgttaggaagaatattagattatagttatctattttaaatgcgttgctttaaaat

SEQ ID NO: 59441 - DNA, 942 bp, Cannabis sativa
  modified_base (44)..(50): a, c, t, g, unknown or other
agtggaaggagacatattattccgatgcacccaatgtaaggttnnnnnnnctttatatgtgtttatttatagtcgttttcgaagtttgtatttaggatgttaaacaacatactttggagtagatctaagatctttgtaaaataattctaacatgacgaacttagagagcttccccttaataaaatagacctgacgaaggttgtcaagattggaacaaacttgatggaggtttagagcgagatgctcataacttgcctcaggagaaatcaagatattttgcctggtcgcatgaggacattattgggatcgacccccaggtcatctttcatgcctcaacatagacaaagtaaacttccgacctgtacaatagaaacatcaacttcttaacaaagagcgctccaaagctctcaaggaagaagttaagagactacaggagaaaaacttcattagggaagctttctactcgattttggtatccaaccttgttctggtacctaagccgaaaggtaagttgggaacctgcgttgacttcactgacctaaataaagcatgccctaaagattatttccctctaccacaaatagatcaactggtggacgcaatagccagccatgaactcatcacattcatggatgcctattccggctacaaccaaatcagcatgcacgcaccaggcgaagagcatactggtttttgaaccgacatcaggctttattgcaacaaagtaatgcccttcagactcaagaatgtaggtgctacatattagagactagtcaaccgtatgtttcatgacttaataggaaacaatatggaagtctatgtcgacgacatggtggttaagtcaaagaaatttgaagaccacatcaaagacttagaggtagggttgtacgtcggtcggtttgggcggtttatcctatatattttctaacccaatctaaagtt

SEQ ID NO: 59442 - DNA, 1352 bp, Cannabis sativa
aagcaagagtggggtgggtttttgtgaggggtaaatggctccttttatgggccttaggagggagagagtctgtctagatgactgccatgtgttttaatccaatggccaataatacaatttgcatgtgtctgtttaccttctcaaatttggtatttttttcttcaaatttggtatttttttttcttcttctcaagttgtcgtaatattgtaacattttttttactgagttaatatatataatgattaggtcgttatatggcattgtattttaggatacattctcatgaagagtctaagacacgtggaagacatgtgctgcttctttttttcttcttttttatgctttgtaggtatcgttcaagaattatccttttttatgtgtgttattcttaatactatatatatatatattgttttattatgtatagtgctgtaatttaatctccttttctaaattatggttgttaattatggctgtatattagcactaaacatcaatgctctaactctaaagtgttcatgttgggatacgttgagaaatcaatttagtttttcaattttatcacttaaagaaagataattattcaggctatttattcgttcaaattcaaccttaaatgttacaattaaattacccaataaaagtctatatagctagcctatatatatatatgtataatcaacttattaatttggtctgtattttgtgtgaatttgcaatctttatggttcaagttgtcacttaagagaagcaaaactatgtagaactatatgtctacacacatagtttagtaatttgttgtttgggcacggcccactgattgaaataaaatttgtgttctaattgaccacatgtccaatacttgaataaattttatcaatttaaagagttataaaaaagtaaaaattagtgtaagaactccctttaattgttacataatgttttctttatcataaacaaatgtttctttctttttttattctcagttcttacactctaaaagcatattatattttggttttgcatatatactatactatattaaaaagaaaattaagaagtagctaaaattatatttgttccgtaaatgagggtaagaatgtaacttcacaattattatttttttgattaatttattaatttgggttgaatttcttaacagggttgtaaccatatcttttgtttgtatggtaatagggttaaaaccttgaatggctttgtctgaaatatgactcacgacccttttgagcaattatagcactgcagttactttgtaacagtcatttcaaaactctctaaaattgtcatttttaaataaatgactcagtttaattacaattaaaatcattcc

SEQ ID NO: 59443 - DNA, 1249 bp, Cannabis sativa
gttgtagtatggcacaacttttgtatccaaaatgtaaattattttgtcctctacttgaagaacaaaataatttaaattttgttgactaatatatcttttgtttaaaagacttttgtagtctaccattaagtaccttgaatgaaagaactctttgttattatgttcattgctaagtatttgttctttttacttattaaagtctactattaaatcttcctttttatttaaaaagaactcttattattatactgtcattttctaatttctaattatgtataatttattttttatttttaatcttctttccatgttgttttaatatattttaatttaaaataatatataattctaaaaattctaatttcttaaaactttaaaaattgtatatcacataatcttataatatattatcgtataatataaatgttaattctaattttttttcttaaacacattcataatacaaatgattgaccattaactttatattaatacatttaaaattaaaaaagaaacttaaaattaaaataaaactaaaaaaaatctgaaatgatacagaatatacgtgcaacgcacgtccaaaaactagttttttttaaaaaaaattattctatttatagtcatactattatacttatctctacataatactattaattttcattagtctcgacttctatctctctatttttttttattttcataatcataaatttcattattttttatcattcacttttgtccagtctaattattttttatcaatcactcttccatctctttctctcacttctacctattattttttttttcaaaatttcataacactttaattttatatggagaattattttctcacatctatatcatttttattttcagtacaatcaaattttggtttttatttacacatatcatattaacaattaatgatattttaatgctccattttttttttgaataaaaaagattatatcattgataattaactagcatccgcaattacaatattacacaaagaagaaggagcattatactccaagtaaattcgatctgacgaaaaacaagaccccctagcaatattgtgggcaaccttatttgcagaacgattaacaaaagaaacttgaacattatttaaagaagataaaattaaacgacaatcctccaccaacaccaaattgagatggcatatgaataggactttgaattgatggcatatgttttaatgctccattagtttgtgttgata

SEQ ID NO: 59444 - DNA, 629 bp, Cannabis sativa
agcccttctcttgtggcaggtcagatccctgtaaacgacttcttttatattgttgttgtttgatttgggagctacatgttcatacatagttatgtgaataattaatcttttttgggtaaggccttgtgatattttagaaatagggtttggaaccctaatgcctagtggggcgttggttatctctaataggcgctttaggtctatgctgattaggatcgaagataggaagttgagcgctgacttcataaaattggaattaactgagtttgacattatactgggaatggattttctgttcaagtgttcgaccagtgtagattttaagcagaaaatggtgacttttcagtcgaaggtgaagatccatttgtttgggatggatcagttcaggggtcttggatctcggttatctttgtaataaaggctagagatttactatgcagtgactgtgtagaatttctagcaatggtaattgatttcagcagacctgaaaaagtagggcccgtggtagtcagagcggtgaaagattttcttgttgtgtttttcgaaaagttgccggggattgccgcgccgccacaacaagaaattaattttgtaattgatatggcacctggagtcgaacctgtttctaa

SEQ ID NO: 59445 - DNA, 1668 bp, Cannabis sativa
ttaacatgttattttcttattaattgaatgtgtaacatataggccatatctcttcattttaaaggatatcaacctacaatctcttgtatgctctctcctatataatgagcactaaacaaaacttaaaataattaagtcttaagctctgaagttgtatgatctaagttctagactcttaagttctgaaaccctagctctccctctcttttacatgccaagagactaagtctccctcatctcatctacttgagattttcctcttattttcactattgtagtcttaagagaaccactcttaaatccacaatagttgtgatctaagtggtgttatctctaatatcaatataaaagagagtaggttattacccgctaactaaaggggttgaacctctataaaaaaaatgtgtcctttttgtttgcttattctaattgtgtacacgtggtgatttcaatcataaatacgactccgctatcagttggccaaatttgaggtcaacaataacaaaatcaacatttaaccaaatttgtaggaataaatgtaacaaaaatataatgtatagtatttaatttgttgaaaaaaaatttatgggatataattggataaaataaaaaacataaaatatttatactgctaatatctatatgtatacaacaagattgattaagaggaacttaaagtatatataaatatatttacattaaatatattacaattaatttcaactgcatatattatatttatttaacaaagtttcactgtttgtggtcgatatacattagtaatgactaacactaacgaataaataaatcaaattaggtttactaataattttttagacacaatataattgtgttttaattaaatatgtgactaaaatatagtatttagatacaagttgttattaattgtatttttgttaaaacatgcattgtgacgaaaaatacatctagtcacaacaaattgtgatttttgtgacaaatatatctttagccacaaatattataataataatataagaataataatttataattagtcacaaataatttagtttttagtcacaaattttattgtgactaaaagtaaaaaatattatgatgaaatttatgataaattaaacaattcgtacaaaaaaaaaacattaaagataaagtaattaagggaaatttagaccacatacaatctttttttaaattatacatttatactttgagaaggaaattttatatttataccttccctatttaatttttttcttttttgtttttttttttacttattaaatcttaaaaaaaaatttctttcttcagtatattttgtttagtcagctctggctgactttttttttttctctctatttcttttttttaatgtttttattttagttctctctctctctctctctctctctcttttaattttgttcttcaaacaattttttttatcttcgtatatttatatatattgttgacctcactcttagccaacgacattgagtctattttagtaagtgacaagtagtttataacgattgaaacatagtaagcaatgtaaagacgtaattttatacaggttcagccccgcgcagttcggtaatagtctaatcctcgttatttgtattaactcaagaacaaggaaaaaggatccttttcttatagctcttacaa

SEQ ID NO: 59446 - DNA, 772 bp, Cannabis sativa
atgatcgaatttccatacgactctgcaaactccttccaatatggcattattaaaaagtactgtgctaccaagaacacaaaggctcttttctttcttactttaaaattttgtcaaagcattaaaaaatgtgagatacggaaacggatttgatacaaagtagtcagtataaaattttagcaaacaaccaaaattacctttctaaaaatatttttactttcttcccttcgagattcagacgtaggcaagaagaacatgccaacggcatattcccccagtggaggaagctcaaaaccaacatccttggcaacctgagaataatcaaacgattagaagcaagcacaaaaggccagaaagtagttactgagcacaaataattatatacgataaccaaggtaaactaagtatgttgtactcataaaacaaaccttgacaatattatgaaaaaacactttcatcaggataattccaaaaaaaatgtaactgttatagtgagtatattaaatcagaattttcttttctgtagaatatattgtatatgtaaataacaataaatacgaagaaagaataacattttatgtgtaaatatacacaaaggtttactaaaactgattaaacgacggaaatgattagttatttactaataaaatatataaataaaaatgccaaagaaaaataatttatttaaatgatggaaaaatacctccttgaagaaatcgtgagggaggtctacaagaattccagctccatcgccagtattagtttcacaaccaca

SEQ ID NO: 59447 - DNA, 1417 bp, Cannabis sativa
ctctatttttttcttttttttttggacgggacaatctaaaatcctttaaagaagcccaagagagtgagtcgagtgaccaaggaggcggctttagaagacaatagagcgtagagggttctctaatggagtttctttccggtgttttaaggactgaagctcagtttcagttgatttattagcttgaattttctcttggattggactaaacgcaacttgaacccaagtgggtcttcttcgtttttttgttttcatccaaattcaacgatctttgtgctcttgcaatatttttcttcgtcttgatcttatcgttttcttctttttgtgacatgggtttttcttcttcttattttcttgctctttcaaggttctctgctactactgagtttattgatcacgatgggtggattagaagagaatatatatcaggacactacaaacccctcattttttcaaggtataatcttaaacacaattttctgtataccagtcatggagttatatgtggttgagacattttaaacacagatctaaagcttattttatgctctgtattttctttgatattttaaagaaggttcaagaattgggggtgctaagtttgctaaggagatgggaaacaatcagagaagggcattgagtagtatcaatcctaacatttttggggcaactcataatccttatgtcatcaacaaaagggatttttctgggtaatgtcaaaactcttgtgtctgatctatcttcactttatgcattattttttctacagaactctaaatataattcataaaagttacaaggtcggtatctaattttgccttgttctttgtttcacgcttggtgtttggcgtttgtataggaagctactaccagctcatgtcgttcagcattgctctgaagtaatttccatctcatttctttgtgttgccttaaaattttatgattaagagtgttaaaaaattgactttgtctgatggaatctttgatgatctgcaggtttgtaatcgtcaaactcagaatctaaacttattggcagtaaagtctagtggcatagaggactgtcagattgtagaagtggaggactttgaggataacaaggatgtcccagtaccaatgtttgtgaagcacacagaagctcttctagatgaatttgatcaggtggtaagtattgtgtatagtaattcctggattagcaaattgtatcaactataattattgctgtttggaaaaatgactgtggatgtactgcatataaatactgtaggaggaagttgaaatggaagatgtggaagatgaagaagaagatgtggaagaggaacctgtcatggatatcgacagcagcaatttgaaagatccactttcagttgttgagtatgtaaatgaaatttatgtccactataggaaaactgaggtaatttgc

SEQ ID NO: 59448 - DNA, 1609 bp, Cannabis sativa
aaaaaggttaaaaaacagtatatatggggtaattccccttaaaaatatttaatgataaatattaattttagaaatattaaactatatatattaaattttgatcaaataacgaataataaaaaaaaaaattagagtttctatgtttaatttaattaagaaaaatataaaaaaaaaatacacattatatcaaaaatatatttatataaataaaatttaagtcacactcaatttcttttttatttttgctaaataacttttttttttaattattttttttaatcaatagaacaacctaactcatgcattgttatgaaactaactatagtatatattattggtataaagtgttggaaaagatacaaaaaacatattaatatggccatttggtcagcacttggatatataaaaaatcttcatatgatgatcatgattcatttctgaaaaaataaaaaatcatttcaatacagagatatgaatatgataattacgagtaataattaagttttatatatatatatatatatatccatttttcttttaaataaatacataaatatatgtatatatatatttaaatataatggccattttcaagatcttcatgatcatatatatatatatatatatatatatattctttatttgaatggctaatatatgttcaaatactgttagtttttcccaataatcgatcgagctatattcaaattatttcatcatgaagtgaactacgtacgttttagtgggatataatgaaattagaatgatttatgaaaattattttaattttaaaaatagtttcttaaaaattgtttgagaagaagctagaaatcttaattaagattaatagaaatttagtggataagaatagacctcaaatcatgtcactctcatttatgtctccaaagagttattgattcaaaataagcattttatcaaaaatattatttttacttcatattctataaattataaaagataaataagtcagaaacatataactaaccaacatatattaagttcttatataataataaattaattaaataagatattaaaaattgaaattgatttgtagaattttatattaaaaaatatttattataatgtaggcaataatttaaatacaattatatacaaataaatctttagaaaattatatgaaaactatatataccgaggtcggttatagggtgggtatcaccctccaccccgccctaaacccacttcgagtataaaaatttgcccccaccctaccccattacccaccaaagtgggattaccctgcctcattcaaggtgggtacccgttcttgcaagtcaaatttttgtctctaatcctaacttctccgaaaaaatactattcttatttttatgtaaaactcttagaaaagctttttttaattctaaaaatagtatttatatatgagtgtacttttaatgagtattacctatgaatgaataatattagaaagttttgaatttttatgattaaatttttctgtttaattagaataaatctctcatttttacattataaggcctgagattgttccatcagctgaaaaaaatacaaaaaaaaaaatttggtaaaaaaatgataaaaaaaa

SEQ ID NO: 59449 - DNA, 1335 bp, Cannabis sativa
  modified_base (843)..(850): a, c, t, g, unknown or other
taatcctactgatgttgcgactaagatcttaaactaaaacaagttcaagcactgcttgaacttgatcaatctcagaagttagtataatgagattcctagaacaccaaccatgacggttgcattctttcttcatcatcatcatttttttaatttgaagtaactaggtggaatttgtggtatagttcctccaaatgaaaaagtctccacaaatattatttttggaaagttgttcactcacggaagccagtcccaaaaggaatcttaggaatgttagttgagtctagaagggagattccggatatttgggtccagtctccaggatagctagcctcactccaggatggagttctagtttgctagttatccctcctagaatagtagttttcgatagtcaactccaccaggctcaatcctatccaaaagcgtcttcagcgagtgtccttagtccgtgagttcgaaagctcatatatgttcccggaggctctaatacttaagctaacgtggatacttcgctcaaagaagagctagttaagttagttatgtctaactaacttaacaacctcattgcttctagccaccgactttaagatcttgatcctaagcctataaataccacattgccttgttatttcaagggacgagattgtgaactaagttcacattaagattgagagtttgagaaagagaagtttgagaggtagagagagaggtgcatagaaaagagagagattgggtttgggtttgtaagaagaatcttctgttaatgaagaagattctggggtgtaagtgtgagagttgaacacttagtgagaactcaacaaagaatctcgtctcgactgtatnnnnnnnnttcttgctcaatcaataaagaagtatttcagtggtattctagaactggagtagagccatagatcacatagatctattggacttgaaccaatatatatcttggtgtcaatttctttatttttctacatttattatttgtagatttatatactctatttacctttgttttcattcgatttttgttttcgatttgataattttgtcattgctaatcgtttgattgtttaaaatttagtttatttgattctgcactattagtagtaatttttctacattaataattttatattaaattatttttaatatgtttttaaagttaaatgtatgaacaacatactattaaaaataaaatgaatttagttaaaaattaatagcaaattgaacctagctactcaattttatagaagacttccagttatgaaaattatataaaaaattaataaaattaaaaaaaaataagagcaaagaaaataaaaaaaaaaataa

SEQ ID NO: 59450 - DNA, 1334 bp, Cannabis sativa
tgaatatttatttataaatactaacatttttatatcacgcactctataaataaattaatataatattatagttttacatattttaatagttttaattataaaattacaatattcagtattatattaaaattttattatcattttaatttatttatattgacaaatacatatatattattaactataggatttttctaatgtttcgtggcgtgtttttcaagtttgttatgtgtagtattttttaagctaatctatttgtagttacgtatagtgtcttttgtacttctcgtgtaatatcgtgttttattatatattttctgtactatgtcatagtaatttacaacatcgtatcgtgtcgtatctaaactcatattttttaaatttttaattgtgctcatacctttttgaactagtgtgtgttaaaaaaacttaatgggtgtatttagtacactaattggaagtggtattagacataaatttgaagtagtatgtaaggattgatagaattggaaaaagagataaataatttttgtatgtgtcagccaaagatagctccatggggaacctttcactgcaaatttctgaagattccgtactccttcttaacctaaactctgttttcccctaccacttttttattattattatttgtgtatatacatatatatatatacgtgttcattttgtccatacgtgtgattttgcatgtatatctacgttatattattattatttaataaatttataccaaaaaatataaatatacatcatctaaataaaaataaataaaatattaattacactctgttttccaaataataaatttatatctttactaatattgacagcgtattaattatcaatttaaaatatatgtattaaatactcaaccacatttattgtaaagagaagaaaaaaaaatctcaatctcatttctaatttttcttttgggattattttacaaatataaaaaaaaaaattacaaaaatacaattgtataaaattttaaacatatttttccgattttcataattttatttacaaaaatatatagtctttctatgtcatagtaattaagacgtaattatagtaatttctactatttgatatattttagatataatttttcttttaaaatggcagaagttttagcgtttaaaataatgtaattcaaagttaaagtcgtttgttgaatttttagaatgtactttttgaatctgattatttaaagggtaatttgcggtcaaactccttatatttttatatttgctaattgttatacggtttaaccccttactcaaaaattatggctatactttttggaatcgacaatc

SEQ ID NO: 59451 - DNA, 796 bp, Cannabis sativa
aggagtagccataacatcgcttttcctcttctgaggaatgacaggtgatgtcgttcctgttccaatctttggttggcttgcggttaaggactagtgcggacttcaggaaagtcatctcagcgaggtcaagaaaagataagtacagataataataaattttaatgcagtagtttataaatgcgatatgttacctgatgttggccgagaagtctgcttggaaaggcgtttgtctatccgttctttttgcttctcaaacggttccttgtacactggctccctttgaaggctcacgttcttcggaatcagcttatcttcgcgcagctttaaggtcgtgcaagtagtcgccagtcacgatcttgaacagggaggatcccgagaatttcagcagtttgtctacgggttgcgtctagtgcaggtcgagccggtctatctgcgagaataaagaaaatcgggttagttcaaaattacaaggtgacatgaaaattaactaagtaaagaaatatgcaacgtactgggtcgacgattaaaatcagtcctaatccctggtactttaaacacgtaaaaccatttagatttccaatcccctatattggaaaccatgccttccaccccattgatctcagaagtggcacttgctgaaacagtagaagccattgtggacacccacgttttttatgtcacaaaaataactaaactatgcacatactccatatacatcgcataaaaacctaaagctatgcgatagctatttggggttagttggaaaggggacacgtcataccgcttaagaatagcg

SEQ ID NO: 59452 - DNA, 635 bp, Cannabis sativa
aaaaagcatcactgtgttaatgtagtaataataggaccggaccattctttttgagatcatcctcagaattttacaagtcctccacagcactacaaatagaattgattttattggcactctttgttaaatacaaaatgacacactaacaaggaaaaatagaaaaaataatttctccaccttatactttattattcattagttttatcatttaatcattaaattacatttttctacatccatattttgttcgccaatgcttacatttgcatatttttaagttgcttacatttttaataattttgagttctaaaaataaagacttgatgttatgttgtaggttaagaaataacattttaccgtttaaatttataaagatgttttgttatatacattattatatttgtaaataaataaataattaattaaaaagaggagagagaaaaaagagtgccaagaactgtcagtttaaaaaatacgaaaataactcaatctttcaaaagctgttataacaatatttacataaccaacaagtagggatttgaatataaagccttcacgagcgactgtgcttttctcttttattgaaaaataataacaaaatagaatagtgattgtccccaaaaagtaaatgcagg

SEQ ID NO: 59453 - DNA, 1220 bp, Cannabis sativa
taatcaaatagtaaattacaattgaatattaaaacatattaaagataaatatgcgttcggaacctaatttcaaaataacaaattcatgataaactattaccaaaaactgaataaaaattaaagcattaaaaccagttttaataaaaacttagttcatactttctttggacttcttccaatcttttgcatcttaatattcttagcaatatcaaatttctttctaagctctagctaattagaatcagagactgtttccacctgttaaaaaataaattgaaagtcaaaaataaaatctaaatgatatagcaaacatgataacaaacataattaatcaatttttaaaaaataaaaccagtttccagactcttaaataataaaaaaatgaacaaaaaataaaactagtttcatcaataatataaaaaaaatatacaatgcgaaaagttataacctaaaaataatacaaacttttaaaaccagtttcatcatcatttaaataaactaaaattttcattaaaaatgcaaaataaaaaccagtttcatcaacaacataatgaaaaaaaatacaatgcacaaaaagtataatgtaatacgataccaactttaaaaaccagtttcatcaaaattaaaagaaactaatcatttcattaaaagcaacagaaaaaaaacctatttcatcaataatataatgaaaaaatataatacaaaaaattataacctaaaaacaatagaaacctttaaaaccaatttcatcaatattcaaataaactaaatatttcattaaaagaggcataataaaaactagtttcatcaacaacataatgaaaaaaatataatgcacaaaagtataatgtaaaaacgataccaactttaaaaaccaagtttcaaaaaaaaaaaaatcatttcattaaaagcagaaaaaaatactcgtttcatcaacatcatattttaaaaaaatataagataaaaaattataatataaaaataatacaaaccccaaaaaccaatttgatcaacattataaaagaaactaataattttattaaaggaaacgacaaaaaaaatcatcaacaatataataaaaaaattataagaagaaatacttataagaattcttaacaaatgaatcagacaactaattaaaaatctaacataaagaaaccaattttataaaataaacaaattaaagactaacacatgataacctctatcatcaccatcat

SEQ ID NO: 59454 - DNA, 1347 bp, Cannabis sativa
ggggatgtggcgaacccctcattcctcagagtaattcttcagtgcctcatagttttggaacttaatgggatttggtccatctcccactgggaataattgtatatttcctccacggcaacctccttgggttgctccacgtctaaaaccatttcatgggctacatttttgactggctcatccattagctccactacttcgagattgatgacgtccaacatgatggtatagctaaaaagaaagaaaaaaaaatgacaaccaagtagttaaatacccacactaagaggaataacaggggtacaggaaaccttccctaaaattgcttggagaggtctctgccagacccgttgtccaaaagcaaagcccttgcagaacttcgccctaggacgatcagattgagaactcaatagtgaattatagattcgaagaaattttgtctataaccataagagccccagatagaggaaattggagattaagattgtttaaaggtgccttgaactcgctcaatgcaaataatgaattacgagcaaaattcacagatcctaatctcgactataggcgacattcataccaagataaacccacatgcaaataatcacctaaaccctcaacagagaagaggcctatcctgcccaaaatctaaccaagcatttcaatgcaaaagaaatcaatagttcaaaggggagaaggatacttactcaaggaaggagttgtgggagtggcaagatttgcggcggtataatcgtagtaggatctctgacacgatgatgaagtctagcctgaaattcatacgaccacacaagtagtttgtcaatctttaattgaatattcagtagcctcgatggatttagacggttcattgtcaagtctattagtaatgctcctggtttttctctcgctcgaactcaaagagaagactaaggcaatcgtcgaaaggattggacattcactaggggaaaagtttgagtttttctctcttgaaaaatttaaactcaaactgcaaaataagcctatttataagtggtgaaattttttttcttcaccctatttataagtgagagattttcatccgtttactttcacgatcaacggctcaaatggtgtctcaaaaaacacaaaagtgatctaacggctggagagcgaaagggtcatcatttaatgcatataattggtactaattcgtttctaatcataacgttcaccttgatgccagtgctaacataaattaattgtcagcacattaccccaagcgccacacacttttccaatgctcatgaagttcacggaccaagaagtcaatgtcgcgtgtactacgtcagctataacccaaaagtccctagtcatcca

SEQ ID NO: 59455 - DNA, 1112 bp, Cannabis sativa
ttctttatttagtttttattttaattgtacttttaatgtaatgattaatgttttttatcttttgttttacagtttaagtcagacgctccttacagtaatgaggagagatcaatgaaatacgggatgagtgggccgaatttgtgaagcctttgattatagattaagtacaaagttactactcttgttataatacatgagtagcaagttttttatgatcgttgttaacttttgcattatgtaattagttaatagaatcgattactaattttatataagttctataaaattattctaaaatttgataatacatcctctgatagtagttcactcgccaatatccaatgcatactcctttcgacaaggactaagttttggtgcacttgggggtgaggttcgcaaactaaccgtacccaacagcacttacagaacatgcttccactgaagccaagtccttccgaaacttcacatgccaactccttggcacaccatcctcctgacggcaatcgagcaagacactcctattgcatggtaaaatttgatgcgtcccacctggacgaggcttgcaagctaactgcacccaatgcagaaccaagtgcactcttgcacaaaatctcttcgcaaagttctcaacattggccctctggccctaccgcacacccaggacttcatgcaaaaggctccttgacccactgcatacttgctcctctgagcttctttcacgtggtcaatgatctatcaatcacctgaaaccatgaattttccctttggctcctgctcgtgttggctctcaaaactgtgtcacaagtctatctcctaaaatcaaccctacatcctctgatgactcgctaacttcttgacaaatttgataacacaaagtcttactcttaagacttgaagtcatcccaatctgctatctcccatcggcatatgctctctgaaccattcagcttacagtgtcccatacaacaccagtgtccccataaacacaaaatattcccatacatgtcgcaaactagctcagtcttgatcttagcctacgcccctgcatattttatatctgcagcttgcagcaatcatgcaagtcttcgcactgaacaacccatctgttgtag

SEQ ID NO: 59456 - DNA, 1468 bp, Cannabis sativa
caaaacctatcgcagcctcattggtaaacttctttacttaactattacacggcctgatatctcattcgccgtaaacaagttaagtcaatttgtatccaacccaagggttccccacctcactgctgctcacagaatattacaatatctcaagggtacctcgagacaaggactattcttttactcagcatcttctactaacctatctgctcatgctgaaactgatatgtccagcaaagactttcatctaaaaaaaatttcagatgctgattgggcctcttgcagtgacactagaaggtctgtttctggctactgtgtttttcttggcaaatctctcatctcttggaaatcaaaaaagcagtccacagtctctcgttcttctgctgaagctgaataccaagctatggcccatgccacttgtgagatcacctggtttttggctcttcttcgtgattttggcatccagcacaaagatcccgccattctttattgtgacaacacagccgccattcacatctccgaaaatcccgtattccatgaacgcacaaagcacatagagattgactgccatgtcgtccgagagaagatccaagaaggcacacttaagctcattcatgtcaccaccaaaaacaatattgccgacatcctcactaagcctcttttaccaagctatttccaatctattgtaaccaagatgaacttaaaaaacatatatagttcatcttgagaggcgggtattaggttatgtaggccctgttatttcgggcccatgtatttcggcccacttaccttattgggctgtcttcttttgcctatatatattcactttgtaaaaacctaatttacattttgtcactttggcatttctgccgtgacctagcagagaaacacaaataaagatttcctttattttcttcattttatcatggtatcagttgcataaaaccccagccacctttcttcttcattcatcttcttccatggctccaaggactaggaactccatggccgccgcatccatctctggccacaaactctccaccgccgaaactatcatcgccgacgtcgaagctccgccgcccctacctccgactgctcctccctcgtcggacacgaccggacctccttctcctccgtctgatcctcccacttctggtgttttcggctccggcaacgttgccgatctccccattagtggaatgatcggaccatcctcaacagctccgatcatctccaccacggcaccggcgccatcctcctcggcatctttaccttataatccgcttctgccattttccgccaccactacaaccccgacagttcaccagacgttcgccattttttccggcaccaccgcggtccccgccaccaccttcggccaaccaaacctccccacctccttcggccaacagaacactcacattccctttggaccgaaccatgctcctcttggtggtaatattcctaacct

SEQ ID NO: 59457 - DNA, 4031 bp, Cannabis sativa
atttaagaaaaacacacttagtttcataaaattaattcaatataaaatatatgtatttttctcatatttaattaaatgaagaagttataactaattagatttttatagatacttaattatttgaattttcttagaaaatagatttaagttgaaaattaattttagatcaactttgtttaccaagattttcggcaaaatatttttagagcttaaggaagaaataacagaataaataacagaataacaaatacgagatttgtaacatgtgactatggttaactatcctttgtccacgagtccattttattaggctcattggccggtaactgtttacacaagttgatatgtaatggacagaaactcagttttcttagtgttcctcttgaagaagaggaagcttagtaggaatattctggagtttctcagtatagtattatctagcttattacaaatgtgtttgcaaatagtggtaagaaatgagtcttgcccctatcttgtgttttacaggggtatttatagaccaacttctttccatgtcctggcttggattgatcatccttgggaaaaattcaactgttgatttggtaggtggccttttctccatatggcatttaatggtgtcagattggacaggctgggcttcatacatttttaagtatttgtatgaaggttgtctacctttccataactcatatagtgtcttttgatctttctttcaggggaaattttatttaatagataattagctgacaggagagcttcaccccacatgttctgcggtaatctaaaacttaataacatggcattcatcatctcttttaaagtgcaatttttccattctgccactccattggatttaggagaataagatggtgttacctaataaatgattctattttgtgcacaaagttcactaaatggttctacatattcaccacatcgatcacttcttatcatcttaattttgttattaagttttttttcaacctcttgcttatagagagtttctctctagcctcatctttgctttttagtaagtacacataacaatactttgtactatcagcaatgaacgtaataaagcatttgttaccacctcttatttgaacaaattttaaattgcaaatatcaatgtgaattaaatcaaggggttcaatctctctttcaactgtttgaatgataacctagttaattttgcctctacacaagtttcgcacttatgtttcgaatcaatattaaaagtgggtatgttaagcaaccgcttatgagaaaagggtatgtcgtttttgttgcagatttcccaaaaaccccatttcaactccaaaattaacccaagctttctataactctcaagaatctctattttgggtcaaataaacatagttcaacaataaagtagctcatcaagactctgagttgagttttgccattgatgagctaagtttgggctcttaaactcaaacttaggtaaccaacaacaaactttctccaaaaccaactaatctaactccaaataactcaaaacaataagagaattcaacccttaaatatcccaaacatgaacaaaaactacaacccaacttgaatatctaaacctagctttttcctttaaaaaacaaggagaaaagggagaggagcctaccttatcctttggcaaaataaaccatctaattcccttctaaaaaaacccctaaatttaggtctaaaaatgctgaagaaaaccttggttttccttggcttgctagggtcaaacaaagaagagagaaggagaagacttaatttttttattttattgataattttctaatttactaacttaatatatatcctaaataatcagatttatctcaaaggaaatactagaattcattgaagacaaaaattcaataacttagggcaaaatgtcaattttgccctttctttactatgaagaaaactaaaatgcctaggggtaaaatagtcttaaaccacaacactgaataatcccaacatatcaaaagtctaattatcttgtcctggtaattctaagatactcaaccgtatctaagtgactctaatggccaaatagccgcattccactattacttgacttaaaacatgaaattcgtaaaattcttatataacatatataatgcacctagaattcaaatatatctccataactaagaaattattttcatatggcctatttctgacaatgagccctaattttctactacgaaacctacaatcacaaattaataattaaatctttaattatctgctaattcccatgatttaactatgtggccattacattcacaatgcagcagttcaagtggcaagattttgcacccagtaagttgatctttcactttgggcattacccaatcctaatatatgttgatcacttctttggccttcttggtctcaggataagcaacaactgtggttatagtcgatttgggcaaattatgccgctcaacatttgcaataccagcttcatccgagcctttacaggatttagaatgtttggacggagcggctaggggcaagccttagaaggttttttttttggtcagaggaggggggtctagaatgtcaatagcagaaaattccttcgtcccagaagttagaatcgcctgagttttctctgtatcagggtgggaagtcttagggctcaaagctatactgaccggaggatcatctcgtaatttctgctgcttggtaggggacttctatctggagcagtcatcaaccttcctcttcaacaggtctttcagtctgctcatcatagctatatagagaagaaaacacttagtaaatatttgtgcaagtcataaaaagtaaagctaatgttgaaatagctaccctaaaactctagagcaacaccttcaaaactaacagagatggagtgtgatcatccaaagagtctcctttgtttggaaccttgactactcccttccttttaagaactactatttgggcggcaggatgaaaaacttcttcagaatcatctctgatccgaataagtttttcaactgagtcctaagctgtcttcttttggttcttcttcttttctccttcagaacatcccactcagaagtaggattcttggctactggatcatcttcttgtagttctttgggcatatatactctgtacttgagaaagttctatgtggtggccatccttgagatgttctgagcatctactgaaaattcaggaatggcctaagccctttatctaaccacaaggtgaaaaggagatggcagtaagtcaggttcaactagaaagacaggtggttggcattcatgccttgcacaatataataatcctcaatatatccacctatcatggacacctctgattcgtttatgtcggtcagccatgggtgttccagctgtgaaaaatagaagtagcccgaccaattgtgcctcaagctagaatttaaatcaaaaatccaaatcgtatcatgagaaaccagcttgccccaaccttgcttgtcatacaacacaaataatgcagccaagtacttgatgcccttcgaagtgaactgggtccggcaaattttgtaggaattagagatcttcttatagtatggatgaaaaggcaagatcgcacctttctcagtgtggggactgaaccacgcacaaagcccctccctggggttagaggtgagctacctgagggtacgaagaaaagcttaaacatcttaaaaaaggcccttatcatggggattcttcaacctcttgtaagtgagagtggacgaaggtgaaacccactgaggaaatttcttctccctagtccccatgggatgtgccttctcatactccacctcgacatagtcttgagccgaaaccaagacctccttggactctaaaacgagcaccttagccttgttataccctctaaatgggagagtgcatggaacctcttcctcttccattacctcttccccttcaccatctggagaagcagctggatggactttccctggtcttctacctcttagacttctttgtcgccagcaggctgttgggttttatgcc

SEQ ID NO: 59458 - DNA, 1073 bp, Cannabis sativa
atgaggtcgcggtgatttattgggctattttgtgagcacaaaatgcatttgtttagaataaaaaaaattcctagtatgaataatattgtagttccttcagtaaagttgtatcttgaacaatagaaatgctcaagttaaggatgattatacaccactattgagtggtattgcagaagatagtactagagcttgagtgaagccaaaagagaatcaaatcaagataaatgttgatgttacattgtttgctgagtcctcttatattagtactagtatggtagcttatgatcatttgggtcgctcaattgaagtttgttctgtgtatctttgtatggtagtgtagtgcctgagttggttgagattatagggttttgtgagtctcttagttggaataaggataaaagttgatcgatggtggctcttgagacagatagtttagtagtggttaagactattcgcagtcaattaatgatggtctctctttttggtttaagtgttaatgactgcaggcaattatttaatttgtatgagtagagtttctttattgtttgtgtatcgtaacataatagctcataattttgtaagagtttcatatttttttttccatagtaagttttcaataatggcctatacagtattcataatcggaataaattaataaagagatgtaacagaaaaaataaagaataattagaatcaatatttgtaatatgttgtttactaaaaaattttaaaaatataataatagtaatttatcttgtttactttatcagaaaacataatcggaatatttaaattgactaaattacctttttgagtcaaattatagtatatgataattattttgtaagacatattttaaaggacaaaattattattatatatttaatattaaaaaataaaaaaataataaaaattcattacccttatgacatgtttactaataagtaatggaaatcaatagtaagataatcattttcttatatttatttacttacattattaaaattaagaaaatgagaacttgattaaataaggaataaaagaaaggaaatacttctcccactaattttgta

SEQ ID NO: 59459 - DNA, 1077 bp, Cannabis sativa
taacacttttataagtgttgttttttcttaatacttttggcaacagtttaggagacaacacttttacaagtgttaccttttaattttctttactattaaaatagtgttgctaatagtgtttttctagtagtaactactctaagcaataatctactcactaacaatacaaataaatgagacaattattctctcacaattaatatcccaagaaaacaaattaaatactattttaatctagatattacagtattagatattatttttgaatatctaattggatcggatcggatgttggatagagtgtccaaaaatccaatatatcgaacatccaattgaactaaataatatttttatttagttggatgagtaattaaattttatattgttatacgtaaaatatatatgtgtatatataaaaattaacattaaaatttacctttttttcttggattggatggatccaatctaatccggcctatacatgctagatctaaaatattagatggatccgatccgatctaaaaagtacgaggtctaaaatattgaataaactcaaattaaattaataaatatatatgaaatacatctaacggatataatcaatccaatccaacatccaatagatgttgaattaataagatgactaaattaattaaattagatcggatggtatatatataaaaatatatatcatacaatcatattcatcttcttcatttaaagttacaccgtaccttaggtgtacgtagtacataagttgagagaatatgtgtaatgaaaaattataagacttgatgaaaatattttaaacaaaaaccattaatttaaagaaaaatttgcaaagttgtcataacttcaagtaactaatttattaagtagtaatagtagaaaaaaaagtacatccaactatttattcttgaagtaacaaagttctccaaaatgaagctagattaattattctagggttaaacatggctactaattctttgtcaagataatgactaagttcacataattccaattttcattggccatagactcattaaccttattagcaaacctattaaataattcatc

SEQ ID NO: 59460 - DNA, 1218 bp, Cannabis sativa
attaatattttcatgaaattaatatgatatattatataattgaaaatattattttaaatttagtttatgttcattttagaggaaataaaatgatttttggtattgtcatagaagagataaaaaagaaagcaataaaatgctacaaaataagtaaagttgacaaagtgggtaagatcacttcttggtgtgagcccgtacaccacaagagcatatgcataatcaatttcaagcatcaaagttggcagccagctagagatactcttcatcaacacaatgttaattgattttgttttatctcttgtgtgaaccaaagggaaggaaatgttatcagcttcttcatttatccgcaatcaaaggcctcaacatctccatcacatttgactaaatgagggaaatcaatttcctataattggttttccattcttatttttttaaattaattaatgtaagaatcaaactcaattaataaggattttatttttccattgaacggttatagcatgtcataatgctatatattgaggggaacttttctttggagtgtgtaattttttttggcaaaaactatagtaaattttagttttattttgtctattccttctcatattttttctttagaatattgtgagaatgactagcatttttggctagttttctagataaggtgaaggatgatcctatatgcaaggtgaaatttatttgtattttaattcaccaaatgcaagtttatacatttgagtaatatacttttcttctatttttctctatctcaatatcaatatatttatctatttagtattatatagaaatagtctagctttttctatgtgaatatgattaggacaaatatattgatattataattttatgattagtcttttattacattattgccaataaggtatattgtcattcttagatttttcataaaattattttctataatcttaacgtcacgttaattattattactcgaatatattttattatatatgttcttcatgttttatcttccgattaaattgttgggaagtgaacgatttaattgtgttttatgtgtaaatcaaaatctaaataaatgagccaaacatatcggtgattcttgaaacgttatcaattttgttttgaatttttcaaccaattttattttcaatattttctcaaaaatcaccaacgatttatttactttttgcgcttaaagttctactaatcactttt

SEQ ID NO: 59461 - DNA, 758 bp, Cannabis sativa
taaataattagatataatataggtataaatatttttcaatgataaataagtccccacaaaataaaaattctgagtccgtcactgtttctcactcaatctctcttagttttctctcttactctcctaatctctttacttcaattgaaatgaggttacaaggcactatttatacagtttagtcaagctcacaactcgagctaactaacactaaaaaacacactcaactaactaacaacgttaactaacttcctaactaactctttcaagagaagaaagagtattccaaaactaatttaatagtggattactaattacacagcaatattctttatatgtcactttggaatcgaaggaaaaaaaccctttatatagcttattgattcagctttctttaatttctatattaattattattcttttacatattttaattaattaacgaatcaaacttctctcaaagtaagattatgttacattattttaatttaatcatataagtgcttaataaattaattattgtatcttctacatgcttattttgcattatcttttattgcaaagtgaaaaggcaactaacatattaatttccattttgaggcttaagaaaaaagcaccttttgctttagaaaataaaaattatattaattaaattaacaaacaatccgtattatatactaaaaggtgggagaccaaataaagatataaatcaaagttttgcttttgctatataaattaatatagaaagcaaaaaaatatgg

SEQ ID NO: 59462 - DNA, 1918 bp, Cannabis sativa
  modified_base (71)..(73): a, c, t, g, unknown or other
cgctcttccgatcttttagaagttcatatttaggatgttaaataacacacttgttagtaaatctaagatcnnngtaaaataattccaacagttggacatatggttatcaaaacaagggtcaacattcattaaaaaagataacaaagcacggtaaaactggattaaaagctgcctggtaagccagttgtcttaagatgaaaaaacataacccaagtttaaaaaccgcttggccagtcatatttgtctctaataaagagcttatgggccgaacagataaaaaaaaaagaagataaggaaaagtgtttaaacagaaggggtcccgggctctgtgtatggatcagcctggtctgcaggggccgaaggttcaacagtctgagcagcaggggtgtcgttgctcttgtcggttggaactgtagaagtggtcgccttggggttttctttggccttctaatctgcgtagaaatcaagatacatccccttggattcaccgaggtaatcaaagtttccttcaggattggcctttcaaaattcatagaaaactgggtggctgtctccaggctttccacctccttcacgagctcttcctctttggtctgcttaatccgaacgtccctctaactttgtgagaagagtgcgaagactctccctctcgtctttaagctcatttacctccttagacaaagcgtcattatctgcctcaagctgctcggtcggaggcatctcttgtatttccttggttagctcctcaaccctagtgttagtagcaagaagctttttgttcacctccccgagctcattcctcacgtcctgagcctcctttttggccacatccacctccctctgtagtgtgttggtggtggcaaggttcttggcagcagttgatttggctcgggagtaagcataagccatcttcacattgacctgcacgaaaaaagtgttaaaagtccgagctacaaaaaagagagtaagagaaagaaggagatagttacccgtgtagcttccttcaagactcctcctaagaccagctctaaagatagctcattgtccgccccagacagttgatcactcacttcaggaagtgattggttcaaatataccggagcatatccttacccctcttggcctccgtgctcaacgccacggccgttgaaggggtcctagtttgatcagacctgtccgagctcccccctctagaactttttaacttcgagaacttctggactggaaggtccacaacaggccgctcctcaaaaaggttaatgacctcttcgactggcgccttctctttggacggagtctcaccgcctttagatcttttgggcggaggagactggcccgagctgtccccaactctcttcttcaatgcctggagtaccttctgagacatttctgcacaaacaaaacaacacagttagaagcaaatataatgtatgtaaaagtacagtacaaaagaagtaagtgcaaattataaataccctgcacgcaagcaggggcattttcccaaacaagcacaaacgggacatcatcatttgaagagtcttcctcatgctccaccaggacggccttccctattccgtccacaagaacggatggacgagcaggcattattaaggtttccctaatcctgatagtgtgttccactggtgcttggtcggttgggggagccttcttcttctagttcagcctctcctactctgaatattcttgagcatactgcttggctctgtcgtctcccttcaacttagcctcatgcttgagttgaatgagctctttctcctgctcggttataccagctcagtttggcttggcctttttcttcttctccttcacgcgcctcggcacaaagtcctttgggaagagcttatacttaacaaaattggcctcggtggccaactgagtgatgttccgagcatcttct

SEQ ID NO: 59463 - DNA, 1923 bp, Cannabis sativa
  modified_base (215)..(235): a, c, t, g, unknown or other
ttttcaagccttatggtatttttgcaagtgttgctcaaactttgttgtatttgtgatagtttattatttaatgatagtccaaactgcataaccgcataaaccgcaccgcgcacaccgcaccattttttgcggtgctgtttttgcgttttttagtttcgcggtgcgagtgcggtttgagaaattgaaaaatcgcatgtgcgggttggtttgaaaannnnnnnnnnnnnnnnnnnnnccgcaccgcgaacacccctagttcctatgttgagatgtagatttgggttgcgatttatgttgctcattagttactccgtgtattgtataaatataaaaataaaaaaaacctcaatttatattatacatttgtaatatttaatattttatttactaagttatatactatttatccttaaataaataataattatatactatatacatcattattaattaaggtgatttttacacttggtgccactttttgctaattttttacatttttatcaatattcgattgtgtaatcatttataaaagttttatttttcaattttacattttcaaaagtttcataattacaaatatgtctatccatgcttatgtcatgggttttcccgcttcttacactccaccactgccataacttctcctttcttatttgtttttttttttttgaattttttttattttctgttacactttccttggtttttttgttgccacaaccgacgatcatcacgtccgaagccctaacccacgatttttcctcccacattttcttctattcttccataaatagccaccactaggccgggttcgaagtcaccttccccagctaagaaaatttcaaaaaatactaagaaagttccttcgaagtcatctaaagttgatcctaaaatgagtttcacgggcattgcgaagaagggaatgggtgatgttgcagagccatctggttctaaaaaaagacatattccagataagattgagtctcgtaaggcaaagagaacaaaatctttaaaatctaccaacgatgtaagttgggttatgttgttttttaatttttttctttttagtttttttcttgttgctgtatttttcgtatgatgttttgtgttttaaatgtttctcccttgttgttttaggttatctccaattctaattttgaggatgaagtccttgatttggaagtaaagcctaaagttaaatccaaggtatttttaccttgaatttttttattttcttaagtttaaaatttttaatcaccctttgttttctttttgtttttgttttacctgtttataatgacggttttatgttttgtctcattcttttgtgtattttttttatgtatttttgttgatgttgtttttgtgttgtttttcagttattttttgttttgtttctactattaaaatgtttatagcattattggtcttttagtgttttattggcttgttctgaacaattgtttaaatgtttgttttcagttgttttcatgttgcttaatttaattttacggttgacaattactattgtaatttcattttctgcatagtgttcttaatatgttgtttggaagttgttcatcttttaggctgagcatgttggagttgttttttaaatgttattttttgattttttcctgattgcttagattttatttgtctttttcttgttgcttgcatattatttatttagttgttcaaatttgttgcttatgatttttattgttattcccactttcaggtccatcctaagagctcagagaagtttgaagactttgacatacctaaaaatatcctcttatggtatctattttttttagtttttttatagtacatttctgttttttgtttcttgttttgtattttgtattttagttttttagtcttttgttgttatcctcatgttgtttgtttgaactg

SEQ ID NO: 59464 - DNA, 1159 bp, Cannabis sativa
  modified_base (499)..(503): a, c, t, g, unknown or other
cacattatgggttcctctattaggaacagtgagaacaggcgccgaagttaatctttccttcaattctctgaaagcttcttcacaaccatcataccacataaactttacttcttttcttgttaactttgtcaaaggcatagaaatctgagagaaattctctacaaagcaacgatagtagcctgctaacccaagaaaacttcgaacttcagtgacattatttggtctttcccactgtagaatagagtctatctttgcaggatcaacaatgataccatcttgagaaattaaatggcctaagaatttgacttttgtcatccaaaagtcacacttctctttcttagcatataatcgatgatctctcaatgtctgtaatattattgtcaagtgttcagcatgatcctcacatgtcttaaaattcatcaagatataatcaatgaataccactacaaacttatccaagaaaggtctaaagactctattcatgagatccataaatgcnnnnngtgcattcgttaacccaaatggcattacaaaaaactcaaagtgtccataacgtgtcttgaaagcactcttaaggatatcttcttccctaatcctcaattgatggtagcctgatctcaagtcaatctttgaatagaactttgaaccaccaagttgatcaaataattcatcaatcctcggtagaggatatttgtttttaattataatctaattcagctttctatagtcgacacaaagtcacaatgtcccatcagctttcttggcaaacaagactggagctccccatggagaagtactatgcctgatgtaacccttatcgattaacttccctaattgttttttcaattcaaccaactctgcaggtgccatgcggtaagacgcaatagaaactggttgagctccgagaatcaaatcgctgtaaaactcaatctccctatcaggtggtaaccctggtaaatcctctggaaacacatccagaaaactaataaccactgttatccaacagaactagtctaaatccctagactcatcctcgatcgcaaatagattcccataacactctaagtttctctttccagttaaacatgaccttaagataggattttgtctcactgcgctcatgttggctagataaacaatgaaatcaccactaggggtt

SEQ ID NO: 59465 - DNA, 667 bp, Cannabis sativa
cattatcattggccacgtgtaggagtgtccatcaaggtctgtaaggcactcctttgctggcaagcccctgtggttgccaggctggccagccatggtgctgtcctaggttggtcgaccatagagacgaccaggggtggccgaccaactcatgagagggagatggtctgtcacttgatcccggtctgagtgccgaggccttgtttgctcgagtgctgacttggccttccttttattgagctgtactaccatgtggtactggttctgtccacgtaagcatgccacatcacgaagacaaaaattgggatacatttgtccccaagtccctgtgtagaaattcctaataaaataggataatcttattcattatgctctaaacacacataatgttccatatttaataaaatatagttagatttttggaatattacacatcgcatagaatccgatgacgattttataattggagtgaaatggaaaggagaaacatcataatatgccaaaatcactttgacaaatgggtggaaaggaaccacgacaccacagtgaacgatggggactgaaattacagtgacgttgttcgggataaccggtgggttagtacacagtttaggaggacattgtatcgacatgggtttcgtacaaccagtatgttgggttttatgcccta

SEQ ID NO: 59466 - DNA, 1219 bp, Cannabis sativa
gctcatggatttcgtccttgagtggcttgtgaatttactggttcccatactttctcgatcattagcccgtcgagtattttctcctcttcgagttgattgactgtaggtccttgaccgccctgaggtcacacttgcttcttcatgctctgttctttcccccgggtgtggtttgtcgtatttcccccattagggtttgtacgagccttctctctatgggttcgggaagaatgttggtcagttctcgcaggtgacctgcgttctccaggttgagtcccaagatattcctcatcttcatggggaatttctcgttcatcagtttctggttgcctcccattctcatgtctgtgagagggttctggctggtcattctgattttcaagggaatctcatttttcctaggttgttcttcctgggcattttcttgtcttctggtttgtgagccacgaggtctgcctcgtggtcttctcactctaggttcaggttgattttgagtgttagccccctacgccgccctagctgcggctgcatcgcgttctaactcagcgttccgccgttgagcctcctccaggcggcggttttccatttcataagtgccttctcccataggttgagtacctccacgaatggggtcctcatctccagttataggattttggtcattctcacgctgagttctcctcgagcgtgttgttcgcgtactgggaccaacgtcaggttgggtcctctgagaacgtgtggtctgagtgctagggccaccctcaggttgagtcctcctggagtgggtggtccatctggactgtggatcggaagaccttctggtgcccatgggctctttcccagaacggtgatgagtttcctcatgtggtgtattaacatcttctggtttttcagccatgaaggagatgggttttcttcaaaagaaaggagggtttttctgagctttttcacaaaggctctcaataaaagcaccaaactgttaacgcagattttcgttaaccaaaatttgagcctaacagtgataatttcacacaaaaataatgaaagcagtaaagtaagaggtatgaacacaagggattttttacgtggttttgcaattaaaattctgcatagtccacgagtcaatcttattcgatttctgatagctttttaggatcttttttgtatgattttttcgtccctttttttatctaacctaccactatttataatcacatagtag

SEQ ID NO: 59467 - DNA, 759 bp, Cannabis sativa
ggcctcacccctcacccactttacattcatatcaaaggacttataatattgcccaattttccaataagctacgaaatcagtgcaactaaattgttattacactatgtttgaggttcacttcttctgactacttgtaattttgtatcattttgatgaagtaaatgcttactttcttttccggttcgaaaaaaaatgcttactttcttctttttctttgttaatatattcaattaataatatcctaacagtaaaattaattttttattcaatgtataaatgaaatgttattgtaacataaaatttaactcatattatattttgtattaaatttcacaacgttaaatttagacctctttgtatattactattgaaattcacttttacggactaaaaaattcctatacaccacagcttttagccaaataaaatataatggagataaaatgcagtagcaaaataagtaattagaattataataacattacatttaaaaaggattaatgaaacgaaaagctaaacagtaaaatcgaattcgaaggctttagacaaagctacaattactaaaccacagcagggacatgaatgtgtagagtagacaacactgtgtggccccattgccccagcagtagccaatgtgaagttcaatccaaatcctactacaccactaaacataaaacaaaaaaaaaaggcaaaaataccctattgtttgcctgtaaaatgtgatttttcttaaatcctctatataataagctggaagca

SEQ ID NO: 59468 - DNA, 963 bp, Cannabis sativa
  modified_base (47)..(56): a, c, t, g, unknown or other
ttccgatcttatttagggtgttaaacaacatacttttgagtagatcnnnnnnnnnngtaaaataatttccaacaaactcatcatagatctgaccatgtctagcaaggtttgatttcttctctctaaaacatcgttctactgaggtgtttaggtgttgtgagttgggataagatcccttcttccaacaagtagcctttgaattgatagaccaaatactctccaccacgatatgatcgaagtgtctttaatgatttacctaattgcttttcagttaaggatttgaagtctttgaactatctaaatgtatcaaacttcttggctataggtaattatgaccatatcttgaatagttgtcaataagagtgcaaaatatctataaccaccttaagcttgaatattgatagctccgtacacaacagtgtgtgcaagcttgagttgttctttgcctctattgtcttttgcattaaaaggtattataaccatcttaccttcaagataagattcacataccaaaagagttccaacttttacttctctcaaaggaccattctttgttaaccttttaattctgtctaggccaatatggccaaaatgcagatgtcatagatacgattcatcatcattagaaatcttttgccacatactttattgagacaaagctactctaaacaattcataatttaaaattaattgctccctaggtctgagcatgcaaagtctgtttctctgttctgcacaaaaaataggaattccaaactttaaaataataatctcattattaataaaattaatgttaagtgattgttcgtgccaccatggccacagtggccatggaaggccacgagaatcttgacaagagcagcaccaggtgggtctagtgacccaagacccggtcaagtcttaaatacataaaggaccaaaagatacatgcatgctttgcacacaatgagtggaccgtaaagg

SEQ ID NO: 59469 - DNA, 1158 bp, Cannabis sativa
  modified_base (367)..(371): a, c, t, g, unknown or other
gacattgacatgtttactctttgcaaagaatgatcttgttaaaacaactatgaacaagatgtaaatgacatgaatatattactgtggttgtggtcttttgataatttaggtctagttacagcagagagttcttagaatagtccaagtgggttctggtcttagaatacaaaactcataatccatacatcaacatacagttcagatctattgtagaaaatggatattaacaacttatgaaagttatactgtattgtattctggaaactgaaatttaaaatttccatttggaatctaaaattaaaggcaaagacttaaatttatacaaaatttactttgagtaattattttttcttggaccaccactacnnnnntaactctaagtttaagttgccttagtaagcatatacacgtaagagatttctaatatcgatgatttatatcattttgggatagaatatctagaatatagtcatctgcgccattcatttttatagaagaaaatagagtgacatcataagcaaatgatttatcaaccttcttatccaatgatatactatctaagaaattcttaatgaaaaagctaagagaaaaaataaaggataatttcgattaaaataagaatccagcgatgtcccatttaggcaagagtcaaagttatttttattttataaatttcttcattgtttcatattgtaaacactagtctaagttatcatctttggatgtacaactagatatcgcgtttataaatatttatctgtcgagatctaacactatcatgtttgtctaacggatgacaatcctttgagatttgtcccattaaataacaaattaagttagaccaacaaagaagacttaaatttttttactacaataattaataacagaaaacgacatgaatgttcaatacaaattcatacacaaattaagaaattattatacatttagcacgtaataaagacatgtgaaaatacaaaataaacgcatcttaaataattttcaaggtttccaacatattgatacagtgtctcatttaggcgagagaaagatattattcactgaatagagtagtcagctcatctaaaatggacaccattctagtaaatttttattcgatcaagataaaaatttggtgttgtctcgtttagacgagagtca

SEQ ID NO: 59470 - DNA, 1971 bp, Cannabis sativa
tcacatcatgcaagtttccaaggctagtgatgattttaaatgtttgtgtttttcattaacattaagtaagtccgtagatgactcatggaagaggttgtcttcgagatcgatccacaattggagagacctacaagtaatgttcaagaaacagtttatagcggccaaagattatgatttggaagctagctccttgataagcgccaagaaacaacaaggagaaagtttgaagaagttcatccaacacatgatggacgtgattgccaagataaaggttactgatgacatgaaaatggtggtccaatattaggactaagactggatctttactatggggataactccaatgaaaagggcagataccttgagtgaattcttaacaagagctcaaggattcataaatctagaaaatgcttatgcccagacatatggtgtactccccgcacatcccaccaaaataacaaacacccaaccttgacaggtggcatctccatctacttaccatctacaaactgcttttactactaccacaatatataaaccaagtacttccatacaaccaactatataggctagtttctctgggtttggggcggcatagaccggatacaatgctgctcctaaacaaatgaaccaaaaattggaagctccatagtcaaatataacccactcgagaagtaaaaggagtatgaagggtccaaatcggagtgattctacgaagaagggtaaaactcaagaatcgaggtacactgaatacacaagtctcatggatactcaggagaatgtatataatgcaacatgtaacatggtacacaataggaagcctctgccaatgtacaagggcagaaaacattgaagggacctaaataaaaagtgtgaatatcatggtgatattggtcacactaccaatgagtgtgactacttaaaggataaaatagaggggttggtacggaacagacacttgaccaattgggtaagaatcctagtcatctatccaggacaagaagttgcacatggaaaactttttgttcccgaacaacagggagccataaatcctcctcagagagtaggccacccataacttcctagaatacaagctcccagtgcagaagcccttcaaggggcaccaaacgctccagcagcgacaatagtggtggcccccgatcttgaaaatccgtaccctcctagagctgcattactagctttagatggtcatgtggaaattattttaggtggaccacatattgttaaaagcactcaaaatgcacagaagcagtatctgaatgaattgaaccaaggcgaagcttgtcattctgtacaatcacctgcccagcatctaaggatgatgaatttgcctatgactttcatagaagatgatacctgacatgtgcatttcccgcataatgattcgttagtgataaaagctcaaatagccaacaagagagtttctggaatcctaatggacaatggaagttatgtgaacatcatcttcaaaggagccttccatgccattggtctagtagaagccaatttgttaccctgtctgattcaactatagggtttcaatgaagctacgttaattcccatgggaaaagtacaacttttgatgactataaatggggaagtccctagaagcaacgtaatgtcctcattaaagtacaacacgttcgagatagtcaactgccctactgcttatcataatatcttgggaagaccattcttaatgaatttcatagtggtgacatcaatccagcatctatgcttaaagttccccaactataacagaagcatagggaccatcaaaggagatcaatgaagtgtgtagagttgctacaacatttcaactagaataatacttatggtcacagaaggtaataactttgaagccaaaacatcttctcatccagcactaggggtaatccatgagatgagcttgacccacgaatcggcgtggagcgtgtcatagaactaatg

SEQ ID NO: 59471 - DNA, 749 bp, Cannabis sativa
aagctaataaattatcagttattaaaatgtatcatatttattatatagcacgttatggggtggggttagaatatttaatgctcatatatgtatattagtggtggccgtgtgttttaatttcgaatccaaataatcaacatccttgattttgtgattatatatataaattacatattctaatcattttttttttcttttgttaatataaagatccacgtacgtggggttttgttaaaaattctagctattattattattattattattattattattattttcaaacctgagcaatacattatttttgctaaagaatggataaaactctcttctctttgccataaacaaaattatatgaaccaacttcagtttctttaataataataaattatgacatcaaatttttatatttgtttttaattacagtaaaaataattacaagatacattgaaggatatatattttttttttatagagaaggatacatttaaatgaacaaggaataaaatattggtggggtttaatgttaatatttaataatgagtttttttggcaaaaaataaaaaataaattaaaataaaaaaacagtactatatattggcgtaacgtgcaagtcacgtgattttgacgttgtctaacataaaatgtgaatgcctaatacctatgcaaatttcattcaatattattgtgcgttgctcgataatttgattccctcattcaatcccaatgcattttacaaattaaattta

SEQ ID NO: 59472 - DNA, 1782 bp, Cannabis sativa
  modified_base (192)..(195): a, c, t, g, unknown or other
  modified_base (836)..(844): a, c, t, g, unknown or other
tggctatttactttataaaaaatagtttactttataaaaaatagaaaactttataaaaaatagaaaaatttataaaaaatagaaaaatatttccttttcataaattttgcactaatttttttattattatttttctttttttttttggcatcgtatcatccttttttaaaaaaaaaaatcgtgtttgattcnnnnttacaatcccttaaattgttctcaaatttctctctaatcaaatatgtatatatatatcttaagtcaattagtttttttttgcctattcatgaaaataattttttttacttacagaaataaaacaaaagtaaatcgacctaacatatactatcgactagacataattatataacaaatatgaaataaaataatttaaagaatgatacaatatgaaaaaaaatattgatgtaaaatttgttgaaaaaaaagagctagtgttttctattttttaataatataaaatattacatatttattataaaaaagaaattaaaagaaagatgcatagtagtacatattatttagcattaaaaaaatatgaaaaattattaaaatagttcaaaaaaaaaaaaataaacaagcaaatgataacacattttaattattaatgaaaagtaaaaagtgtataattgtaactatatttaaacatactttagaaaattacacatgtcacttaattagaaagagagtgtaaaagagagtgcaaaagagagttttcctaacactcctcatttcttaattaattagtacgttattaaagaatattagtgtaattaaatattgggaattaccccagatactatttttttttaacttttttnnnnnnnnnttacggtttgggtttctaaagtgggtgcagcgctagttgcaatagggctttttgtactattttttgttgcaatttaccttgcagcgctagttgcaataagggtttctatgcctaattccgtaaaaatgcaaaaaaaaaaaaaaattgtgtttaaagtgtaaaaatgaaaaagtcccttaaatatttaggtgtctattttattgaataattaatataaaactcaataatatgagatactggtatttcataataatgttcatttatttatctattactattactacaatgtagaagagtgttaagtacaatctctcattataactttttaatcaatctatatgtttgaaattacatattagaatattttttttcatagtaaaattatttatggttacagtattatgattgtaaattttaaaaaaattctaaatagcttactgaaaatagagagtacgcgatatgtcagtttatcacgcgtgttaaaaaaaatttaaacctattttaacattataaattattcgaattttttttagagatgatattgtaagcataacaaatatcaccatgaaaaaaaaattaaaaatatttcgtcatgtattttcgagtacggaggttgactaataaattataataagaaattgacggtaagtattaacattctacctatataatgtctatattaatgtgacaactaacaattaactaatttatatatatttatataaaggagaaatatgaggcggtgacgtggcggtctaaactctctctaaaattatttttcttttttctccttacttctctctattctttaatattttattatagtataaatttataaattaatattttattgttattttaataaattttgtataaaattatctatcttaaattaattactttttaaaaaccacataataataaatataaactaaatt

SEQ ID NO: 59473 - DNA, 1305 bp, Cannabis sativa
ttcatatatacatatatattttacgtataacaatataaaatttaattactctttcaaactaaatgaaaatattaattagttcgattggatattggaaatattagatttttaggcaccctatccgacatccgatccgatctaatcacaattgatattcaatgtttggtgatcggttgtaattggatcggtcggttggcattgaattggatcaatttatgcacactcctaattgtaatgtttaatattttgttttaacttttaatcttttcatctccattagcacttcattatattatttatttgtattattatgtatcgagtaaacctattggggataacaatggcaacgactataagtagaatacggtgatgacaacgggtgagatataataattgacaacaactttcaataattgagatataaataatattgattgcgggaaagagtgtttgcttaaataataataatactctaatttttctctatattattctatttattttattttatattaataattttttaatagagaaattaaaaatttacatatatattattcatataaattttaaacttcttaataaataaaatagaattttttgaattttatttttaataaataatttgataatatatttttaatattattatatattagattaattttttaagttattatttattattttcataagtaattcttttttaattattatattaaaataaaattaaataagttcacgaaaagcgactatattgactagttatataatatatgacctataaatatactactaaacaatatttcaatttctttgaaaacattttacattcattattatagttaggggtggacacttagtagcattttatggaaataaaactaatagcaaaattaatgagaatctggccccccttaagctatcacttacctctgctcttgactataacataatattttgccatataatatgttcatgagaattctctaaaattttaccattaaaatgctctaaagttgctatttgtatatttaagtatgaaatgtttaatcacttttacaaaatatggctatttatttgtaaatataaatagccctcatgaggtgctagatagctgttggggcctaatatcaatcctcttatttgattgatttgattttactggctatatattctgaatggatgcaacttgcaaggagaagaaaagtcagctatatttcattaacaaatcttttgttgctggggtccatccacactctgatcttttgtttgggaaggacgaatgagcactaactggttctc

SEQ ID NO: 59474 - DNA, 754 bp, Cannabis sativa
aatgtcgggaatagttaggattttagaatttcccaaaataccccttagtgtttatttatgatttttagggtggaagggcaaaatggtcattttgcctaagttttagttttgtcttatgtgggtcttattaagcttattaatttgattttcttgattactgttggctgtagcaaattcataaaactaatttcttttactcattagtttaaagataaggaaaaaatacatgaaaaagactctctttcaactctctccttctttctctcgaaattcctagaggaagctagggtttgattttctttctgaaattcaagctagattcaataggtttttggtggtctcaagctctaggtaagcttcttgtaccaccttattggatttcttgaattttaagttagagattttttacatgattttgagatagttgttgctgttcttgctgtagttgttttatgttgttttctgaggttagaatatgtttagaaatgttgttttgagcatgaattaagggttgttagtaagtttaacccaactttgagttttagaacacaaagttggagctttaatgatgattttggatttttagcttcggtaactgtttcgttgcttagaaatggtttattggggtataatatgcaggtctggaaggttgtagttggtttggaatcgatttggttgagctttgaaattttttgggtttcttgcaaaaaactgggtaaccggttttacaggtacctgtaaaaccgagggtgtt

SEQ ID NO: 59475 - DNA, 781 bp, Cannabis sativa
gtaatatggagattagggatgaagctcctatggtggtctgatgctttgctgttgttgaaatgagcaaaggttgaagacgtaggtccgatgtagatccgatagtcgctcgatgctacctatttttcttattttttttaatgttattgtacataaaaatgggtatcatcggacctatgtcttcaaccttcactaatttcaacaacagataagcatcagacttgcatcggaccaccattagaccatgtcctacatttataggtagcatcagaccaccatcagtcttcaacttttctcatttcaataacagaaaggcattgagtctgtatcggactaccatcagactttcatccctaacctccagattacactactatcatacccactaccggacaactatcataccccatcgtaccatatacaaaaaaaatcacaaaaaacctagatttcacccaaactcgatttttaaccaaacaataaacaaaaaaaaaaaaaaataaataaagaaaccacaaattagggtgaatggaaaatttaaggtttaaatggattatatatatatattttttaaaaaaactaacctttaacgatgacattgccggtcaatggagaagcctgaaggtctgcggtggtcgttgggcgtgtgagtcatgtggtcgtggtggtcacaatggtcatcgatataagagatcaaggtggctgttggttgtgcatggtggttgtgggtcgatttgttatggttagggtgagttcaaagcaagagagagaaagagaggcgattgtt

SEQ ID NO: 59476 - DNA, 1095 bp, Cannabis sativa
ggtaaaataatatccaacactttcgtcaatgatagtcctgtgtgtctctgcttcatgcattagctcaatcatgtgtaatacatgaattctatcagggacacacttcttcattttacaattcatgtagctacgagtagcattatgtcttgtttgattagactgctacccaaacattgcctatagagaattcattatttgagatgcattcgccatttcttcatacatcttacgcagaatatcatccatgctaaccaacatgatacatttggctttgttgtttgattgaatccaactatcatagctgtccccaaatctttttggagcattggcaacgggctccccaggacactccttagttagaacaaatttgtatttctcacaaaccaacatcaaattcaaattagatttccatttcaaaaaaattttaccatttaattttttaagtattagtaaaacagtaaggggatttgacatagtagacatgactgaaataaataaagtgacattatacttgaataataaatatcatttcaaaatgaatgtaaacgtgatgcatgagcgcgtacaattaaaacacataaaatagtatataagttattccacgataaaattctttgacaattgatcgctgccttagggtcggtatcaagtcaatttcaatgagtctatgagacaattctcatcttcattattttgaaacttaaatctcttatttccttttcaaagtataaagtacctcttttttggtcaggttaacaactaaccacatgaaatcttagttgcgctttgtgagtgtaacccattatttcatattccatgacttaacttagtaataccgccttagggttggtattgcactaaaatacatcacttcttatcttagtcaaaagatcaaccttgaacaataatataaacacataccttccttagggaacgaatacaaagccgtctctaggccactttatacttcttcggtgttgaccaataatggagctcgtaggttacattgacttgtactccttttcccactcactattttaggttaatgtgtttatttcaataattcccataataatacatattaatcattttaat

SEQ ID NO: 59477 - DNA, 1140 bp, Cannabis sativa
aaaattccggtagacgctcatatcgaaaatcaatccagaaatcatctttaatacgggacaaactaatcatccgccctctagggagcggtttgttaaccaaaagcttaacccgaattcgaagaaaggggccccatccttcatcaagggactcctcatgaacatcgacatattcaccaatgatattccccaaagccttggcaagagttttggatttgctaagaaagggtagtcgatacacttgaacccaaaagcaagtagaattgaaggtattggctgaggcattttgcagagcatctggtgtgcagaaaaccacaagatgattttgaaagtgccatggctccttattcataacccggaattgatctccttcacagccgaaggtgaccttaaaatactcatccctatattcagtgatagtaaccggaaaacgacccctccaatgatcggacatttggttgataaaagtgggcttatggacataattgtgggtgatgactctagcaaggagagtaggggttgggatggtattggtggaaggaatcacatcatcatggagaaggaagactgaatgttcttcatcagttaatttcaaagtggaatccatagagtggaggagaggatcaatgtctgaagacatgacaaaaactgctggtgcaaacagaggaaggaaggggaggaagggaagagacggcggtggaggatgggaggaactgccagtatcacgggagggaaaggaagaagtttgaaaaagtagttaaattgttaaaaaactgttaaaattgcataaactgctacagacccaacacaggcacaaggacacctgctaactttatctaaaggttttacttaataactaaataaaatcattagttaattatgcacatatattattatattaattaagaggtaacttaacctagaataaatgcagaggaaggaatataacaaaaaaaaaaagttggatatgaagtcattgttagtaataactattggaaataattttttttattatgaatatttaattatattatttaatatatatttgactaatttatccaataataaatcatcaataaaataaagaagtgtatttgctttctcagtgttctaacttgttttattaatttagtaaaataagaa

SEQ ID NO: 59478 - DNA, 1288 bp, Cannabis sativa
gaagtagcagacaaatttaactgagaagctacataatatccacttttaacagaataagtaccatctaccgtgtagtgccacatccaagagtcttctttagaaaatttgcaaagaggtatggaatcaatacattgttgatcagcttcatttagcagacaaattttttcgttattaattatcaaatattattcattaatttttcatggttgtgccattagctggaaattaagctaatctacaagcagtggtagctctctctacaacagaggcagagtacatggcttaccaaagcagtaaaaagcattgtagctcaaggtcatcgcaagagaacttaggcctggaccaaagaattgtggctcaaggtcattgcaagagaacctctcttatatgctaacaaggttctccaatcaacaaattaaattcaaacattgtttggatctcctatttgtgctacgtaaattaggtgtcaaggtagagacatattgttagaataagtgcgacagttaatttagttaatataatctacggcacacacaatcaacaaaattatgtgtagaactaaaaactcttagcaaaaacctcctaaggatggtcctgagattgggtgggcctaagaaaaataataaaatacatgggacgttgattaaaaaatgtgatatttacggaaaaacaactcaaaaatatttatatttataaatatactagattaaagttacgtgcaaaggcacgtattttttgttttattttagatgttataaattaattttttaatgatacaacaaataatcatatataatttaatattgtttaattagaatttttttaatataaagtgattaattgaaaaaaaaaaatatacatataataaatagaagtataagtataagctttgacttattttttttttaataaaaaatgtttttttttttttgaagtgtttgaatattattaaaaaaaaattataagtgaattaagaattatataaattattttagttataaaaatagtttctcaaaaattctttcgagacttttaattttttatccaaacactcttaattactttttttaaatttaaagctaaaaaatagcttctatacttgatcaaatattatcatcaaacacaatatgtaactatgtacatatatacttgaacatttacttaaaaggtgatcttgcaatctattgacaaaaaccttggatttattcagcatttacttaatgagatttattttattaatttattttattatatataaataaaaagtgacctatgaatttctcataaa

SEQ ID NO: 59479 - DNA, 1416 bp, Cannabis sativa
ttcattatcttgttgataagtagccatcactagccttattaatcatagcacaatagctgcataaaaggggttacgccgtcagacttattacttatggcaattctaatacgttttctcctacgcggcattaaatgagaggtgattgttcaaataaggtcatgttcctcccagagatcccttggcgttcccctggtctccgggagtacgtggagcctttacctctcctctgggagggtatattcttgtttgacactcttgaaactaagagacttagtcgattgatctaagagtcacacctcttggatccacgtgtcgttgtcatattggtccacgtattttgggcaaaattaagggcaacaatatagtatgcctgtgttatcttttcacgcgtgttctgacatgttggggcggtatagtcacaatcaggtttttcgggctgaaccgggttcgggcccaaaatgtaattttgggaattaaatattggcattttatttggtattggataatttgaatttttatttgaaaataaatgagtgtgaaatgacaattatgctcttgtatattaaagtggatgttatttggcccttagggggtaattttggtcttttgacctttattgatttacatttgataaatagaatttttaaagaaaaaggaaatcaatttctagttgcttcccctctcacccgacccccctccctctctctcaaacccttgattttgggaagaacttgcttgaatttggcttggatttgaagctttatgtttgtggagttttgggctttgcttggttgaattgaggtagcttcctttactgaatttgattgaagttttgttgaattttaattgtgttagaagcatgttttgggttgtgttgttcttgagtgcatgctatgagaattgatgcttagctttgttgattttgagtgtgaataacatgatattgttgtggttttattcttgagttgtggctgtgattttaggggattttctacgttgaaaattcatgctttatttggttttgagctgctggaaaatattagaatttgttggtttgaagctcaagttttgtgcttgagttcttgttggaaaagcttgatttttgtgtgtttgagcaagctgatattgagagtttttgttgatgtttgatgcatgaaatagtgttttagactctctatttaatgattgaaaatctatgtgatggttctaagttttggtttgggtttggatgtgttttgggcataattttcgtagctgaaaattgagttttctgggtttttaaacccagtggtcgcgactaccataggtctggttgcgaccatggtaatggcagtttattaatttttatgagtttttgtttttgccataacttttgactcgggacttcgtttgggacgttctttataccgttggaaa

SEQ ID NO: 59480 - DNA, 1517 bp, Cannabis sativa
ttattttattatttatatgtgtaaaattctgaaataaagttttaaaagaaaagtaactagttgatattttattcacatcaaaagtaactaaatgtttactttttacaaaactcctaaaaagcaaaaaaatctagaaacgagattttttttttctattttcggtaattattttgaatttcggtatatatgctgatgtggcattagggtatttgtgtaaataattttcttaaagatatttttgtaaataaaatcaattttaagaataatattaaaaactccccaagaaaataagcgaagagaaaaaaaaaaaaaggatgaaaataaccttaacatatatattgtaagttatatgagtttttcatcatcaatttaaataataataaaaaaaagaaataaagaaattatcacaaaagtgacacaagataaaatacattataatataccttaggttgccacgttccttaaaataatataataaaactttttatttaaaatcagtacacaagtgtaataaattgaatagtaaaaaagtagaaaaaatgcatgtgataatgaaattaaaaaaaaaataaaataaaatattatgaggtgtaaattttccaactatttatgtgtatcatcatgtgtttattgtcatcattaaactttgagacttttacactaatcggtacttgtttataaatatatattatatatgattgcacaaatgaatagatattgtttgtcaattctagcattttgtgcattttggtgacataaaaaaagataagagtatatagagatagcagagaaaaagatccataagatatatttttctatataaagatcataaagtattgtctaattatacaattttctttgttcaaatcatggcagcttatgacaaaaacattctacttattatatgaatacacatctatcccatatatatacataggcagaccaatatagagtctaagaaaaacttaagcgcaccctcaaatatcattatataaaattagaccctcaaatatcattatataaaattagagatagaaataatacataattgttaggcaacataatttgtataggtatttattcgttattcagtagacctggttttaaatctgattcccctcaattttatcttctatttttatttatatataaatctacctttttgaaagaaaaaaaaactaaaaagtattaacataaagtattcaaactacaaataacttttttgttagaaaaaaattattatattaagaattatgtttaattatatttaatttataattaacataagttctcacataaaaaaaaaactataacaagagttataaaatctcatattattatttaaatgctaaaatttgtttccttctatataataactttatccgagatttaagtaaaaaatgtaatatatatattttttttaaaattattattttaaattccagtacaaattttacttatcccaccctaaaattatatcttgaatctgccacattatttcatgttattttttaatt

SEQ ID NO: 59481 - DNA, 640 bp, Cannabis sativa
ggtgatttaaataatatcactaatcaaaatgacaaaaggggtggttgtccttatcctgaatgcttgatacaaggttttacccaagtgttgactgactgcaacttggttgatatggagcttcatgggcatcaatttacatgggaacgtggaggaggtactgaacatttgactgaggttagacttgatagagctttggcttctatttcatgggttaatgtttttctttctactaagctttttaatcttcatgtttcgtccttcgatcattgtcccatatttttagaccccattgttcgaaatgtttttactagtgctacgcattttcgttttgagaatgcatggttgagggagcctctttgttaccaaggagacaattaataccagccggcgttgggaacttgatagataaatggtatactgaggagatggctcaaaggtcgtagagagcaggcatgtcgagcatcacattgtacaccactattaatggggccatgatggtggtttgctttggggcagtcccgacagtaagtggtagtttaatcttgcatggttccaggtcttctaaggtcaaacccattttgagtagggcttgcttaaacaggatgtttgatgatgattcgttatcaatcattaccctggc

SEQ ID NO: 59482 - DNA, 1064 bp, Cannabis sativa
  modified_base (319)..(320): a, c, t, g, unknown or other
tctctgaacatcaaccatctgtgggtcaccggaacaacacatccttagccccctcctatattggtcgttcctctctctttgattctaattgctcttttagttacaattgtgatctctcacaatctaagccaaaacattgaaaagattgatttaataaaaacaaaagagtttaattttaggaagagaagattacatgcacatatctaaacttaatgttgtcaaacttaactagtaacattttatttatcaaataaaatcttatgaattcctaatataatttattctaaattttcaagaaaggaacattgtccttcctagnntcaattcaagacaataaagaaatataaaacatattcatcttcttcgtaaaaagtgttatcaatcataagtgaaaggataatcttaatttctctaagcaccacttcagatgaggctctaattctaggaaacatcttttacaaaaatctacgtatcacatataaaactattaatggcaatagcaagtatattaaactaacacttatcttatagtgagatggatcttttgagtcttctgtatgtataccgtgagtatcattcaggataacggacgattggctcacatacaaactgtaacgccctgacattttgccttactttacaaaaataccatcttaaatgcataatttgaaaagataaaaaaaaaatccttgaaatacaatagtggattttagaaataaaaatgcaatagagaaggatccttcatttggaaaataaaatacgataagtaaatgattttaaataatacatttcaaatgtatttagatttatcaacagcttaaaataaaactaaggcaccatcggcgttctagatcgtttgcccatccgtagccgctcatagtatgcgtaccagaactcaccctgctcattatacatacttccctgtctaatacctgtggggggaaagtaaggggttgagctaaaagctcaataagaaaatgcttatcatacaataccatacaatatcacacataccattaatgtattaattaagtttcagtaatatcatacaccttattttataa

SEQ ID NO: 59483 - DNA, 1872 bp, Cannabis sativa
gaattaggataaaaagtaatcttcccaatcaatttatcttcaggtttaaagtagtattcccataactgcaaaaaattaatgaaataaaaaaaaattaacagaaaaaaatagaaactagcaattggaaaaaagcaaaaaactcatagagaatttgctaaaaatattaaccatttccaagttttgggtaataaatgcaaacaaaacagaagccaaaattagaaagactgtaacacattataaatacaaattataaagactgtaacacgttataaatgcaaacaaaacagaagccaaattataaatacaaatttgaaactacttgcaaaaactcaaaaagcaaattaaagaactctcatcattatgtaacacattatagtatctataatcaatccagagccaaaaaaaaaaaccacctcaacctaaaaaagaaaaaaaaaactccataaacacataaaagtgaccaaaaacaaaagactttcacagctacacaatgaaatccagagcccaaaaaaaagaactcaaaatcactcactatatgattcgataaaacataactaaccttactaaccttatttaacatctaatttgagcaagctcctaaagttgttcgagtcaaacttatttgttggaaagtattaatcacctaatctaaacaggtctgaaacaatataatatgttctattagtcacctaattgttgtattaaattctttttttatgtaagaactttcaacaaagaaattaaaatactgatttaaattggaaagcataattttagtcccactcaaaatgatatttcctctatatgattcaataaaacataactaaccttatttatagcaaaataactaaataaataatcaaaacaactttctcaatctattataaatttgagacccgcacaatttcaaaaacagaacaacatagaacaataacatgatcacaataaaaataaaccacacacaaaacactaccactcctgtacagacaagaaaatactaataaaaatagttcaaccaaacagttaaaataaaaaacagaatagaaactatatacacacaaaaaataatattatctcaaaatttaaaacatactgaaaaagttacacaaaaaaagaaagaaacaacataaactaagaataactaaatcacacaaaaaataaaaacatactgaaaaagttacatcctacacagttacacaatctgaaaccattccagagtaacaaaacaagaatatagaaaatcaataaaaatataacgaatcaacaaaatatgaaacaaaaaaaaaaacaacaataagaaattcatctcagattaacaaaagttgtataatataaaaataacaacacacaataaaaccctattttaaaaaaataaactaaaacaataccaaaaaatcacacgaatgttaaaacaaataaaacaaaacataatgtatataaaaaacacacaataaaactatttaaaaaaaaataaacatcacaaaatcagaaataaatataaaaaaaatcaacaaaaaagaaaaaaaaaaacgacattaagaacaacttcaaaagatgcaacatatagtaaaaaaaaactaaaaaatgaaaataaaaaaaaaaaagttaaaatgaaagaaaaataacctttgctccattgaagatatccatgcctaactcatcttcagaatcagaatccagagcaacacatttcctaactcttttcacaacacggtcatcttcagatgcctttcctttctcgactatcttctccttatttcgtttttctttgcagcaaaaccttcactctttcctgaactcgagggcttcgaaccaccggggacacacattgacaaatctttttcagttgcaccacaatcagataaaggcaac

SEQ ID NO: 59484 - DNA, 553 bp, Cannabis sativa
aaaaaaaataaaatgtgatatgtgagtaaaagtaaagtaaagaaggatgggtatgtattagtttttatatatcggtattagtggatgtattggtatataataggggtttttttaatattatacttaaaattaattttatttataaaaatacctttaagaaagttagttgcacaaataccgatgtgccacgtcagcatcataccgaaattcaaaataattatcgaatatgaaaaaattggaaaaaaatcgtttcaaaaaatttttactttttgggagttttaaaaataagcaaccatttagttgcttttgatgtgaataagatatcaattggttactttttcattaaaaaaaattatttcagaattttatacatatataaataataaaataatcaatttaatatttgagaaacatatatttttctgtctccaaaaaaagacgactaatattaaaaataatttttttgtttattttttatagttttaggttatattatgttattttattgtttaagatacctcgatgtcacttttttttaaaagcaattcatatg

SEQ ID NO: 59485 - DNA, 753 bp, Cannabis sativa
ttttaaagacatctttccatttgataattgtttcttggaatctacatatgaagtgaaaaagactttaaattctataggattgaagtagaaaagatccatgcatgtccgaatgattgcattttattacagtaaaaaatatgcagacatggattatttcccgacttgtggtttatattgtcataaagtaaacaagagtagagagaatagaaaacttatcaccaaaaaagtgttgtggtgcatacctttgattccacaacttaaacgattatatcgtcgtgcagaacattctgaaaatttgatttggcatgagaccaagagagtgaaagatgaaaaattcagaaatcttgcagattcccaagtttggaaaaaagtaaactacataaatcatgaattcaaatctgaaccaagacatattcatcttggtctgtctgcggatggagtaaatccacatagatctctaagtagtcatcatagttcatgtcctgtcttccttgttatgtataatcttcctccctagttagtgatgaaaaagaaatttaatatgctttctttaatgatatcaggtcggcaacaacccagacataatatagatgtatattcagaaccattgattgacgatttagtagaaacgtatgagaatggtgttcaggcctatgatggttttaaaaaagaattctttaatatgaaagtagtgttattatagattggtataaattttccagcttacagtaatttgtcaggcttaagcacaaa

SEQ ID NO: 59486 - DNA, 1127 bp, Cannabis sativa
aagggaaacttacaaaaatattaggttttgaacaaatttttataattttactgtcacacggtaaaaaatatatttatactgtcctgccttttttttttcttttatactgttaacacaaaaaaaaaatgaggcctccatcttctacacccacggacaaaactaccacaacaacaccataatagccaaaaaaaaaactattaattcgagcaagatgaaacaaaaatattaaaactattaatactggggctgtcatgatttttttaatattgtttttggattgctccactgttatttcgtatgtttaacaaatattggttttaaattacacaggttaaatcaactactagaatgaaagaatgaacagtaataatctaacttcccattgaaagggtaaaatctaaaagaccaaaaaaagaaaaagatggaagttggctgggagaaaaaatagcataacaaatacagtaaaatatgggaagctgggacacaacaagataacatacaagagaagacatcaaaaatgaaaagaagcagaacaattaaaaatcaacagtggaacaatacggaggaaaactgaatatatattggagcataggatactgaaaaaaaaaagataacttacacacaaatttcattattttcctattactattaaatatagagcagtacaataatatttggaaaaatgtgagaaagaaatgaaagaaacaatagtaaaacaacattaaaacaataataaaataaatcagtaacaaaaaatggtaggttggagaaagagggtggacttggaagtacgatagagatggaaccaacgttttgagactaaagagactgatcaagaacatgaacttagttggagtttctgagagatttctataagaagctcatcacaaagtaggctctccatttctctcacacacacacacaactacactcttatctttctcaaatcttcttcttcttcttcctactttacatactctttttttttttagttacctactacaaaaagagagggttagcttttctttggttaatgttgtagacatagaaaagaagaagaagaagaagatgaataggaaagataaaactcaaaaaataatgacaaataaaataaagagtatttaatt

SEQ ID NO: 59487 - DNA, 1563 bp, Cannabis sativa
  modified_base (43)..(50): a, c, t, g, unknown or other
  modified_base (1348)..(1351): a, c, t, g, unknown or other
  modified_base (1535)..(1536): a, c, t, g, unknown or other
ccacaattaaataaattcataaataataataaaataataaaannnnnnnntaattgcctttactaatccaatttacttaaagcggtcattacattaagtgtggttcataagattgttcacaccttattcttagaatataaaaattatattttttcctaaaacataatatctttgatttgttgtagtttctttaacttatttcacaactaaatttttgaaattatacccttataagtgaagaaaattcctatcttttgaaaataacatgtgcttaaatgaaaaatatattttgaaaataataatttgattgggctgactatcaagaaaactcgggagtcaatatactattaaatattattaatatatattgtggattctaaagtcttaataattttttctctaccatttattcataaattccttttaccttatttattttagaatcttatttattttcttttcttttatgaaacaaatctcatcaaatatttagagccaggtcagagtttaactacttttgagcttaagaagtctctcttagatgtaaatcaactcttttggattcgacctcatacttacatgaacaatgtattccatatcctattatgcacttgcgagtataaatattaagagcacatatcaccattgggtgtacaataagtttttagtaccgttgtcgaggagttgtaagaatagaaacatatttatctcaaggttagtaaaattcttcactagttattttatttttattttactctattatctaataaaaaaaatttaacagataattttgggtcagtcctacaacctattatttatttatatttttattaaaaaattgggtcagttttaagcctaaatatatatatatatatactatatttatatattatattattgtcattctttagttggtggcatgagttgctcctatcagcttgttttcattatctgctgatatagttgatggaattcgtgcctcctattctctttaatttttgtttttactattattattatcacttatattatatttttttgttcttttttcattgttaaaaaaagaattcattctaagtatgttctatggttgcggttctaattgatcatcgacattagaaattttctcttgtgattttgtttttagttgtgtgaaatttgcatgcatcattggcaacgagattcaaagattcatttggttaaaagaagactgtatttgcttgaaattgaaagtgttattgggaatattttaccaagatctagatttactaacaagtatattgaattaacatcctaaatatgaattctctacaacaatgaaataaatccatttcaatataatcagatnnnntaattaataaagatcaaaaatcgcttttatgttgcatggttcaaatgatttatttcatgattatggttaatatataaattctaataagtctagaacatatgtatttgttaattaatatagtgtcttcagcacagtggaatataatcatgattatatgttcaaaaatttaattccctgatttgtnngttcactgaatttagactggcataata

SEQ ID NO: 59488 - DNA, 1632 bp, Cannabis sativa
ctcttcatggcctcgtccatgcccccgaactcgaacatgacgtacccatggtccattaaagtctttgagaggcgaccggtctccgcagcaatctgacaatacaagaaaaaacggtaagtatgggagatcaggtgccacaaagtaaagcccaagaacattaacagagacttactgtggtcatagcagcgctgatatcctaaatctgatagatggagttcgtagaagcgcaggctgcatatcttttggccgggagttgggtcaggttggagacaaagtggctcgtcaactcgaaggcgaagggagcaaggttaggctcgacgaagcggtttaactagtccctcagggggtccatgttcaggtcccaagcattcctaaaggcctcctcacgcaaggaattttgttgggcctcccgtaagacctttttcaaagcctccacctcggtgttcccctttgtatactcagccataacatagttgtgcttggaaattcggagctgctttctctcctcatctgcgggaacgggggtaaggacgatgctgggaggcacagtgtattcctccgcttcgggtggaatcccagaatcagagctgacggcaagagtattaaccctcctaggctttttggaagactccgcctccaccattttgcccttacattttctgtccaagggggccaggatctcaccctcttcctcgtcctcctcgacctccctgtcttcgtcgatcaagatgatttggcctaagggaatactagaagaagacctccctagggtcaccgtctggtcaggcgccggaggaaaagcggagtcagggcaagagtcgccaaaagctcctccattggtctggctgcttcaaaaagacacacaaattaagtgtcagagtggccacgataaaatatgcacacgaaaacaaagaagtaaaactagtcctaccccgactatctaattcagccctaacaaagtcttgtactacaatactggcttcgtcatccccaagaaatctgttcgaggggagaaaccagctggaagacagataagctgaatgatctaggggaataggtgtaggaggtttggaccccatctgggaccggcctagaaaatgacctaagttggaaaaaaaagcccttggcatgatcaccccaccgggtagggggcattctaaatctaagaagacgttcgtcaaattctataggcctacaccgagaataatcttgagcagaaggaacacgatgaaccgttaagggagacttaacggatttggatgtactggcatcaggagccccagtgttggggacagggagaagcatcttaggccgagaaggtgccagttctttcccagcttctatccgcagggtcctcccagcagcagcctgagccttgatgtaggctaactcttgttccctcctaaagagggtacttttggtactggtcctctgccgaggcaatgatgtccggccggagtgccttctcagcgtccagggtaagaatgtttgggcagaggaccttggagaggttgaagtcgtccacggattggctcccttagatgagcttggcctttcggcagtttttcgttgtgaccaagtcccccacgttaagaccatttctgtcataagtggagaaaaccttagcatgct

SEQ ID NO: 59489 - DNA, 747 bp, Cannabis sativa
tttttttttttgtaaaataaaatagagaatctttaaatctttaaaattttaaacaaatgaaaagacactacaccaaacaagtcaattagtgacattttatttagggggttttagaaaaataccaatttttctttgttatttttaaaaaatttacacttctttttttttacatttttacggtattaagttatcaaaaatattgtgttaatattttaaaattacaaaaataatgttttataaaataaaaaaaataaaaacaattagaaaacatatctaaaacaacttaacaaataatataaaaataattataaaacgataaaaaaaataattagaaagtaacaaaaagtaacaaaataatgatctaatttcaatacacaaaataatattaactcctcattatgtttttattttactattgaacattttttaagaatatacataaattataaatgaggagcattaattggtaattacaacttcctattgcaacctcttagtcaacctccacgttcaaaatatcatgccgaaatatttttttttcatagcagtattcgttatagttgcagtatcaaccctataaatttttgaaaaattccgaatagtttacagtaccgaaaacagagttcctgatatttcagtttaccacgcttgttcaaaaaacttcaaacgaatttcagcaatgtaaactatttaaaatttttcaaaaatttatagggatgatgttgtaagcataacgaataccgccat

SEQ ID NO: 59490 - DNA, 2784 bp, Cannabis sativa
aataatacctttgtgcatcaatgcgggtgtcttccagtcgaaatggtggtttgttgcacgccatactgctcgagcatatttgcaaccaaagagtgtgtgactgattgactcccaagcttgacgacaaagtgaacaagtggagtcagtaatgatgtttcggcataccagcgatgttgcaatcgggatagcatcatgaaatactcgccaagcagattattttattttttggggcagctgtaatttccaaaaaaatttccaccaggtcgtggatggagttgaggtggaggaaaggtctgtttcttctagtgatgcagcaaaatggtatcccgaatggacattatatatacctgaggtgtggtgatgccaaataagcttgtcatttgttgagaaaaagcttaggggaattgtgagtattcgatccacatcaatattagaaaaatactgctgaagtatattgcagtcccattgtcgatcattagtgatcagattagcaacatcagcttgggcaggacctttgtaatgtgttgggaagaaattttggtggccaggtatccatggatcagtcgcatagttaatgttccttccctctccgattttccatcttagtccaacacttaagagctcccgtccgaaaaggatgccttgccaagtaagtgaaggagagtgaccatgaggtgcctcaaggaaagtgttgtttggaaagtaacgactttttagtaatctactcaaaagagagctaggattatcaataattcaccataattgcttagctagtagcgcctgattgtaatgtacaaacgaccgaaatcccataccccatcaaatttatttttgcataagagtttctagctatgacaataatggatctttgtgccattctcgttcgatccccaccaaaagtttgacatcatcgattcaagctgattgcaaatggtgattggtaacttgaaacaactcataagatatgtaggaatggattgcaccacaactttgaggagtatttctttgcctccaacaaagaaaagtttgtcattccaagttctcataagtctccaaatcttttctttgacctcactaaataagtgttgtttatctcgatcagtatatgctggtaatttaaggtattttttcatggcaatctcgaatgggcatagacaacactctatggaattgaatttgggttgccaaagtcgtatttagtgagaaagatagaaccgatttgtcaggatttaaaacctggcctgaagctctgtgatatgtgtcgagagatctcctgatagcatggcaagaactttcattagcagtacaaaaaagtaagccatcatctgcaaaaagcagatgtgaaatcggtggagctcttctagtgagtgaatatccatagagataccccagtcgttcctcattctgcaacaagcaagatagaccttcaaaacatattaggaataaataaggtgacaaagggaagccttgtcggagtcctcttgttactgtaacaaaactagcaagctctccatttaagaggaaagtgaaatggttcttagtcaagcaattcataataagggatattcaaccatcagcaaagcctattcgctccataacaaccttgataaaattccattcaacccgatcgaacgccttactcatgtccaatttcatggcagccaccccttttcgacctgatgttttgagtttgataccatggattagctcaaaagccaccaagatattgtatgttataagtcgattgggaaggaatgcactttgtgtttcggagatcacatgtggtaggacattcttgaagcaagcaactagaactttggtaatcatctttgagatgacattgcaaagactgatcggtctgaaatccttcatgtattgtgccttctttatctttggaattagagtaatgatagtggaattaagaggagtgggatccgcaccatcattaaggacacttaaaatagccgtggtcaccatgttaccgacgacatcccaattgttttgataaaacatagcagacattccgttaatttcaggacttttgtcaggtcccatagagtggagagccaattcaacatcagcgtgtgtgaatggtttgaggagagtctcattcatttccaaagtaacagtggctgggatagtggccaaagttgcagcaagagcaatattgttaattgaagaagcctggaataagtcgaagaagtaagcttcaataaccatgctcatgccgtgtttggaagtaacttttgtactatcttctgttttgagggaagcaattttgttgttggactttcttgctgaggctttggagtgaaaatattttgtatttttatctcctaattgtatccaatcaaggcgagagcgttgttgccaatagatctcctcttattctaacaaatcatcgaaaatgaattcattgtgtttcagggattactcagagcattgtttaaagagtagactttcttttgtgcagctgcaatattattcttcatacgaccatatttttaatgtgacaagtttgcaaagaaatagcacatgaatccggattattgagcacactcctaatagggtccaatgagtgaccagccagccaacaattagtggaaattacatattatacccgttttagtttaagcattttaatttctaccttctgattcttattctttcatttatacctacatttataggtaatattcctattataccctttattcattatttaggttaataaaattgcaaagccacactctctctctcggttttgtgtggaactaaaaagaa

SEQ ID NO: 59491 - DNA, 1774 bp, Cannabis sativa
taaaatttaaaagtaatattaattttttaaaaaattaatattaaaatacatcttaataaaaaaaaatattatttttgaatagaaaattattataaaaaaagtgttatccatgaatttctcataaacgcaagaattcagttatatatgcacactttatatagaatagatatatatatcaatctcaacctcaagaagaagtctttggtcaacaaaatgggacccgaaaagctattgatagtatagtcgattccatgtggcaagtgaatttaagaattagattgtggtgttgatcaactacctggaaaaaatgtggccccttttcaaaccaaaaaaagtgtggctctatatatgttacactatttacaatttttgtatttttaacttttttagatcgttaaaaattaaatttgaaccatttaaagtattataaattaattctttagttaaattttatcacacgtaacaaataagatgataatataattatttaaataattaacacgttagtatcatgtcaataccacgtgtgtaacactaatttaatatctttatttagttatacaatttttttaattatactaattaatttttagtttaataatattttagaaatacatacttttttatttattttttaattttaaattatatatgaagtggtaatatagtaactggcaaaatatatagccatatcattattttaaattaacatctataataaaatttgataaaaaagattaatttatacaattctgtaaataattcagagttgatttttaataagctcacaaatttaagaatacatactatatacttgtatataatgtgtttgctactgtcttttatatatatatttatatatatggcctgataaattctcagccagtcccattaatttgttgagggcctccatatatataaatatatatatagatatacatatatgtatatgtgtgtgtggctgagtggttagtggggttcctccaatatttaagggcaaatgcaaattgagatactacaatgatatccaacatagcaactgtgttatattttttatataatagtatagtactatacattccatgcatgtaattaataaacagaaatagaagaccaatgatactccaacccatgatcaatttgtagtctactatttcacaccttaccttaaggtatatatattaatttgatagcgaattttgtatattttcttctagtaaaaaaaatgagctatatgattataaatacttaaatggatattaaatatatataatttatcatgtataataatttatttgaatcttaattatatattagttattctcgagtacatattaagttttttttttaaagaaaaataatctaaaaattagttacaagatgtcttttagtaactatgatgtacgcttataaaataaaacacgaaaaataaaacacgaaaaagttggcagtacataatgtacatatatatattttttaagtataccataaatttctgtgtaaaataaataacaaaaaatatcatatatgtgtacaatttctcaaagagatacatcaaacatcacttcattcaaaagaaatatagaatatatataaatatatacatttaagaaaaaaatggcacatgcccatgttgtgcttttttttcttcttctttttaattgaaagtactaataaatttttctgaaataagcaagccattttgattttgatgatgagttgattgatgttcccacttgctagtagtaagctatagccatattttatatatata

SEQ ID NO: 59492 - DNA, 2502 bp, Cannabis sativa
  modified_base (368)..(373): a, c, t, g, unknown or other
ttgcagcaggttaggtatgttccagatctcaaaagaaattttctctctattggtatatttgataattggggtatgttgtcaaaactgaggaagatgtaatgaaaattgcacaaggcacagaaactgttttgagaggaaggttgagtaatggattgtatttcctagatggaaacacaatataaggtagtgcagcatctgttatggactcaactaaacacagtcaagcaaggctatggcgcctcaaattggggcatgtatgtcagagaggacttgaggaaatgaacatgcaaagactgtttaaggaaaagctaacagaaagacttgaattctgtgatgaatgtgttttggggaaggcttgtagattgaannnnnncaaggcagaacacaccaccatagaaaggttagcttatgtccattctagcctttaggggccatctaggattccaaccaaaggtggagcacactactttatgagtattattgatgattgcagcagaaaaagtgtgggtttatttgttgaaaagcaaagataagtctttaagaacctttgacacatggaagaggctactagaaaaccagactgggaacataatcaaggtactaagagctaacaatggtcttgagtactgctcaaatgagttcaagggattgtgtgctacaatggaaatccagagacataaaactgtgatcaaaacccctcagtaaaatggtgttgttgagaggatgaatagaacattgattgagagggttaggtgcatgttactaggagctggtttggatagaaccttttggggaaaagcacttaaaatttcctgttacctaatcaacaaatcaccatctgtgccaaacaactccaagacctcacaagagttatgaacagctaaacccccaaacttagatcacttgaaagtgtttgattgtactgcatttgtgcatgttagacaagataagttgcaacctagagcattgagatgcatgtttctaggctatcgtgaaggggttaagggatatggagtgtggtgtttagaacctggattcaagaagtgtttgattagtagagatgtggttttcaaggaatctgaaatggccatgaaaaccaagagcacttccaaagatagtgaagatggtttagatgagaatgtccagattgaggtggagcaggttgctcctacaacaccaactaattattttccagatagaactggggcaacagaaagggaaaataatgaagatcagcaggaactcaacaactatcaattagctagagatagagagagaaaacagagaaaagcccctaatcattttggttatgctgaattcattacatatgcatttatgattgcagatgaggttaacagttcagaacccactagctttgaagaagctatgagaagtaaagatgctgtagcattgctgcaggccatccaagaagagatactgtctcttaggaagaatggaacctagattgttgtgaagaaaccagagttctacaagctggtaggatgtaaatggcttttcaagcataaagaaggttcaaggaatgagcctatcagatttaaggcaaggttagttgtcaaggggttcacttagaaagaaggcatcaattacaatgagattttctctccagtggtgaagcaagcttcaatcagagccatgatggcaaaggtagcaagcatggacctagagattgagtagatggatgttagaacaactttcttagatggtgagttagaagaggaaatctatatgcaacaacctgagggctttgacaatgggaacccagatatggtatgcttactcaagaagtctctttgtggcctcaagcaggcacctaggaaatggaacttaaggtttgacacttatatattaaatattggatatactaaaagcaagtatgactcatgtgtgtatttcaataatcaaacctattagctactctatgttgatgatatactgatctttagcaaagcaaagtcagagattgacaagctgaaaaggaaactcagtgatgagtttgagatgaaagatctgggcaaagcaaagagaattcttgggatagacataaagagacctaagcatggcatgatagtactttctcaagctatctacctacagaagtattgaacatgtttggcatggacaagtgcaaaccagttgcaacaccacttgctcagcacttcaagttgtctgcatctcagtcactaaaaactgatgcagaaagagccaagatgagtaatgttccctatgcaagttgtgttgggagtctcatgtacttcatggtatgttcaagacctaacttagctcatgtaatgagtgtggtcagcaggtacatttcaaacccaagccctgagcattgggaagcactcaaatggattatgaggtacctaaaaggtactctggacactgatattgtgttcagtaaggagaaccagtacaaggaagaaatcactagttttgtggactcagattttgcagcaaacctagacactagaaggagcctaa

SEQ ID NO: 59493 - DNA, 1084 bp, Cannabis sativa
  modified_base (873)..(895): a, c, t, g, unknown or other
  modified_base (990)..(994): a, c, t, g, unknown or other
ttttgtaattttttttttttgtttttatatttttgtaaaataatccctatatataataatttattttcacacattacaagtgtgagactaactctaatatatacgtgttaatatcgctattaatctaactaattatcgagtttaatataatttaatgtaataaattttagagagtatcatcagggccggtcttaggctagcccgcgcttagggcccactcctattagagacctaaatgaaaaaaaaaattaataaatatacatttttttaataatttttaaaaatactatttatttttaaaaacatgacacctctaaaaggtactatacactattaatgatcaataacaatactcttttatcacatagctaaaggtataagagatggactgaaggagggtccagctttgttaagagctttgttacgaggtcacaaaaaatggaagttgatgcgacttgctagcttcctccggttgccccatatctttccacaaatcaaaagactcaactcaactattttttttctttaagtatatcctaaaaatgcttctttatatttattattatatgcatggcatatatccacgtgctttcacttcatgggcatgttttaaatttttggtaacatgtttacctcctctccgttcaaaatggaagaccttttgtttgtcaaattagtccttggccttcaatttatatctaaaattaaggtgttcattcaattcaatttgcactattttgttcgtagtgcatgcgatccacattaagtgcagattttattttttggatccaattcaatccgcacaatagttcaaatccaatccaattcaatctgcaaaagtgcggattggatcagttattttagattggttannnnnnnnnnnnnnnnnnnnnnntatttatgaaaaaaaatattttttcacataattagcaacaaaataaaacaaattataattattttatgctctaacaacacattaaaataaataannnnncatattcaaaggaagaaaaaaaattatatgtataactaaatgtttacttttattttaaattgtatgtaaaaaaaaaattatatataagaa

SEQ ID NO: 59494 - DNA, 941 bp, Cannabis sativa
  modified_base (36)..(62): a, c, t, g, unknown or other
tttcattgttttcgaattcatattaggatgttaatnnnnnnnnnnnnnnnnnnnnnnnnnnncctggtaaaatatttcaaacagttacaactcaaggcaactgtaacagcacaagtgtgcgtattggagtggtatatggacgcttaaggctttcgcaactcaacttcacaaatcataaataacgttttcttttgaaagtttggaaattcaatttcgatcgtggcattaatgttgttgatgaatttaacgaagaatctacgtcatctatgtggagtttggtgcataaaattagactcgtgaaggggtttaaatataagaaaattgaatgtggtttctttccatcctgataatggcaacatgatatttttactacgtgattcttatatcattgaccaatatgacatgttgacaaataacacctcaaaaattggccatttttcatttatacatatgttattaaacaagctaatcactaggaaattgcaagttcacacccttttgcatcctctatttccaacaccactcccttctcttgcagcctcgaagtattttttattatatttataatttactacctaatgtgtatactctttatttgatatttaatggaatttatttaaggatgttaaaaatacgtttcaacattttgttcattttcagtatactagttaggagtgtaaatgggttgggtcgaatctaatccggctatgattcgaccaaatccagatcatgtaaggatctgccccgcctcgtcctgctagatcagatactcggatcggatcaaatccgacccgattatttttatatctattttaattttgtattagtattattaaatacagtactatgtttggtattgacatacattaatagattgtgtaaagatccgaatctgggatcgggaccatgtcgcgtccggattcgggtttgagtcccgggtc

SEQ ID NO: 59495 - DNA, 1525 bp, Cannabis sativa
agaaacccaaacaccttttgacaatcaaattgcacttcagttggctcaatccctataggaaattaagagcttcagccacatccttcacagtaaaggaataccagtgtctcttgacaaaaattttgccaaacataaagatcatcgagactctcatcagttatattagcataaaactccttgacaatttgatccacatagccattaaacctaatcaatgtatccatccactatctttctttcaataaattatataccccaaatgacttatgagcaatgacattgaaatttttctccacaatgaattcctattctcataaaatttcatatctttagcatgatcattataacaaaataatgagaatgaggcttgaagttttcaagagtaataccagagggtcttttctttttttggagaagaatagggcttggagaaaccatgagtctttttcctttgtcattctttggaactgcaacaggaacaacaactggttctgcactaacaagatcatcttcaggcacttcactttcagatctagaatcatcagcagagggttgctcttttggaacaagttcttcactagaattagactcatcctctgattcttgttcaacatcctcaatctcttcttctggttcagaatttgatgaggaaatagaaggtggatgctctttgagactttttgcctttgaatatgaagacaccactttcttctctttgaagacttctctgagctcaaccacctctggtttctttggtgtggataccctggaccttgtacaagagctcaccattgacaaaggaataatagctatctcggcattgggaacaccattggaagaagatgacttcgacaaggtgtgatcagatgaatggaattcatcatgatcaccaagcctaggagttggggttgcaatcggagaagcaatgatcggaggagagctgagattgtaggttaatttttgagcttgggattttgacttcctgacagtttttgatggagcagacgacgacccaaaatctcagcagaggacgaagcacgaacaagcctcttggatggttgagcattcttggtcttatccatttttcctttaaaccctaagcaaaaggtattctcgaacttaaaaagattaaatttttaaaaagaaaagaaagagataaaaggttagtgatgatcgttggaatagtgtggtgaagagaatgggtagttagacatatatagcactaggaaataaatacccaaaataagaaaaaatgaaacttttataccttcttaccttgagcaccacatgtggataaaaaaagaaacacaaagattttttcaaaaaaatttggttaatggttaccaaaaatgaaaaaggaaaaaaccaacttaaccccacaaaatctagaaaaataaaacacaatacagtaactcacaatctatgccttattcgaaaatgccaccaaaaaggaaataaacaaaaaaaatattttaaaaaataagtttcctaaaatcatacaaccaaaaataataaaaggaaacac

SEQ ID NO: 59496 - DNA, 580 bp, Cannabis sativa
aaactaaacaaacttacaattatttaaatatattcaaaagtaattagtttacatagtcttacatatttttctttggcatgctagctaacaaactcgtctgtgcccttctttgtgtgacaagctttccaattctcaatgcgacccaagttttgctaataaataaaaattataagaaaattgtaatgaaattaaacttcataaaataaatagtatatatattaacttacattttcatgaaggttctcagccatagttatggacccttctgttgatgggaataacttcttctgtcgattgagagcattttgctttcaacgagccataaactcttcatatgtgaagaactggcatattaggcgacattgttcttcattgagttcattgtggggttcttgactgcaattttaaagtctcctgtatttttgtaaaattctttaaaatgtacaaatctaatattctttctcgtcttatacttttcgaccatttcagctaacgaaatagctaataattttggatgtctgtcaatttcgtaataatactgcatttgacaaaaaatattatgataacatactaataattt

SEQ ID NO: 59497 - DNA, 940 bp, Cannabis sativa
aaaaatgttattttgagcgtgtcaaagtataattgtaagattattggaaaagttagtaaatgatgtaaatttcccttgatatataagtgatttttgggctttaggatctattcagtggtttattcccatttttaaaagagaaacttacataaagtactatttttgttaatttttttacaattttacattcaaatattttcttttatatttttatgatgtgctataaaaataacacaaaaataataaaaaaaataacattccaacaacttaaaaataatatataaataaaaaaaactaacagcaaaacaacaaaattataacataaaaataacataaaaacatcaaaagaccgtatttgctgtaaataaaatcttaaaaaccataaaaatatttaaatttaatttcatacaactatattttgtaattttgtgtatttctaaactaatccctttttaaaacctaagaacattaaattaaacctagctatagtaataaaaaaattatttcctataagatatatataataataacatgcactatgtctcaaaaaaatttatgtttttaacattataatttattcaaaattaccttatcagatatatatattttttatatatatataatgtaaaaaaaaaaaaaaatctctaccatacaaaaatatcatattattagtgtttaattaaatatatatacttttttgtatatatacatatttatacatagacaaaacaaaggcattatgtatggtctcctagttaacaacaatatttcataagcaaaatttgttaaaacatacttaaaaatttacactattcttttaatattccacctttaaacaaatattttaaatattctccaaacaacctaaaatccaaaattacccttacaatttaaaaactctcttctcccactctctgtctaactcccccccccccccccc

SEQ ID NO: 59498 - DNA, 812 bp, Cannabis sativa
ggttactgctgcaagaagtagcagttcggctgctgaagtgttgatgattgcttggcagatttggagtgcaagaaacgatatcttgtggaatcaaaagactgtttcggctgcaagtgtagttctttcagcaagatcgaatcttaatcaatggttatgtgctcaacaaaaaagaatggatcctttacttgtttacaacaatcaagttttggaaagtgagcattggacaaaacctatagaaaatatgattaaggtaaatgttgatggctctatatttgaagcggaaaactgttttggctttggctttcttgctagagattctcaaggtagattgattgaaggcatttccaaaagtctccccgtccgagtttcccccaagattgctgagatttttggcattaaggaggccctcagctggatcaaattcaacaattggcaagaagttacactagagacagattgccttgttgctgttcaggcaatcagtagtggtattaatatgccctcatcctttggcctgctggttgaagaatgcagacaagttctgtgtgatttggtttttactaatattcagtttgtaagacgttctgctaacaaggcagcacatttccttgcgcgtagtgcttgttctttgtcagatcgtgttttttattccaacaactgcccttcggagttgttacgtattgtattggctgattccttaaattaataaaactgccaaacttccattcaaaaaaaaaaaaagaacatatttaaatcattaagctttcttaaacattaatatattgcactcgatattcacttttaattgataa

SEQ ID NO: 59499 - DNA, 663 bp, Cannabis sativa
actaaacatcatgaggttgtaagatcctaggccaggaaaagtccaaacaatcaaatatgatgaatatcacacaagcgaaaacacttaatatgattatctagccattcatttactttaatgtcagttgacaacttcaaacttcaaaggtctcatatatacaaggtaatttatatccttacgatcctatcgatcctgcttcagtggagacaatacctactgctaaacattttatgtgaaaatgggaagctgtacttctttattcttccttttgcttttatttttaaagacattgaattgatttttaacaatctatgtcaaactcactctgcctattatgttttcttcatgaaaccagaatttatacacaaacaaaaactttcagtttgaaccaaatgaaaaggttgaaggttattgggtctgaaaagtttctaaggcaccattggtgcctaaccgtacttcagtgtctcatatcactattggtaaaattaagtatcgagtccacattatttaatttaattactattatggaatattgcaagtcattttaagaagccacctcatggtggtggtggcggtgcctaatagcaatgagcattgctaaggtgcctacatctctgtgacatgatttcttatattgaataaaataaatgatactcgatattg

SEQ ID NO: 59500 - DNA, 626 bp, Cannabis sativa
gaggctagagggatcattcaattgggaagtctagccataccggggaggggagactcaattgctatatggaatcaaccttaacagccaaggtggagtccatcgccatagcttctgatgctaaggtcattgtgtaagcgctggaaaaaaggaaatgccctactttttgggaaacaagacatattgctatggagattttacatttactaccaagttttaatgtttgcaattttttctttatttctcgtttggacaaccaagctgctgattttgtagctaaaaaggctagagttaacagtcttttgaatggtgtctaccatagggagggaacccctgttgtgcttcccagttatcttatctaatgaacaaaacgatgttcttcccccaaaaaaaaataaaatatttatgtacatatttaatatacaattttattaaactaattttagttcttatttttttttttatttcaagtctcacttctccattactttattttattataatgggtaaatagcggcataagtacctaaagttttatgttcgtaggcggcataaactcaatgtttatttttagtggcataagtatccaatgtttgtaaaactgtaatttttctctaattttgtcaata

SEQ ID NO: 59501 - DNA, 658 bp, Cannabis sativa
tgtcgcgttgtgattggctagcgatactccctaaaagctattatattaaattatgtaggacccaatacttaattgaaccaaataatgctctttaacatttctctttaattaattatcacatatatggtactttattatgattattacttattatcttaaatccatttagaaaaaaaaaataagaggcggctaacattgatccctggctgcatgtggcagaagcaggtatagtaacgactacttaggtgatcatataaacatttttcttttaagaaaaaagtaaattaaaaaatggacaggtcagcagccacgacaataattatgtagccgttcgcataagggagcaggtgaggggttcacttatataattttatcttttgcaaaagctatagctaatacatattacatatccaaaactttttgtatacatgcatatatatgaacgtgtctgttcctttacgtagaatttacagatatataattaaattttaaacaagatttaatcatggttatatacaaaatatctctcctatattggtataacgatgtttctagctagctattattaatcattaaaagtcatttgtgaagaaaaataattatatgcattagtggtgttcatcaaaccgctcaaaccgcccgcaccacaccgcaccgc

SEQ ID NO: 59502 - DNA, 1673 bp, Cannabis sativa
agaccccacctagcaaccttatgagcaagagagttagactctcttctcacatagaccaaactaagttgtgggcagttagataacaagtctcaaatacaagagagaagatcatctaaaacattagagcccctagtacaagtacttattttgtctacaatagatttacaatctgtttttagtacatcaacagggagatgaatacaagagacccattgcattgcttgtaaaattgccttggcttcaactaccaccggagaaacacaaccagcaaaaggttttgcaaaaccagcaataacctggttcgaagaattcaatacaacagccccaatgctataccttttacgagtagaatcaatggctgcatcagtaaaaagctgaagggaagccgcagcaggtaaatcaggcaaagctaacagatccacttgttgagtagaatagggagaagaagcttgctgcacatccaaatacttgaaaaagaaatcaacactccaatcataaatatcatatggttgtggataaaacttactgtgaaaaagattgtttctttgattccatatagcccataaaaaacagcagaaaataccaacataatccttctccagttcctgagtaatatttagaaaaaagtcatataaactaagatgtttaaattgataataataatttacaaaccttgaagacttccaagctttcctcgatctggaacattctagtaaagcatgcttggcggtttcaagttgaattttacacaaaagacacaaaggagaatcaataacacattttttatgtaaagagaaagcaacatgaatggcattagaaagtaacctccaaataatgactttcacttttggaggaatttttgaggtccaaatttttatccagaacttcttagaatttgtaagagatgaaggagaaggaaggtcatgatgagaaaaggctaaatgataagcagacttgacagtgaaaacccccgaactatcatgttcccaaataatttcatccttatcttgcaaacccgaaacagaggcattcagaatttcactaaccatgttttcaccaaaacaagtagcaagcttagaaatatcccagtccccagaactattaatgaagtaagaaagaaaaggagaaggaggcacctgcccagagttaaacgatttaaccttattatgaggaagccaatgatcctccaaaattcttatattgcttccatcacctatcttccaaatcaaacccgaagttagcaagtcctttccccataaaatacttctccaagtgaaagaaggattgtgactaggcttagcttctaggaaagagctacgaggaaaatacctggctttaaaaagtaaagcaagaagagaggtggaatttttgaaaagtctccaagcttgcttagcaagcatagcctggttaaaatgaattagagaacgaaaacccatcccccccaaaaatttagactgacacaggtatttccaggatttttccaatgaatttttttagaattacctgcagaatcccaccaaaatctggccatcacagcttcaattcccttacaaagcttaaccggcaaacgaaaacaggtcattgcataagcaggaatagcctggatgatagccttaagtaagacctccttaccagctcttgaaaaacatttccctgaccaacccctaagtata

SEQ ID NO: 59503 - DNA, 1145 bp, Cannabis sativa
gcttggtcgatcgctacatcggtgttgcatatgaaccagccctcaggaggaggcagccactgcatcatcggagctgggccacattgaagggtctgaaaagccttctgaagccgattatcgatcagctggaggattatctttgtgggcgtgcattgttgttggtgaaccaccttgtttctttcgctccaaatcttttcgaaaattattgcagcccccttaaggaatgcatgaaggctggtatcttttggtctgttatcggtgattttgaaccagtttatccattcctcccaattggagaagttgaaggagcaagtcctaatactccaacagcagtcaaaccacaaggaacgagccagatgacatttccaaaagatgtgcaacgagtcttcaactaccaaagaacatagaggacaattgggatcattaaggccagcaaagagttgtagtttacttcgagttaataggcaattggagagtattctccaccaaagcattttcagtctcgggtgcatcttagtcccccataaaatctgccatttttcattaccagtgtttccttgatcaaggttttttatggttggtaggctgagcggatagtgaatttgccattgctttcgggagtccacaaccaagagtcttccactggatggtttggtatgttgatattcaaaattcttctggcgtcttctggttggaaccattggtggacaaggtcctccctccaggtgaagttgtgaataaagttgcacactaaactgatgccctgagttgcatcaagcctcggttgaggttggagattgcctaggggaacccaagggtgaaaccaaatggatgttgattcaccgtttccaattttccggcacatacctttgtgaagttgattctgtgccttgagtattgccttccaaagcacagagttggaagcttgagggtcaaggtcgaggaagttgtggttcttgagatatttagcacccatgacatgcttccaaaggcttgagtcatccgacaacactttccaagcccatttcatgagaaaagcttggttggttgcctccgtagttctaaaaccaagacccccgtgagttttcggtttgcaaagggtctcccaagcaacgcaatggagcactcgcttttcttctgtatca

SEQ ID NO: 59504 - DNA, 1235 bp, Cannabis sativa
taatttgtttttctgctaaaaataattttgaattcaatatttttttttctctcagaaaaaataataaataagtaaattttagaattattaagaccatctatagtaacagtttttattggtattaggtatgtattgttacatatatatgtggagcacttctcaatgggtattacccattgacggttactaaataaatttaactattgatattaattttaaaaatattaaattattagattttgatccaataacgaataatcaaagagaaattttaatacatatgcttagtttagctacttaattaaaaaaaaaaaataaatacaaaatatttaagtcaaactcaacttttttttatctttttttatctttttttttttcaaaaacttttttcatatattttttttcaacggatgtaataaccccaacacatataatgtaaaaataagagattaaactaattagattgaaaaattaagcttaaaaattaaaatttatcgattcatgggtaatacccattaagagtgtatacatgggtgtgaatgtattgtcacatttttattttttgaaggatgtattgtcacatttttatttctttgaggtaagcatataatattatatactttttactttcaaattacaagcttattaatgtaattaattcaagattgtaattcacttacaaataaaaaatattaatgtaaaattgaaaaaaacaaaattatatttatatcttattttcataaaactaataagtaattttaaagttaaaaatatatatgttatgacaaattgaaaatattttttctatatatcaggcccatggggccctttcagccacctaggtgtttattatcaaacaagcctagattaactttatcaaatatcaataaataaactgaaacaatagaatcacttatactttttccaacaaaaattatgtacaccttctctttttaagttatgattggtgaaaatagtttccctatagtataagtgcaatacattaggaccgatgatagaaataccctatatatataggataagattatggtaggacctagcaaaagttccctactgatagggtactttttttaaccattgattttaaatcgtgtggttattatgatataaggtgtatactcttacgataagactgcttttattcaattaaaactttatacattataataatatttaatgatatatttattttaaaaataaaataatattaataa

SEQ ID NO: 59505 - DNA, 1035 bp, Cannabis sativa
ataatatatataatttttttaataataatataaatcattttgttttattttattttttattgtaggtatatatattttgttatatgatatatattttttgttgtgtaaactatgttatttatttaagatgatatttagtgtcattttatttgaatggacaatctaaaattaaaaataataaaaaaggaatattaatccaaggaaattagaaagtcatataccatatatctcaaattataaaccaaagctgatatatatgtgtgttcacacagaaatcatggaaacaagtacattttacagattggtttctaaataaaaaactcatgacttataatatcatccattctatattcatgtttgaatttgatcatacaattttcctttttgttaaagaacaacttacttataaaaaaatagatatttagttagtccaaaatagatattttgttagattagtcttaggagtattttttttttctttggtgatcttattttaaatattcataaaaaacttttatttgcaagctctttatcggctttttaagcaaaagcgattacattgttagtagacttaagatgagctctgaatgttgtcattaatttttactttgaattatagttctgtgtactataatgaattaggtgttttatttttagatattaaaattttattatctaatttttttgtgcatctctttttcatgctaatcgtaattttaacgttgagatttatggattagctatggattagctaaacattcccttaaaataaatgatgagtttttttggatggaagataccactcctttgttgctataattctttcttctgagattatgaccaaaaaaaaaatatatttcaacaattgatttggttgacaaaactcatctaaccattggacaaatctcaactattcactaaactagaatcaaaccaaaaaaaaaaacaatctctgataaatcatattcagagagatatctttagatgaaattgaatcaagaagactagaacaagaagaacaaaaacttttttata

SEQ ID NO: 59506 - DNA, 877 bp, Cannabis sativa
caatctcaattgttcggggggaataacagccaaaaaagttcaggggcacgattttgtacatgtcaaagttcgggagaaaaaattattaattagcctatagacgatggtcacatgtcattttattaaattttgtttattaacaaaaagttatttttacctaaaaagtcattaatttaatgagatgtgggaccatagtgggcaacttttagttttgtgaactattagagtatttttttaaaaaaaaaaaaaatgtaacaaatcttatatatggatgagagaaaataaaaaataatattttaggatgatatgtgtattttagagcatctccaatggttaaattttagataatgcttgtttatgtggattgcttatttggcaaaatacaaggatgtcataccattggagataaatatgtgctattatagaaattgtgttgatgccactatatgctatctcttttttttaaaaaaaaaataaaaaattaaagataaataagtagtatgataatatttataattaaaacaaataatatattaaataataatgtgtgaaatcataattatagcattcttaaagggtgttataccattggagttttagaattaagagtgtcaaaaataatgtagaagagagataaaataaaatattatatttttaaatgatatggaaatttttagcagctttaaaaaaaatattacaattgaagatgttcttagcaattataaatgttttcctccattaaaaatgctcttatccaccccaatgacacgtggtataattatgggtgagattattttttttttcctaaaagaggcagagaggtcccaatctaactttttaaggtgtaactttaataattccaaacaaacttaattta

SEQ ID NO: 59507 - DNA, 1562 bp, Cannabis sativa
attccatccccatttagccagaaatgccaagttcatctcgcttgtcctcctaaacccaagacctccgtgggacttcggaaggcacaacttatcccaagctcttaggtgcagaccatggttccctttttcaaatccccaccaaaaatctctcaccatcccatcaattttgctgaccagcctgttggaaattttggtggtttgcattgcatacatcggcattgaaaggcccactgatttgatcagggtagcacgcccagctttagaaagagttttcgccttccacccttgtaacttagaagtgaggttctcaataatgaagttaaagtcagcatccttttgcctggaccggaataacgggagacccaaatatttaataaagcccgtgggagatccgatacccagagtttccttgatctcccttttcatatccggtggagtatttttgctaaagaaaactgtagttttaagcctattaacttgttgtcctgaccaagcacaaaattgttcaaggcaatgccagactcctttagcctccctcacattggctctacctaccaagattaggtcatctgcaaagaaaatgtgggagaggactggtccccccctgctaagtcttattccactaatctcaccgatatctagagcattcagaagcagcctagagagaacctcagctgcccaaataaaagatagggggaaagagggtccccctggcgaagcccacaggtcggcttaattgccccaactttacctccattcagacagatattgagggtggtggtggataaacactgagaaacccacctcctaaactgctggggaatcccgtaacaagagaggacatgatcaatgaatctccagctcagtcgatcatacgcttttaccagatcaatctttatagcaaaaaatccctccttgcccttctttctattaaacgagtggattatttcctgcacaattacattgttgtcctgaatattccttccaggcacaaacgcagcttgagtagggcaaatgatagtcggaagaataggtttaattctgttcgcaatgatcttagagatgaccttataaatcacattgcaaagggatataggcaagaaatgattagtacgggttgggttagggactttagggatgagaacaatattcgtggtgttgatacccctatgcatattacccgtgacaaaaaagtcagagacggcattacaaaagtcttccccgaccgtctcccaataatgtttgaagaaaagaacagacatcccgtccggaccaggggctttatgattacccatatcaaacagggtgcgcttaatctcatcctgagaggggcatttaactagttcgtccttttccacttcctgaatcctttcttggaagagttggctacagtttagtccctggccaacatcttggttattgaatattcccgtgaagaagttcataaactcacgaccgattgatcctctgtcagagatccaaacaccgtcaccattcaaaatgctttctatggcattccttcgatgccgtatagtggccgagagaaaaaagaacttagagca

SEQ ID NO: 59508 - DNA, 1650 bp, Cannabis sativa
taaggaattgaagaacctggtcatgatcgatttggagttgatgttgggctgctgctgcacaagtgcagggagtgcgtggaaggagttggttgatttcatcccgaattccagtcaacttggtgaaatatgtgctaaccgagtcatcgccttggtgaagatagatcaaaaaagatttattcaactcgaagatccgagggccatttccttagttgaaacgattgttcaaagcagtccacatagcagcagctgtttctaggtacatgatgctacttctaatttctggggaaaccgagtgcataatccaggacatgaccatctggttgcaacgggtccaagaactaagaagggcatcatcggggtttggttggggaagactgccatcaagaaatggagttttatttcgtgcgccaatggagatcctaaaatctcttttccatggttggaaattccgatcggtgagaatcggagttgcaagagcaagacctggatgatcagcggtgcttaagtagtacggacttctgatttcttcataagcagggcgatcttgaacagtgggtcttgaagctggtaatggtggtgagtcacgatttccaacagaatgttgagatggtggtggagcaactggatttgtggcatcgatcacaggattgtcgtcggtgatggtagctgatgaagttgctctggtgcgcaccattgttgataagcttgagattctttgaagcttgaaattcttttgaagattaggtcagaattttgcatctgataccatattacaagagaaacaggggagagaactctgtcttattatattggaaattgaatgaattacaaagcaaagtaacaacatttatatagtatgctcaactaaatgtacaaccaactaattgactgtaacagaaataactgaatctaacagactaatcctagcaaatagggacgattttggggaaaaaagcaagaaaaaactgaaaagagaagttaaaaagaaaaaaaaaaaactaccataactgccactgagcaaccactaagggcagacaatgctctataaaaaaaaaaatagcttgttgtgaaattattattatttttgaacataatttaaaactctttgttgatggaaaatcaatatcgagaaaagttgataaaattttcttggcacagaaatacagtggcaagaagctcaatttatataatgaaaatattaaatatatgttaatattaattgctcctacttcaataacttttggctctttccttgcttttaaatagaatattttcctctcacaaaaaaggcacaaaagaaaatccttcgagttattaagcacaaaagaattttgaatattgttctttactaacgaaaaggatttgaatattgaatgttcctttctttcaatttttattttctctcttttatattgaaaagtgtatttttattacttttaatcaaataaagatttttttttctatagccacaaagaagtaaaaggattctgctgaattcatatttcttttatgaattcatatttcttttatgggatattttcggtataagtatataaaactatgactttataactgaaataaatcttatgatttctttttcgcgatataattacataatattagtaaagtactgttttttttttttttttt

SEQ ID NO: 59509 - DNA, 1090 bp, Cannabis sativa
catgatctctataacacttaggggaggaagaagttattgatatatgtagttcatttttttttttgtaaatttgaactctagactatactcaatacaccatattatctctaatacacacatatttggattagccagggatttaataaacaaattagcaaactattactcttgaccctgtaattgtttcaattaacatgttattgtagtaatagaaattgataccaataaagttcttggacatagtatcacaatatcttatttgagtgggagaattttaaaattctagcccatctttatttggatgatgatagattactatgttatgatcacgatatgagctttagaattcaactgagaaagtatatttaaccattcatacggatagaagtaacttatcagaattatgaggataagataggagaattttgcaatgtctattcgaatgacttgggcaaaatacctaatcattatgaaattctttatggtatctctaacgactacttaatcttaagcaagtattttacattaaagttaatactagaatgctacgttgatgacttagtctagaaggaacttatagttctagactaagacaatatgtcacaacaagatgtccctgataaccaataataagaggctaagtgtacacttgtgtacaaacttaactagactccaaatgttgaatgggagccatttaagatgtaatcaaacaaggaacattaggagacaatcaagaaagaatctctgaaagtgacctatatgttagatgataggggtgtatattagaatcttgttatctacaccaatacagaatattagagatggtggttactctaggggtggaggaattattctagaaggatgtaaaaatcaatctgtaataatttaagctccatcactgaagctaaataaccgtgttgcttttgaaaagcattgaaaagttattcaaatcaaagaaagttcttaactggcttatctctattccatttggatagaattagagatttgtcttctatatattcagatgcacttaataaacactatagaattcagtatccctagatgggtaatgcatgtagaaaatgatgtt

SEQ ID NO: 59510 - DNA, 1539 bp, Cannabis sativa
aatgcacccaatgtttcagctgccctctccaccaatcccatatctcaagcaccatcttcattctcccaaatccccacacctcccattcttcccactcctactgagttatccgcccctacaccacccacaaattatcacccaatgacaacaagatccaaaaatggaatcactaaaccgaaagcctacctagccaccaattatcctttatctgaatctctcaccatcactgaacctaaaacactcaagcaagctttagccgatcctaaatggtttaaagccatgaatgatgaatacatagctctcaagaaaaatgggacatggaccctggttccttatgattcctcaatgacattggttgacaacaaatgggtgcatcgggtgaaactcaattctggtggttcagtcaacaaactcaagtccagacttgtagcaaagggctatctacaaaccccagggattgacttcacagacacattcagtccggttgtcaaaccagcaacaattcgcatgcttctcaccattgctgtaactaacaaatggccaatcaatcagctggatgtttcgaatgcctttctaaatggttcactacaagaaaccgtgatatgccccagccccctggttttgttgatgatgaaaagcccacttatgtctggaagcttcataaagcactgtacggactcaagcaagcaccccgtgcctggaacgatactctcaaacaaactttattcaacaaaggtttttcagcttctagatctgattcatctctgtttatccgaggctctacaagtgatttggttgtgcttttggtgtacgttgatgatataatcatcacagggccaaacactactgtcctacacaaccttatcaaggagttgaatcaagtgttttccatcaatgatcttgggccattacactactttttgggagttgagattgctcgaaacaacactggcatgtatctatcccagacgaaatatatctctgatttgttagtgaaacttcacatggatggtgctaagccttctccaaatccaacaagctctgcccataagctttcactagccgaaggagaaccatttatggatcaaacactctacagaagcaccctaggggccttacaatatctgactttaactaggccagacgttgcattcattatcaacaagttgagtcaattcacgccccaacaacagtccattgggaagcttgtaaacggttatttagatatctgaaagggacaattaatgaaggcctactcatcagaccagcaccacgattttgtcttgaggcatactccgatgctgattgggcgagttgcccagatgatagacgatccacgggtggatatgcaatcttctttggaggaaacctagtgtcttggtctgccaagaaacaacatgttgttgcaagatcgagtacagagagcgagtttagagccctcgcaaacacagctgcagaagtacggtggctctgctctgttcttagtgaactcaaagtacctctgcctactgcaccaataatctgggttgacaacttagg

SEQ ID NO: 59511 - DNA, 1297 bp, Cannabis sativa
acctgctctggctcgagtcaccatggggtgaacaacaggtgttgtttgttgttcagctgcttgttcaggttcttgagacagaggcatgttatttcctgcattcacatccacaccagtagagataacaacaggtgtatcatcagaattaaactcatcactgacctggttgttcacagattgcaaagtaggagattctgagatgagatcttcagtatggtgtacagtttgagtcctttgagagctaagagatgtgttttggatcatagagggcagattgaaccaagaatatggtgtatctagagtgactgtattttctggtttatagttgtttaggaaaccatgctcaaaaggaaattcactctcattgaaaatcacatgcctagaaatataaattctcccatgtggactaagacatttgtaccctttgaacacctcactataacctaaattcacacacttaatagagtgaaattagaacttatgttgttggtagggtcgaatgcaagggaaacaagctgctccaaatattttcaaaagtttataatctggtattttagagtttaccacctcataaggtgatttgccatttaaaacagtagttggcagcctgttaatgagaaaaaccgaagtctgaaaagcatcagaccaatattttaaaggcatatgagcttgagccaaaagagtcaaacccatctcaactatgtgtctgtgttttctctcggccctaccattttgagctgatgttctaggacaagagtgctgaaactcaatcccatttttgataactagatcagagaatgcatcatattctcctccccagtcacatctcaacattttgatttttctttcaaatttattttcaacaagtgctttaaactgaatgaatgcagcaagggcatcagatttgtgcttcaaggggaacaaccaagtgaacctactatgatcatctatgaagtgaatgtagtatttgtaattagtgtgtgatgctaaaggtgctggaccccagaggtcagtatgtataatttcaagcatagttttggctctactatgagagatattaaatggcaaagcatgggatttaccaagttgacaggcatcacaaaaacaaggcttatcattgacagaattcttttcattagacaactttaaaacttgattcaaaacaggtaaagatggatgacctagcctcctgtgccaggtatcctttagggaagcagaaattacattcttagatgactgaacttgaacagaaaaagaacaaggattgtgtttcctggggcagtaagtaggtgaagtg

SEQ ID NO: 59512 - DNA, 1028 bp, Cannabis sativa
  modified_base (341)..(342): a, c, t, g, unknown or other
gatctcttctaattcttccataggtccaacattggtgcttgggtctccaagtcgaggatccacatcttcatccccgccttgggaagctccctacttagaaatgtctttttcctttgtctgtgtttcctctcagacaccctgccccattctttgttggaaacttcaggcacaagtggaatatcgatgtgacagcctttaagtcatacaaagttggacggcctagcattacgttaaaggctaaaggaacatcaaatatcaggaattgtgccatgatagtcatgctcgtcggagcttgcccaacagtgaggggtaagttaatttgtcctagaggtgcgactccnnggccggagaaaccatagacaggcaaaagacatggggttagatccttgagctggagtcccatcttttcatagacagtcttcaacaagatattggaagaggctccattatcaatcatggttttggccaccatcttgttagccatctcgacctctacgaccaaaaggtcgttgtgcgaaaacctattttatatagcatcttcgtcgttgaaggttacggtaggccctcctgcccgtgggattttaggcttcatttcttctacgaccaggattactttttcttgctcgtgttgtgctattcgggcatacatctcccaagctttgcctgaatctccagctatgtgcgggcctccaatgatgacttgcagatgtccgtctactggtggaggtagcaagtcttggttattgtcattcctctgactctgatcggccttgaaatacttctataaatgtgggttatttttccttatcaggaattaaatttcccgcttcagatttcttcattcattggtgtcatggccgtaatctccatgaaatcgacagaacttggtaatgtctctcttgctgacatccttcttcatgggcttgggtttcttatacggggctagcgactaagtggccatgtaaacactttctatatcctcagtcaagattgtaaatgcagtgtactttgcttgattctctcgggga

SEQ ID NO: 59513 - DNA, 1597 bp, Cannabis sativa
tcttttattgataacaaatcagattagattgtaatgggttttatttagggcataaaatcccaacacgaagtctatcaggatatccttaattcttttcgtaggttgtatccttagaacggtggtgacaaaactcacaccttgatcttccaaaacttctaccatacacaaggactagtgtaggatagtagaataataatgtatatgaagttcttgatcatatctcaaatgagcaagaactatttcttttttgtgatagaaagggaaaggtatactggtaaaaatctttttaggctttcagaaaaattacgtaaaaattctatattaaaaaactatataaaactttgttatacggtatattaaacaaaaaaaagctaataatggttttatttaattaattattaaattatatttaattatttgaataaataatataatcgaattcggttttatatatttatatcttataaccgattaagggaatcttccaatcccttgagagaatatctcaactacttttaaaatttaaatatttatctattaaaaagacaaaaccaatgggacactctacaatagtgggggtgcatgcattgtgtatagacacagtgcatgtggcgcctccgtctccgtctgtctaaattaagacaagggatgtaccttttgtcctaacaacttttgtctttccactattttattaatttgacaaaaaaattatttactacaaaataaatgattgttattttaacaattcaaaatagatttttttgaactttcatatacaacttttatcccacttatcccaccccttgatagtgtttcaaggtggcgatccaaggactatggacctacaactctaagttctaataaactatattatttgttgaatctcatcaaccaaataaccatgtttattaatttcatgattacttcactacaaatatagaattaaactcttagtaactatagaattatattaaccgagttttactgcagtatccattaatacaatcaatttcagtgattagccctcctagtgttgattcgtaattagttttaatcaaattactgttttacccttataattactaatttatcttttagtatcgctaattcactagtgaaagtataatttagattcaatctaaatttgcactcaacttttcaattttagaattaacacataaagggaaccaactatctatttgttaggaaagtcaggattctataattgtagatcgtgttacctgtcatccacattattagattcctaaaacagaagttgtaagaatcattttctctaagaaactttacgagggaatcaaataaactaataacatgaacatgagttcatgattactcaagatttaggtcgatctactattgatcatctttatgatatgaattaggtctttaaagtaaacggtaagtttgataaagatagctttattcatactggtccttatcatatatagtttttattatatacagtacattcacttagatgtcatgctacatcagtaatccaaatcgagattacttgctccaaaatggatatcagtgaacctactagcaactgttaattaaagattcttaaacttta

SEQ ID NO: 59514 - DNA, 1109 bp, Cannabis sativa
agtttataattgttatctacagttttttgcacattgatgtggcaataggatcaaatgacatgtgccctatatatttctgatacttgagcggaggaaaatgtccctagcatcctgcacatgatcactggccagcatctataatagtcggttatctgagcaaggctgtggagaagacattcgacaagatagaagagtgattgtgccgagaaacttacaagagatagtgacttcaaagaataatctcgctgtgtccaaacatgaagacgatccctataatcgtgggattgagtcagaggaaaatggcagcatgttctagtttcctattgcttatattgtaattatagaaacattataatttcctaatttatgtattgtaagtaaaagagaaaccatccctcatgtattaagcccctataaatagtgacctgacctccctatgaaagggatcaaaagaattgtctcagagagatattttagagagaaaagagtgatatatctaagagagaaacacactcagtgattagttgttgtaagagctttcaagagaaagaacacttcattccttctcttaagtcaatacagtacaaggggagtaggctattaccacactaacggggccgaacttctttaaaatttggtgttcactttacctttattgtttttattctctttttattacattacttaatcactttattatttgactcactgtcgttggctagaagcgaggtcaatattttggtgctttcattgagagtaaaaatacaattttttttgtcttaagttttgacaggtaaacatgatggttttacaaacctgtagacgccttgctgatcaaggcaaccagatggtgaaaaatcccaacgtgcaaactcctagaaacacgagaggaccaccagggacaaaccttgaacaggtcaatacacaacctcctactgtaggccatagagtgacttcccctctggctgggatcacaccaggtgtacaagagactggaaacaccagtttgacaatacgttccaccaactgtccagccaggtatctgtacccaagatctagttcaaagagatcctaatgtgacacaggtcagtcaacaaatcaaacaagtt

SEQ ID NO: 59515 - DNA, 831 bp, Cannabis sativa
aatagccgcctattctctctggccggctgagtgctgcctcagtgacttttcacaaaatcacagccctcagtgacccaccatatttgcctctgtttctctctcgtttattatctctctacaaatcccatcatatttctaagaaattaatgttcggcggctcgacaatggtggagatgaagttaggcaagttgatggcgctggtggaggcatctaatttcatctttgtttattctaaggtatggatctgtatttcttgagattacttctctttgtttttttttctctctgatgtaggctcctatttcaagcgccgaaaaattgctcggctttttgttttttattttctcaatctaaatctgtgtgtatatcgctttttctgattaggccaaggtcctctctttttaactcattctttttctttctctattttctctacaagttggttgacaggcgttggagtcgttttgggttcacagtggtggtagccggagttgtggatcacagtgccgatgatggagtttgatttggctgaggcatttagatattttttcttctttctaggttttttttttctttttaggttggaaatgtttaaaagctgtaatatctgtatagaaaaaaataatgtatagattaattatgtttatcacaataaattattttgatgtataccatttgaaaatacaatgttcacattattctttttcttttttctttggacagattaatgaatattaaaaattattttgttgattaattttaatttataaactagggtataggtaattttttttttttaatcttcataatatttttactgactgttataaa

SEQ ID NO: 59516 - DNA, 1200 bp, Cannabis sativa
gctctaaagctcaaaccttgtctaaacaccaaaacaaatcataaactaacttccaatcagctcaaacaacataatttaaacctcacaatacagccacaaacagcatgaataactacagaacctaactcatagaaaatcatataaaacttaacgtgaaacttaaagaaatcaacaagaggtgagctagaacactaccttcagcttgaatactttaataacttgctcgaaatctctgaattgaggttgaaaaatctcaaaccctagctggttctagggagctcgagaaagagagaaagagagagagagttggatttcttaatttttcctttttctttgaataaagtgaaattaacgtatggttttctaataaattaaaatgaaatcggattgtaatacttaaataaaattcacaaaaggacaaagaataaaatggccaaaaagaccattttattcctcactaaatccaaaaaccttctaagtcacttagagatattttggtcaattctaaaacccgactaatcctgacaatcccaatgtctaactatattgctttgctattactaaaataccaaaatgtaattttactggccaaacaccgcgttccaatattgctgggcacaaaatatgcaaaaacataaattacatgtatgacataaataatgcatcctgaattcaaataaatttccagaaaataataaatcataactgatattccaatttcataattaaaccatattatctgctaatttccaaaacaaagctaagcggtctttacagtcagcacccgggagtggtccatgactttccttgggataatagagagccaaaaaaggttgtgggtgtggatggaactcatgattgcatggatgttgaagaggggtccagtaatgatgtgtcctatggtgagcttaaccaatgttccttgcaggttatactaaggaaaagtctcaatgatttgaatactcagatggtttgttcggccctgggggatgatgctggttctcgtgtttttgcttagtctgatacccctatggaggaggatgtctcatctcctccacatgagtcatgagaggattggcttagaactattgagtgttgggacagacctctacagtttgcgagttaaagtcactagtttagtcttgctattcagatttcatcttcttaactgaactaaaaactaatgctactcatctggta

SEQ ID NO: 59517 - DNA, 3295 bp, Cannabis sativa
gtgatatgattaataatcctaactttagaattaattatggactaaaatcaaactcaaaagtattattatattatattttgtaaaataaatagattaatcaataatttttacaaatcccttttcacaataatattatatatttatgtatacatttgaaatcatagtcttccaaccgcaaaattctcataaaatgaattaatcttaattcacataacactaactttatttttcaaagcatgcaacaacaacataatataataacaagtttctaatacaataacatcccaacaactatcctcctttctataaaatactaaaatgtaagtttaaaatatttacatttttcttattttttttatttctcatatacctaatatttattttttgctctgcaataaaataaagaatttactaaatgaacagcataaaaattgtgaaatttacctaattagtggctttggtataaaattaaattaaatttgtatatataagtgatcctaaagtttgttttagggtcatatatagtaatctttgaggttattttgtaaataatttcttaaaaagtaaatttcctaataaaatttctcatatgaatccgatatataaataagtcatttgattcttttttttaaaaaaaggaaaagtacgtataatttgcatgttattataattacatttacgagtgatggcaaatactgtaaattcacagaaaatgaggggccaaattagaagagaaagagaattgatggtggtggacggcagcaatggtgggcacgacaacagaaaaagacacttgtcttctttaagcacaagtcaaccacttaattaccaaatcaccccatgtgagatttcttccaatttcccaattaattaacactaattaagttaatgtatatattttaaatgaggaggtatgtctctgagattaattattaggctaattaagatttttgttccccgaattttactatgaatcaaatcatattcgatcgttaaaatattcctaaactattgagattattagattcaatgacttaggtctaattttagtaaaaaaaaaaaatctaacataaatgaaagtttagaaggcatgattttgtatatcaaagttcgaggagtatgaattggtagatatcaaaatttgaggagcatagtttagtaaataaacgattactgaaatagtaaaattgaatgtaattaaacaaaaaattttaaatctaacaatttcaatagttcaagaggcatttttaacgaccttaaaagttcatgaaacataatttaatacatgtcaaaattcagggacaaacatcctaattaacctaattaaaatatatcccaattcaaacttaattaaaatatatatatgtacatatatgtagatagataggcttaggattctcatggtggcaggaaattggtgattttgtttaggtgaggaggagcaaaatgcatgtgaaacccatacttgataatcgatctcacagacagaagctctagtttcagagtttgagttgggtttttgccgttttgttatctcttggctctgaaaattatgctctctgctcatactacaatatttataatatatacaatcgttcccacgtacgtaacactactataaataaatatatacatacgtgtatagcagccggcaacaagaacattgtgcagctttgaagataattatgtctattttgttgttcattttttgtaatttaggtcttgggattctgtgatggatgggtcatgatccttgtattgattagtgtgttccagcataacacattacacttgttgcgtcatgtggttttacttgtacacctgcaatttaatatattagtatataatttaactaaatacatgggatttttttacaaaattaattaataagataattagttatataactaataactgattattttagtactttttttagaaaaattagcctcattaaaatttttagagtaaacttcgtagagaaaaccttatgagaaaaaacagtgcaaaaaagatatcgttgatataaaaaaaagaacatcatattgcatatattgttttgcaaatacggggtattattaagggaagagaaaattatgtctaggagaatttttttttttttttttcatttttcgtatgaactattttaaaattacatttcctaataaggcactggtatttttacaaaaaaaaaaaaataaataaataaataaaaatgaaataaaataaaaaaaaaaatggttttagggaaatttactcaaaaaaaaactatttttggacaaaattataatattttaaccgttaaataattatttttacaattttttttaattttataattttttattttttagttacaattttaagatatcttacaaaaataacaaacaacaacataaaaacaataagattacaacacaaaaataacatgaaaacatcaatagtccgtattaaaaacttataaactatatttaattactcattattttaattttcgtcctactaatatatattgtttttatatttaatatttaattactcattatataaatttgcaataacgtttaattactcattattttaattttcgtcctactaatatattatttgtttatgtgcagttgaaacattattgtccctccgaactcttcgagaaatgatagcgagtttttataacaaattgcatgccgctgatgatgacaatagattggagtcagttacaaagattttacaactatgattacttttattatcagagttcccgctcaaataattttaagatcattattagaagtttttacaagtttgttatttagatttccaggagtgtccctaatctgtgttgctcatggattagttgtgcatgctcttcggatgaataattaacttgtttggctagatatgaatatcattattttttattgggtgtatagtattattttgattatcctggcaagaatcgtatttatttgatgaacattagatgtgtagtccatatctagcctgtatgacgttattatattttaatgaatttattcattgcaaaaaaaatcttataaactataaaaaaatatttaaaattttgtacgactgtattttttttgtaattttttgactttttttgtgtatttataaaaagaaaattgataggggcaccccacaagaggtggcatattgctattagtacaatttaatgtttcgttctacaataaataatatagaaaatcgttaatcactcaaaacacgtcatatagatgtggtgttagcaccctcaagtgctcaatagcaatactct

SEQ ID NO: 59518 - DNA, 688 bp, Cannabis sativa
cttcaaaatttgagtcttttgggaggaattgttgtacatagttagcgtactactgaagttttggaccattcacattcaatatggctaatagggttcaattaataaaaagaacagttgtgaccatgattgtggtcattgtcaaagaaggttttgatcatattacattgtcaatgttattattataatctttctctttagtaaataatacatacaacaactgtatttatgttttattaacctgtataagttcagtttaaatttttttgttcaagctcttaccttgtgtgtgctactaaatgtagaagaatcttgtgaaattgctaattctactggttggagactgaatgcctttgtatgttcattttatttttttgaaaaatattatactaaagtaatgagacgtagaatttaatttaatttatttcttcactttgtgagagcaccgtcaattggaagcaatggtggttacctatgaatgcgatgtaatgctgttctcaatcagcaacaaactgcagtttgtagctttctcttattttatttttattttaaattagtaaagattattttcaagttgcacttctgttcttactaactgatatttcttctcaattgttatcttagataatatagatttgtaattcggtttagttacacaaatgaatgcaactctgctcgtgctactagagtt

SEQ ID NO: 59519 - DNA, 855 bp, Cannabis sativa
ttatgtaattattaaatcatttgcaaccaacatgaaaataataatttatatgtaattactatttgatatccgaacacacattatattttaaaatatattcaagtaaagtttaacaattagacaacgacttgtcatcgcaagaactaggggcatgataagggaatgattcccaaaatatatcatcgcatgatcaaaacttgtgagaatgtgcgaccaagacagagtctagtagcacactatacatcgcatagtaatcatataaaagcaggacgtagaaagaagttagcacagtcgcaacatgtagaaaacatatgaagacaaaagtgtttctccaccgtgccttatgtaaagaccgcaactttacaagcgttaggtcatgatgagtaatatgctcgacaacttgaccaaaatccacgagttctatgttgtcagtacatgaatactcaatacacaaccgatatagtcgcatgggtttcatgaattaataagaaccccaagaggttcgtgcatcgataagaaccccgattagaggttcatgcatttattcaaatctcttgagattcatacataattgcagaccccgagaggttcatgcgtttatttgaacctaacaaggttcatacatcaatgccaatttcgagaggtttatgcgtttataagaaccctgagaggttcatgcgtctcaagaggttcatccattcatatgaacctcaagaggtttacgcaccaataagagctacgagaagttcttggcatcgatacgaacccgagaggtttatgcattcataaaaactctgcgagtttcatacttctatacgaaccccgagagattcatacatcagtaagaaactctat

SEQ ID NO: 59520 - DNA, 1140 bp, Cannabis sativa
ttaaaatatcccttttacaattcaactccattctatttctctttctctattaatctctttccctcatcaaccatccaccatccctataaatgatcaccacaaaatttatcaaaatatttattatatatcatctcacttaccatactcattgtttaattttatgtaatttttcattttcttttttctctacctccatttttgttctcaatattttcattacatctttatagatgttacacaaaaatgaccaaataaaaaatattggttatttagaacttaagttcatcttaaatatcaattaaaaaaaataatgtatgtatttaagctaatataaatacaaatatatatatatatacctatatatacattattcaagttttttggaattctttcagatgacatagttcgaaaagaactcgatgcccagctcaacgaggtcttaaaaatcaatattttcataaaaaaatttgctaaatgaaacttaataagaacttgataagtgcttaatgttattcttaaacaaaagtataattttttatttaggtgaccatttgaatgtaattttttttaatttagatatttttttccaagatctaaacgttcgtatgtgtacatatataatttagaaatttacaacttgaaaacataccaaatttcaataaatatacactttttcaggtggttttaagtttcacactttttaaacatatatatacacatcaccaatgtgtagatcattaaaaaatgcccaaattcaaaaaaataaaaataaataatacttcatacaaagactatagtaaaaagttatgcattttttaagaattgacattaagctcacatcaaggagctatctagttcctattaagtttcatccaaaaatataatttttgtataaaaattttgatgtttaagaccccgcttacttggacatcaagtttccatataattctataaaatttctgcatatttcaacattcactactacaaatatcagaatttgcgacggttctaaaaacgatttttttcgggaaccatcactaaaaaaataaagtaactatttaaaactgtcgggaaaaatttagtattcccgacggtttaaaattgtagtaaacaaaataggcgacgtttattaataaaatg

SEQ ID NO: 59521 - DNA, 947 bp, Cannabis sativa
aaactgaaaatcaggtacaaaaagcacattagttaaacaaaagttagcatttatgtgaataataccagatttaattataggaatttttataccagtaggtaaagtgatatgtgaagcactagaaatagtatcaaaagaagtaaaacatgttttatcaaaataaacatggtgggtagccccactatcaactatccagatattattaaagaaaaatacagatttaccagtgaggttagatgccattgaagtgttgacatcaaccgttgattggatctgttgaacatgttgaatctgttgagtaagttgagagatcatttcttgcaacaaagcaagtttgtttgagacagagtgagaagcgaaagcttgattagcggctggtcctttgacttgggaatcccgatccgaagtggagctctgtgtagaatcatatttacgcttgtcaaaataaccaggttaaaagccatggagaacatagcatttctcctttaagtggcctactttctggcagtgagtacaaaaaggtcgcactatttattgtgagggggattagatggctgagatgaagtggcagaaatgagtttcgggagaagacgaagttttctttgtcgctcatgctgaatgatagtagagaacaccttcgatggggatgggaagggtttggtgattaacacttgatcctgaactgcctggtatgattcattgaggccagtaagaaaccgaaacaccttttcttgattctgaaacttggtgttatcagcagaagcttgacaagtgcaagggagacgaggtcgaagctcattgatctcatcccatatagcctgaagcttggtgaaatatgcagtgacagattcatctccttggcgtaaatctataagagattcttgaagttcgaaaagacaaggtccatttccttgactaaaacggttagtaagctcagtccacatctc

SEQ ID NO: 59522 - DNA, 867 bp, Cannabis sativa
agatgatgttcccattagacccctaagttatgtaaattatatgctatacttaattggagagtgagggtatattggacaattcatttaaaaaaataggtatattttaacagaaaaaataatataagggtatttttgattaatggatacaaaaaagaggtatttttcaacttatctcgtaaagtaaaagcgaagtagggcttcgagaaatgggaaaaaaagaaaaacgcaaaaataggtcccaccgagatttgaactcgggttactggattcagagtccaatgtcctaaccactagaccatgggacctttttggcttgtcgatctgagaaaacgagtaatagtaattataaaacttgataaattaaatttatttgcaggttgtggctggtgacgtggcatttgggtctgtttatcgtcctcacatttgggcaaattggattcaaaggaaggactgatcagtacttttgaatctgacccaatcttcgtttaaataatgtataatatcgttctctttctaaaacttctttccctgtttattctctattttattgcttaaagtgttaattagctacctttctacatctctctcgtttttgttattgtgtttattaattaactcttctttgtaacttcttattgtgtcaattatatgggcgacccacttgatgaacacaaaaaactaattagtctacgaaataagaatgaataatgtataataaaataaaaggctaattaagatttttatctcttaaatgcccttgaatttttttggtctttaaaagttcaacaattgagattgagattgtttaatttcattcaattttactatttcagtaattgtttatatactaaaccatgctccccaaac

SEQ ID NO: 59523 - DNA, 981 bp, Cannabis sativa
aataataataattatgaagttaaacaatattcttattctttcattattttgtgtttctatttggtttgatgagattatagtctctgcttcaagtgccggtactcgtgggccgttccaacctccaataaaggtaacaagtactcctcaaggcccagacgcaaaagtaccaaaccaaggaagcccagaaagagcagaccatagatgtgggccagattttggagacattccgtgtaacccaggaaggtgttgtagtatatttcaattttgtggtgacacatctgaatattgtgaaacaaaatgtaagtctcaatgtcgggaaccacctagtaagtaactagttagggtttttgccctaataatatgataataatgataatttatgctataattaagcaaaaataaaagaaagaataaaaatatttgtttgtagtgttatgtaatctaatcaagagagctttatgattgcaatgtaacctactataaacataatgaaataaatgagctactttttttatttattttttcttttagaaataacctttgcttcctttgaaaatatcaatagagaaaaaaagtaacaaggatatgtcattgaagaataatattagccatcacaaaatatttattattattcacctaaagcaagttttgttaaggagagaacaaccccgctaacaactaaggcatatcgtgtagcccactatgttgttagaagttctcgattcaatactgatcgtagtatttttgaacacactgctcttaatgagcttagagatttattagattcagaatattttaattatgaatgttttacccctaaaaaaaactactaaagcattaacaacagaaaaatatcgaattcaatcataacctagctaacctcttagttattcattatatatataaaaggaatgatatttgcattgcattaattgatcattatatgaaccgacttaaacattgagcattgctataaggcat

SEQ ID NO: 59524 - DNA, 1977 bp, Cannabis sativa
taacattgtataacatggtagacaatacactaacaggttcatctatgtaattgcttatgtggctcaaaaataaaaagtaattaaattttttttaaaaaaaaatgaaaagtaaaatgaaactaatttataaaaaccctcattttaacgtaaaatttatatttgtaaactaaactttaaaaaaaaaacttgaaactaatttcattttaaagaaaaaaattaaaacatagaatatattaaagattgaattaaaataaaattttgtgcaagagaatttaagagtaaaaattttctttatctctattcagttgaatttgatttactaacaaattgtaactgaataaagagaatagggctgaacatttgaactcggaaacccgccaacccaccccaacccgctgccaaaaaagttgaaaaaaacaaaacacgtatgatcgggtcgggtttcacctgaaaatggtatatacgggtatcaggttcggatttttaaaatgcatattttggaaatcgggtgtccacctgaaacccgaatcaattttttttaaaaaaatatttttcttccttaaatagtaaataatcctaaataagtaatatatattagtaaattgattcgtccccaaatgatacggaagagaagaagaccgaccgactcatccctgaatcgaatcgatcagtcatcatctcatctcctccggcaacggtaagttctcatccttacaggctgcaaccagatcaattcgattcttccaagcaagatgtccactgctacttagtacttatgtatcttcttactctcttcttaagtaatttaagtttaaagttaaattatatatattatattgtatatgatttagaaagtgcatacttgttaattttgagttcgttacttatttttctatgtatttctttgtatctgtaatatcaatgattcaatatattatacatttgtttctcaatgaaataatatgttaattgttttttttttctattcgtcattagaagaccaagacccttaccgatttttattcatcatcgattcattgacacaagaaaagtcaagtgaaaacacccttactgttaattgttaaaaatagaaaaaaatggtatttttaaaaacaaaatttcatttgggctcaaaaatctttcattcggacttggcctattacaatccgaacccgcccacgcagagtttgatgtacctgacccgaaacctgccaaacccgaccacccaaaaattgggttcggttatacattttaaacactcgacatctaaaaacctgaatccgaccacccaaaaacccgacccgtgtgcagccctaaaagagaagactaaagctaataactaatcctaatagtttctgcataagctgagattgttggagaggtgtttgcaaggaaaaaaaggccttgttcgggtgtgcactttagatactatgataacctattagtggcttgaagatgtggtactcgaggtgcttgtaaaaattggcttagatggttcatagcatatgagatatatggtctcattatggtgagatatattaatttaccaacatgtagttggatcggggagaggatcccctttgtttttgctgagtttaagattgcattccattggtgatgatgttggtttggctcctaagtattttgtgtctttcaacagttgaagtgtgaaaagtcgttgggacactaagattcccttacttgtgcgaccaattataaggccaaagaaaaagcgaagggaactaatatccttgagtttaaacttggtgtcaagtgaagttttaaactgggatatggcatgatcattgttgctagctacaacaatgttgtctacatacaccaggcagcaagaaacattgttgtccgtcttatgaacaaagagttatcaaatgatgattgggaaaaaccatctgcaagaagggtggagctcagtttggagtactactattgagaggcttgctttaagccatagatgct

SEQ ID NO: 59525 - DNA, 2957 bp, Cannabis sativa
  modified_base (27)..(30): a, c, t, g, unknown or other
actaatcagattgtaaagagttttatnnnnggcataaaacccaacaataattattttcgttttgctttaaatttgttattttttttgttttcctcaattttttttaatttgttattttttgttttattaattttattttgttatttgatacatatataaaataacaataatttgttttattttgttgttagttatgtgattttttttttaataaatattaaataaaccgatatttaaaagtaatcaatccaaaataactgatccattctgcacttttgcggattggattggattggatttgagttactatacgaattagattagatccaaaatataaaatctgcacttagtgcttatcggatgaactatgagcaaaatagtatggattgaatcagatgaacacccctaatttaaacttttcttttttaaaaaaaaaaataaaaatctaataatttagactaattagggattgtcacgtgaaaatttacttaacacttatcagccaaatacccacagaatttcgagaattataacttaattattattagcgttaaaaattaaatttaagtatttatttgtaactaagaattaaatttatgtatttatactgtaaattactcttatttatttatatatatatttatattatatactagtgagcgagccgcatgtctactaataaatttgaattactttttttttatcaagttataattcatgaattaactatatatttttatttatttttagaacatatgtaataattaaagtttgtatttttagaactaagctaccttcgtccttggtcttcaaagctatagacctagctttgagtttcactatccagccaagttaacgagcttgacaaacccttacaactgggaatttttcaccaaggtgtttctaaacgtcttacaatagttttgcactgccaagactatcaaccttttttcttgagttgttgtaatgataacctcactctaatcaggttgtttacaatatcggtgccaatctcacctcaatcacaatataaaaatgtgtttgaaattacaagcaaactcactctaaaagtatgataaaacaatagaaaacctagagtgattagcaagcacactttaaagaattaaacactaattttggctcaaagtgtgcgaaaagtatttgttgtattttagacttgggagctgattaaacccacttgaataggttaggtatataaaataaatgcttgaccaacttgaatttttgagtaaaaattaagtttatatatagtgtttaaacaaaaactaactgtttatagccgttagcgcgtttttcaaaaagattcctagaaaaaacggtctgccattttccaaacggcctggtgtttttgtaaaaattggtctgtcgtttagtaaacggtagaccgaaaatagagaagtagggaaaaatcttatttttttagctctaaaatgcacataactctttactcgattatccaattttaaaaattctaattttattattttagctaaataatatgtgatttaagaagtcaatttaaaaattttatatatcattggtgaaataagttatcacacaagttagtgggctaaaatttgtacttaaaaactttttaagtatggacttgaaaattactgtacaagactagaaaatataaataaaccttcatgaagtcttatcttgagttccttgagtcttagaatctactttgggtcactttcgagaattttggtaaaattaccattttgcccttggagttaattttaccttagttttctaactattttatctttaattgtgctacaaaatcaacaaatcattagtgacaaataataatcaaatattttttaatcatcaaaacgacgagacctaagagtttgagttaacaatctctccctttttgatgatattaaatatttaattatttttaaaaggaaaaggaaatagaattgaataaatagagtagctctcccttaatgtgtgcaagggttaatttctttttttttttagttttaccttgcataagtttgtaactttccctcaattttatacttatattcaaaaaccattagaagtccaaaaatttagtttgttgccaaaaataaaaataaaaatcactataaaattctctcccttttgattcatcaaaaagggtggcaaaggaattcacaaaataaatagcaaaaagaaataaaataaaaaaatgaaaacataccatccatttgaaacatagatccataaaccataaatgttcaaacacataccactcaagcataaaaaaatacaaatagcataacacactagcacctagaaagttaacaggcactaagccatggaaacatactaaaaataagaaaacataaatatgagaaaagatgctaaaagaatgcaagagatctaatttggtggaggtccaaagtggtccatatatacttttcattgtgtcatctcattttgaacattagcaaacccatgtaccatgtcacttcgcatggtgttaatgtcattgtagaggttggtgaattgagagttcatgttatctctcaaattttgaaattgagtaccaactgaagtgtgaagacgaaaaaaatgcctcttcgatgttgaagtgaggaacttgaggtattggaggtgcttgaggttgcacttcttcttcttcgtcttcctcttcctcttcttcttcactagcactcggaagtacttgggcttctccatgagcttggaggtcttggttggagtaaatccatctttcttcctcctcatcatactcataagacatacccttaaatgtgatttcacctaaaatattagaatccttaaattctaggacctcgatttcatcatcagtgggaatgcccagaagagaattaaattaggtagctaagaagggcaccatagggtaaggcttttctttgtcaaggcttatagatctcattgatggttctaatgatgag

SEQ ID NO: 59526 - DNA, 2507 bp, Cannabis sativa
cgtccccttcttgctgtaccaggaagcccgcgggttcctcttctttgtggccttgtggcctcctgggctccatacctctcttgccactctctgttgagtctgagagtttcatctaaatgttggcgcaatgcctcgttctccacgaacacctcatggacattggtagatcgccgtacaccatgggatggtgatgatgagcatcctgcatcttggacttgaccttcgtcgtcaggcatagcttgtttgtctagacgtcgagaggtcccttcgccagcgggctcagcgggttggtactcttcatggtgttccacggtgtttccttcgttcatagggtcatcatggtcctcctcctcatagtttgtccgtcttgtactcaccatgatggtaaagggtgattaacacttgtgttcactgctctcaatgaaagcaccaaactgttgccgcagtttttcatcaacggatctaagaagatcgtaaaacgagcaagatgaacacaagcaatagttaatcaaagtaaaccgggttgcaaaaggaaattcaccaaaaacaaacacaagaattttatagtggttcaccgcctttcatcgataataggctagtccacttggagtgttattgatctcaatgcttgaggagagttctccagagttatgttctccaagagttcactcctcaagtgagtttttaaaatttgagagtgggagctcaagagtatgatctcgtgagtatcaatttcagggtccctttacaagtgattttacccccttatatagatattcatataggatttaaaatcccttaaatataggtataccttcccgtaactatagttgcgttaggttcaagatacaaaataataataataattatttaaaaaataaatatctcttcacttatcattttttgactatattttcagaacaactctataagcacgtgtctctcgtatttagtgacccgatggtcatgggtacatgaggggagctaattgggtcggttcgtgcccatcaagtcattgagataatttgacagctgagaagctctttgcaccttagcacctgacggagtcgggagcttagtgcgcccaaaatgctcctccttggccacaatgatcctctttggtcaatgagctcctctttggcccatgagctcctctttggcaaatgagctcctccttggcccatgagctcctccttggcaaatgagctcctccttggcccatgagctcctctttggcaaatgagctcctctttggctaatgagctcctctttggctaataagctcctctttggccaatgtgctccaccttgctcgacctccatatttagaataaaaattcatgcacaattattttgattttttttgagagataacatttggcaaatgagctcctctttggctaataagctcctctttggccaatgagctcctctttggccaatgagctcctccttggcccatgagctcctctttggcaaatgagctcctccttggcccatgagctcctctttggcaaatgagctcctctttggctaataagctcctctttggccaatgtgctccaccttgctggaactccatatttagaataaaaattcatgcacaattattttgatttttttgagagataatattttccccccaagtttatcataactttataatgttatgatggacttgtagaaaaaataatccccgcgttcttggactccatacccgcatataccaatcctgttgagtgtaaacatgtagaagaccaccaatatttttaagcatctttggacacaaacaatacaagtgaaataataaaaaaattaattaacccttatagccttcaaatatgtcatctctttcctttacaacccattctactcttcactctttatcaaaaataatagctcttctaaaaatcctctcaaatagttccaagaaccatttcaaaagaatgttcaaagtggaaactaaagattgtcggaggggatttaaacttgggcatcactattgagtaagtttttcccatccattcactatttaattctttctcatgttaaaattcatagaaagtatgaatatcatagtgttctttagactttttcataaaaccctcttttttaaatatttgcttttttttaatgctgtgaaatttggcttgtaatttttagaatctatgaatgaaacttagcaatgtaggctatgcgttatcttgatccactctttattttagaaatgagtgagatttatatatttggtgtgatttgggtaaacgttttgggaaaaaatgaagaacattatgatgatagtgatgaacattagaaatccatagtttgattcaaaagaaatttgaaatggaggaaaagatatgtttgtggctatttaccctttagagagtatagacaaaaaggtagagtaagttaaagtacgtaggaattgatgagtatatatgtcataaacatatataccatctccacgcctccttttgtatatgcatatatacatatatatatat

SEQ ID NO: 59527 - DNA, 1065 bp, Cannabis sativa
caagtaaaaattaactgtataaccaaaatgacacataaaaataactatagaacacataaacaacaacataaaaataattataaaaaaataagaagacaactacaaagcaatagaaaaataataagacgtccacctcgttccaatatgcatattattcatagattaactcagaattacaaaacattcaaaaaaatattacgtttattaaccaaatattaataactctatttaaacacaaacaataaataaaatgcatgtgtgcaacaaaaatatcagaatcgcaacgataacataacataacaacaatccagctgttatacctgaaattctgctggcacttcagagaaggacacgtgtcaacttggaagaatacgaatcagcgaaatattaattatatttgtagatgttaaaatagaataacttattaaatactgaactagtagagtatatttacaactcgctgattataaagtcgtaagagagacaaggatgtatgaactactaattcacgtattgacgagaaaccatttcacgtcagagacatgatcacatggatgacatcattagtacaaggcgaggcaccaaccttgccacgtattagtacaaggcgaggcaccaaccttgactgttagaacacttaacgtataatatacattatacaaactaagcataacagttgaacgaatctaaaacaacagatagtgaggcatccatctcgctataggaaggcacactcgtggtacttcactaattagctccagacatctttcaatgagaattactactccatcgagtcagctctctcagatagaagctaacattcaaatgatgttgactgctgaagttcaccttgtcaccaagaactgtgattgtcagaaggagcattatgtcttcaatagcataaacgaagaaatttacattatcaacctcggaaagacatgggaaaaactttgactctctgccagggttattgttactatgcttctagcgaaatgtccatgaatgacacgcttcacaacacatttaatacacgtttgcactgacccagtaaaagcggaccaatca

SEQ ID NO: 59528 - DNA, 929 bp, Cannabis sativa
  modified_base (633)..(640): a, c, t, g, unknown or other
tatgattagttactagtagttccctaagtccttctaaggatataccctagtgataggaaaatttcagaatgatggaatggttatgtacttagtgtaaacgattttagaatcatggttgtcctgatcatgaccttaagaaaagctagaactgttaaccttggcttacatgttagatagctattctaggtgattaggggtgaaccatcctatggtcatttagataagaaaataagtgtttattttaaaaaatattacttttctaagaagatgactaaatctgaaaataaagtatgatagtagaagagataaattttattttgatgccaaagtgttctatcatcttattctacataagatggtcacattgcccttgttgtcttgatacaaccgatgaggacaataccacttatgttcttagatagaaagtcaccgtaccttgtcgtagtgggagggtttcaaggaactcaccctgttatgacttgggagacacttgtgattaaaaatccattgttagtttcaacaagtaatggatggtcagaataaggaaagtagaagcaaaaccaagataactatggttaaaccattcatatgaagtaactaaaagttttctattacaaggataagaaaggaaannnnnnnnataaatttattcaatggacttaacaaaacttttggatcctagtattgtaggtttacgtttatctaaacttgtggcttgtggtatgcctggtgattaacttactctaatgcaagcaacgtactttagtaagatgctagagcatttttttttctaatggcaatcaatagaagcttctcgacttctagacatagatttaatttatctaagaaaaaatgtcatctattcgagaaaagataaaggccaaggaaaagaatttcttaggatcaacagtgagaggtctcaaataagc

SEQ ID NO: 59529 - DNA, 1778 bp, Cannabis sativa
cccaaccctacttactataatgatataagggttgggttgggttgggttcattgggttgtgattaatatttttttagctttaatatttatatatgttataaaaaatgataaattcaaatgtactataaaatttaaataaaaaaaattatgaattattgataatatattaaaaagtaaaaactatgaaaacctatgaaaataataatattattagtactcatgctgtcatgcattctaaaattagacaaagactatatgttattaataacttactatatataaatattttgtcatagttacatatagtacgaacaataattatataaaatatacatataagtaatgtgacttagcagtgtgggcacggtctagtttgggttgagtagagttagatttttctaacccataaccaaaccatacatacacgggtcatgatttttcaggccaatgaaatacggcccatatttgacataacccttttgcataaaaaatgggttgggttggtcggtttggtcggcccggcccatattttgtgcaccccaagaacttcttttgattgttttcttgtctcgtggccctggactctcggggccttccccgtggtctccttgcagatggatcaggttgagtttgaggagtcgctccttatgcagccctggctgtcgctgctttttgctctaattcggcgttccttcagttcgcttcagccaggcattggcgaagttgcctattttctagttccactagtgggacatatctggttggatcataagtgtcttcactttgcctttctaggatctgttcaccagttgggttgaaatctccaccattccttcctgaacagggggtttcagttgtgttagttctttgcgaactttgaggttcctttctagggcgacagattgtctcttctgcctgattctcttcattacgctgagtatcatccacaataaattcaagctttgagttttatctttgaggatgttattttctgagttttactacaaatgttcttaatgaaagcaccaaactattaacgtagatttttgttaacaaaaaatattagcattttttctaataaataaactacataattaattaaagtaataaatagacaacagaaattttttaatgtggttttcaaattaactcttcatagtccatgagtccattttggaaggtattagcaagatggttacttcaatgcataaagggcgagatgaacaaatgttgtggtcattctttgaacatactcacgagtatgtggatcaattacccacaagctcttacaagtatgtgggtcaatgagttgcaagctcttacttacgagtatgtgggtcaatgagctgcagactctttgtttatttgtcttgaacaacttttattatgtatttttttttttatcccgatatggacttgttgtcttgcaaatcttatttgttaatagttattattcttatctcgcttttttctatgtggtagcaagttcgaatatttctatcaatggttatccctaaggcgagttatttaatgtgcatttaataatatacgactttggctggttcgtattcctcccctggtacacgtgtcaacttttcattattggctagaatttgagtataccaataaataagactttatcttcctctttttaagggacattagtggttaatctttatgtaagctctaatatataaggtacattagtctaatctagggctgtgcactaagtattcgatccaatccaatccaatataatccgcaaaatgcggatatccg

SEQ ID NO: 59530 - DNA, 812 bp, Cannabis sativa
tattaatttttattcatataaccggttatatttttagttatatctgagacaattactttggtgacttttccagcgacgttgacttttccattgactgttccgccgacgttgacttttccgttgactttccagtgactttttcggcgtctgtgattttccggtgacttttttggcaaaacttattgttgttttagaaacatgggatttttatttttttttacaaaaatatggcataaaaaaacccatataaacgtcaaaaaattaaaaaacccacaatcctatagtgttatttatttatgccataaaaaagtaaaccataccctcaattcccatatttatgaaaattcctcctaacataaaagacttaaaaaactttaaaatagcccaataaacattaataaaatagcccaataaaatacttaagtgagcccaaataaaattaaaaaataaaaccctagttttatcttcttcatagcagctcctctcttcttcagagcagcacacaactgctgcatatttcttcaagttcaacccacaaaaaaaaaaaaaacttgctgcatttttccttcgaattggtgcactgccctgcccttgccttccttctcactgctcctccattttaactacgttcctccacgactccaccttgctgctgccttttcccttttctcatcacagaaaaaaaaaccttgctagtttgctgctgccttgtctgacttaggtgcttgttggttgctgctgcctttctttgttccataggtaaacatttgaatattatttagttcttttaattcataagccatatttagttg

SEQ ID NO: 59531 - DNA, 1702 bp, Cannabis sativa
atagattagggcgttacaattttaaagcataagaaatagccagtgcttcagcttctttaggggagaaaaaaccagtcagggatttagcaaaacatcccaacggaaaggcatcagaatcacaaccaaggcccctaaaccaatagtaccgttttcaccatcaatagcagcatccacatttaactttaacgaaccagctggaggtgcaacccaaagaaaaacacgtgggggggagagaaaacttagatgtatacttatgtgttttctgagcctgaaaccaactatcataatattgaagtgcccaactcaaaattgcaggagcattcctaattggggtaccatgtttttcgttgttacgttcaatccaaatgcaccaagccagagtaatgaagacacaaaactgatgtggggaaaatactgacatgagataattaagaatgtcgatgatcttccaagagaggctaggtttgacgaaattccaaaaatctaaaagcttccaaacttgaattgagagagggcaaaggaaaatagcatgtaaaacatcgtcaaactgccagccacaaaaaagcagcttccgaaaaccggaacatgatgagctagaagcgttgagccagtgggaagaatatcatgtgacacatgccaagcgaagaccttaatttttctgagaatttttagagaccacaaagcatgccaccactttgctaaaggaagtaacaaagaagaatttgaatcgggcatagagttcattgctagggaatatccactcttgactttgtagacttcactttcttcataatgctacgtgacaaataatattagtatgtaaaaaatgaaataatatatcataataaagaataaacttaactaataaaacagttatagacaaaactataatttacaaattatagttagttggagtattaatggaaaattcaactttaatcatctattaagattctaaggaaaatattattacagaataaatactagagactactagagagattttagattttatacatataattagttaagctatgtaaatatattatgataaataatatgaatacaaaaataataataattttttcgtcattatgataaacaaattaaatgtttttttagaacaaattaaatgttttatatgaatataaaaatatgaaattagaagatatctttctcttttttttacaaaaagtaaataaaaaaaaaaatcaatatcctaaatatttatctaaatgtcagcgacacattttttttcttaattcgaatttgaatctcaagtactaattaaaatataaatatatttatattttatctttttaatattttgtataatcctattccatatagcagtgagatactcctcctctatgtataaacacaaacatcttagctcaaaaaaaaaaaaaatatatgaaaaacaaattactcattagatcatcttagtttgtgtgctagtaagtattaaattaaagtgctaactctatcattatggagtctggcgtgtttcaacaagaacaagatttttattggaggtctccctcctcatcaaattgaagtagctgaattgaaaacatattttagtaatttcagaactgtggtagataggaaattttgattttatatgcttaaataattaaaaaaatttattattataccaaaaacttaaaccataaaaaaactatactttttttttcaaaac

SEQ ID NO: 59532 - DNA, 1226 bp, Cannabis sativa
tcgtatggttgcgtccttgctccgattgctagcaaatttgagatgtaagatcatcatcgactggtggtcgtgcagcttcgacgcatgcaagtggtcggaaggtggccggaggtgggtcgttggtgctccacaggtggtggttatgggggtttgtctttgatgttttgaagagagagaaagagaaaagatagagagagagagagggctagtggggtgttaaataaattaaaaataattttgttgtttcacccactttttttattaatctctttatttttctttttatttttatactcggtttgaccgagtcttcacaactaagcttctacaacaacaactgttaatttcctttattatgtgcttcctgtttctctaattgaccaacccctcttcagccttcaaaacatttataataataataaataattttcatattaatatgtaaatagtcgtccttatatattacatgaaaattaatgacaaaatattacaataacttaattttattcattcatattaattagttatatattttgagaaatagtttatcatttatatatatatatattataaaacatatctgcatatagatataggtagggcaccaatataatttgcatatgcatatatatatagatatatatataactagctagtaaataattcaaaggtcccaaaggtgcatgtcgatgtcattaatgttgaagtctgtcaaaaaattgtggtagtcatgatcattattgacaaattgatcatcacttgtactatggcccctgaaataatcattgcattctgaaactacatgatcatgattagccaaaccactatttattatgggtttctctatatatccttgaattatttggtcaccatgttctgtgatattgttgtttaataattccctccaacaataattcttattatttgtttggtcatgatctataacaggttgtttattattattcatcatgactgataattggcttctgatgattcgagttggacgacgctttgttaccatgttggaccatgctttatcatggttattattattattattgagtttactactttgatgaatatcaatattaatagccatcttttttctctgatgagtattccaataatttttcacatcattagctgttcttcctgggattctaccggcaatcaatgaccatctgatcatgaaatccaaaacaaacaaacaaaaaacatattattat

SEQ ID NO: 59533 - DNA, 1280 bp, Cannabis sativa
atttcaaattatagtctaaatactcaagatcaatttcgaagacattatttgcaacaagggccttgtcaatcaaaaattcatgaatttcctcctaaatatttttcgaggcgtggaccatcgatttaacattgaatggtatgatcaatttcctacttggttagagtatagcatcaataaagattctgcattttgtctatattgttatcttttcaaacaaaataaaggaaaacaaggtggctgccagacatttgttagtaagggtatttcaaattagaagaagccaaaaacatttgcactacatgttagaaaacatgatagttctcattacaaatgttacaagaagtgtgaagctttgatgaatgaaaaacaacaaatcgaacacattcttttaaagaaagagaacaaagataaaaaaaaatatcatgtgcgattaactggatcaattgaaagtattcgattttttctacgacaaggtcttgcacttcgtagtcatgatgagtctgaagattctaataatcaaggtaactttcttgaacttctaaaatttttagttgatcataatgagaaagttgctctagaaaatgctcctgaaaactttagattgacttctccaaagattcagaaagatattgtaaatgcatgtgctgttgaaacaatcaaccttattattaaaaacatggaagatgttgtgttttctattttagttgatgaatctcgtgatgtatctataaaagagcaaatggttgtaatgtttcattatgtggacaagaaatggtatgtgattgaacgatttataggcattaaacatgttgaaagtacaacaagaatctcactaaaaatagtaattgataagctattttcaaagcatgggttgagcatatctagattgcgaggctagggatatgatggagctagtaacatgagtagagaatttaatggtttgaagagtattattatgaaggagatgaatgtgctttttatgtccattgttttgctcatcaactacaactagcacttatgggggtggcaaaaaaacatgatataacaggtatttttttgttgctcattattatatatatcaatacttgttatttcgtaagccatttttctatttaatgatttgtattgtatgaaaaaaaaataggtacaatcctcactgtggtatctaatgtagtgaatattattggagcatcatttaagcgtcatgacattcttcgagaaaagcaagctgctcaagtcattgaagccttaaaatgtggaaaactttcaagtggaaaagg

SEQ ID NO: 59534 - DNA, 1199 bp, Cannabis sativa
taatatattagtattaaactagtttagaaaatcacacatgtggcgttacaacttggtatcagagcagccatggttttaaaggtcctaaagactggtcgaaaatatacatttggtgggaagataggtcgactcatggtataataagtgtttatgttatttgttgttgccttacttgtttagacaattatagtgtatgattggaagaagtggtgtgtgttgatattgtttgaattctaaatggttgaaggttttgggttacaggatattggatcatgcaacggtgatctggccatttaaactgcgagctggaactcagggtaggtcgtgtgaaagagcatcctccaccccccaaaactgggaacaactatttgctgccatgtaagagacgattgggcagcaacgggagcagattggagacttgggagagcaacaggctcgtcctgcacctatactggctcctcaggtagtgccattgaatatgggggatcatatggaaccaatttatgagtggtacaggaaacaaaacccacttgtgtttgagggtggcccagacccattgaaagcagaacgacggatgagtatgattacttctatctttgatttcatgcgggtagaagataatgaccgggtacgatgtgctatttatataatacgagatgatgcccggatatggtgggagattgtttcccaaggtcataatctgaataccatgacttgggatgcatttagggcattattttatgagaaatattataatgaatctattcgtgctgctcaagctaaagagttcgcacgattagtttagggtagcatgactgtgattgaatatgctaccaagtttgataggtcggccaagtttgcttctgatgaagtggctagtgatgctacaagaaaggctaagtttatcagaggccttgaagaatatattgctagagatgtggttatggcagccaaacaatcaggggtcgtgaagaattatcctaagattgtggacttagctctcactgctgagggggccgaaagcttgattcgtaaaaagagtactcagaggaaggacgtgtggaaaacctcatctagtactggagtgagtaaaagaattagccccagtgaccgaaaaaggaaaccagatggaccactagttgtgggtccaaacagaaagtttcaaggtaaccagagctttcgttggggcagaaatgagg

SEQ ID NO: 59535 - DNA, 1053 bp, Cannabis sativa
tctcacacaaaaaaattaaattgggtctcttttgaaaaactatttctttaaggaattgaacaacccgggggttcccaaggccacgacaattccaactcaacaaattcataactctcaacaaaaatcacaccactcagaactaaccacaccactcaacagcaaaaattacacaccactcaacagcaaaaatcacatactaaacatgtcaaaacgacaagacaacttttacaataataaatcaaggtattttttttttaataaaaccaaaataaaatttaaatatttaaaaaagcaaaacctataataatataaaccctcaaatcttccaaaccgaactctctcattcaaattttcttcatcgtcttccccttttttaatctaattaatttcatgaatcctcctttcttctacgtctcaaaatttccatctttatattttattaatttgtttcttagaagaaacactttactaataaaatccgaacaagatctaacgctctgggaaaataatcagatcaaaacaagagagttctctgcctacaactaaaactaaggtgatcaccaatacgatatagcagtacgttatatatatatatatatatatatataagaagagttctctgcccacttttcttaatttttttcaatatatcagaaatcataaaaatcctaacatcggctatttccaaataggagtaaataaaaaatcgaaacaaaaaaaacgttgacggatcgaaacaaactaaattctaaggaaagagatgataagacattaagttgacactaaagataaaagggagctaggaatacatgtaatcatgtttgattattattatgtgtgttattgttaatcgcggctaaatcttttttgattattgttttacttatacttaactctccaagctcaaattttagaaatgaaatcaaagtgcttgcaaatttaaggtgtcatccaattaactgccactaaactacttatgtatacactcttatacatgttagcatgtttatattagtacacctaatatttttatttcaaaatttattttaaaat

SEQ ID NO: 59536 - DNA, 2927 bp, Cannabis sativa
  modified_base (1048)..(1048): a, c, t, g, unknown or other
gaactgattgtgatccttattcttattggatctcaatcgttgtctacgacatcttattctttctctgctttggtcttgttgtctcttcttctgcagtttccgaccgtcacctttcttaaatgaaaagaaaaaaagagtttctaacagtcaccaaatagtaatggactttaagactttttgacagaaatagttaaaacacaacaaaatccgtctcgtagacacttagaggaggaattctgtttcagccggataaacaattacttcattcacaacaggtactgtactttgaggctgctaataaggattatattacagagggacgatggaaactttgtctggttttttgagttttctgaagcgattctctctgttttgtatagagttttacattcgcattctacagggggatatgatttagctatgatccaattctcttttctttctttcttcttcttaataatagttaggtttgtcataattagtttataatgtttagttctaagattttggaaatcttgttaataatcatacgagattttgctctcaattttgaaacgtaagagccagggccaaagaaacttccataaatttctgattttggttcaattaaaaaaattctttttctttcatgtgaataccatttgtattgtatttgttcctacatatattttatttcagtgctatgtttgagtttgggacaattctatattggtgttgatgaagtgtttggtaacattgaggaacttttatccaaataaaatctagtttatggtgtttctaggcaatgtgagttttaaatattttaactacacatagtgacaaataagttacttggaacaatgttgtgttgttgattggagagagaatttgtagtttttttaaactttatccggcattttattaggagaagcaaaatagggcagtgctttagagaagttttgaaccaaagtgtacaatgctttattgaacagctaccaactaatatagcctgtttagagaagttgtgaacaattatggtttattcatttgcatctcttcagcattgttnttagtatttgacatgtttatgttaaaactaacagaatttttaagccacaagaaactttgttagatatgcatttattatatagataagacatatatataggtttattgagagttattatatgtgcagcacacctactaaacacactactttttaaaacaatggaaaacagtgggtatctgttggttttttttttttatggaaaaactatatgataaaaaaaaaaaaaaaaaaactatatgatttcgtaatgtttgactatgcatataccattactcatttgttaatgttaaatgataagaaaagtgggggaggtatgtgttgtgattatggttaattcatgtgtaaatgcatattagaaagaaggagtaagtatgaaattaatatttattagcattgttacccaagagggtaggtagttcaaatgatcaagtgtgtttttctttcctcagtgtgatgcttgagtccttgggcaactacataaaaatgctataggtttttcattcccaaatattctagggttctttcttaccgacatgatagctcgaatggtcaagcatgtggtttgtttcccaaaatgtgttctagtcctttgacacctacatagcaactggcaattgttatagttttttcttttctaaatattataaggttagacgaagagcttgatgtaaaaaatgctacatttgctcttaagttcctttgtaagagttgacaattataattgaccatagatgtttattgcaatagttaatttcacaggatggcgactgatcattttcgtattgtatgttttgttgcaggtaatcctgaatgaagtgggtgtgaagtgagatctctaagggctctgttcatagatgtctttttggcacttctttgttatattctgttcaataaaatgaatttgtttgtaaaggcctatgtactctcctttgagatcgtctgcttgttatgccttttttgaaatactcttggttggacttgaattcgcaatgaaatcattgtgctgtttctttttcaattgtgttttatatcataagtgcttattaagtctacatttatttagcgaaatgctctctgtacggtaatatgctaaatcctctccaatctgtaggctggcccttggtatacgtgggttaagtttgtgcttaggattcaccccaacccaaggccaaaaaaagctatggaaaaaaagagggtatagatttgaacttaagatccttaaattattattagttgatcgtaataacactcaaaaaaaaaaaaaaatcttcaagaaaaaaaaaatattaggcaatgcttggctcaacaaaatatcaaagagtggtctaattccaattcaactctcctaggtgaaaaaaaaaaaaattaagtttggtacgccgtatcacaccgtattgtattgtatagtatctatatatataaaagagaagtatgaggcggtgatgtggcagtctaaaatcactttgaatgtcactatctcttctcttcttaattttctctttttttttttattttttattccgttaataaatattaatattaattaattaagaaaaaaataaaataggaatagatataaaatttttttaaccgtatagtgtagcaaataaaaaaaaaataactttattaaaaaaattaaaataattaacatcacatcctttattatttaaaaaatatatcttctattctatagaaagtgtgtctatataactaaattcttggtttatgagaaatttatgggtgactttctatttatatttaataaaataataaaataaaaataatacaaatctcatttaaactgatatttaatatttgaaataatattatttatatatatacaatattataatccacatcaatcgtgcatattcattct

SEQ ID NO: 59537 - DNA, 2275 bp, Cannabis sativa
  modified_base (671)..(671): a, c, t, g, unknown or other
gattcttttgtttcaggtccctggatttttaaggaaagtattcataagaatcgagaacaagagatgaaagagttgaaaagaaaatgcacaatgaacttttctacctaagcccgtcgcaatgggcataatccttcgccgcaatgggagttggcaggaagttttgccatttttgttgataatccttcatcgcgacgggcatattccctcgccgcgacgaagccttaatgacgagatttttgggtaatttcgtaatttcacgaattttaaagagaacgcttggttcaattaggaggagttcatgaattttgaggattattcagatttggagccttagaaacaaaggagagcatttcaagagcggcttgtggtgacctggatcgattgcttcaaccagttcttttctcctctcttaatttttctatgttattttatagtttcaattttaattatggatttgactatagagattatgaactaaactcctatttggggagatgatgaatgttgattgacattatttttagttaatgataattgttatttctcctttcttgattgtgaatttatctatatttgtgttaattacatgcttaagattgatcaccttttgcatgctttatgatcccaattcaaaatctaaaaaagggagaattgggaatgctaaaattggntaaactaggttttgatgtgaaatgaaagtatttacatagcctaagtgaccttgaaattattgcttaatgttgattatatgtttgtctaattcagagatgatcacataacatgtgatttagggcctaaaagatttggaaagagttaggttaatttttataatctgtcatttacattgagaaagataatagtaattagctttaacaatcgaattaaatcaacaggatttttcctatttctcatccttgattaaatacatttttattgcttaattttattatctagttattctttatttttagtttcaaaaaaaattattttttgtcaaatagaaatataagtctaatttagtggtattcagttcaattttcggtgggatcgacctcacctgtgtgagtactacttgattacgtgcacttgtgtagctattcatatttttcgtaacaagtttttggtgcagttgttggggaattgtttaaaaattgatattacaaaaaaattagactaaattctgctttggttttttgttcttacttcttgcaatttttgtcttaattttttttttctatcctacctagtgcttttggtatatgtgacgttaaagagctagttcaagaatgcatgttgatcttgagattgagaagacctgtagacagaatagaaggaaaagagctacattgagggctaaaccagaaattgtcatggctgacaatgccaataatagaaatactggaaataatgggggagcagtaaaagaccaggcaaacagtcgtaatccacctgaccgtagcctgagggactatgttcttccaactttgacggaggttcagtcttgtataagaccacatgccgtagaagccaataacttcaaaataaagccagccatactccaaatggtgcagtcttcagtccagtttggtggactcccctctaaagatccaaatttgtatttgtctaatttcatggagttatgttttaaagtgaatggagttagcgatgatgccatccgcttgactatttccattctcgttgagggagcaagctaaaagttttctggtatccttgccacccaaatccattgatacgtggactaatttggtgacaaagttcttgtcaaaaaaagctgcgaggagaaattaataatttttgtcaactggacaatgaatctctctatgaggcttgggagaggttaaaagatctcattagaaaatgtccatatcatgggatcaaaaagtggatgttggttcacaatttctacaatgggctgattggtaacaccagaacaattatagatgtcgcagctggtggggcatttatgaaaaaaagtgcaaacgaggcgtatgatctgctcgaagaaatggccatgaataaccaacaatagccaattgaaagaagccaagtgaagaaggttgctggtacgttcaaggtagatgccatcaccaagttgacagctcaggtagaggccctaacaaagttgatggcggttcaagcaaaacaatttcaagtcatttgtgagctctgtgggggcccgcacacctatgattcatgccccgtggatgtaaatggtttgccgatggatcaagcaaaagccatcaggaattattct

SEQ ID NO: 59538 - DNA, 4109 bp, Cannabis sativa
acaccacatgcacctaatttcatcaatttcaatcggtttctcatatataattttttttagtttaaactaaatgtattaagatatttagaatttgttaacagtgagtcatatatacttactatatatatggtacaagtaaaatattttttttatttaatattaaactgaatatataaaaagataaatatgatatatacagtaaataaatattatatatattcaaaattttaaatttatttatggttataatatacggttgtcggtcggtttcggtttttttggtcggtttgttactaaaatataaaccgaccgttcaatggcggttttaaccgttgtcggttttttcggttttcggtttaaacggtttcggttttaacggtgttcggtaagtcggtttgaacggttttttcggtttttcggattttatgctcagccctattccctactgcagctcgtaagttttgtagtttggtgtcatcactgattgacctttgagaatttatagcagatgggattctagtatcgggagcattttgcttggtccgagtactagtggttccagtttcttgcacgcctagagtgaacccagccagaggggtagtcactccttatcctactgtttgtgggcatgttgttggctgagaattagtcgaatcagggtctgtcctggctcaatctctggggtttataggtgtctgcacgtttggatctaaagccattagatccgtagtgctagtttgattttcctttcgtgttgttacaaccattttgggtcctgaaaagacttaaaacaaaaacttgtgtttctttgctctcaatgaaagtaccaaaatattcaccttgtttttagccaacaacagtgagttaaattaaagtgatttaagaataattaaaataacaaatatgaataatgtaaaataaagagaacaccagaattatagaagttcgtctccttgatgatggtaatagcctactcccttttagttgtattgacttgtgagtagataaacaagaagaccttgatctatcatgaaagctcttacaatgatctctgagtattttactcttaaataagatttctctagtgtgtttctctaaataaaattcgtgtccctgaatagtgagatgattccactatttatagggattaattacatcaaattagtttcctaaaatcaataaggaataaaatgagaaatctgtttacttcgtataattacaataatcaaaatgaaaaactaagtaggtttttttttcttcattactacgaatctatcccatgaatttaaagatattgttgtgtcttacaagcttgataatatataggatatatctttaaagatatccaactcgtgacctctggttggtatatgtgcactgccttcatgatggagatgatcatatattcttgtacaccttgttcgaacgttcagctccttctcactttgagcattagatctctatgcacagttccttgcgagaagaatcttctgctcgagccacaaaatctggcccatgtgtcacccagatggatgccacatcaccctgtacaaaattttagataacagtctcgcttttacccaataacactaagtcaattaaagcaataagaattaataatttaacaataagaacacaaagatttatagaggttcgaccatgtgattattatagtagcctactccctttagttgtattgctatagagaatttataagatcacaagaagctggctaagtaagtttcttaagaattccctagaaaccttacaattcttttacatcataagagttcttctaggaaatataatctcggatccctgaacaatggaatgactccattatttatagggaaaacattatattaatttggttccccaaaacaaataagaaataaaaggagaaatttggttactttcctactttacaacaacatcgtgtgaaaattctactgaaatagatattcaattgacaaatgaaaaaggaaagcatcactaaagctttgcttcaaccgcatttatcctgttcggattagaagctgctcagacaatttcattcaccttgtgcggatgttccatactaatctttagataagttatttctagataataaatcactctggacgacataccgaggaccgtactatccgtctgaggcttaaaatattctccacatgtcacttagaaaaatgtcacgtcactttgtgtaaaaattgggataacttatataattaaaaaaaaaaagatcttttgtgagtaaattatgaataatgtaattttttttaattttaaaaatagtttctcaaaaattcttagaaactacaaatcctagcttcttccaaaatgacttataaattgaatttttttttatttttttttattttatcatcaaaacacacttataaggattttcatttttatttttataaactaaaaaagagcttatcgaagtcaagtcaaatgctaataatttttttttttaaaaaaaataagaaaattcatgggagaataaataaaagtaattggaataattttagaatgatattttatcttagctttatacataactaggaaacaaccagcgtttcacgtgcaattatattttatttaatgatatatatcaaatttcaaattttgatttttttttttaataatatgagtaattattttactattttttttttcatttaaaaatgtaacaaaataaaataaaataaaaatcatcatacaaattcttatttaataaataaagaaaataaatatatatcttcaagcattatagtaaaaaagaaaatttgaaaaatccttatacaaaattaaggcctacaaaaataatcaataaatctatataaaaatgaccatctatatgatctcaaaattgttgaatcattatcttgtagtcgggactacattaattcaaactggtgtcatcaccgtatctcacttatagttgctactatattcaaattcattattgtcatcatcgtatctcactacaccatttataaacaggttacatgcgtcgtatttagattttattttttgacacaatattaacaccatatacttgtaatacatgtgttaaaatggcatgactcatgaatataaattgccaccccttttgatgagatcggactatcttccaactatttgcatcattatttaagtcgttaaaaaaagaatacttaatgacaaaaaaagagaaatattttttttttcaaaaaagttgagtttaggagaataaaaaaaattacaaacaaatatgaaatactatgaaattattaggggtagacattttttatttattttttatcttaattttagggatggacttaattagagagatttttaaaatttaaattataatatattatttattattaattagttaaagatatttttctaatgcttccaaataccatttttttattatacacatatatattatttttaataataataataaaaatatattttttttggttgctacctatccttttttttttattattattttaaagaatttatctattctttttattatatattttttaattgttaataataataattttttttggttgctacggattgttattttagttagttaagaaaatttttaaattgtatataagtatttttttagttaattaatcaattaatattataaaaagaattaaaattaaaaaattagataaaagtattttaagtaattttaaagtgttaaaggaaagaattgaagaaaaataaataaaattatcttgaatgattttaaaacgctgcctcatacttcttttttaagatagaaaatttgaagatgggtgtatatgaaaaatataatataattaaaagttaattagaaaaaataaaatttaagagattacaattatttaaaaaattattttttaaggccatattgatgtttatgatgattttttttttttgaaatctatgtttatgatgattgaatcaccatttgttttggacaggattttgaaattgaaagtaattgaaaggattttataacaatttttttaaaaggtatatacaagttcttaaaaatataaataatgaaagaattattactctcaaaagaaaaaaaaaaaaaagaa

SEQ ID NO: 59539 - DNA, 815 bp, Cannabis sativa
aatccaactatcatggcctagttaatttagtttcggtgcaagtgcatgcatgcaacgttggtacgttggtacgtagttgcttgtggggtcttagttttggttttcagccaattaagatcacgataaaatattatattattattggatactagttgtgtgtctaacacgtgtccttttataattgattataattgattagtgatattttttaaaaattattacacaaaattgtatactaataacgatatttacacgtactaaacaacattttttagtatttccaatacaattatatgatattgttttgtcttaatttatataaaagtgattggttttaaattaatttataaattgcatttcacaactcaaattaagacatagttatttaacatctaactaattttacttaatttagtgtgattataaaatagataaaatattttttatattttttaaaaattgaattttaattgtaaatttatttaagaagaaaaattttaaatagatatctcaattcaagaaaaaaaaatattaaactttagtgaaaaactcattaggttatcctaaaattaattgatgatgagtagaattattcaaatttcttataaatggtgattaatattcttatacttgtttaaacttctatgtgggatactataaattttgatatatctcatcaacttctatatgtgggatacatactatctttttgtactatagtatatatttcttgcggcttaatttctttttttcttgacacagtgtggattggtatataaatcaaatatgattcatgatatcataacacaaatcat

SEQ ID NO: 59540 - DNA, 3210 bp, Cannabis sativa
aggatggtgttgttgtcacttcaaagcacgggatgactgatgttatttgcaatttttttggggacttattctttgcttcgggtacacacacagaagctttgcagcaggttttacatgcaattcccactactgttactgctgaaatgaacgactcgctgttacgtcctttttcagacaaagaagtacttgatgctcttcactcaatgagtcctgacaaaagccctggcagtgatggtatgtctgccatgttttatcaacattgttgggatcatgtaggcaccgatgtcacagatgtagtccttggagttttgaatgagggtcatgatatgagcagaataaataactcaatcataactctcatcccaaagatcaaaaaaccgaaagccatgggggattatagacctattagtctatgtaatgtgatttacaagttgatttccaaagtgatagtgctacggtttaaagatgttctacctttcgtgatatctgagaatcagagtgctttcctcccaaaccgtctgatcactgacaacattcttgttgcttttgaattggttcatcacctcaaacacaagactcaaggcaataagggtttttcggcgctcaagctggatatgagcaaggcttttgatagagttgaatgggattatttgtctgcggtaatggaaaaaatgggttttgctcatcaatggatctctctcattatgcggtttttattgtccaatagtttctcctttcagctaaatggagaaattgtgggcaatgtctggccaacaagaggacttcgtcaaggtgatcctttgtcgccttaccttttttaatttgttcagaaggtctctcacggctgctacaccatgaagagcatatgggaaatttgttgggattaaagctcacaaggcaagctccgtcggtatctcacttgttatttgctaatgatagtctccttttctgccatgcaaatcagagtctgctttagccataaaaaagattttggagatctaccgtcaagcttcaggacaattccttaataccaacaagtcaatcatgtctttctcacccaacacttcacacgatgcaagaactttcttcagccaaactttggggatgccaatctgtgaatgtcatgagacttacctaggtcttcctgcatactcaagtcataacaagaaggagttatttagtaatgtcaaggacagaatatggaagctcctaactgcttggaatgacaaactgttttctattggggggaaagaagtacttttgaaagcggtggtgcaatcgattcctacatacgcaatgagttgttttcgcttgccattgggtttctgcaatcaaatagagtctatgatggaaaatttttggtggggttctaataaggatgggtctaaaatacattggaaaagatggaagttactctgtaaatccaagtttgaaggaggaatgggttttcaatccttcgttgattttaatcaagctatgctagccaaacaaacttaatgattattcgataatccaaactcccttttagctcgtcttttgaagcacagatactttccaagtaacacctttctggaagcacacaagggtcactccccatctttaacatggcaaggaattcactggggtcgagagctacttcttaagggactgcggtacaagattggtaatggttttcatgtacgatgtggaattgatccttggatcccaggacatgatgagttcaagctaatatacttctcaggggaaccatccacgccagtatctacttacatacatgatactatggaatggaatctgcctctcttacatgaagattttgcccaaattgatattgatcggatcctcactacccctttaagcttttaccagtcaactgatcggcttttctggcatcatactacaaatggtctatacagtgtcaaatcaggctttcaccttgcaagctctatctctgagaaacaccaagaatcgtcctcggatgatcacaagtcgtggtggaaatatttttgggcattgcaaattcccccaaaggttaaaatatttgcttggaaagttgtccaaaatgccctaccggttgccacaggtttgcacaaacgaaatgtaattgactctgctttatgttcaaggtgtaaacatgcatgggaatcaattggacatgccttgttctcatgtaaatccgccaaggctgtttggaaaggtactaagtttctaattgattatcaccatgctcacagtatgtttaatggagattatctaattcatttggcaactacaatggaaaaaatggatgttgaagaaatcatatgtgttatgtggagcatttggaatgataggaacaaagtactacatggtggcttaccaagagatcctatttcaattgcatcctttgctttgaattacattgagaaaaatagaagtgccaagggcttatcctgcaaaaaattgcagcaggaaattacacaccgaaatgccacttcccaatcaagacctgtacaccaaacttcctccaaccaagaatttgttcaaggtcctcacctcacggctgtaaactctcaaggaatgccaacactacacaccatgtctgctcctagccgatcaccatgtcagcagtttagagagaaccatactgaactgcaacctcaaactgcctcgcaccagcacccagcagcagcagcacaatttccacataacaattctgatgcagcaggcagtgtcccacgtcagcagctcttagacaacatttcttggactcctccagctatgaatgaacttaaaatgaatgttgatgctgcagcaaattttaaagatcaaacactaggaattggcgctgtagttcgcaactataaaggagcagtgatcgctgccctctctaaacgagttcaaggatgctttcgtagtgatgaaatggaagcgaaggcgctctttcatagtctcaattgggttaaacaatatccttttttaattgctatggtggaaacagatgcgctacgagtttcctctgctctaaactcttctcataaggatttatcatgttttgcagatttaatcgatgatgttcgttgtcttttatcctctttccctagagttactattatccatgctcgtaggcaggctaacaaagctgcccatggcttggctaagtacgctctagagttggatgaagatgtatcttggataagagaaataccttatcctattttctctattatt

SEQ ID NO: 59541 - DNA, 5459 bp, Cannabis sativa
  modified_base (1062)..(1063): a, c, t, g, unknown or other
  modified_base (1176)..(1180): a, c, t, g, unknown or other
ttacaatagagttgtaatatcttgattttcttccattgtaataaaatctctaacagttgcaatgtagtttatttactggttatttttttatatgaattaggtgtattgtggtaatgatttttattagttcacttatagtttcaatgtagttttaaaatcgttgatgttataatattcatgtttattttttaattttgttgttcatctatgaagaattgagattacaagttctatcattctgattattacaagtcaaactgatactctactggcacgtacagtgttattgccaacattaagaaaactctttcgaaggatcttataagaatgtttcgtgatactcaattcggtcattccttggatgttcctaagtacaaattttatcctcaagttattcacagttttttgttaagggaggtacatcaggacaatcccaagaaattttgggcaaaagattctagctgttgcattaggtttagcattgagaagttttatttgattactagtttggattgcaataaaatgagctttggccaagaatcaaaccagattattgatatatgctttttttgtgacactgaaaaattgaccataaaactattgagaatgcattcttaggcaagaggtggggcaatgatgatttgtcggttttaaagatgattggttgttattttattcattgttttccattaagtaacaccattgagaaagaaatacacaggtttgaaaatagatattattaatagtggtcattggaatgagtcttattgggatagggaaccgtttgagtagacaactaagaatatgtaattacttaacaaaagtacacaggtttgtaatttggttcgaagaattggtttccacctgccaattaagccacaattggaccaattttcatatgtataattactacttattaactattttactaaacaagacattatgaatttatatttaattactatctcatatgaaaacagtactttatatatatatattctaaaatattgtgtaattaatagacactacaaaaaaattatacttttagtcacaataaaattnntgactaaaagtaaaaaaagttgtgactaattataatataaattgttatttttatgttatgactaaaaggtctatgactaaaagtatttgttacaaaaattataatttgttgtnnnnnaatgtatttttagtcacaataattgttgtgactaaaactaatttaatgacaacttatatctatgttttagtcacaagtaatttttaattatgaccaaaagtcatatttagtcgcaaaaaatttatattgtgattaaaaaattatcactcaatataactgttttttgtagtgagacaataacttttaaacaccctaagtaatcaattatatatagtagtgtagtgcatgagatttacatattgcagattgatagctagtatattaattaacaataattatagtgttttttgtagtgtagtcaataattaattaacaaagaacaactgtagcgtatattaaagatcgactacatgcatcgatcgggtgataaatgtaaatttaaaataatattttttaaaaaaatatatatattacatatttacttaaatctcaaatcaagttattatatatattgaaataaattttagcatctaaataataatataatgagattttataatttttgtattttaatttttttatgttgaaatttgaattaattataaattaaatatgaataaacataatatattaatataatatttttttttttcaaaaaaaattattggtagtttgttatgctaatattttgtagtttttttttcaaaagagtgaatttatacatatatataaataaaaataaaaaataaaaggaatcagattcaaaatcaggtttattaagtaatgaacagacatctacacaaattatgtctaacaattatttgtttctatctttaattttatataatctgttctgaaatttaaaggtaagcttaaacactttttaggctccatgtaagtctggtgtgcgtatatgatataatcacattagtcattacgtatagaagcatagtgtaagagtgttatcaattatattatatagtagtagtgatagtgattagtgggctgaacttgagattttcttttttatatagtattttgttcaaaatgattcttaattagtcatcataattgaccaataagtagggtaaagagtagtactagagtgagtgagtgagtgagtgggtgggtggacaataagtgtgtgtgtatgtatgtagatctattctctatagtagtagtgttcgatcaaacgagtgcttccaaaacaagagggctccacaagccctcgtggggatgcacaattattatttccttgccctacctaataaggccccattccttacctttcctctttcttttttccgccttatatataccaccacagatctacaatccaaattattctataattccattcctccaaatattcttaattcaacacccaccatgaggatgatagatttgggaagccaaactctccaaatcatggacactgcaacgagcgtagactgcgcgcgccaagtcaggttcccacgccgctccttgcgcgcccttgtccagtgcatggtccctgcctgctgtggcttccaccaaacaactttcgaagaaggctcgtccttcatctcctcctcctcttcctcctcccccgggccctcctctgacacaacaaccactagtactagtactactggtaatactagtactagtggtcgtgagcccacgcgcctgactggaaccttctttggttacaagaaaggccgtgttagcttctgccttcaagaacacagccgcagcaaccccatgatgcttctagaattcgccgttcccacggcgtatctggccagagagatgcagtacggactgctcagaatagcactcgagtgctgccaccgcagtaatgataataataatattaataacaacatgaattacaaaaaatgttctctgtttcgtgtccccgtgtggaccatgtactgtaatgggagaaaggtcgggttcgccatagccaggcagctcagcctgtccgacgtggcggttctgaaccatatgcagtcggtgtccgttggggcaggagtacttcccgatggagatttgatgtatatgagagctgggtttgagagagtgatcggatctccggactctgagtcgtttcatatgatcaacccaactgggactagctccgctcagcaactcagtatcttcttgctcagatcatcatgagtgatgtttacgcacacgatgatgtagatgatgatgatgagttcatgatcatcatgatgacaacgtacgtccttgtcgggaagattatagctgtgtggtgatctcattatatatattcataactataataattactatatatttatatatgtataatgaatctattaatgtagcaactagcaactacctactgttttaatatgtagagttgtattattataccatgttatactcacttatattttctgtttgagcaatttgcagcaaaatatttttatgttttaatttttatatacttaattttttttagtggtaaaacctcttttaagtttttttttttttttttttgcaaatttaacatgccagtaaatattcgttaaatatcaactggatgaccactgtatacacatgtgtatatgtaacaataaaattttgaaatcgatacagtagtaattcagttggtatttaaatgtaatatttaactgatactttaactttatacaaagaaaagcaaacttaaggggattttgccaccaaaaaaaaaaaaaaaagaagttaagtgtatataaattacccgcaaattcctcttttaatttttattttagttatttgtaaaattagttgtgtaattaattttttttaatattacggatattattcaataaataacattattttttattaaaaaaatattgaattgaagtgctatttacaaaaaaaaaaaaaaaacataataatattttaaaaagaataaaagaaaatattatataaagctttaaataaattaaattagatatacaatattacctatcaaaagtttgaatattatttaatgatatttaatattagttaatagtattaaaattttataaattaaaagaaatcacttataaattttttaattttttctaaattatgtttaaagttttaaaaatttaaagaaaattaataatttaaaatttaagaatattaagcatgaacataatagttgttgttctctattattgatggtagatatggatgattcttttaatttttgtcgccttagctgagaaaatattgaaatatttgtattttatactttttattttttctgaatctgcatatacattttcttgttgataatttctttttgacattttagataaattggtggtgttcctacaaaagtaattttgatttttttaaaaaaaaaaattatgttgtaatatgaaataagtaatttgtttgtataaaaaaattaaattatactacgtaccataaaatattttatcaactgaattgcataacatgatgttaaacaataaaatatttcttatgctatttccttgtatcttttcttactttatttgtgtacgtgacatgtgtcccttaatgggtttttactttactatatatttgcttgtactgtgtactattttcttaaggaatagcaatacatttttcattccttctgacatggtatcagagccaaaaggctccctatggcatcaatagaatgtactagctctaccccaccaatggaagatgaaaatactcaaaacccccttcaaaaccctactatcaccaatacacaaaaccctaacatcaccgccgcccaaccaacctcttcttctcctctgcattttttgacagctgctacttctccttctttacccccaaactttccttcattcaaccaaaccatatcagtaaaattagatgactctaactgccttgtttggaggatgtaaatgcagaacattatcattgcaaatggccttgaaggatacattgatggcactgtggtttgtccattataatattcagatcccacttcaaatcaagttgatccagccttcactacttggcacaggtataatcggcttctcatgagctggttatacacgctcggtcaaatcgtttgcttcaccactgcagcagaaattctctcttgaacggacgtactctgcagcttcattcgcacggagctccgatttcataacagccttgcaaaacctcaagaaagatggcctcactgcttcggcctacctgcaaaagctcaagacactttgcaatacactcgcatcagtcggagaaccaatatcctcacaagaacatcttacttatctcttgaatggactcggacaagagtataacgcttttgttactccaattttagcaagaccagtgaagc

SEQ ID NO: 59542 - DNA, 718 bp, Cannabis sativa
taactgatattattcgtggcagatgccggtagtgatttggatttatcttatgaatagtgtgtgacgatttgattcttattgtgtataaatgataatatttgaataataaactatatgattgttattattacttttcttgctgagttcttgtgactcactggtgctatgtggtgtaggtaaaggcaaagaaaagcttgatcaaccacgaggtaaaaatcttctccagcaatatacatattgacctcaccggcctgcgtgccgagtttccaggagttgttttagactggttgtatctgttgtgtattctgattttgtgtttaaatggttgtcgtatatatttctttagcaaaactttctataacagggatccccgaaacactcttttttagctgttataatgttcgtttttagtatgtcactaaaaaccaaatggaataactcattaaatggtaattatgtcactaaaaaccaaatggaataactcattacatacagaattaatagagtatacttataactcgctgactgaacagtcttaagcgagacaagaatgtacaaactatcaatttttgtattgacaagaaaccatcttgtctcgaaaggcgtcatcccacgggaaacatagacaacacatagcgaggcatatacctcgctgtaagtaaagaagtatcgacgaggtgaattagttattagaacacttagcgtataatatctgtta

SEQ ID NO: 59543 - DNA, 2254 bp, Cannabis sativa
  modified_base (2165)..(2165): a, c, t, g, unknown or other
aatcctgtgatattaaaactcttatctctttcaatttggtatctcgaacactgaatctttgtctcttcgccctaaatatttgatcgaggcaaatggtgagcttccaccattgaagctatcttggaaaacccagttctcttttccttacctctacatccaactttgatcctctttgtcttcttactaatcttaaacatggttgatcaagttgaatctttgaattttgactgtattttatttttttggtttattgactttcaattgtaatttttgtggattcatctatcgtggtaataaaggaatgaagatggacttcaataccactattcttgagcagaagatatctaaataaggtgctttttttgccctgtatttaagtttactcttaacgattactcattttctcttcttgtcaatttgatattgatttggaggacattgtttacggcatgatttagctttatggtcattgtctctgatggtttgttaatgtaatttccttatttactattatcattttttctattattttagctgatgccttctatttcagcagtatcaccttttcttcattaaatttttttcttggggttgaattaaaaactattatttgtcagttctatttgtttcatactatgcaactttcttgaatatggatttgacttttgactttagtatgtgtatgttgtaaatgaaaagtattttgtatctttgttatatttcaactagatcactcggaggtcggagatgatgacattagcaatgtggatgaagataccagaccttatattctcgttagagcttattttttctcaaatatgtttggtttctaaaattagcttattgttgcgtagtagttctgttctgtgtagtggttttcttaaaatgtttcgtaaattatgtataccttaatttgtgtatttgcttatttattcatgcttttaaatgtgtatcgtggatttgagaaaattagtggaacagaacaggataaattttatcccaccgacatcaagaatgactaattatgttcttctctaattcggggagctttctcaaaccatgtaagccttgccattgtttactaattactactactgtttttaattatgcttagttttgtataattctattatcatagaagcaacatcatgaggagttaagagtactgtagaaagcaggattactaaatgtcgtattattacaatttggtgcacatgaaataatacatgaatatatatatatatatatgtatgttcatacatatatatgtatatatatactaaaattaatttattgggtgcacatgaaagaatatatacacagatatatttatactaaaattagtttatttgtctaggtgagaatgtatggattgaggaatggctcatgcaatgcttggtttcctgttgctatatgttcaatatatagacgaagttgacgatctgtgatggacacgatggaactgcattttcaaatggagatttgaccaaagtgaggtctacctatgatgacgatgaccaatgcaaaagacagcaacgtggcccaaccatagttggctctgaagatgtaccgttttttcttctcctaccagcataaatgagtttcataatttttttgaaacctgttctttgttttatgaaattcctcttctaattttgcctaggcccacaactcttcagctatcttgcgtctataaggtcattttcatttctctgtaacttttctgcagaatgttttaattttaacttcgtaattagagattgtggctctttctcaggttgaaaagtgtgagtaggcaatcacctttgcttattccaaaaattaatatattggtgaacagaatagacaattgggaaatcatgataaatatgctaccgtcatctaaaattttagtgcacgtatcaagaaattagataccaaaatctaaaaaggaaaaaacaaaatactaaaactataataaaattaagatttaggtggctccacaagtaacatttaggtgaaagattgaatttgatcatatatatgctgatcaaattttagtccatataccaaatttataattttattttttaaacaactatttgatgagtaatatattaaagaataatcaacgtattattttttttttaacgtgaatcaacacattatctattctatataaagtntgcctatataacagaattcttgatttatgaaaaatttatgggtggctttttatttatattaaaaataaaatagtttattattaaaaata

SEQ ID NO: 59544 - DNA, 1388 bp, Cannabis sativa
  modified_base (630)..(641): a, c, t, g, unknown or other
gacgaggaggcagccaaggaagcaaaactatctaagtctaatactatgaaggcttggtttttatttttattaggttggtggtcgtaaggtcgagacagtggtttgccccttgtggcattttttgtaaagacatacttgcaaggtttgatggccaactttgcttttcattttttttttatctttattggatgcttcgtacttttatatttgaacttaaaatatgcttgtttgcttgcgttttcattcacaatttaaacaatcatattttgatcaaatgcaaaatactttaggttttcccactgctcatattttcctttaataacatctaagtagtttattatctactatgttcgctagcagtttattatctgccatgcttttgatttacgagcagttatcaattcttcctcgcaataacagttataatctgtttcaagcaaacttgaatatacttttaatgatttatcactttctatatttttgattgcttatatgaatagttaggttgtctattcatatattaggtttaagtatttttttcaaggcatctttgtgtctcgtttaatactctcatatacaatgtaagccgttagtatttagcttcacatgtgagttatgagttatatctcnnnnnnnnnnnntgattttcctttctcgtcagacaggtttttaatcaaaaagttattcataatagtttgatcttcttttctcgttagtaaggtttgatcagcaagaatttaaaaaaaatttaaagtggtgggtttgcactatatcatgtatttccagatatattccatttaatcatacacatatgccccctcaagtaattttgaagagcaacactttgtaattacttgaaaaaagattattagtgattaatagtgaaaaatgcacatttcttgatcttacagtttaaaataaattaagttgaaattaatattttcatgaaattgattagatatatttttttattgaaaatattttaattttaatttaatttgttgttattatgtaggaattaaagtgtgttgttgaaaaaaaatgaaagcaagtacaaaattgtaaaaaaggaaagaagaaaaagaaacccaaaaaagagcagctcaggcccaagccactctctctccagcagtccaattggtcgtgggccaccactgcgttgtcagcgcccacctagagcactaccctctctcccacgcgtgccacatggcaagctgccattggctccgcctgcttcctcctttcccttcagcctctccttccttcccctgccttccacgccaaagcccatacttcacctactacgggtgttcattggatcacatccaatggatttggacccatctgatccaatccaattatttattggatattagatttttccatcc

SEQ ID NO: 59545 - DNA, 2292 bp, Cannabis sativa
  modified_base (203)..(215): a, c, t, g, unknown or other
  modified_base (1882)..(1897): a, c, t, g, unknown or other
agtgctctgaataagtattactacagaaagtgcattcaaagtattcaaaatataaaagttgccactacaaatacaaaatgataataatgaatgagttggttggtataataagttaactgaaatgttattagcaaacaagaaaaaaaaattatcataagaaattaataataaaaaaaattgtgttgagagagagagagagagannnnnnnnnnnnnagagagagagagagagaatgtgaagaagaagagagtgtatgtgtaagtgagtaatgggttatctttgattttaagatgcaacaaaagtcataataaattattcaaagttagatggcagaacaacaagtagtctttattagaaaatgacctgaccacaatataacatgattattaccttcttacttctcttacttctcaccaactcaacttctccatcaccacacatcaatataaatatgtatatatggtttttgggtcaattgggaaaatcatcaacacactacatatatcagcatatatattccaaatttaggcctttaattaggaggagaagaattagaagaataagaagaataatatatatccccaactaactgatcaacatgaccatgatgattatgtacataattattaattaacacaccaaacaaagatacgtatattgagaattgatcaggtcattactttattgtatgtatatatatggtcactttctaagacacattttgcgtgaaaaatgtaatcttgagtagaaacactatatatttcttataatggtaattatggtttgcaaagatatcaatggcctatactgtaccccatttcaaagacaagctacatagaaatgggtttcaaatctcaatcctctcaagttttcctccctatttatcattacagtcaagtcaagccttagagtagactgttgcattaaaattgtatatactatattatatagatataataaagttcatatttattatgtttattacaaaatagaagtggaaaaccataagagataaagggcctctaaattatgttgcttttgtaatcattatatatcttcagacaaaatttgatgagaggtgatgtggaagactggaagagtatacctttcttaactattttttttttaaaaaaaaaatatttatataactcattttcaaaatttattcttttaatttttctttctttcttttcctttattgaggttgtaaaaacacagacagaggaagtatgcatgttaagattgaacttaagattccacaaaggcataagctacataatcaaaagtctttataagcaagtttactaatcaagatcttctcttaaaaaatgttgtcccataatactaaccaaaaaaaatgaatgttcttccgtattaacgctttactgacttgcccttttgaaaactaacaaatttaaaagccaattaaggtctatgaactaaaatgaatgtaacaaggtcaagggcaaatgaaaagaagacgatcaaagaaattttgttttcctagcttcttaattgctcttttgtttttaggaataggggaacaaagatagagacaaaatgtttatgtttgtgttaattatatatttatgtcattagactatagtccccatgaccatgaagaatgagacagaaatacacgtgggtaattccaaaattatcagaagggtaatatagtcatttcaacacaagccataataatacctaaaaaaaaaaggcaaagagaggaaaaaggaaaccatatttaataacccgccatgtcgtttcccattctattcttcaaaaatctcataccaaaggccaaaactcatatcatacccagtgtacacgcattaacacggagatgaaacctcacagatagatatatacatatatatatatnnnnnnnnnnnnnnnnagagagagagagagagaaagtggggttttcgcgaaaggttgaattttttttttttgttttcttcttcatctgaatagttgtgttaatggcgagtagttgggtcaagtctttacaatgcaaatcgaaagctttcgaagacgtttaccaacccaaacccagaaacctcctcatacccagtacaagctgtagacatagtgttcaaaacattaaagatgtgattgataacactgccaaatacaagtccagaaagtccaaaacgacgtcgtcgccttcgcctcagaaaaaaccgacttctaaatcttcgagagccaccggaaacgaaccgggtcatgcccccatggtgagaccgagaatgagctcttcgacttcgacccgtcagagtactcgcacccgcc

SEQ ID NO: 59546 - DNA, 900 bp, Cannabis sativa
gaattagtaccaacaatactcccattctcattcaaaaaaactgagaaaaaaattacacgcataatcaccccacaatcacctagtatttttggtaaaagccagcagacataccatctttcctatgactcttagaattgtacatctaaaaaagagcccatttaacatcatcacgagtataaggatggataaattgagaattcatggtagttgaaactttcatattgacaacattaagaaccagcctcatagacataaaggaaggagagtctgaactaaaaagtttgtgaaaatacccttggaaaatagaggcaagataagcttgggtttatctcaaaacattgttctcatcaagcaaagagtaaataaaattttgtttcctcctagccgaatcacacttggaataaactagtattccaatcaccaacattaatacttttctttacaatgaagtacatgaagttctttctcagtagccacagaaacacccagtttgaagaagagacaatgggggtctacatgttgcaactattttttctgatgcataacattcttgctatgcctcctaaaatattactattccattttgtaagggccctctcaaccttattaattttattcactaaacactcaccattagaagttgagttcacttgccacaagaaaaagacaataagtccacacacctaagactgcaggtcaggaggtcgctataccttcctataagctttatgtagatggatcctccaatgagcacagctctggtgcatgactcatcttagtaactctagagggatttcaaactcacagtgcattgtggctttagttcaccataacaacacaatgaagtggagtttgaggcaatcctaataggaatacgattagcactagcaatgaaagtcg

SEQ ID NO: 59547 - DNA, 989 bp, Cannabis sativa
aggtctatggtcaagcaagaggccttctttaggtgcattaaggagatcactaagcgagtatatagttaactcaaatggtaccccttttagaattccgttaacgctatatggatcacaactaaccttaatgcaaggatataaagctctaactaacctaggatatatatttgtttgaatttctaacaatgtttcccatccccatacgttcaaaaagtgaattacaattgacatactcaaggtcttggagatcacattgcttaccattgatgacatccctttgtgagaaatcttcattaaactttcttgcatattttccatgtgagaagacctcatgccttgccatatttcgttgccccctttgttgcattgacaatctttgcctctttggtcttgaggaagaagcatccatggaggtaggaggttgaagagaataagaaatttaggtttagagagtgagaatttgagagaaaaaagggtttgaggctctattcagggttaaagtatctgaatggggagtgagaaactcggtagtggggtttttatagaaaaaaaaaatctcttttgaaaagactgaaacaaccttggaatcgtgacctgcgagtaaaccggttaaccagcttaccagatatgcagaaccgattcaccagtttctgcagcaggaaaattctcccgaaaaggctcaaaaaactattttatccaactgtttgaccccaaatcttttccaacacctcaaatatgataaacaaaatttctcaaactagaaaaacgaaaaaaatttgaaaaatgacgatttacggtaagcttttcgaaaattgccaagaaaactagaaccttcccaaaaatgagttttatgcaacgaaaataaaaaattctttttccagtagtttaatgatgtaaaatgtgaggtgtataagcttacgaaatcgaaagatgttgaaaaatgagaaagtttggcaaaaaacactcttttaggcctaaaaacctataaa

SEQ ID NO: 59548 - DNA, 749 bp, Cannabis sativa
tgccagtataaaatgaaaagcgctggcaaaaatgacttttcccagcgcgtaaatccgctggtaaaagttagattttagccactacaaatatacgctcgttaaactttgacctctttgctagtgcagtttgcgaaatgtgctggtaaaagttacttttacaagcgcaatagcgaactgtgctggtacaagtgacatttcttgtagtgagtggtgtatcgacactattattaaaactaaaaaaaaaacaaaaagacaataaaaaaattaaaaacaatataagaattgcatatgccacatggcaatccgaagtcccccatgaaaactaatgacagtcagaactcgtcaacgatatttaagttggaaaattaaaattataatgtaatttaagaaaaataatacaactccaaaagctttaaagagaatctctaagtaaaaataatttagaatttacaatcaaattttccaaccccctcctaaatggaggagaagaatttttatattgaggctctattggccttgtgttatatgttgattcttgtgctccccagagacaattagtagaaggtacacctgctaactcctatatgttagagtcatggttagttgcaagagtagtggttgcacgagtgtaattttggggtactcggtggttgatttcctcatgcacgaccctgtcaccactacttgttgggtgctgaggtcaagtgactacacaacacgctcccaaggacatttgtttggccttttag

SEQ ID NO: 59549 - DNA, 2480 bp, Cannabis sativa
aaataaatatttgaaaattatctaatttaagttgttttaaaataataaatttctgaaaaaaggaatccttatgaaacaaagaatattggtcgcgtaactgcacgaggagcaataaagaaaaaagtcagcgtcttcttcgttggggaatgtggtcggtgtacaacagtgcattagcaaaagagtgttcttttgtgtataagaaaaagaaagcacagggaatgctatattaatatttcggcaggaagaaaagtgcttccagaaagttcgcaaaaccttttacaaataattgacgacacatcagcggtaccctaggacttaaaatttttattttcatcagcggtacctttcatcaacggtgccttcagttgaaaggtgaatggggcctttagtaggtactattctactattttgattataactagggcttaaaatttttactttgggatttaatatatctatcaaattcttttattgaatattatttttcgattaggaattattaagaagatatttatatagactaattctaataggaataggaaactcagaaacgaatatatattaagaaggtcttgtctcttgacatggtgagaaagtgatttgcatgtaagtgatttgtgtgtgttattcgattgttttgtgagtgttttgagtgtgttatccgattgttatgctgctggttgggtacgatggcctcatcaagtttggacatgcctgatattgagcaggggtatgctgatatcactattgaaggtgaagacgatggggatttgggcgtcaattttcttgtgccggatgatcaagctggtcacgatcatctatctattgttggctttttccttactgctcggccagtagactttgaagccatgagacatgtcatggcatctctatggtagccaggtcaaggggtctacgcaaaggaaattgattctaataggtatttgttttagttttatcatgagattgatttggaaagggtcgttgaggggagttcgtggacattcaatcgtcaacagtttgttttttggcggctccaaagaggtcaagatcctaagaaggtggtcatcaatagtcttgatatgtgggttcagatacatgggctccaaatcggtttcaaatcggcatctgttgtggaacgctttggcaattttgttgggacatttatcaaatcagacccgaagaattttcagcaagtttggcgtgaatatatgcgtgtccatgtcccaatcgatattacggtgccgctaaaacgaaggaagatactccagcgaagcatggatgatccgggtttctgggcagagtttaagtataagtatgtccctactttttgctttatttgtggtgttatcggtcattccgaaaagttttgttccaagctttttgaagtgtcgattgaaaatactgtaaaaccgtatggggtttggatgagagctcaaccttggaggaggaataatttaattggatcgcaatggttgcgggatggtaatgagtcggacatggagtttgttggccggggtaccagtacaagtgcggctgtgggtggtctgtcttcctccaggccgatttctatggaggctggtggaggggatagggagatgtcgtgtgcggcaaggaaggaggttggagatattttttcagctcctaaaaataaggagcaaactgtgggtaatgttgatttttcaaaaaatgttgattttattttaaataatgataattaatttatggtaaatgatgtggaggatgggtgtgatagtttgattgtcttggacactaagagacgtcgtatggtggaatctcaattgggccgaaaccaggtggaaggctctaatgtgggccgaattaatgtggaggggtccattgtgggccgaattaatgaggaaggggttgatgtgggccaaaaaccaggttgttgggtcggctggtgacgatatatgtagtgagatggagagtagtgaagaggttggtgtgcatggttacttgggtgcaaaaaatggtctttcggtgggtgttggttctcaggcccaccgatcattatgagtatcatcagttggaattgtcgtgggcttgggaacccgagggtttatcaattccttgtggatctagtggtccaaaagaaacccaattttctttttctttgtgaaactttttctggtaaagagaaacttgaaagacttcgtgttaagttgggctttgatggtttgttttcgattgatgctagagggcatagtggaggtttggctatgctttggcgcaatgattctgaagctcggctacttggctattcttttaatcatatggatacagagatatctgaagatgcttcttctccttggagattggctggggtttatggggatcccaataggagtttgcggtataagacttgggacttgttgcgaactctgaggttggagtctaatcttccgtggtgtgtcattggcgatttaaataatgttactagtcatcttgataagagg

SEQ ID NO: 59550 - DNA, 834 bp, Cannabis sativa
aaaatattataaattttgatgaatccctttcttttttttcatctattttgatattatagttgataatgttttaaattttcttattatagttgatatagattaaatattatctttattgttattatagaaaaaattgaaagatagagaactttctgcgttttttattatagcttataaaaataaggataaattttgcgttgattctacttcataaaatatcatgattatcatggtgtgacctttttttactcatacatgttgagaaccagcaacatataatttctcctgagttatatgatacatcattatcagttgatttttaaaagatatatatttattcaatctgtaattaaatagctcaaaagttgatatcatatttatatgtattgtgattaagagctgtacatggtcaattccttactctgaaagcatacttataaaattatgtatatatataagcctaactagctataatattatttctttaaataaagttttttatttacttcgtttatatggtcctctgtttctaatattggttacgagtttaatactactttttataggcaattaatcgtataaactatatatctagtcatataaaaccatcatatggcactcctctccctacactttcttaataataattatagactattaaaagttggtaacttattttatttgggtagctagtattcaaatttgattattagtaattaacagaatcttttagattcttgattgttatattatttttcttccaaaattttctctgttctgaaataactttctgacaacacagtactatttataaagtcatgtgttatttaatct

SEQ ID NO: 59551 - DNA, 1061 bp, Cannabis sativa
tgtccctgttgtgtaggcagggccagtttctgctatgaaccggatgaaaccattgtacaaaaggtttcgcaagcaggcacctccagtctttttgggaggtccagatgtgatgaaagtcgaacaatggctgactgttattatagggatcctaaactttatgggtgtcaccagcaatgatggagtggcttgtgccacattccagttccaagaagatgctctagtctggtgggatatggtggctcttactcgggatgtcactaccatcacctgggaagagttttaggagttatttaatgtgaagtattacaacgaggtagtgagaagtgcaaagagagaagaattcactcagcgaattcagaaagagaatatgactgttacagagtatacatcccagtttgatagattggctaggttgtgtcaactgacttcaataagaaagaaaagtatatgggtggactgaaccctaaaattaaacatgattgatgatcagaaccgatgatcatacaacttatgctgatatggtgaaaaaagcactacgagctgaaggcgcagttgagtgcatctaggagtcccaagggacaggttgttggtggagccactgctcctcctacttcttgttatggtgggggtggtagtgactcgatcatcgattacaaaagaaaggcaccatctgcacctggtggctcaaatcagaataagaggttccctcaaaaccagagtcgtggaaactatcagggtagttctgaaacccggtacacttacctggaatgttccaactgtaagaagcatcatctgggtgagtgtaaagggcgaagatgtttccagtgtagtttgcatggacactaaaagagagattgcccgcaactcaagaaagaatagtaaaagacagaagcaaaacctgttctagcaagggtgtttgctcttactcaggctgatgcagaagctagtttcttaattattagaggtcagctctcagttaaaaactcttatttctctataatatttgattttggggccactcattcatatgtggctggcagaattcttgataaattaggtag

SEQ ID NO: 59552 - DNA, 818 bp, Cannabis sativa
aaagtagcaattttttgtagtgaaaaaaaagttagcaactaacttaaaaatgaagctgactaaaaaaaatataaataagagattttttttttttgaatctttaataagtaaaaaatagtaaaaaggaaaaaaaaataagtagtgaaagtataaatataaaagtttacttgttaaactataaatataaaatttaggaaaaaaattaatatttagtatgaatttctcatatattttagtgtgtctaaggtgaccatcttattattagaaataacaccaacccattatagtctccaatagtaccagttaccattattgttctttaacaaataacaataatatgttatttccaacaaaattgaaaattttatggttgtgctttattaaactataatccaaatcaaaataaattaacataaacataaaatatttaaattatataagttttggtaagttagttcctaaactttactttttgacaaattagtccttaaattatataaattttgacaaattagtccccaaactatatttttttagtaaattgatccctaaacctttattttttagcaatgttaagtcactactattagataatgacatttttattgatttttatttattttaaatactttatgttgtcaaaagaatttagacaattccgaaattcgtgcgagtatttaatgctattaagaatactcagagagcccgtttggcacacaggactggattggattatttatcccaccctgctggatgggataaataatcccagacagatgaggttagctggatttgttatccaaacttctaacatgctc

SEQ ID NO: 59553 - DNA, 785 bp, Cannabis sativa
cctttgtgaaaaagcttagaaaaagcttcctgacataaaagtaatggatgacgtcaaagataatgatcctcaaaaaagaatcagtcaccgccctagaaaagaaccattgagtcctcaaggatgtattgagtcatcgcattaaagaccgcgagccctaggaaaacccggtattggggtccttagcttgatggacattgggtcaataaaaaccagtcgcttcctaaccaggttgatgaggatggcacctacaacccaaccagatacatatcaatcgtggagatagaaaatggccatcttagacgtcgattggaggaagcaaaccagcgtaatgccgagttagagcgtgaaataactgaagtaagggcaacgcatgagaatgaaaccaaaatcaacctgaccttgagagaagagatccacgaggcaaacctcgcggcttgcaaaccaaggggcagcagacaacccagaaatatactcagaattctcaggggatggaacctgaagaaactaacgaagatttggggatacaacctgggatatgcggaacatctgatggaaatctccaactctctctttagattcatcaaaaagaaatctgcgcaaatccttatagggagaataaggtgaatcaaaccttaagaggaagagcagggtccgaccgcagtcacaacaggagtgatctacgagagcactactacgaaaactccgttttaagtctattaaaatttgactagataaatctttctagtctattttggtgttaaacatagtatccagggacataaaag

SEQ ID NO: 59554 - DNA, 1568 bp, Cannabis sativa
aactagaaatatttttatcaaaattagtcccaaactttatgtacattttagcaaattgtccccaattgttttatttttgcaaattggtccataaataaaatagttgtacatttaacggccgttaatcgttagggaaaaaaacaacgagttgggcgagtcgagtgaaaaactcggcgttgtgataacgcgactacgtccgtcactactaccactagggttcgtaaaaccgttgggtatataagagaaaaaaccagagcagtaattccatttctctcctcccttctccacctcgcaacaaccctagaactctctctcactgtcactctcactgaaccaagatgcctcccaaagccgcaaagggaaaggaagtaccggctgagcgacccattcttggacgattctcttctcatctcaagatcggaatcgtataatcttatttctctggatattgcttcaattctcattgattttcccgactttttttgagttttttgtttcattcctgggaaaagtaggaaaatgagcatagaaatggacatttatgtaggagttacctaatttatgagctttgtgtgtatatgtttttgggttgttctagctgtaggaaaagaaaaacaacaaatgggttgattttaaattggttgtttacttagacaatggttagagaagttcgtaaattttctcactaaaaaattgttccattttgtttgagttagaagttaattaagctggattaactgaaaaaaaaaaatcttagtgtggatttgcttctgaaaattgaaatagatgtttaaagaatggtttacagttggatagttggaaaagaaatcatcttgttttcaatatcttagctaaattaaggctctgcgtgtaaatgtaatgatgtaacaaatttacattttattgtttatgttctttgctagctcacattgttgttgaatttacctcgtcaggttggattgccaaatgttgggaagtctactctttttaacacgcttactaagttggcaattcctgccgagaacttccctttctgcacaattgaacctaatgaggctcgggtaaatatccctgatgagcgattcgaatggctttgccaacaattcaagccaaagagtgaggtgtgttcctcatttttataaagctaatttgttctactcctatcttcgtctttaattgctgtagaggtgatctggtcttcatgcaacactatttattaatatttttcttagttctgtgcaaaaaataaaaattgaatagtctaatagcttgtgactcataggtgttgtcgtgttgattttttctcctttaagctagtatgagtttatgaattaggaggaagtgatctaagatcagtggcagaattagagtatagattgaaatgggatccttgttttaggatgtcttgcctactggttagaggttgtgcacacccattaggaacatatacaaacaggtaaagagagaagtcagtggagaactaccaaatccaaatgactttgacttgttcgtaccattctgtcaggtgtaataagttagataaagtgttgtatgttctcttacccaac

SEQ ID NO: 59555 - DNA, 954 bp, Cannabis sativa
tattaatatatttattttaataaattaataagtagtttcttttaatttataaaattttaaaaatacacataataaaaataaaaactaaaaaatataactaaatatacatgcaatgctcgtaacaataacttagtatagatatataaatactttaactcacacaagatttttattacatgtaccactttattttttttctttgtttcaacatactacataagtgataaagtttattatatattaccttcaactttgaagcaaggtgaaagttttctctctctagctttctctcacctctttgagctggtgccatggcaaagacgagggcaaaacagagcaaacccaaatctctggcaaagaaaaagaagaaacgcatccctgattcatctattgatgtgaagaagaccaagtccatggatgaggtcctcggaatagaacccattcttttctctgaggaggaagatgatactgaagtcctggtgaatgctgaggaagtacattcgcctgctctggatttgaacgatattaggagggaggagatacggatggacttttcgcacttcctggaagctaagcaatacagagaagctcagaatctttctgctattgtagtcgcacgaggtaaggatgtaattcctcccatactgagatctggtaacatagttcgaaacttggattcaaaatttgctggctccccgtctaaacaaaaaattaaaatcacaaaggaggatatccaagaagaggtagacttttggaccccttcaatactctgttatgtacttggggctaatcccccaatgtcaattctggaaggttttgtgaggcgggtttggaaagataaaatcgacaaagtggggatgatttctcatggtgtgttcctggtgcgttttaggagtattgcagactgtgatcagattttatcaggaggacatattttcttcaacaaacgctcgg

SEQ ID NO: 59556 - DNA, 1542 bp, Cannabis sativa
atcatatagatttggttgttgttattattatgacaaaaaaaaattggccatcagttggaatgagggtaatgtgaaattttaatgtacaaaaaggtgttaaggttatttttagcctaagttttgtttcgggtcattttttaaagttatttttttttctttgttattatttttggaatagaattactcttgtgttctttagtttaaagtttcgacacttgtaatgtataaattggtcaaattttgaaaaacggtgatctatgaaatagaggaaattttgtaagaaaataaagctaaaatttcaagtttaaattggaccatgttatgatcagattttaaaaaaagtcaaaatataaaaattttagatctcttttttatttttctaacacatcttgtatcaactcagttggagcttgcatgtgagaattatgcatattttactgagaaatgttaaagcaggaacatttttgtcgctactaatatttgtgaccgcggcgaacacgacttatggccacggcgagatggctacaaaaagcctcgaattttactttctacagccgccgtggcgaggctaattgtggctgcagtgccgactccgtacgggtcaaggagaacttcgttaataaaaggggtcgcttatacgtggatagacataatggaaccctagaaacacaagaaggctcttggagcgagcgtggacgattcgtgacaatcctccatctagttttcttattttctcttaatttcttatgttttaattgtgtctagtttaattatggatttaattatgagctaaactcccaatttaaagatttaatggatattgcctgagattattctatggatttatgatatttgattgttccttctttcttattgtgtgatttattcatctttgtgcttattacatgtgtttgattgagaatgctctaaataaatagacatatgttttgatatgaaacaaagtatttgcataacttatgtgacttttagattattgcttaatgtaaattgtatattgttctattttagggatgcagtagttgggcatgcaatttaagacctttatgatttgaaaagagtttattaggttaatttataatctaaggatgaagaatagttaaacttaagaaaatgttgccaaaaaaaaaaaaaaaaacaataattactcaaaattccacggaatttaatacattcccacctaaaaaattacacaatgcagagagtacaattcatattcctacctaataattagccccttaaaaaatcgatttacgaaaaaaaaaaaggtttttataaaaatacttaattttaggtaaaagtttataattttacagtcacacgattttttttacaaaaattaatgtcttttataaagtaactgtaaaataacaaaacagaacaattaaaacaacagtggagcaattaaaaaaaataactgtggagcaacagtgaaaacttaacacagtatacatgtatgaaacttacatagtatttttgaaaaaaattccgccttatagtaaaaaaaagtaaaacaaattaaaa

SEQ ID NO: 59557 - DNA, 1634 bp, Cannabis sativa
  modified_base (81)..(84): a, c, t, g, unknown or other
  modified_base (1456)..(1461): a, c, t, g, unknown or other
ggtcttaggactaatgtaacttttcactgaaaaaactatttatttagggtgcgtttggtaatatttttttaattagttttnnnnttttaaaattaaaaagtaaaaatattttctaaaatcatgttgtataaaaactgtttttactttttaatttttttttaatacagaatctaaattttaaaaatttaaaaaaaaatatatttttaaatttttaaacagtgtttttaatcaatattttagattctgactctaacttagacattagaaactgaacctggacctaaccccaaacttggacctgcccccggtcccgatctcgttggacccgacttaaataaaatcaatagataaaaatgaaaatgaaaatgaaatttacataacacatttttgttttttgtttttaaaattaaaaaacaaaagtagttatagaacacattttttatttttcaaaaataaaatttaaaaacaaaaattttacttttatttttgtgattaaatttttttaaaaataagtgttaccaaacgtcttcttaatcaataaaaaataaaaagtgcttttatggtatatcccaaaaataggtgtggcgatgcaccacatttctattttcaatatttgaataattatggtagtatttgataacattttttttttaaattttttaatcacaaaaataaaagtaaatttttagttttgaaaaataaaaaagtgttctataactacttttgtttttcaattttaaaaacaaaaaataaaagtgtattctaaaattctatttttatttttatttgttgattttatttaagtcgagtccagggtcggggtttgggtctaggttagggtctgggtcgaggtccaggtctgagtttcaatgtctaggttggggtgggagtccaaaatattgataaaaaaactgtttaaaaaaaattgaaagtgattttttagttttgaaaaatgtgattttgaattagaaaaattaaaaagtaaaaacagttttaaagaacatgattttgaaaaatatttttatttttctaattttaaaaacaaaaaactgattaatttaacggactaaaaataaggttcaagcggtctgttactgtgtctcatattttatatgtgtgaaataaaatgtttgaacactattttctatattataaattatttctttaaaaactttacatgttgtcttaaaaaaatataacatacatactatcatctatcatctattatatatataaagggatattggcgctaaaccatctaaattttaaaattgttgacacttaaccacaaaaattgaaatttcgacagcaaaacctactgaacccccattccattttgctctttccacttctgtcaaaaaatcttagttaagtgctacgtggacgagcccacgtgtacacatacatacacgtgtcaaattttattggtctacttaatattaattttaaaaaatannnnnnaatatttaaaaaattaaaaaattagaaaaaaaaaataattttattttatttttttttctttttcttattctttcttctttcttcttatttatttcttaaactttctgaaaccctaatctctcagccctccctcccagccccccccctctctctctctctctctctctctctct

SEQ ID NO: 59558 - DNA, 1919 bp, Cannabis sativa
aaaaggactgctataaaagacatgatggaaaaacattactaaatccaataaaatttatgtaacaaatatgtttaattctaaaaaatccaaaatcagaaattatcaaaacagaggttgtaacttttgttaaatttatttcaccaaaaactactgtaagcatttttagagcttagcttagcttagccagagacctttctcgttggaggaatgcacacagaattggacagccttataataggaattctttactcgtgcactaattcatgcaacaaaccaaattccatttagtattcattcattatctgtaacaaatcaaattccagatagatataaaatcccaattaaatcaaataccaacataccgcaaatgatttctttaacaaagttctggatttctttgcagtttatatagaacccaaccccaaattacaatattcatactaaaacaacaaatataaaagaaagcagcaacacaacataatgaataaataaaaatataggcaactgatgtaagcaaatcccaattatcacacagcacaactgaaatccaaaaaaatccatagtaaattgaatcgaaaaggatgaatcaagctggactaaccttattggtaaccttgtcttctctttacaactcagatccgactaagcccatttgcaatttaaaacctaaataaagtaaatcaaaatgccaatatataaattgaacaattggaaatctagggtaatctttgttagaaaaaacgcaaactgagctaaggatagctattaccaactacagtcctccgctctgccaactgagctaaggtcggtttctggtgatttcaaacaaatttaataaatattgctttaaataatctgcaattattcttttttatataaaaatttaaaataattatttatgttttgggaactttagttatcaaaagaaaaaaaaacaaaaagaaaaagttgagaattatatttgcatctcaatatttgcttttttaacaagtacacttaaatattataagaataataactttgattagttttaaaaaatcaatcttaatattattttattttttcacatttatttgtttcaagtgactcaaaaacaaagaacagatcaaaagaaaacccaagaatcaaataacagaccacactccatagatccaacaatcatacccaaaaatcaaaattagatatgacagtcatgcttcaccgttatgaaagagtcaagaaagatttttgagtagaaatacatcctaagctactgttcctttccttactcctccagaatccatagctaaaaatcaaatgtatagctttgtctaatagtactttatatgctcatgtcttgtttgaatactgttcgttttagttgttttgtgctaaaactctgtaaccatggttttcctccaccaaaaatgaggtttttaaatacattttgggggaggggtcagtctatacaagtgacctctttctcctttttttaaaaaaaaaaagactttttgagcaatacttgaatatcatttcaagttgatcatagctactcgttgtgtcataaaatgaatagtaaagacacttgaaagctatttattcgtgcactaattcatgcagcaaaccaaaactcttaaatcaaatatagatataaaatgccaattaaatcaaatatcaatacaaatccccaaaactcaatcaccaaactattaaacaaaattctggatttctttgcagttcatatacaaaccaaccccaaattacaatattaatactaaaacagcaaacataaaaacaagcagcaacacgacataatgaataaacaaaatataggcaactgatgtaagcaaatcccaattatcacacagcatgtaggagctaatcaagacaaacgaaattaacagagtatagtgcacagcaaaagaacaatgccaagaaaa

SEQ ID NO: 59559 - DNA, 993 bp, Cannabis sativa
gaaatctatcatgaagccatcccctaaaaaagttatcaccaatccctatcactgaaatgcctgtcatccgctagcaagcaaaagaaaacgaacaccccacaagataatgagaaatagactctccaactcgtaagcaccttggacacgacaacaagggaagaggaacatgtttcacgcctaattggatatgggtaagaagacaattggaagcaatcctccaaaccaaatccttgactttaggaggcactctcaaatcccacaactctttccaaaagaccgagttaccaactccaactaacttacctttaagcttttgaagaatctaatacgcactcttgaccaaatatacaccagaacctcaccattccacttccaaataccatcaaacattgaggggaacaaaggaatgctcaaaataagctttacgtccgtctttaaaaaaatgtctttaagaaccacttcatcccaatacgactctccaatcttcataagactagagaccttttgatttgccaaactggggtaatttgaaaccacaaatgagttctctttattcagaagccaatggtccctaaggatatcaatactcattccatatccaacaaccatacacctcccttttcgaataaaagattgagcttcatggatacttttccatataaaacttggatttcttctcaacttcacccccaagtaggacccacaaggataataatgagctttgaacacatggctaactaaagaatcttgagaagaatgaagatgccaaccttgtttcccaagcaacgcaatattaaaatcataaagcttttgaaatccaagtcccccattaacctttgggacacacctccaatcccaactcatccagcgaatgccactgtcgtttttacccgaattcttctaccaaaaataacacaaattttttcatctcgtcacacacctttttaggtaaaagaaaaacgctcataacatagttggggagagattgcacca

SEQ ID NO: 59560 - DNA, 829 bp, Cannabis sativa
acaaaaaagaagttatgcagaagctttcgagaaacataataaggaccattacgatgatgctaccataagcaaatggagagacgctttaactacagcagctaatcattcaggatggcatgtatccaaatccaggtaattaaatattctcaactatatattgttataattatatatactcaacatacaatttttttcagataaataaaaggatatgttattattatttatatttactttttactttaataagatatatatttttgttttaattttttaatcttaataattgtatatatctagaataatgaatgaaaaaaaaaagtgaatatattaattgaaaggtatattttatacaaaataaaaataatgaaataggataactttaagaaattctgagttcaaatatatatgaaatagactgttataataataatgttgtttttatgtaatatattatagtaatgaagctgtggtggttcatgagattttcaactggatacgagaaaaattaagatccatatctccatctcttcattattcaaagcaaggcattgttggaattgatgactcgattgcagatctcaacaatctattgtcaaactctgcaagggtgggcatttgtgggatggggggcctgggtaagaccaccctagctcaaatcgtcttcaatcaatctcgtcatctatatgatagtcattgtttttttcaaaatgttcgagaagaattccaacagaacagaagaaaattgaaagaagaatttttcggtcaattatcaaatgaaaaaggcttgcaatatggacatttgggttccttaaaggacaggctgcgc

SEQ ID NO: 59561 - DNA, 933 bp, Cannabis sativa
atctttattatttgtgtagcttactatgtgtttaatttattttaataatattcatagtaattccttaatattttttataaataaagtcttaattgtggttcttagatgtgattcttaattaatgaaattcggttcagtatttgctaatcgaaggaaaattgacgaattctggaaatctgattctcaaaatagcgatttgtattcgtaggggctgttccgaataaatcgaattttgaaatgattatagcttttcttgcaataacaattgtgagaatgaaagattctccaaatacgatagacactccacagtaaggttcttagcttgttctccttccctattttatttttatatattctaaattaattcttttcactatatataatatataaagatatgtatttatatgcgtgagttcgcatctgtttttctactgtaatcgatgtgagtaattctatggtgaaatgggacttgtgaaaatggatatttatagtggattggatggtagaatggagaaggtggttgaggagttcgataagtttttggaaggtgttctttatgaccatagtctctgtgtcaattttaattagtatttatatgtatataatttttatgagttttttatatatgtatatatttttttagtgttgttttggaggtaataaagttgcatagattgggaacgctccctagacctttgattcctcaactggtaggtatcttttatttttgaactctttgatattatgaggttatcaatcatccaaaaaacttggagcttaatttgaaaaccttatatgaactctctttttgtgaaattgagggctcttgtccaaaccacaaagaggtgccaaaaggtattaaagagggttctattctattttattttatgttgttaagattgttacttgttagtctttattttttaaaattta

SEQ ID NO: 59562 - DNA, 1242 bp, Cannabis sativa
cttaccatgaaattccccaccccttgggtgtgggatcagtgcaaagagtctagtcagactcaagggaatgctataatactgcgttgaaaattacagaaaagaagaaattggtaaatgtcatctatttgctagaggctcctccacctggacatgaatttttcaaaattgaggaaatgccgcatataaagaaacccaatctagatccccatatcctcaactacaccaacactgtgcaagccgcagaagagacaatcgaggtacctattgattcttttaataattctaaagtgttaaaaattggttctaaattaattaacttttcagcagcgagaaaagtttgtcacttttctcaaacaaaatttggatgtctttgcgtggaaacattcaaacatggccgaaatatcgcctgaggtcatgtgtcaccgtttgaacattgaccccaaagtgtgagtagtaagacagaagcgccgtaaaatggacctcgcgaggtaccaagcgcttaaagaggaagtggattgtttgttagcacgcgacttcataagggagtcgttttactcaaactggttagctaatcctgtttttgtaccagagcccaatgtctcatggcgcacatgtgttgactttacagatttaaataaagcctgtcccaaggacaactctcctttacctagcattgaccaactttttgatgccaccgcaggtcatgaactccttagctttatggatgcgtacttgggatataatcgaatcctgatgtatgagccagaccaggagcatacctccttcatcactaatccaggtttgtattgttataaagtattgtcttttagattaaagaatgcagctgcaacgtactaaagattggttaacatgatgtttgcatatttgctagggaatatatgggctttctctgctgctcgatcatccttagtgtttaccgagtttttcgggaactaaatatttttagagcttaagaaagtaacaacaaaatatatggaaaaataacaaatatgtaatttttacatgattcaaccattaactatccttagtccacgagtccattttgttaggcacatcgtccggtaactatttatacaaatagatatacaatggatgtaactcctttccaccgtgttcctcttgaagaagaggaagcttagtaggaatattctagagtttgttgtagggttacaaaaatgtgtttacttatgatgatgaagaatgggtcttccccctcccccc

SEQ ID NO: 59563 - DNA, 4310 bp, Cannabis sativa
tcaattttatctattttgtggaacagtgaaagtctgaaagtccaccaccacaccggccgtcttcctaactctctcaccaggtttctctccttgcctgaggctgcaaacaagtgcggcgagtcctcggccacgaccatacacggaccaggtaaatcttacttcacatttcaatttaacttctttcatatggctatggttttgcgtctgttagttgttcgtggattgctagaatttttttcatctgctattgaattgtacttacaatttttagatgggtttcttagcttcttgttcgtgattgttattcatgcttgttttgtttagtttggatataagctgtgttttccattgttttcaatccattgaatttattcatatcgctagtgttatttatgtgtacattacataactacatttctatgtaatatgcagtgcatattcaattggcaatgaggtttccgagcctaccccattttcacttgctcaattttttgtttttataaatatgaaatgttccaatatctcttgatttttttttacactttgatgttttggtgcttttttatgttcctttcttcttttaagcagtaaattagaatgctatggttattctcaatatgaatagctccaaggttcagaagtctggtctcaagctactgattaaatgcttcttttggatgccaacataaatttatgaacaaattttaataaattttcactaacttgattgctcattctggctcgtagctgcagtgtgatctggtattgttcaattcagactaattaaagcaagagtggttaagaaaagcgaaacagagagaacatactgcctttccttctctctctctaggaaaactactgagacaaagatgaacaactaaaatcaaaccctgtttgggatttggatttttcatggctgggaaggagctcgcgcttgcacctactttctggtgcttttgattacgagggtcattgcttacaccaagtaatgtcttcttcttttgcaatttttcctctttgctaatgtaacattgaaataaaaagcttgagcttttttaatcagaattttgatgctcggtaccaatttggccatttgtgttgctgttgtggtttatactttgttatgataatatgatctaatttgacaaatctcgaaaagcaggaaatcaagagatgacaatggcggtggttttcatttgttgtcttcttttgaataggatgttgtaattttcttgctaagaaacatctttgcttatgacttgggatttaaatggggtgttattgtggtttcaaattttcttttctgatgctcaattaaacttggatctttctgcttcgttcctatttcattcaactaacccatgatattgaatagatgtatttcacttttgttcagtttgtaacttatataagatggctgaaagttgggatggaagctatgatcctggcagcccctcagatgacagccgacaatttgagaacgtagagccaatatatgatgcatttgtctgtcctttaacaaagcaagtaatgcgcgatcctgttacgttagaaaatgggcaaacatttgagcgtgaagcgattgaaaagtggttcaaggaatgcctcgacagtggaaggaagttgcagtgtccattgacgctgaaagaattacgaaacagagatttgaaaccaagcatagctttacggaacaccattgaagagtggaatgccaggaatgaagctgctcagcttgataaggctcgcaggtcattgaatttgaacgctccagaaaatgaagttcttatgtccttgaagtttgttcagcacatctgccaaaaaagtaggtcgagcaagcatattgcacgaagtgcagggttgatacctatgattattgacatgttaaagagtagcatccgtaaagttagatgtagagctttggaaacccttagaattgtggtggaagacaatgatgaaaataaggtttttatatgagtttctcttgttgttttctttatattactaagatagactctatggtctcttgctaactgattctctttgttttgtaggaaatggttgctgagggggacactgtccgcactattgtaaagttcttatctcatgagcaatctaaagagagggaggaagctgtctttttgctgtacgaactttcacaatctgaatcactgtgtgaaaagattggtgcagtcaatggagctattcttatattgttaggaatgacaagcagcaaatcagagaatcttttaactgtagagaaggcagacaaaacactagagaatctggagaagtgtgagaacaatgtgcgtcagatggctgaaaatggtagactgcagcctcttctgacacaaattcttgaaggtactttttgttgctcggataaacggggaaccgtattcttttttaatttgaaataattgaaataaatggattttttgatgttaaactttttgcaatattggtatgattacaggccctccagaaaccaaactgtccatggccaatttcctcggtgaactggttttgaacaatgatgtgaaggtccttgtagctagaactgtgggttcctctttgatcaatctcatgaaaagcggtaatatgcagtcaagagaagcttctctaaaagctttaaatcagatttcttgtgaggcaagtgctagggtgttgatagatgcagggatacttcctcctcttgtgagggacctttttgctgttggtgctaatcatctatctatgaaactaaaagagatttctgcaacaattcttgctaatgttgtgaactcaggttatgactgtgagtcggttcctcttggacctgataaccagactttggtctcagaaaacatagtacatagccttctacatctcattagcaacactggcccagcaattgaatgtaagcttcttcaggttcttgttgggctcactcacactccctctactgtgatgaatgttgttgctgctattaaaagctctggtgccactatcagtttggttcagttcatcgaggctccacaaaaggaattgcgtgtggcttcaataaaacttcttcagaacctttccccgtatatgggtcaggaactagctgatgctttacgtggcacagttggccagctaggaagcctgattagagttatatcagaaaatgttggcatcactgaagagcaagctgcagcggttggcctcttagctgagctgccagagagagatttaggcctcactcgacagatgctagatgaaggggcctttgaacttgtctacacaaaggtagttaaaattcgacagggagagaccaagggggctcgctttgtgacaccgtttttggaagggcttgttcgagttctttcaagagttacatttgtacttgctgatgagcaggctgcaatcgatctctgccgagagtataatcttgctgcattgtttgtcgaccttcttcaagctaatggacttgacaacgtgcagatgagttctgcaacagccttggacaacctctcacaagaatccaaaaatttgacaagacttccagacatgccagcacctagtttttgtgcctcagtatttccatgttttagtaaacaacctgtgataagcggattgtgtggagtccacaggggtacatgcagtctcagagagagtttttgtcttttggaaggacaggttgtggacaaattggtagcacttttagaccacacgaatgagaaggtggtcgaggcagcactggctgctatatcaactttgttggatgatgaagttgatattgaacaaggagtgaaggtgttgtgtgaggttgagggagtcagacctatactagacgtgctgttggagaaacgaacggaaacattgaggaggagatcagtgtgggcagttgagagacttttgcggattgaggagatagcctatgaagtttctggtgatccaaatttaagcactgctcttgttgatgcctttcagcatggtgactacagaactcgacaaatagccgaacgtgccttgaaacatgtcgataggttaccaaacttctctgggatttttcccaacatggggtaagaactttttttttttggtgtggtttatgcttacttccaaatccagtggaaggtatatattgttgtatacaagatttcccacttgtagatgatttttgaaccatgttcatttgtttttttttctcttcctcttcttcatgatgcaagattttcatctatttatgcatttttcatatcatacattgaggctcgggctgaaaactgtcattcctttcctcattgtttattcattattactttgtccactatttttttttttttttt

SEQ ID NO: 59564 - DNA, 694 bp, Cannabis sativa
aaaaataatgtctctcttattactctttaggtagtatttaatgatattgttggtctttgtaataggcacaaagttgttacttttgtttgttgtaataagtcctgtaatagttttgctcatgtcttgaccaaacttactttgactacaagtagtagtatgatttggtggccaaggagtcctatttttatacataatcggttgatagtagattctcgcgtactattttagagtactcattgatcttgatgtttggtggtgaaaaccttttctctcaatatatataaataaattatttgtcaaaaaaatatataagtaactattgaatggttacattaaaatataatcataatggttacatctttaattacaacaggttaataataagtaaattttttatttttagacttaagttaattataattaactatatacttaaaataaattaattttttaattgaaatatttaatatgtctttttttgcaattgatatttataattttttttttatttttttatttataaaaaactaaaataaaagcaggtttgtatcatattatatataatttattaaggctagttaagatttttgctccctgaaatttaacatgtactaaattatgctcctcaatttttttggccgttaaaattttctaaaaactattgagattgttggatttaagaacttttatccaa

SEQ ID NO: 59565 - DNA, 701 bp, Cannabis sativa
ggctagttgcaaaggggttcaatcaaagagaaggtgttgatttcaatgacattttctctcctgtggttagacaaacatctataaggatcatgatgactaaagttgccaagcatgacctagaaatggaccaaatggatgtgaagacagctttcttacgtgggagacttgaagaacaaatctacaaggaagagcttgatggatacaaaagtagtaaaccaaaccaggtatgccttttacagaaatctctttatggactaaagcaagctccaaggcaatggaacttgagatttcatgaattcatggtgagcattgggtacaacagaagcaactatgatccatgtgtgtattacaacagtgaacctatctggttattgttgtatgtggatggcattctgataattggtaagaagagacaggccatggacaaattaaaacaagatcttagtgttgaattcgaaatgaaggatcttggtgaagccaagaggatacttgggattgacatcaaaagagatagacctgaaagactttcactgtcacagaagggatatatagagaagctaatagacaagttctgtatgaatgaagccaaatttgttagcacttttttggctcagcatttcaaactgacacaaaatcagtcagcaaggacaaaggaggagaagatgtacatggatacaatgccatatgcctcttgtgttgga

SEQ ID NO: 59566 - DNA, 584 bp, Cannabis sativa
aaaaaaaatcattttaagtatcaaccaaaatataaaaacaaggaacaacttataaatataattcacttataatattctatgtcataaaatctaaaggaaacctccaagcacatccaagaataggcacccgcttcacatgaaatatcattaataaatagagaagataaaacacacatatacataaaaaggtcactcaatcttctacacaatctccacatccttcattttaatgagagcaaagtaataagacaattatgggactttataattcttcgactagttggctattatagtttatagccatactgtttgaagagaaaccaaaaagcactgaatgtttactttagtgcaaatgagtgataaaatgtaaatgtgcatacaaataaaaaaccattgattaatttcgacccactgttatcatctaacactacctgtattttaataaaataaacatacccaaacttgttacatgtaaaaaggtgagaccatgcctactagtgttcactccactacacttataatttagtcaaaaaattagagcatgaaaagtggccaaagcaaaaaacttcaagttcaagaataac

SEQ ID NO: 59567 - DNA, 638 bp, Cannabis sativa
aaaggtaaagtgggctaagcccacttggataactccttccaggaacgtattctagttctacaattgtaaagcctttttccttcagcgagccgtactcaaaattatgtctgggaccacgagaccggagggacaagacaacacattcccaaaagacccttacagtttccctttttattcctgcgcacaaataaggaaattctagctgccaaatcataacagaattttgtatcaagattaatggagaaacttcctaaagtgaatattatgtaattaacattcacagattaattgcccacgattagtgcacacgatgtggaccaaattaatccaaatctaatctgcctaatcaacaaattgtctacttcatgggctggagttcatgagacagcttaagtgtataatttactgtaaactccccaacagaggaaaaaggcaaacttaatgtaattctcaaactactataaatatccctcgaatcctatggattgaactctattgcaaaatttgctcaagaaaattttagaacatatattctttgtattcttgaaggctttttcaagctaaaagaactatcaaataatactaactcatggcctaaggctaattaactctccaaccaagtaagaaactgtttgtct

SEQ ID NO: 59568 - DNA, 1342 bp, Cannabis sativa
  modified_base (320)..(327): a, c, t, g, unknown or other
caagatgtttcctattgataaaatgaacaattgaactacggaagttctttcgagattaatgattgtaaatcacaatactgatggaatattttgaattccagttgtgaataaaataatcatttcattcgagcaagtaattacaaagcataaaatctttaaaattttttgaggggcatatatgtatgattaactagaattgatctggaaatacatagtacaatgcaaacccatagtttcaaattttgaaaactttataaaagggccttgatcaaacctttttgacagaaaaggggtcgaactgttataactccctgaccaannnnnnnngacggaagaggggtcaaatcgttataacaccttgatcaaatctttctgacgtgaaagggatcaaaccattgtaatttttgatttataacctatctgacgagaaagaaaagtcataagttacaactagcgcataaaactgaatactaacagttcgcgctgggaggaagtattaaacgaggcatccaaatgtcttgaaaaaatacttaaacccaacacgtgggtagaaattttaactactcatgtaagcaataataatatatataaaatgacaagttcattaaaaatatatttgaatgtgcttaaaatgggatcattttttatgaccgcgagatggaattgatgacggatcacagattgaggagtgagcagataagttgggtgcacgtaaagaaggaaattaactacttaacgtcggaagaaaggacaatcaatggaaacccctaataaactttatgcctgtgatagtttatattgtgaataaaatggaagtaaacattcacataatgaagttcatacttaaaagtgcgaggcattaaaaaaggaaagttggtcgtccaacctttcaaatatgtctttacaaaaaacaaagttccactaggggcaaaacattcgtctcggccaaattgccatttcctaaaagaaaagaaaagggagataaataaaccaagtctacatgctgggagacttggatagaatttcttcttcttcctcaacttcgtcgtattcttcttccatcttggtcttctcgtagaaagctaaattcctcttccttctcctccaagaagctggtatccatgttaggtttccaaagccaagcccagtatacagtgcgaaaacaaactttttcgcagcgttcatttctttctcgaaaagtttctcagcaagcctctcctcaaactcatcagcttggacattgagtgccttctcggcctcctcttttggctttttcaacttccttctttgttgtctttgcttcttccttcgcttttttggcttcccgcttggggcgggtaat

SEQ ID NO: 59569 - DNA, 1647 bp, Cannabis sativa
ataaatatcttatttttgagtaattttagggttgcttgcattggagtatttttttagtaaaaagtggcaaaaaatgatgtagatgatagagaagataaaatattatattttaaggtgatgtaaaattttatggcaactttaagcattaattgcattagagatactcttatatgatgttggttgtaagtatgagatcttattgaattgtttttattgacttgacacttaacgacgaactacctacaaaaattctaaaaataaaattaaatttaaatatttatttacagtgaatttaacttaactatttatttataagaaaataacaaagctttcacctttttttttttttattatttccgtaaaattactaaaatattaatttttcttacattttaatattaactgttaaatttgtaaaaaaatacaagaaaaacaatattttgatatccactataaaaaaatatatatattaaatataaaaagtaaaaaatttagtgctttatttgcaaatttatcttttaataatgataactatgtaattagtgtaaaaaattagatttcccaatttatttgtttatcactattataattattgacaacatattttgtttaataattatgtgaggcttaaattatataataataataataatatactacgacttaggctacataaccttttttaagaaggaaaaaaaatatatatatatatattttaatattttgggaactaaagaggtagaagaattctgcaattagtacatatttttttggtactaaagagaacttcaatcacaaaaatatgtttggttaaatgggagaaagctatcgtataatatggaagagaggagtctacaatgggagccttaatatttcaacaaaacatgatatgcaaatcttttctgtaatacccaatatcaagaaaaaggaaaatgtgccatcgaatttgaaataaatttagttgttataaggagacaaagcaaagaagaacatatttctccaacaacatgggacaatcttatcacatataaagtccttctggtactccttccttcttcttgaacatcaccttctctttcgccttcttaaagtcagcgtgtgtcacctgaaacacaattcaatcatggaaaactattgttagcaactcccacagtaaagaaaccaaccgaatttgagttatgtgaatcaccttcattcggcgttccctcaatgcaagcaaaccggcttcggtgcaaattgccttgatatcagcaccggaaaactcatccttagtcatgacaaattcttctaagttgacgtcatcagccaatgtcatccttgatgtgtgaatctgaaagaggatgcagaaatgataagaggaattttaacgaaagcatatcgaagtcacacttctacaaatcatgtcaaatttctatgatacctggaaaatccttcttcttgttttgatatcagggagagggaattcaattttcctatctattcgaccaggacggagtaaagctggatcaagactttcgattctatttgttgcaagaatgactttaacatctcctcttgaatcaaaaccatctaactggttcagcagctcaagcatagttctctgaatttcacgttcaccaccagaatgagcatcgtacctgcaaaatg

SEQ ID NO: 59570 - DNA, 1426 bp, Cannabis sativa
taatatcaaaatttagattcatataatgtagatctctaacaaacagatctggagctccccatcaatccaaattaggtataatgaagatacatgaaaaaatatcatgaataatagatctatgatatatctagttgcattgtcgttgattttagattttaaatatttaatatattaatttattaacaaataataaaaaaagaaaattcgaatgaatctacaaccacgtatgtagaagtatgtttcaggattttttaggttgctttatagtttgcattctcgttttataatggtgttaatcaatattgcaggtattgtatttgacagcgaagaaagagaattcacttcaaaaacacttctacaacatggttagttttatgaaattagttgcatgttagttttataatagttgcaaaatagttttgatacaaataaaaaataatgtaaatatggggttcagacttcgcaacacatgacttgaactaacaaacagatctggagctccccatcaatccaaatcaagtacaatgcaaatacaaaagaataaaagcatgaataatagatctaaaataatgcctctttaaccttgtcatctaaaacagctttccacaagaccaagttatatgatcagtcgtaatagccgaatgaatgcaatcaacaatctcctaccactgaaccagagatgatgagaaaatgtttagaaaaatgattcaccatgacctccctcatgtcatgctccctatcaatccattgactcatagaatttttcaattagtgaattgtattattcttccgtcttgttgtggccttaaagtgaagaatactttgtgtttcgatctaaataaagtattcttagagaaaaattttgaagtataaattttcaaattctagttatagcttattttcttaaagttacatataaagagtattgctattagaaaaattcaaaaccatttaaaatataatattttattttacttatcttcaacatcatttagcaacattacttctaaaagtactctaataattaacactttcatttccaataatatttcacacattattatttaatgtattatttattttaattttataaagaaaatagagaaaaataagtataagcatcaatgtcaagtttttgcatcaatggaaaggtgtagaaaagggatgaagaatctccaaatcgaatcattaatgcaatcttgcctgcgactttgtacaacttgtggaagaatagaaatagatgcattttttatttgtattgtactgctccttgtcatttgaccttaaatattaggaaggaggttcggctgagaatcctgagcaaggggcattttaaagcttgctaaaagaataattttttacttaatgtaattaataggtggtagcttttgttgtggagctgctagctgtagcagttgcctctggt

SEQ ID NO: 59571 - DNA, 2200 bp, Cannabis sativa
attatgaaacatcccctgaaacacgtagtcaacacttcccacagaatcacattagcaaaatctcttccagctatcacggaagcatcacaattaagagagaaattccctcactaggaaatattcattctcccaaacttaggtcagagctactcctaggaacagagagcaataattgtaggtccctttaaattctattaaaaattatgagctaacacactgagcacttaaatccatgactgagatatgtcaaaagaaacacatttcgaatattttatatccacaacaaacacgcagctaccacttcatgcaatcaaaaattcaaaaaatatatccaccaacagatccatcgatgacccattttgcctccatcgaatcagcgaccaagcctcaatctcttgccaaatatgaatcaacccagtgcaaaaaagtacatcatgggagatagattcttcctttttcccatgttgtttggcacacaactccatatatatgtttctcttagttaaactatacaattgccattggaattgcttagtaaaataacctccgaaggaatattttaaattttggatgaatatttagctcccacaccattctaccattttgaagtcacctccgctccacgcattcactcttaatacacctttttgatgatagaatctcatcaaccaaattatagccaaaatttaaagttcaatcaaaactcaagatgaagatgaaggtaagtaagagtgagaatggaaagaggtattaagagtcactatgcaaaagagaattgtttgtattccttaaggtcaagtgttactatactttttcagtcccctctcacatcagagaatagggtaataggctctaatggccttagatagacagtggttcccatgggacaagctgaagtcctagtgttgcgagttctaggtgtaggaggtggtcgtccaccttgtaccgtagtttggtgctcggtggttccgagttgaagaggtggtggtccttgtatacccttggatgtaaggatttacatgtggggtggatccattactcgtaccctttctcactaacataccatgtaggaggcattgttatactccattggcgcgcacgcctcatccttgtggttgtacgtttgcttcttccatctttaacactcaagaatatttcacttagtattggttgtgttgttgagaggagcgtagtcgggattcttgagtgcatgctggccaagacggatgcaatgcatgctggctgagtggcaatgacttcaaaaccctcacctaagaggtaaaagctaggtactaagttaactaagtgtgaaaaatggtggtatatgtcctaagaagaatgcatgtcaaacaactcaaaagaaacaaatatatatttatagagaaaggcaacacacgggaatcataatgacgagccaataattatattcagaaagggagatagtgagaataaaaatagtgagttcaataccttagtgcggtgatggagattcataggagtgtgaaatttagctagggtaaagtaggacacgtgccatacaaaaaataaaaagaagaagtgcattagaagatggttatcaaagttgcttgccaaccaaaggtcactcgacccaaggccatttggctaagggtcactcgacctaatgccactcgaccaaaggctctctgccaaaggcccttgagctcaagtcacccgtcctgtcggccatcaggtcactcggccaaaggccactaggcaaattgacacccagaggttctcgacagccaatgaatgcatcccaaataaataaataaataaataattgagaaaaaaaaagaaaaaatattttgatgaaaaaatgctttggccaagattcaaacctgttaccttttggaagagttactttaagctcaccactaggccaaacgggttgtcgtgaaatgaaaatgaaggaaaaagggtcccctttatatactaggtcctttttttgaagtgcatgtcaaagacaaagttcataattcaacaagatgaaccaagatgaaataccaactctttctgtaatatctcagaaacttaattatcaataattagggtttattatattatgggttaatgagaaagtagtgagtaggattatgatcctactagtataatttaacatgaattataaattttaccataagtggataattaagcataatttattagttacaaagatttt

SEQ ID NO: 59572 - DNA, 638 bp, Cannabis sativa
tgtcactaagggtttgacaaaaaaataagtcactttaaagccacgaattgcatcccctcgagcctatctcactgaattggataaggactttgatcctcaggtatatgcctttactattttacctaattttggtgataataatgcttggtttgctgatacaagagctacttcttgtgtcactaattgccttaaaaacttagagcccacaatagcttatactggatctgaaactcttacagttggtgatggtaagcagattcttataacacataggatctgcatctttaccatcctttacctcaaatacattgaaattaaactctgtccttcaagttctagctattaaaaagaatctagttagtgtctctaaactagcaaatgacaatgatgtatttcttaaatcacaagaattattattttgtgaaggacaagtaaactggagaagttctactcaaaggtctagttaaatatgggctctatgtgctaggtgaatctaataactctcccaacactttgtagtgtaatctcaccaccatctcctagtcaagtagatgtagcaattttcctagttaccaactgtttataataatctcactgatgattcagtgaacaaatgtatcacacatacatgtattaat

SEQ ID NO: 59573 - DNA, 1643 bp, Cannabis sativa
atatatatatattatgtatataaaaatgatcatttaaactgtagaatataatagtataatttttgagctaaaataaatcctaatgaaattagaaaaacttttgataatttatttagatagatttaatcacatcaaaatttatataaaaaaaattaggatatataaataaataaacttaacagaaatataaatgtcatttgtttaaaaagaaaaaaaaaaagcaaataaatgaagaagagactcagtgttagaaaaaaaaaaatgagtcaaagacttgaaaaaaaaaaaaaagattaagagagtagatacttacacgcatatcaaattaataaaaacatatcgttaatgttactatattaaaatatcggagcatattcatgtaaatattgtagaaagttcgtatctgtagctaattttctcttttttttaaggctagtccataatatttctctaattttaaaataataataataataataaataaaataataattaaagaagctagctatagctttaccacacaaaccctaaactcccaaaagctaagcctcccctgccgcctaacctaaacctaaaatccctctcaaagctcccttctcgtttgctccattcgcctgcacaggcagtgctcgagtggtcacaaagctctctcttattcttttgcctaaaccataaacacatcctaaatctccctctgctaaaatcgctgtctttccctctcatctccgcctaaatctccctctcatttatcaaacactacacctaaaactgctctatttcagcaagttacttcaaatggcagcgaggctcctgtagtcgaccaggaggatgtcaccgttgctggcgatttgacgacgcgtgacgaattagctagtgctgcggtgaagcttcagaagctttataaggattatcaggtcagtagtaattaggttaggctatagctatcattctctaattattttaaggctatagctttactactgtatggttttagtttttagataactcatcttaaactttactgtattctcttgctatcattcttctagatttgcaaagataaagatgaagctgaagtatggtttagtggtttaaaagcattgatatcccgtggtcatcatcgaaaatggagaaatgagtttaggagtgatggaatcccatcagaggcaaataaacctagaacatacacgaggaggagttctcctttgcactctcccttcggtaattatgcattattgattatatcttggaaatttttttcgactctgtttctctgtttctgtgattgtgatgatattggggttgataaatttgtgctgggttattttgtttagttgcttattttgtttatatgattagattttgttgcttctgtgtggatatattatgcttgtaatgagtcttttgacttaatgaggcaaatttagttatgacaacacacacaattatctaatactttatgcctaagaaaacgctccactatattctaaactaatacatattcttttgaaaagttgaaacaatttttttcaatacaattgttctgattgtattcttttagtgattaagagtttctgttttaaaaaaataggatagaaatttattcaaacctgtttgtatgtacccactccttgtatcctttt

SEQ ID NO: 59574 - DNA, 524 bp, Cannabis sativa
atgtaacttgtaaaattctatgagcccctatttcacttacaaaacttatattacaaagtacttaacgctaaattataaataagaagtttgtggtgatcaacaacataattcacaatgttaattatatttttgacatttttaatttgagaaaagtattttataatttattaattaattgcagttgtggtatttatttagttttcaaattttgtgcatttaattttcacatttttgtatttattattttatatatggaagaaaagttatttagattttctatttttaaaaaataaggtataaagtgtaagtttgatgactcatagctaaccagttgtatcaatctaattttgtgtgagtttccaatgatatatttgatcagatttcttgtggagaaaattgaagcaagacttttcttttttacaaaaagaaagttgcacttactgctcacgattctgtaggtacaaaaataaatttttttgggctgattgaagatctattttaaagaattgtctagtgagttgtgg

SEQ ID NO: 59575 - DNA, 1536 bp, Cannabis sativa
ctctcgaacttttacatgttctaaatcatgcccctgaacttttattcatgctagacttttttaattaaaattggacaaaagtccttaaatccaacaattttcttattcaggggtattgttaacaactttaaaagttcaggagcatgatttggtacatattaaagttcggagctaaaaatcttaattaaccctttattttttttgtgtaggttactctttgcggtcacgcaacattagcagctgcccatacactattttcatctgggaaaattgattctgatgttattgagtttgtcaccttgtcgggaattctaacagccaagaaagtggctcaaaacaacaaggcctctgatggtgtagcgcacaaaggcttctttattgaattgaactttccaagcgatccaattgccatattcaattccgtcgaggtttcaatgatatctaatgccttgggtggtgcttcagttatttatctaggaagaacaactactttggattatctcattataatatacttattctggacatgtttaatcttttgtattctgttcacttctcgttttaacgtagcttgttaatttttcaaggttgtggtcccatcagcaaaagatgttatagatcttcaaccaaactttgatgccattggaaagtttcctggaaacggaatgatagtgacagggatagctccttctgagtctgaatttgatttttacagtaggtgcttcttcccacaatatgggatcaatgaggtaatatcagtttgcctttcatttttgagcattaggttttttctttgagctactgataatccttagataatagtggctggctaactctatgagatttgaagttgagccttgatttccctctttaatgtcttaacttctcctagttagaactaaatactggaactaaaaggcaggtttgattcgatttgaccatggctgtccagaattaggtggcgtttggttagaagtaatgaaatagaatataatgaaaaagaaacaatcttcattccattcctttatagttgcatattaaagtattaaagtattaaaatgttatcccaatggaatttggtagaattaatattttattttgaaatagaaagaaagatcattccaatgcattatgagaaaatatttaataattttttatcgattttttaggcattttaggtagcgtttgattggaataaatgaaaaaatagaaatgagaatgagaatggaaataggaatgaaataaaattaaaaatgcataaaaattattaaattttttctcatcatacattagaatggtctttccttctattttgaaatagaatagtcattccacgaaaatggtagaaaggtcattccattagaatgacatttaaacactttaatcataaagcaaacaaaagaatggaatgaagatggtttccttttctttcctttccattccattacattacctccaaccaaacgcacttaaattttattcattcctattctcattcacattcatattcttatattttcattcttcctaataaaa

SEQ ID NO: 59576 - DNA, 3724 bp, Cannabis sativa
aataatggacaagggtaaaccgtggaggcggactacctctttaaggaagacttgcgcaattgttgtggctgtgaatggatgttttagggtgacaaaatgggtgtacttgctcaatctatccactactaccataatggtatcccagccttccgatcttggcaaaccttcgatgaaatctacagagatatcatcccaaacttgagcgggcagggcaatgggctgcagtaaaccaggtggggtagtggttgcatacttatgctgttgacaaatggcgcactcttggatgaatttcggcacaccttttcgcatccctacccaaaaaatctcagatttcaaccgttggtatgtcttcatttctcccgaatgaactcccataggagtggtgtgaaattctcctaggatggccaagttatttgcgcatacacaaccacaaatttacggtaataccctgtgagacccaaaaatcctctaagctcgcggatgtttcggggaaccggccaatctgtcatagcatccaccttgcttgggtcagctgccactccttgacccgagatgatgtggcccaaataagccatttggcgctgcccaaactcacattttttcctgtttgcgaaaagctggtgctgttggagtagttgtagtactatggtgagatgtccaatgtggtcttcgttactcgggctataaaccaaaatgtcatcgaaaaaaaccagcacagatttcctcaaataagagcaaaaaatagcattcattagggattgaaaggtggctggagcattggtgagaccgaacggcattaccttaaactcatagtgtccttcatgggttctaaaagcagttttcggcacatcctcttctctaacccgaatttgatggtttccggacttaagatcgagcttagagaatacttgtgcaccgtggagttcatccaagagctcgtcgatgattggtatagaaaatttgtcaggaatggtagccctatttagtgcccggtagttgacacaaaatctccaagtctcatctttctttttcactaacaagactggactagagaaaggactttggctgtcctgtatgattcccccttgtagcatttctgctgtcttcttttcaatctcagttttctaaaattgggggtaccgataaggccgaacactcactggtggagtcccttctttgaggtttattgcatgctcatgaccgtgtattggggttaaccctttggcgattgaaacacaaggtcaaatttcaccaaaagctcttccaaaaaaattggttgttctgtctcctccactgtttcaatgctggatatattgggttgtgcccgccatttggctggggctgcttcctttgacaattttgcactaaggacttcaaagttcccacacttttgcccaaggaagtatcccccttaattgttactggttaatccccaatctgaaactttattgtttgttgattccaattaaaatggggtggtccctaaagttgccagccgcctggattccaagtatcacatcagtgcaacccaacccaaaaggtaaaaaatcatctacaatggtcaacccttgtagctccaaaactacttcccggcaaattccttcacctttaattgatttacccaaaccaagagtcactccataaaccccagttttcgtcaaaggcaagttgtgttgctcaactaagttcttggaaataaaattatgtgttgctcctaaatcaataagcacagttacctcttggctaccgatggttcctttgatcttcatggtcttgggagcagtcacacctgtgactgaatttaaagagacttctgcagcaccggtcagcttcgcattatctaggttgagatcctcctcttgcatagaatttgagtcctcctcgcaacctcgatcactctcatcgtcatggatcacaataacactgagctctttcttttcacatcgatgtcccggcgaccatttgttgtcacaccgataacaaataccctttcgtcgcttctcttgcaattttgagtcggtcatcctccgatattggcccatgggtttccgatccttgggtgaaaattcggtgcccttgcgatcttcgtggtggctcgtgtatttggaatcgccccaaggagaacgatttccaaataatgactggttcttgctctcgatcttggctgccatctccattgctttattcaacgtactaggttcaaacaatcgcaattcctctttcaaaccccgtttgagaccagaaagaaattgacccaaagccacagcgtcggataccccatctaagtgtgccagcaactccaagaatccctcacaatattcctcaaccgtgccggtttgccgaaaatcaagaaattgttcatgtaaggatccttttgaagttgttcggaatttattcaagagaaataacttaagatcttcccaaagtaagattggtctccgacgtagctcccatcgaaaccaagttagcgcctttccttcgaagctaatggtggctgcctcaaccatttcttcattgttaaatctttggagtgcaaagtacttctcagcctgcatcaaccacccatcgggatcaactccttcaaaaagtggcaacgccaaacggcgtaatccaacatcccgacgatgttcgaaggtggcactactagtttccctctctggcatcgaagatttctcatgacccagtcgctgtcccatcctcgccattccttctggcgtctgagaggtcgggttatcagcgccgcgttcttgatttccgatagaacccgactcttccgtttgttttccaaaagacgttcgaccaattccttgagttgccgcatctcttccctgaaatccccgatttctgctcgaacagagccaacctccgctttaacttcaccaatcttggagttgacaacctcctccatctccgaaaactcctccgctcgttcttggtctggtttttctggtttcttcagcattctttccttcccagaagaactgctctgataccactttgatacacactaggacaggtacaagaatggagtagaaagaattgaagttttattgaatttcaacaagcaacaatggtgctaggcaattcgagaagcttggggtctccctaagttcaagactttgttacaacgtgactctttttccttccatccaattacaatcctcagtaatatttatagacaacactatccaaaccattaactaattattttgacagctcatgcataaaactaccacctcagctaatatttctattctctatgcaatttttactgctattatttacagcttatttcttaggtctcctagaataagtaaacctaattggtggtgtatcagtatgactcattgttgtgaaaaagttatgaaaatcattcttggatattatttcgagtaaaaaaaagggatacatatatctagggttgtacaaacaaagctaataaatacaaaataaattaaatcctacaaacaacaaaagtatacatttacacactgatcatgcaactattatcaaatcacttagatctgattttgttctgatttgattcctataccaaatctatttacacaccccctcaagcttgactgtagatattgatgagtccaagcttgtctaataggaaatcaaacacttgctctatccatccctttgtacatatgtcagccaactgttgattagtaggcacatacttaatacatataattcctccatcaatcttcttttt

SEQ ID NO: 59577 - DNA, 1282 bp, Cannabis sativa
cgggtcctggtcttgttccatttcaggtgctgggtcacgagctgggtactaggttcaagttcgggacaaggtcgggtcttaggtcccagtcttagttccgttgcacacatccctatcccatttctgggtccaggtcctaggtctggtctggttttgggtccctgtcttggttttggtttttgtcctagtcacggtttgggttttggtcgtggtctgggtttttatttgggttttggttcaggtcttggtcctggttcttgtcctagtcctagtcctagtcttaatttgggttcgggtctgaatctaagtctaggtccggatcttgctccgggtgtgggttagggtcttgggtctgggtccgggttaaggtccgagtcccaagtttcgatctcgatctaagtctgcgtttagtttcaagtctatgtcttgggttccatcaaattctgggttcgagtttgggtccgggtgcagctctaggtttgggtctgattctgggcttgggtctgagttcgggtcccgagtttgggtccaggttcaggtttggtcctaatatgtgttcgtgtctaggttcctgtgctggtttgggtctggggaaggttttgggtctgggtctgggtccgacttctgattcacgagtccagttcaggtcctagttcggattcgactcctggatttagaccttgctctaggttccggggactaggtccctggtctaggtcccccatccatgtcccgttcttaggtcttggtctgggtccatgtccgggtttgggtcctgagtcttcattttagtccagctctcggtctggatttaggtccagattttagtccctattttggtctgggttcaagtttgggtccttgtcaaggtctggatcctggtctgagtcgcgggtctcaggtcccagcgagggtttaggaccaagtcacgtccaaatcccagtctaggtttgggtccaaggtctcaagtcccagtctttatcaaggtctcagtcaaggctctggtccgagtttgggttatggtttgggttcggttcttgtctcaggtccgagtgctagtcatagttccagttctgatctaggtcttggttttgttctgggtttgggttgggttccaagtccaagtcttggttcaagacccgttctcggctcccagtctacttcctgttttgattgtaatttcaggtcatagggtactagttttggtataggtttgggtcttagactgggttcgggtttgggtctggggcaaagtcctaaatccacacaccaactacgagtt

SEQ ID NO: 59578 - DNA, 1230 bp, Cannabis sativa
  modified_base (302)..(305): a, c, t, g, unknown or other
tagccaccctggccacatgggggtcatatggaggcaccctacgcagagtctatttcattctggccataagtacaaggcaagcaagagacctacgtagctctcacctcccctattcaacactaagcactacctgcacggaagtaataagggaaggtgagtaacttgacaaagctacaaacacattaagttaatagtacccaagggtacctttcaggtaaaacaaaatgtacaaggtcgatcaacgaccaagtaccctcttaagtacacttactaagacatatagtaagtcctaagttgtatannnnactataatggactcactacctagccttatacagagattctaagagaaaccatgcataaggttgcagctgtatatgcctctaaggccgtcacgggaccctagccaaggtctaaagagggagaaaaattggttgcccacttggatccttggccttggctggctagggttccaggtcttagtggccggccagaccccaaaacctagtctagtggccgggcaggaaccctaattccaagcataggccggctagcctaaggacacagtctctatggctggctagaccccataaaagccatatggccggccaggccttaaacaaggcctccttgggcagccaggatctgcatggatcagaacacattatttttcaagaactcaaacatgttcttcgtgttctttgtgactcaaagagccaagaatcacaacaatagtcagattcaattcttttttgtctaaaagtcacacattatgcattttaaggctatcatgcggatcaaaatactgaaaggataacaatctaatgtaagaatcaaggcatgttcaaatcaaagaatagcattcatgcatccaaggaaaaattaatcaaatcaagtaaaatgacaggattagaaagcttacccactacaagattttattagagaagaaggtgggaagctgggattgtcaaaacaccacaaaaatcccaagaagaatgatgcttgtggattcaaccacttagagagaagtgagagaaagtgaaaagttaaaagtgacaagtgaaaaaaggtttccccccaaaaagtcacttatgtaatacatgtgggccccttttcttcacttacctcacctacacatcataaaggcaactaaagcagttgttactctataacaattagattagagcacatcaacttttattgaacaaaggctacaacagtcctgaccac

SEQ ID NO: 59579 - DNA, 930 bp, Cannabis sativa
atggatatcatatattaacattagaaaaaatttcaatgccaataattccaatttatatatataaaaattacatatacatgtgcagtatattttaagaaagccaacattttagaagaactcattaacctattccaaatgatgaacaaaattcaaattgtaacaaccagcgaccgaagctagaatgagggagcagtgcgatgccgaatttcgaaagaaaagctgtgctaatttattattgttcgaatgagtaaggagaagaagatgatggataatagtaatggcaaaagaaagagcattaaataatttttttacgggtcgtattctgttttattcagatttaaaatttgattttttatttaataaaaattctaatcttacgttaatataactgagggaatatttgagtcccaacttttttaaggggtcaatattataccttttcagggtagttagaatactaccataaaagcattaaagggcttaaaaaatctaaaacttcataacaaatagggtaatcattaagattacctttcccctcctaacattaatgcgttacaaagagcccctaagtgttagaggggtttaacattaatgtcattttaatataaaaagtaagatctacctgatattctcattcctatcaatctgaacctcataccaaacatctaagactagaagaaataaataatgggattgaactattcctcaccaactactggttgtagttgtgttatagaatgagcttaaaagaaagtgaaaaccttattgttatttccaatcatatttatttatttgttacagtttgactcaatatcagaaacagaaacaaacaatacattttgatagtattataatgcgaatttctcttagaaatatgagtacagtctcgtgaaaagttatcaagtggagccaaccttcataggaaaatat

SEQ ID NO: 59580 - DNA, 1311 bp, Cannabis sativa
gtgaaaactcgagtttggtgatgtagaccgatgcaatgcattcacaagcattaaacaatctgtttccacataagcaataggaagatgcaattggttcgcccaggaaagaccaaagaacaatgcctttgcttccatttcttgagatttgaaattccccctcgctggtttagacattgcagcaagcacctgtccatttgaatttcgtataataacaccaataccaattttgctcctcgaagtatcaattgccgcatccacattcattttgagtttgttctctgggggagcatgccacttaacagcagcttgagaattggtaggaaaaccaatatttggtgaaccagcagaagttgcagaacttgtatgcccaccagtatgctgtaatgcagcctggtttgtgagctggtattgctgcaaataggcatcagcttgtgacaataaattaacaggtcctttagtggttttaccatgaataaagttgtttcgatcagaccatataaaccacatgacacacaaaattctttccatctccaatttagtatgcagagaggagagatacatcaaataatccccatcctgcattcgatgtgcactatgaaagttgaaagaaaaaccagataacttccagacttctttagcatgacagcacgaaaacaaagcatgtcctattgtttcccatgcggtttgacacaaagaacaggttgttgaagttaggactttcttatgaaacagggatttagcaacaggtattgaagattgtatcactcgccaaccaaatattttgaccttagcaggcaaattatagctccaaaaagtcttccaccaagtattctgtgtattagaaccagtagagagttctctttcttccaaagagcttgcaaaatgatatcctgtacttactgaataatcacccgatacatcatgatgccaaatccacctgtcttgaacagcattgtaagataagggaatggtaagaatacgatcaacatctggtggtgaaaagtcagtttgcaaaagggcaatattccactctctatctgctgtaatgtaatccgagacatgatttgaagatggaccataataacaaaaagctttgaagttatcatggcctggaatccatgaatctgtaccacaagcaatagacaggccagtacccactttcaaccttaatccttttgctaacaattccctaccccaaactattccctgccaagtcaaagaacccagaccatttgctgaagctgtcataaattcagtatgagggtaataacgaccttttaaaacacgacttagcaagctatttggttgttg

SEQ ID NO: 59581 - DNA, 1464 bp, Cannabis sativa
  modified_base (30)..(31): a, c, t, g, unknown or other
atgatgaatggatcattcttgcttcctctnntacttaaatcaaccaaagtaaaaccaagctcgtcagttcttactccaacattgttgtcaaccgaagaagatttaaatagtggaattcggaacacaaaatgattgagctcccatatttcttcaataactccataatatgtcatagtacctaaaacagggttcctatcttttgcacttgcaaaatgcatggtttctgcgacgatacgtatgtcactattttaaacctcttgagcatcatctcttgactttgtatggaaacatttacctcttacaatgtacgcttcaagctttgctaccgcaaaatttggtccaagggcaatacgactcaacacatcagatactccatgattcggttcgttcaactttgctataatggtattccttaaccacccaatgaaagtttgacgatgctgttctgcaaccttttttttttattatttttatgatttcttggaaccattgattgaaacatctccatatggttactgtaaaacatgtaaggtaaatcaagttattattcattgtgacttaagaaatgtttatcaaaggaaaagctacttacgttatatatggctgaacctctgtattattgttcatcacgactaactagctagttcaaacttggagactgtcaccattgtccctttcccccttaaacctcaatcaacctcatctgggtcagttcttggtttgctaattcctattgcctcaactccggccatgtactctgaacaaaattccacagcctcttcagaaatttagcactcaaccatagatgcttctggctgatagtggttacgcacataaattttaagtaccttcatatatctttcaaatggatacatccatctcgcccaaaccggcccacacaaccttgtttctttcactagatgaaccattaaatgtatcatgatgttgaaaaaagatggcggaagttttttttcgaggttgcacaatgttttgactacatgttcatgtaatgcatctaacttatccagttctaattccttcctggacaacttcttaaagaaaatgcaaacatgtgtcaaacactctcgaacattttttggcaagattgatctattggcgattggaagctgatgttgcattaacgtatggaaatcatgtgatttcatacccattagtttcaattccacatcattcaccaagtttttgatgttagacgagtaaccatcaagtactttcatatttgtaactgatttgcaaaccatttgttttttcgttttggacaaagtgaaacaagcaggaggcaaatataattgttcatcttttttctcaggtgctagagattttcgtacacccatttcaacgagatctaaatgagtatttaagccatctatagtttcgccgggaatatcaagtaaggtaccgataatactctcacacacatttttttcaatatgcatgacatcc

SEQ ID NO: 59582 - DNA, 869 bp, Cannabis sativa
atagattagatttttggtcgattttgtatttttcatgaattatttgtgttatttataaatttaattatgaaaaatacctagactgttcaaaaaattaaatgttaattatttagagcttagtacaggctataaactgagttatattggttagattttggttttcaatgatttttgtattttcatgaatttatttagttaataattaaaataattatgaaaaatagttaagtgatgttaaaatagtaaaatatatttttgtaacgctatttactatctatggtacgcaataaaaaggtttttataatttatttgttgttgtaggtatttattataattatttgtcactaattaactatttaattgaattttaaataggataaatagtgaaaaaaaattgtgtttactgtttggggaaccttcaatataatgctaagatataattatagtgtctggaattaatttgagactatgttgagatgttttgctatttttggttaattatttaggattttattctttttaacaataaatttatacataatcatggatagtatttcacacatatttctaaggagattgaatatgttttatgatcagtataaatggttaagaaatatgctagcttctggtttcgataaatgattacatatttctatatttgttaataaatggtattttagtgaaattttacgtaaaaagtatttgtatgagttcatgttttacgttaaaaatattcatattggtacatgcaatgtgttggtgagaattatagagataaaagattgtgtttggtgtgtcatgcaagtgaaattgatttatgcatgtgttacctatttttacgtaagtttctgtatgagtacaaagattca

SEQ ID NO: 59583 - DNA, 1943 bp, Cannabis sativa
tcactcactgcgcgtcactataggcatttaaagtcaagttttgtcagacttaaaaagtattagctacactcaaaaagtgttactatatcttttttttttattattctttattattatttttagaggtatagtgacacacaaaaagtgtcactatattaaatatttttctaaaaaaaataatataaatttctcaaaataatttttataattttatttttagaaaattaataatttttttaattaagaaaagcaatatcatatttttatatttttttatttattctaaaccaaaacaatatactatattttagtaatactatatttctaagttatttctaaaaaacatattaaggtgattgttattctttttttttttttgatattaaaaggtgaaataggagtccaatttttttaaaatcatctttataatttattcttaatttaataaattgtactcaacaaattagaaagtataatttatatttttacaaattaatctatacattggcaaaattaaataaaattattaagtataagtcaatataaaatattttacaaagaaattacaggtgcaaaatgtacaaacatgttcaataattttctaaatctataccgaaaaccaacaaaaaaacaaatctgaaaactaattgagcaaatgaaaaacacaacatacactaatcaaagtagagaaaataaagaacaaaggcacctcaaccagcagaacattaaccaaaatatcgaaaccaaactcaatgtggttgcattgttctgagcagatttgaacaattgcaatgcgaaacaccatgtatcatcaacgggcaatgacaaattttcaagcatgtataaaatttctcatctcacattcattttttctccccccaatacacttgtataaaaattgataatttacaagttcaacacaaaattccaatatgcaaacctcaggtggatgtacaatcacttcttgaccatcatctcctcctaatgagcattcgggccttcgaaacgtcatgagagcagccaaagcagcaatatttgcagtatccacaaggtttctattaacaaattattcaagatgaaaattcaatatagatactcaaaataaatgaactacacaaaaggaaaaaaaaaagagcttgtgcttgaggggacaagatttacagcttaccttccattatctagaatatgcaggtcaatacggatggcccaaacaaattttcctggaagaacacaaagcgatacagtgtcaacaaccctactttctctgcacatacatttcaaaattccaattgttaacttttccttttagtttacaatcaaactaattactaatggcaaagaacatcaaaccttaggccacgatctataacatggccaacctcaatagcagcctcggtggggcggccaggctcaaaggaaggatcagccataggggagaactcagtgaagatggaaagcgtgccctcattggagtggtcacgatagggttgaaccaattgacccgtcacaaaaaccatgacatgggtttggcccagctgcagctctaccgagccatcgtccttgccgaaggtgatgatgacattgcgatagtcgaaaggacggcgaccgtcaactcggaggttggagagaagagctaccttatttttattttttagtttttattttcagtttaatagcacagataaaccttgacgcatttcaaattgacttctttatctcaagtcaaaataaatgttcatataaacatttaaggccacctgaattactaatagcgtttagaaaacaaaaacacaaaatgtgaacaagagtatggattattaacaagcaaatgttatagcaccttgttcctacgattagaccatcggaggctgagttttcgccatctttttcttggtagctggaacaacgagagagaggaagaaagaggcgctgtaatttttttt

SEQ ID NO: 59584 - DNA, 654 bp, Cannabis sativa
ttaagatgctttcatgttttgaattctcttgtccctttttttctatatgtatttatattttatttattaagaaaaatgtagcggcataattacttaaaatttaagatttgtaagtgactataaacttaatattaatttttccggcatatatatttaatatttgtaaaactataatttttttctaattttgtcagtgataataaatattggctttatgctgcttacaaacttagaactttaggtacttataccactatttacccaatatattgatataaaattgttgctttcatatatatagtagttaaatagaacaaatttattaagatgctttcctgttttgaatccctttgtccctttttttctatgtgtctctaaattttatttattaagaaaaatcaaagaagtataaagttcaaaatagatatgatgaccactagaataggaggatatcattctacttaaatttaatttgtaaattattattttggattatattaaatgtatacctaagtccaccctaaagttaaatcttgggtccgccactgatcaggttggatatgatccaacttgatccagactagatgatgatctgtcttgccctaccctactagacaagtttttaagatcggatctgatctaactcagtttatt

SEQ ID NO: 59585 - DNA, 683 bp, Cannabis sativa
gcgtaacaacatccttcataaccacatttcctgggactctcagcaaatttataatagatgccttaatcgttttactgaattctctttggttgaggagagtgaagtaagcgaggaagatagttatctgttggataagaaggattggcctactactatgactgataatactgctatatacacagctgatgcttcggtcgctgaaggttgggctgggattgctgtgatcaactccaggggggactcagttttggattattgtgcagccagcagcgctcttaaaggtgaacttgcggctatttccttagctctttcttttgcttcagaggagggagttaagagaattaaaatcgaatctgattgtagtgttgcagtcaatggtcttaatcttggttctctccctttgtcttggggctctttcccggtctttaaggaatgtttatttaagagtaagaactttgattctgttatctttgttttaattagtcatgatgctaatagcactgcagattctctcgcccgtcgggctcgaaatgagaagatccatgctcggagtgtcttaagggaagtgaccccctgttgtggtcactagactttttgctagtttaattaaaatcttagactaattaatatcaaaaaaaaaagtttggaaagtgccaaacgccccaatagagaaaactcaactc

SEQ ID NO: 59586 - DNA, 639 bp, Cannabis sativa
taagtttaatttgagttagatttgagttctagttgctagtttgggggttttttgtggtggatgcacaaatttgagtttgaaaactcaagcttggttcattcatggtatattttgattctggatttatttctgaattctattgcttggattttgttgtttgaggttattataggtgttttggaaggtttggtgtggtttggatacgaattggactaggttttgaattatttttggttacctggggcaaaccagttaaccggcttcacaggtcctgtaaaatcgattaattggatcagaaacgggttttcgtgaatttttcctgttgtcggtttgtgttagttttaaagcattggttggttgattccttgatacttagggtattggggtattagttattaatattagaaccttaagttggaggtttggttttcctggattagggttttggcttgtcgtttactcgtttatgttatgtgattatagcatccatccaacacgaagttttctgttcaggtcagccaactcatgtgaattttaaaatgaggtaagatcagtataatggttgtatatatgtatacatgtttagcgtaaatgttagttgttgtcagaataagcaaatctatagccatcagagtagca

SEQ ID NO: 59587 - DNA, 2648 bp, Cannabis sativa
aaaatagttataattttaatataaagtaaataataaatatttttataacagttaagcccccatagatcaaaaattctgggtccgtcactgattatattacatgttttgtatctttttcttttacctttcatatatctatgtgtgggagatatatatagtgcatatatatgtgtattataacatatatttaatcaatctcttttattgtccttgtattatttttacaattaagttgtatatatcttaatttatctttcattgtaataatatctctaacacttctttatcaaactttctaccatggttaagctcttatagggtggaaatgacacgatgaaagtatttttgttaaaaacaaagggattctcacttgcaactattcctctctccctcataaaaccctgatctaaggttgctttttcatgttaaaggcattgtcgatgccccctcatgtgttgaatggtgtctctcgatcaaatctttcatggctatttcatgatggagctacaatgaagtagtagtagagagtttagtagcataaagagatatcaaatgtcttcaaaacattcagtgcctaggagaggtcttattctatcagtcatattaagtacaaataagtggttttaacaaataacaaacaaatgcacttaataggtctaaatttgacccaatgagatttaatctcccgttaagtgcaaacaaatagaaccttattgataattcggtagtaagtattattattgcttgattgaaatatctttaaaaaaaaaaaaatagatggtaaaatttaacaaacttgtatacaaattctatgtttattaattaattttttaaatattacttcgaattctgtattttataaaaattattgaataactcatttgtgcttttattaaataataatatagaccttgtagaattactaatttggtcgaactattttttgtccaaacgttaaagtttgcattcctaacctttaaaacttcctcttctcttactctaacagttgtggttcaacttttattatattcttaatccgaaaatagtttgaccgaaatcgggcaagctatcattttattcattttttccgtatacaaattttaaattattatttaataaaatagaggagacattaattaataatttttgcaaaatatataattcataataatatttggagtaatttgcggtataaatacataagtttaactcccggttacaaataaatacctaagtttaatttttgacaatacctaagttatatttctggaactctgtataggtacataaccattaaatgttaagtcattattcacgagtcatttttttattggtatatttaaactattttttcaaaaattgcaccaatcagagatcgccacgtggcaatttacttaataattaacatccaggtatctataaaagttccagaattataatttaagtattattactaccaaaagttaaatttagatatttatttataactagaaattaaatttgagtatttatgccgaaattgcattaatatttagagcattttggaccctgtgttttgtaaaagttaccgattggatcctctattttgttaaatgacaaaatggatcctgtatttttcaaaacgataaaaataagactctgagtttaatttttgacaactttttttaatataaccaatttgaagacaattcctagtacaaacagatacagaaaatgtaaacaattttgttatagcacttttagatcagattataattaaattttattatgaccagaaatcaatttagggtcatatttgtaccattttaaaaaaaaatacagaatctattttttcatttaacaaaacaaatggtccaattaataatttttataaaatacagattctaaaatagtatttatcctaatatttataatatattttagtacaatttttgtcaacttgttttattattgtctatggtcggtcgtacgtgaaggagggcaaattagtaattttcaaaatataacacataaagctatgagattgagaagagagaaagaaaagaaaacaaacacatggaccacctatttcaatgtccaacttttcccaatgatatatatattatatattctgtatttgccttccctaaaaatgaaaaaccaattaaaagtcttttgttttttttctttcttcattattcttctcaattctcatcttcccatgttaatgtctatggtcggtcgtacgtggcagcctcccattggctttaaaatatagaagaaaagaatcttgaccattaagtatcattttttgattactactcttaagtcctcaccatcacttttggattggaatttggaattatcccaatagatctgtgtttgtgaattaaaaataccactaaaggagaatcactataatgcaagtaaagctatacacataacaaagtacccaatcccttttctatctctatatctcatttctttttctttctttcttaaaagttttctttgatatattttcttagtgcatagggaataaattgtttaattgattagtaaagaattttttacaccctattgtaggaatttttaagataggaatttactatcttgccccctacaccaacaaacaaacgaatcaaataccaaggtcaatttcgaccttt

SEQ ID NO: 59588 - DNA, 913 bp, Cannabis sativa
agtgccataaaggcatccattgctcaagaggagcaaggatgtggggaagaagatgaagatgaagactgtgcacacatgagtgctatttgattattgaattctctcaagaagcatggcacgagagcaaagaaagcccttgggaagggattgatgattgtggaggccactttaaatggaaagcaggccaagagcgtgttaaattaattgatactggcataacacacaacttcattcccgaaattgaagccaagaggatgggcctgaaactagagaaggatacgggtcgcatgaaagcaatcaattcaaaggcatggccacattggagtggccaagaaagtgaatgtcaagatcgaaagatgggaggggcaactgggcctcctcgcattgatgactttgatgtggtattgaggatggagtttctagctgagaagggggccattccaattccagcaacaaggaatttacttatcctgggtgagaaaccttcaatggttcccgcgaaagtaaggtagcccccagaagtcaagattctattagccttgcaattgaagaggggtctgaagaagaagaggccaacgtttgtcatcactcccgccgtgtatgatgcaaaagtggaggagtccactctgcctgaaattgagcaggtgttagatgaatacaaggatgtaatgccagatgaactcccaaagaagttgcctctcaggaggggagttgatcatcaaatagaactggtgtcaggtgcaaagcccccaactaaagcggcataccggttgtctccccaaaacttaaggagttgaagaggcaactaacggtgatgttagaggtagggttcatcacgtcatcgaaggcaccatttagtgcacctgtgttgtttcagaagaagaatgataggaccttgagactatgcatagac

SEQ ID NO: 59589 - DNA, 733 bp, Cannabis sativa
caaacttttaaaacgtgacaagattggaaattattattattattgtcaaaagtttccactactatacaacacatggtagacttttatagttatatacaaaatcaatcacatgtttgtgtggataattcaaaggggttgtttggttgaaaatgacaaatacattaatacatgcatatatgttaaatcccattgatgttaacatagcaatatgcaagtggattccaaaacagtaatattcaaatcattattttagtcatgaatacaacaataaatgataaattcttctaattagttattatttcttcaatgcaaatgtcatgtactgatgaaaataacaaaattacaacaaaataatatatatatatatattattggacaaaatcgaggaaatcattgaacgggttgaattttttttgaatttttaattgggcaaattacgattaaatatttacaacctatttttttttataattattattgttaatatatatttagtatataaataatatttatatttcaagctaaaaaattgtataatttaaattatttaaaagatttttaatgtaaatataagtaaacataatataattgaataaaataataataaaaaaaagtaataatatggtatagattttaaacttcaactttaatatctaaatacaataaaaattattaaatgtaaagtctaagattaaagttaaacattaaaatatctaaactttaaatacaaaat

SEQ ID NO: 59590 - DNA, 824 bp, Cannabis sativa
aacttgtagcggtagtgttcactttgaagatttggctcccttatctctatggagagaaatgttagatttatactgaccataagagcctaaaatacttctttactctgaaagatttgaatatgagacagaggggttgtttggaattggttaagggttatgattgtgcaatcctttaccatcctgagaaggccaacgtagtggctgatgccctcatctagtagatgacatggataaggtagctcaattaactgattcggtattagtgaagatcagagaagaggtttcaactgggcaagcgaaagattttatgatatcagataaaggaatgatgttgtataagactagggtttgtgttctaagtagtgcagaatgtagaagtgaaatccttgatgaagctcataccattccatattcactgcaccctggcactaccaagatgcataaggatcttaaaccatacttctagtggtccaggatgaagaaagatgtggtgaaatttgtatcccagtgcttgtgtcagagatcaaggctgagcatcagagacaagctggattattgcaaccactagcacttcgtgagtggcagtgggaggatgtcaccatggacttcgtggttggattacctagaattacgggcatgtacaatttaatttgggttgtggtagatcgatttacaaagtctgaacattttctaccattaaaaacaacctttatagtggatcacaatgcagatttatatattaaagagatagttagatttcatggcgctccaaagtccattatgtcggataacaatctgatattcacttcaaaattctgggagag

SEQ ID NO: 59591 - DNA, 883 bp, Cannabis sativa
ttttggtctgatttcttgagtttgggagataagtttggtggtccttggcttattttgggtgatacgaatttttttctctgtgattctgaaagagaaggctcctcgggtcgggatccttttatcccggtcatctataatcttgttgcctcttgtggtctaatcaatatgcctattcaaggggataagatgacttgggataatcaccgttctgggcggagtcatgtaaagtctgcccttgataaagggttagtcaatgtagcctggctcaatttatttccaaaagcgattctctgttccattcagactagcaactcttaccataggcctctgtgcctcctatcggggggtatggatcaaaagttccagagattctttaaatttgaagaagggtggactcgagatgagcgaagcaagctggtagttgacaacgcttggaagtctgttagtcatccttggccccttgcccgagtgtttaaaaaagtgggggcaacaagggtagctcccttgcattggaatcagactcaatttggtaaactagatatggtcatcaaggagctcgaaaatcaactcaacgctctgcagagccttcctgctggatcccgggactggaactgggagtgtgatatccgacgagcgctgaatgaatctctggaaagaaagtcaatatactggaaacaaagggcaaggatttcttggctaaaagatgggataaatgttcaaaaaatttctttatgtcagctgccattaaaggtagaagaaattccattgagagtattttagataaaaataattcctggatttcttgccgtgagcttattggcagagaactcatcgattttttcaaaggtattttctcagaggcggataatggtttggaatatga

SEQ ID NO: 59592 - DNA, 1334 bp, Cannabis sativa
tttgaaaagaaaaaaaataaaattgcatgaacaataagacatacgcattaatcgatgtaagcagtaagcaccttattatttgtatatataatatcctctattaattaaactgaaacaattgggattataatgagtgggcagcttactttgttttcttcacaaaatttgagctcaaaaggcttactttgtttttccaacttaattaaaatcgtggaagatacgattccaatatattttttttttcagttttttggttgagagtacacagagacagtgcttggatgacaaagattccattaatttactttgatgaaattgtcgatcaatcactaagtgaggaaaaaataatcatattaactattcattacgtacggtacttaaaaatataagccaattaatatatctctactttgacagagcatgctaagaacataaaataagagcactcttaactctttattttattcttcaaaatacattacttaaatttaatttctttattttacgtcaaacttttacattataccatacaacaatttctctattttttctttatatcatttaaataataattttttaatatatatataatacacataacaaaattagaataaaatactatttatgtattattaaaatatttttaaaggatgaatagtgtttccctacatgtaaagaagtaccattgcatagttctctaaaatacataacttgttggaccatcatttttatactttttcacctcttctcttcttcattttaaagaaaaactaattttaaaagagttgttaggagtgctttaacaaaatcattctacttaattgctgttagagagaaaaaagtgtttatgcccaaaattcataagaaattaaacaaatccttccttattataaatcttaggtcgcgtttggttggaggtaatgaaatggaataaaaaagaaagaaaataatttccatattatttctttatttagttgcatattaaagtgttggaatatcattctagtggaatgatctttccaccattttggtggaatgacaattctattttaaaatagaaggaaagatcattcatgtatgatgagaaaaaatttaataatttctttatcactttttttatacattttaaactttattttatttcatttttatttttatttttatttttatatttttatttctctcaactaaacgtcatcttagatttccatcgcttcataatatatatcatcgctgcataataaatgctatatattatatagttctactactatggagactatgttaatatttcataattttatttacaacataaaagtctaaaatatttttgg

SEQ ID NO: 59593 - DNA, 1191 bp, Cannabis sativa
ttcccagcgtactcactacgagtaaagtcctgggcgtcccttagaatctttttcaaggcctccacctcggtgttcccctttatgtactctgtcgtggcatagttatgcttgctgatccaaagttgggttctctcctcgtcaccaggaataggggtcaagacgatgcccggagggacagtatactcgtccacctcggacggatccctgaatcagaactaggagccggagtgtctacccttttgtgcttcttcgcaacctcagcctccaccatctttcctctttgctttcggtctaatggagggagaatcttgccttcttcttctgcttcctcctcgtcctcgtcaattaaaacaacttggtccagagggaggctggaggatgacctcccatgagtaactatcaggtcttttacctgaggtagagtggggtcaggactgtaggtcagggcaagagcatccaggagctcatccattggcttcgctgcttaaagaaataaagaggataagggcgttagaacattatcaaaaagtcgtgcatgcaagaaaaaaaaaataaaactaatcctaccctgacgatctaattctgtcctagcgaaagcatacattaaaaggctggtgttgtcgtccccaagaaagctatccgaggggaggaaccagcaggaagataaataggtcgaataatccaaagggataggtgcgagaggaccggaccccatacgggaccgccctaaaaagtgacctaggttggaaaaataaagcctcttggcatgatcgccccatcgcaaaagggggtatcctaaacctatggagacgttcatcaaactctacttgcctacagccagaataatcttgaacgtaggggacatgatgaacaattagtggagacttaccagatctggaggtactgacatcaggagcaccggtgttaggaactgagaatggaagcttaggccgggaggttgcctgctccttaccagcttcaatccaaagaaccctctcggcggcggcttgggctttgatgtaagccaattcttgttccctcctgaagaggtacttcttataacggtccacagcggaagcaatgatgtctgcccgaagtgccttcttggagtcaggactgcgaacattgggacaaaggaccttggacaaattgaaatcgtccactgattggctctctgtgatcaacttggcc

SEQ ID NO: 59594 - DNA, 1046 bp, Cannabis sativa
  modified_base (99)..(107): a, c, t, g, unknown or other
ttagttgttcaagattattctcgatgtaggcctgtagagtttgatgaacgtctcctttgatttaaaatgccccctacccgatggggcgatcatgccaannnnnnnnntttttccaacttaggtcattttttaggccagtcctcgatggggtccggtcctcctacacctatctctctggatcattcagcctatttgtcttccagttggttcctccccttagacagctttcttggggatgatgacaccagccttttaatgcatgattttgctagggctgaatttgatcgttagggtaagattagttttattgctttttccttatatgcacaatttcttgataatgttctaacgcccttatttgtctgtctcttaaagcagctaagctaatggatgagcttttggactcccttactcagacctacagtcccgacccggccctgcctccggcacaagatttggtggtgacttccaggaaaccctcttctagcttccccttgagccaaatcgttttaattgatgaggacggcgaggtagaagaggaagaggagggcaagattctcacccctctagactagaagggtaagggcaaaatggtggagaccgagacatctaagaagcctaggagagccgatactcacgctcccagttcagattcagggatcccatctgaggcggaggagtacactgttcctctaagtattgtcctaacccccgttcctgccgacgaggaaagatagcaactccaaattgccaagcacaactatgctatggtagaatatacgaaggggaacgcggaggtggaggctttgaaaaaggtcctaagggaggcccaggacaatttctctcgcagcgagtactccgagaacgcctgggatttaaatatggatcctttgacagacttgttcaaccgctttattggacctactcttgctccttttgcatcaaaactaactagccacttcatctccaacctgccctaacttccggcgaagagatacgcagcctgtgcttccacaaactcggtctaccagatccaggacataagt

SEQ ID NO: 59595 - DNA, 1289 bp, Cannabis sativa
ttttataattgcttttacttattatttatttattttactttttccttaataggatagattagtgatgtaaacgacacgagctcaagaggcatgagcatgacctaatatgaaaaaaatatgggcttgagtacaacacgacacaacgtgattaaatatagacttaggcacgacacaacacgaaaaaaaaatagtcttaagcaagacacgatacgtgagcacgaactgactaactcaaaaacacaacttgttaaaaattcttataataataatactacatatgtatttacaaatgaatatttaaattataattagtcgaattaattattttatatggttttttttttttttttgaataataaaagctttattaaatcaaatctcccaagacaatggaaacataacaagtgggtaaagaatccccactaagaatacgatcagcctcaaaaagagaagcccgcgccaaagcatgcacaagaccattaacagaccgtttaacaaacttacaatcaacatcaaataaagaggttaacaaccctctacaatcctgtaaaacaaacccataaggagaaactaaagtttataattatatggttatgtgttaggtattatagaaaaattatacaaaaacaatttaaactataaaacatgtttataattttgtgattaacttattaattataaaaaaaattagtgaaaaagtgaagtttgaattcgagcacatattagaaaatgaactaacacatgtacgaaaaacaagtcggcttaagtaaagtatgatacgagtccaaacatagtacgaaaatataggtttagcgagacttaccctttaaaatattgatacaacacgatctatatttttttatgggtcaacatgacacaatctatattattactagatttccaaaatataagtggacccgacctaatacactcatatttacaagtatggtatagtcgatgataactatagcaatcatatgttatttaattcattcattaaattgttgtattcacatttcatttccttttcaaattggaattaaaaaatgataaacaaaaaataatgtgtaatagataacttaaaatttaaaatcataataatacaacacataaattaatctgccgattcgataagatttagagtattctttctatataataaaccatcataataaacttgcaaaaatatccaaacaagaataagtcattatccacctttgttttttctttgagagtttcttttggtatacatattagatctatagtattatattaaactatattttata

SEQ ID NO: 59596 - DNA, 1349 bp, Cannabis sativa
ttgcgactacggtatatacgtcggttttttaaaccgacgtaaattctttaaatgacacttaaaaagcgacgagaattatactttttgtagtagtgcgcggtcttctcactgtgccttttccaaacggcgtctcaagcggcgactttccatttcataagttctttctcccacagattgggcacccccacagttgagctcttcatcccccgcctcaggattttgtccactcccacgctgagttctcctcaagcgtgttgtcctcgtactaggaccaacgtcgggttgagttctctggggacgtgtggtccgagcactaggaccatccttaggttgggcctcctagaacgggtagtccttctggacggcgaattagttgatcttcatgtggggtgttaatattctctgggttttttagccataaaagagaaggttttttttttctaaaagaggggaaggctttttctgagtttttttagaggctctcaatgaaagcaccaaattgttaacatagattttcgttaaccaaatttgagcctcacgaatatgattcaacgcagaaataaaaataaagttgtagaaaaataaaataagaacaccaggttttttacgtgattttgcagttaaaatcttgcatagtccacgagtcaatcttattcagatttctgagtatgttcttttttcagggcctctcgcgtaagagtttcttttccgtccctttttcttgagattgtctcccactatttataattgcatagtgacagttaattacaaggttgaccaaaatgtaattacagttatcatcccttaaatcgtgggatctgattacatattacaaaatgtaaacgtggtgcatgattttaaaagtcatacagctgtgattttcccgcttttactaggtcagaaatatcgtgtattaaacacgtctttaattgttgattctggagatgtctcgataaaaacttgattgtagtgatcccaatggcgagctggaaccattcttctatccgagatcgacaacatacggcgatcgtggatataaggaaatctatagacttgccagggttgtgagtctaacttccgttagctggataaaactataggaagttttctcgtagcgagatggctgtctcgtattattgtactccgagctggttcgacatttatacttagtctgcttgtttgtgagctgaggtatgtgttattcttctctggtacctcgctattctttttttagccacatatgatttctcattaatactctaagtaccagttcgtacattgattcctcgcctaagactttacagtcagtgggttgcaaatatactctagtacttacgcaattaatgagt

SEQ ID NO: 59597 - DNA, 716 bp, Cannabis sativa
tatttaccctatattatataataagttaaattttaatatatactaaacattatatatttaggtacctaaaagttaacactatacatagttttttataataaaaatattgcataacattcaattcaatataatacaatataataccgtacgatataatatggtgtaccaatcaaactctaattactacataatgtcccatataacaaggtctaactaatatgggccggacaatatgtaatgggtgaaatttgtaataaactaaaactaaatggaccaattagcaaagtaggaaagaaaccaattttactatcaccaaacttgaatgctcttatagtgaaagtaaaataaaaactaaatcatacatgaacctagatatgtagaataaaatagatcgaaatatttgtttattaaatctcactataattagaatatttattattaattgaaatagttttttcaaaaacttaattgaaatataactaattattatattttataaattaaatcaaataaactctctgaattgttacccataaaagggactcataatatttaacactaaaataaaatgttgtcttataattagttaacgattctttataatatttattaaaataaaataactcaaactcaatattaaattataccaataagtactatgagtgtccttcaatatttctttaaaaattatcctatacatcaaatcaaataaaaca

SEQ ID NO: 59598 - DNA, 2208 bp, Cannabis sativa
  modified_base (790)..(791): a, c, t, g, unknown or other
  modified_base (1048)..(1050): a, c, t, g, unknown or other
attcttggtcgaggtgcaaaatttattttgggataatccatacttattcaagtattgtcccgaccagattatgtgaaaatgcattcccaatgatgaggtgtctagtgtgctaaatttttgccacaatgatgcttgtggtggtcacttttctgtgaagaaaaccaccgcaaaaatcttacaatgcggtctttactagcccactttgtttaaagacaccaatgatttttgtcgttcttgtgtaaggtgccaaaggttaggctccttgtcccgtcggcacatgatgcccttgaacccgatccttgtcatagaaatatttgattattgggggatagactctacaggaccatttccgccatcttttcgttacctttagatccttcttgctgtggattatgtttcaaaatgggtcgaggcagtaccatgtcgaaataatgataacgctacagtggtgaaatttttaaaagaaaatgtgttgtctaggtttggtacccctcgcgttatcattagtgatcgaggcactcatttttgcaaccgatcttttgaagttgttatgcacaagtacggtgtacttcacaaagttgcaaatgcctatcatccacaaaccaatggtcaagcccagctagctaatagggagatcaaaaacattcttgaaaagatggtaaatcccgaccgcaaagattggtcaacacgtcttcaagacgcactttgggcataccacacagcttacaaatcccctcttgggatgtcttcctatcggcttgtctatggaaaagcatgtcatttacctgtnnaactttagcacaaagcttattgggttatcaaggccctgaacttcgatttaagtgaggtaggtatgaatcgaaaactccaattgtctgaaattgaggagttgagaaatgatgcttacgataattctaggatctataaagaaaagttgaaagttgctcacgataaacagatcctgagaaaacattttgagccgaatcaaaaagtacatttgtacgattctcgtttgcatctccaccctggtaagttgagatcaaggtgnnntggtccatatgtggtgaaacaagtattccccaacggttctgttgaggtcgaggacccaaccgatgggagaacttttcgagtcaatggccagagactgaaacattacattgagagtatgaactttgttgaagaggtccttcttgaggacccagattatacactctgaatgtttgtttttcctatctatatgctataatattttattttatctttatgtgtttattttattttccattttttatgttgttttgagttgccattttcaggttatctccgctctcgccccatgcatatcgtcaatcaggtgtactcttttccatatctttttcatttcatattttgtgacattgaggacactgtctaattttgagttgggggtagtgagctctgttgagcattcatttggaaaattttaattgtcttgttgaatttttaagtcaatttttttcaaaattttctgagcatgattgtaaaatacggtttgagtcaaatttttgctatgttttgttaccaagttgtgattttcagagttattttatgcactttccaaacttgtgaaaaaattgttgttaacacatatagttaagaaaaattttgagtgtaaagtttttcattttttggtgagttatgagagttgagaaaacaacttttagaacttttattggtcatttgagttggcaaaattgaacttttagaattaaggccaagtctaccaccctcttatacagagtgtcatgggatgtggtaattttcaagtctcagctgattgtagcattcagtcctctaacgtacttttgttttctggtaaaatcggtaggcaccaaatcaccagtaaatttagataaccggtcaaattccatagtatattcagccaccgacatcttcccttgagtcaacttcacaaagtcttcctggtgtgaagtccgtacaaccacattatagaacttttcctcaaaagtttcttaaactcatcccatgtcatcacactgacatcccgggtttgattcactatgtcccaccagacgagggcatgatcttgaaacataatagccgcacaatttaccctctcggttcccgtcacccccatattatcgaggatatgggtaacagtgctcatccactgatcgaccttaataatgtcgatacctcccagaaaaa

SEQ ID NO: 59599 - DNA, 687 bp, Cannabis sativa
actttgtcacgtaaataaacgcatcatcaagaacatgaatagtttaggcctaattcctaaattatctttaaatgactttgaaaaatacaaattttgtagccaagcccagattactaaagcaccacataaatctgtgatagaaaaggaaactgagtctctacatttaatccattctgatatttatgaacttgatgaaacttttactagaaatagtaaacactactttatcactcttattgatgattgttctgactttacctatgtgtatttaataaaaaataaaagtaaagctcttaatatgtttaagatatttgtggctgaaattgaaaatcaacttagtataaagatcaagaagtttcgtagcgatagaagcactaaatatgattccactatttttgttgagttttataactcatgtggaatcatacacgataagacaacaccttatttacctaaaatgaatggcaaagttgagaactcttactgaatctgttgtcgctattttgttgaattcgggtgctgcttctcattgctattacttaaattttattaatagagttcctaatctaaaagcaaaatttctccatatgaaagtttgaaaaataaacaacccaatatctcatattttaaaacttggggttgtttggcatatgttagaatttatttttattggatatgctattaata

SEQ ID NO: 59600 - DNA, 512 bp, Cannabis sativa
tgctaggggtggtggaggaggatcgtgattgtctcttgatgttctggtgtcttgcctaggtggacttccgccatcagatgtatcaaaccctttctaagattgagtcttcgaggcctgcctccttgaggcagccaattgcaggaccttctcttttgtctccatcctcaccttcttattagcaccaccattggatgaaccatctcgcttcctgttgatcacgactggcccatggtaatttgagctatctcatccagagttctccataggaacctgcctcaaaggttccacgaccaagaaaggttcggttaggtcgatgatggaactagacgtggctttcatacccagagccttagaagtagcttttggattagaagctaaagatgctagctactgagatcagctcctaatagcctagttcttctttcctttatctctctcaccttaggtgatttcctgaaccttgttagaccgggatttgatattgcccaggaacctattcagcagccccattt

SEQ ID NO: 59601 - DNA, 1265 bp, Cannabis sativa
aaaaaaaaaaaaaaaagtgataattttttaaacgtgatatatctatttttgggtgatgaaaaattgcaatacttactagtttattataaatttgatgtcttttttttataactttcaaaaatctcaatatcaccaacaccacataagcatccaataacataaagatattgaaatattataaaaatgaatagttaaataatcttttttaagtatgaataaaagttaataactgaataaatatatgagagtattgtgttatcattaacacataaatcaatcaactttggcgttataatttaaaactcattgatcgagatgtagtctctccactgaagttataactaaaaataaaattttataatcatttgaaagtggtctgtactcacttgaggttgccacacttttcaaattttgaagacgaaccttcattcaatagatacattgagtatttaataatcgataaattgataagaaaaataatagaataaaaaatatgaataaaaataataatcaacttctcattaataaaaatcatatcaaaatttattaattcttcattcttcttagtaataagactctcacattctacaaactctaagtaaaaaaacgaacactgagaagagataattaaaattaagaaaagtagtaaattgaattatgaaattaagaggaatagactaagatatatacagagtttagtaattgaattaaaaaaagaaaaaaaaaaaaaaaaagataattttttaaatgtgatatatctattattgggtaataatctttcaaaaaaaattatttaaaaaaacgcaatatatataagtgatagataaaaaaaaaaaagtaacaaattttttattattattttttaaaaagattgtggtatgtatatatactagctaggttaatgtcacgtgcaatgcacgtataataagttttttcttaattaagtttaattaggtaattttaactgcaatacatgtatgtttaattatagatttttttttaatttttgaaatgaggtttgaaattatgatctttaaaatttttttagctattgcggttatattggtgtgccactgtgccctttagatgtgattatagatatcgtggtgaattattgtctgcctaattgagtggaattgtctcttagtttaattcaaaattaaatcaatgatgttaaaaatatctataatattttacgtattttaaattttaaattaaaatttctttatatagaatatctacataatttttatttttattttaat

SEQ ID NO: 59602 - DNA, 869 bp, Cannabis sativa
  modified_base (795)..(795): a, c, t, g, unknown or other
cccaagcaagagaggatgccaataaaggtaaccctaccactacaccaaacagcacgtggtgggaccattattattagggtttggatagttttgtcgaccaaaatggttaatggtcacatgcttagttcagatactgttatattagccacaaacttgatttagtatgaatgtttatttaactaactaaagtaaattgaaattgaatttattgatgttacatacattagttgtaagaatcatcttgtacatattatcaaaatttattattaaatattattatttatatatgcatgtatttttttatttgaactctcaaattgctctatatatattaatatatactactaaaaaagttaaacaatacaaaatagaattatagaagggacacatttttaataaatattgctattataggaattttaatttgctacacgcaataaaattcaagaggaaaataaattttatagatcaatataagagaaaataaattatttgtagtccttaatattttttttatcaacaaaaaaaattcattaatcaaccatcaaaactatagaacctccaaacacaaaacaacagccacaacgaccataaaaccctcactctctacctatcatttaataagggtgcaagtaaattttgtctaaagaccatctttagtaattaatattttaatcgcaataaaaaaaatttgtgactaaaagtcacaacaaaaatattacttatgactaaacatagtacagtatttagctacaagttgttactaatttagttttagtcacaacaagtattgtnactaaaaacatatttagtcacaatgaattgtgatttttgttacatacttttagccacgaactttttagtcacaa

SEQ ID NO: 59603 - DNA, 6087 bp, Cannabis sativa
agaagaagaaagatagagagaaagaagctgaaagagaatgaagtgattcattaattaacaaagtcacgaagcaagacttatatacaatcttacactcaagcaagaactaactgaaaatatttacaagttagttagaaactaacagttggacaattaacaaaccaactaactcataacaaacattaactaactcaagcaactaattcactctaacaggcccccttaaacttacaattggtactattgtcaattgtaagtgtgtttctaaacagagcaaatcgagagctggagatagccttagttaaaccatcagccacttgatcaatggcaggcacatgcttgacttccaactacttttgctgaaccttttctcaaacaaaatagagatccaactctatatatttagttctagcatgtaaattcgaattgagtgtaagcataatcgtgttgaagttgtcgcacaaaaccactagaagtttagaaagtttgatgtgcaactctgaaaatagggaatgtagccaagcaatctcagcaacagtgattgctaggcttctgtattttgcttcagtgctggacctggatacaatgtgttatttcttgcattgctaagattgcctcctaggtaaagtacaaaaccaaaagttgatcttttgtcattagggttagatgcctaatcagcatcacagaacccagtgagctcaaacctggtaggtctggtgagatgcaatccatagtcttaagtgcctccaatataccttaagatttatttggctacaatccaatgagcttgtaatggattctgcataaatttgcataccttgttgacattgtatgctatctctagtctagtgatagtgacatactggagggcaccaaccacagacctgtaaagctgaggatattcaacagggtcactaccatatacagagagtttgaggccacttgtcgtagatgtagaggaggacttggcaccctgcattttggccttgcataacatatccttggcatacatagtctgacacagatgcatactcaattccaaagaagtagttgagtttgccaagatccttgagagagaattgctgattgagaacagtaattatgtgggaaatgtgctcttggttgctgcctgtaattatgatatcatttacatacactagaattagtgttgtggatgaactggtgtgctgaatgaataatgagtgatcaacttttgatgaagtgaaaccaagagactagaggcattgttgcagtttctcaaaccaggctctaggagcctatttcaaccatataaagctttgtgaagctttcataccaaatgtggtgcaaatttgtcttcaaaaccaagaggttggatcatatagacttcctcttgtaaatctccatgaagaaatgtattatccacatctaattgtcttagtgtccaatcttgagcaagggccaatgtaaggacaactctaatggtaactggttttatcacaggactgaaagtctctgtgaagttaaaactaggttgtttgtggaattcttttgctaccaatcgagctttgaacttgttaactgagccatttgagttttctttgatcttgtacacccacttgcactctagtggtgtcctcctttcaggtaatggaaccaaggtataagtgtcattcctttttaaggcaactatttctatacctatagcattgttctagtgtttctattgtaaagcttctttcaatgtaagaggttccctactcaccatgtaagtttttagcttgaaaatactaaatttggatctggtattcatgtgatgagtgttactagagctgggaataggtacaccaggtactctgttggttgtagctggctgagagtcaataatgacctctgatgagggagcatacataggaatctcatcttgaaccacattcttagtagggacactgagaataggtgtttgctgactagtgccaatgttttgctcagtgacaacattaggaggtaatgtgaagtgggaggtagggattcaggcttgagtggggatgtttaaggagtggcaatgagagatgcaggcctggttggaaggttgtttgtgaggtcagggggaggggtaggatagctaaaactagattgggaggaagaagcataatctgtggtgactgtactagattgtagaaaattggttggacagtaagatttgttgtgagcaccagggatatgaccagatgtaaagcaagtatctggtgtggagatagggatggtagagacaataggttgagtatggggaaaggtatgttcatcatacacatatcccttgagatgtataatctgacagaggcatcaaggcatttataacctttgtggttaagactatagccaacaaatgtgcaagaagtagacctaacctcaagtttgtgcttattgtagggtctgatattgggaaaataggtgcaactaaagattttgagagtaaggtaatctggttttatgtggaacagatactctataggggatttgttgtcaaggacaggggtaggtaacctattgtgaaggtaaacaatagttctaaaggccttatcccaaaatttaagaggcatggatgcatgagcaagggcaccagtaattgatcgtgaacttcccaagtggagtatgcaggattgacattttgagcttcacaatcggcattagtcaagaattgaggtggagctgagttttcttggatgtaattagtcattagtcaattcccttgtatggtagcaagaacttgctgtctccatagtaagtaattgtgatcattcaatttgataagcagagtatgattgaagaatacaggaccttgatcatcaccaccacgatttcttggattcagctagtttgcattccatggattcgaggctgagatgttatcgatttgagcttgagcattagatccattgccaggttgagcttggaagccattaccagagttggtgacgacattggccattaatggcggaaaggagctctgataccatattagatcttcttgacattgttgaatcagagaaaataaaccagaaacagtaaagagaaagaagaagaaagataaaaaagaaagaagctgaaagagaatgaagtgattcattaactaacaaagtcacgaagcaagacttatatacaatcttacactcaagtcagaattaactgaaaactgttacaagttaattaaaaactaacatctaaacaattaactaaccaactaactcataacaaacattaactaactcaagcaactaattcactctaacaagtagaaacggaaataacagaaatgtaatttaaagtatttaattcatcgaaaaaaaaaatataatatttaagtgtataaaacaaaaatataaaatatttataccgtaaatatcactaactcaatatttttatatatacttttacctttgaatcaacttattttctacatatataattcttaaattaaaatataaatataaagttgggcatgaaaaaagaaagtcatgaaagtcagtgatgattatggtttccgagatcatccaattccaaacctcctttgcgtcaccgttgtctttttaaattattatttaattttttgttctttgatatggaattgtgttgtgtcttcttctttcctggtattttgcttttactatttttttactatataatatatttatcacattcaaagcttacgaaagaatatatggcctttgcaatattgcataggaatacaagttgattacggagtctcattcattattatgtggtttaacatcaaaaactactacaaatatacttgcgtatatataacttagatagatatttataattacataacgcatggtatatgcacatatatagggatatgattttgtcccgtactttcatattccgtggtacattaaatgggtatcagggtacattagattagtgtcagtgtacgttactattttttaaccctaattacccctaaatcaattttagccctcagaccaaataattcactcgctgctgtacattatggaatacattctgtgaaagtataattacaagaaaaaatcatgtccctatatatatattgttgaaacggaaaccaataataatcattatcaaactaaatattttaaccaatattctactaaatatgatctcttttacgtgaggaaaagccaaactagcacagttgaacttaaaccaaatttacttaaattaacatacgtatatagttgatttttaacttgggatttttgtacaaaattgtacgtgcaagggtgattttcccattgaactactgatttgctttcaaatgttttgaattgaaaatagatagatttctatagttatatttctatatattctaattaaatcttcaatgttttgaatttgtatcacttgagtcttcataattttctcttattatcaaaagtcacgccaccctcccacgtataattaaagatactttcaggttctttttttatgaagttttttcaggtctttttgttctgtcttcatactatatatctcttaatttcctcccttattttgacaattaataacatgtgtttaccaaaatgagttgaatattgtttttctatctgatatattgttttggtcatgattttatttttcaataatctccctgttattcaatcactttatcaatatatataatatatttatattcatcatttaaaattaggagtaactactacaaattaacttatttctttttgatatgtgtaattaatttattttctcaatttaattataaagtgtatctacatatttattttgacacctcttaaactaaataattaaagactcatgcaaagggggaaaatgtggttaacactactatatataaaatttaaatacccttgataagtttttattatgattattgatcctatataattatatacatatactataaaaagcatcatggagtccaaatcataatatacatatatgtaatgactaggtgtgtgatattgtcttgataaatcaaaataaaagagactaatttaaggaactttcccttcataagaagaatccaaagcctaattataaagttatgatatagaagctctgtcaaaaacttattataaacatctttgggttataggcccatgatgaagtgcatacctttattccttttctaaatgcaccaattattgatatattctctaaatatggttcacatgcatgtgacatgtacatttcactctctttatattagattattaatacttattctatctctttttcttttttccatctctagaattgctatttacaatcaaacaaagcaataatggagagtgctcatagaaatttaattggtacatagataaagaaaacattataatatttgttttaatttcaaccctttcatttttcttttcaatacttgtcttcacgttttgttttgacgcctatcatgtgagctagcttttcgtgggtcgcttgcctatcaacaactagaggtcttcgctgtctttagatatggtcactttttaatatatatatatatataatgtatgtatacatataaatttataagggtcaaatgtggtgcaactgactgcataccaaacacatatgaatcgttctatatttagagctattgatgaccactattggcgaccagcttagaaatttggaaacatgcatatatatgtaccctaaaattaaaatacacaatacacatcataatacttatacgatcacttcaaatgacgtattaatatatcatcattacatagtgtgcctaaaatttctttttacacttttacaaactatgttgtatttttttatagattttttttttaaaaatttttatgaaaatttatgagagtaacatgaaaataacgtttaaacagtataatatatattaagctcaaatatttcggcttatttttctttgcttaataaagaagaccaagccaaatggtagaaagctgggtctggtccaacccgaagtagcggagattattggtattgttgaccgagattttcggcaactgttaaaatatgattatactaaagagctgtaagaaagtgagatgaggattttttacgtggttgggg

SEQ ID NO: 59604 - DNA, 693 bp, Cannabis sativa
tgcatggttcacatgattacttttatgattatatgtttaatatataaattctattaaatcctgaacaaatagttattcatgattatagtattttctacagagtgaaaaatattcatgattatatgcttcaaactatttagtcccacaatttatcagtgcactagatttacagtgacgtgataatcaatgatgtgctttacttacacttctataagtggaatatactttctagggcattagcaaagttaactagtattagatgtattggtcatacatcggactggaccaatattgtccggcagattataaacagctacgcaagtgcacgtaatcaagtattactcacacaggtgaggttaatcccacagagaattgaactaaataccactaaattagacttatctttttatttggtaaataataattttgatgaaaataaaaataaggaataataatataaaaataagcaataaaagtgtttactcaaggatgagaaattaggaaatagaatcatgttgcttcaattactcaattgttaatactaattactattcctctttcttaaagtgaatgacagattataaaaattaaacttaactcttttaagatcttttaggccctaaatcacatgttatctaatcctccctgagatagaataacatataattcgcattgaacaataatctaaaagtc

SEQ ID NO: 59605 - DNA, 952 bp, Cannabis sativa
acatggcatgcctagaaaaggaatttaagaggttttttgattttacaataaatatccaagttaaaggcagagtacagcattcacatttctcacatgtaataaataattcgttcgtgtagtttaaaagttgaataagaagatccaaatcattgataccacatattcacaaaaaaaaaaaagtgtgcaaaaacaagcttaattaaagaagttttcttctttctttttatgattgtcgtactttgcataacataataaattaacattatttacataccctattcctcgagatccaccggtaaccagagcggtttttccatcaagattccacctcatttcatgattggtataattctttggttcagccatattgttattgtttatcttccgactttacttgcctattatgcataatgcttgtcttatttatagctatagtttgaagcacagtaataataatggctactgtagtagtgatttgtcctctgaggtggttgagacgtccactctataacttaatttctctctagagtctttatgacactgtacaaaagaagattcttgcttatatgatcaattatggtgaccactataatacaaaacaaaatggcattttttctcatatagctttattttaataaaaatttacctttttgctctcatataaaaaattaaacaaaaaacgaaaacttaatttaaaaaattaattaggtctcttcaataaccttcccaaattagctttttcaaatatttgagatatgaaatgataactcactcaaacaattcaagatctattcaataattaataggaaaaagttttattattattcaaaatgtaataaatgagaatagaaatagtgtttatataggggaatagttatccaaccttagaatacacaccaaacttaactaagaataactttatccttacacccaaacataaaatatttattta

SEQ ID NO: 59606 - DNA, 1975 bp, Cannabis sativa
  modified_base (619)..(619): a, c, t, g, unknown or other
cccagcaacctaacacaaccgaaatgaaacccaaccagaaagagaactaccattaattctgacgacttcacctgagaagacgatcagaatcaattaaatcatggactatttcgaattcatgaaaaaaagtccatgagaactactatgaaactaaaattccaccaaaaatctaatttaatctgtgtaaaactaatgtcttgacttcaattttcagatctatgaaatgcaaatctcaaaaaattgagttggagttcccaaacaatccaactaaagtataatccaaaaaaaaattacatcaatattatagttaaatgtttatcttggtgcatgtttttgttttctaaatttcaaatttattcatattaaatcatgaataaacatgtagatagagttacgtacgtagaaacactgttctgatttgtaatgtttcataacagttgcattacagttgcataaatatttttttaacagttgtttctccacatattactattaaggtacaactaattatcgattagtgacaaaaaaatactgacaaatagtttcttatagatacacattcacatttaacatttctaattgcacgttagttgaataatggttttgctactataatatnataaaattataaaaacatggctcagaattatcaaatacgcgatctgaaagttgtaatatttgtttgtattaaatatatgaaattattagtttttttgtggttttatattagttggctcgcaacagttataattgttgtattataatttcatcacagtcgtcttaaagttaacttcttctttctcttttggccgtcgaagttgaaatttttttcaggcaaagacacatttgacctcttcttcactagacgacgacgacaactacctttagccatggggggagtaaaattggagtcatcatcgtcgatgactgagcgtttccctttaaccttgttagcaactactttatgacccattttaaagcttttttggcaatggaaatggagaagcagagaaacagagaatgaccattatatacacgaaatgaaagatataaaaaaaatgaatgaaaatagtggtagttggatgaagaagttggagatggatatggttgaatgggttttgatcgtggattaatcgtgcggaagaatgtgattttttgaataaaaaaaagaaatgaaaagaaaagctgaacactaacttagaaattgaaaataaaaataaaaataataaaaaatggaaaaagctgtgtaaagtagtttgataattaaaagcaaggaaaaatattgtccaaaggtatttttgtaaataacatactattttgtatttttcatgtaaatatttcaaagtttattccttgttttgatggttggagaaactatttagacgacgaattaaggcttggtgaggttggatcatttggatggtactgaatctactgattccctacgtgacaatatgatttgaaaattttattgactaggctagtcctcccctgaaatgtagatatatcctcaaactcctaaaataggctatataaactatacaccgattccaaagatgtccagaaaatatgaggtcctcttgaggaaaaactcaagaacaaagaagatggtatctaaaagaaaagaaacatttaatttcacattatttcgatttccaatctcttcgtcaaaaacatcttttaattgtaagttaatgaaaatctttgaaacacattgaagcatgattatgaaaaaaaaactaggaatgactattcgaagataacaatgactatgtctagtccagtattttattcaatatgataacataacgtgataatgatatgataattttcttttcagttggtggggctccaacgaggcttgaagatagcaacgagttcttctttagacggcgatacttccttgaccacaggatgagtaccaaagtcatggctccatttacagagctttggaaactttgcctctgtcaatatc

SEQ ID NO: 59607 - DNA, 2042 bp, Cannabis sativa
  modified_base (1702)..(1712): a, c, t, g, unknown or other
tagtaaaatataaaatatatgatttttttttacatgaatttatggtaaattattatttttaattaaatttagattttaatatatttgtgacacaaaattttcaatcaatcattccatcaattattgtagtatttttttttatctaagttggtaatttttaatattatttattaaataaaaaatatttaaatttcaatacaacaacaatattattgcaccttatattatattaattaaacaccactaatacaccataacaatactcatcacatatacataaaaataaaaataaaaattattctccaactaaaaaaattccaacaacttaatacttggccatataatatttatatataataaaaataaaaagatatttattatgaatattaataataataataattatattatatgatatgatattgggtcccattatattctagacagtcggtgatgaggccatgtgagttagtacataatatcccaaaattgtgttccccataataaataaattaattattttttgagattttatcacctattttatctatgtacctttgctttgtactcttaaatctaattctattatttattattattataaaaataattaaaattatttgtctttataaaaaaaaaagaaaaaatagaaggttttatgaaaaaataaataaatatttgaataatttcaaaatatttatataatttgaaaatggctaaattgcggcataaatacctaatgtttccgattttatacacttaaatacctaatgcttatttttggtggcaaaaatactcaatgttacaattctcttacaccgttactaccacttccgttattaactcataaatatagacacgtggaagactcaaatacattacatttatttattttgttttaaaatttaatattcttaatataaaaaactaaatattatttgtttttttaaaaaaatagagagatacaatactaaattaccatagctgagtgaactagtatagtatatggaacatgattatcgaattgaagtgtaaatattatgtgaaaattgttgataagaacacgtttttttttttttttttaaaacaagtagcatttagtttatgatattaaatatattaaattttaaaataaaataaaaataaatgtaatgcatctgaacccttcacgtgtccatatttatgagttaacggattagtggtaacggtgtaagagaattgtaacattagatatttttgccaccaaaaataaacattaagtatttaagtgtataaaatcggaaacattaggtatttataccgcaatttaccctttgaaaataactatatttaatcggtaaaaataaatttattaatctaccaaaacacttctcaagatgtgttttgaaaagttattgttactgatagaagataattatttaatttgacgtgtttgtctaattatataattatataatgattatataattaaagatgattgaaagtcttaattctccaatactcatgtaagaatttgatgtcattactaaaaaaaattcattatatatattagctactaaaatgtatatttttctatttaatttttaactattttgtgagataattattgtcttatatttaaaaacatattgcattttaacatatagtataattattatgttagaaaaaattaataataaacccaagatcaatttgtatatannnnnnnnnnnaataataatatataataattaagtatgcgtatctgattgattcatagcaattattgattaatccatagcaattacctcaattcaatagtgcaatactatcaactaagtcttccactgttgttttaattgttctgtttcgttgttttacgattgttttataaaaaaataatattcttgtaaaaattctgtgtgacagtaaaattataaactttactcgatatctaatattttttagggtaaataccattttggaccctctgttttacaaaatttaccaattggaccatgtgttttgttaaatgacaaaatagactatgtattttttaaaat

SEQ ID NO: 59608 - DNA, 1497 bp, Cannabis sativa
atttataattaatcacaacttttctacttttagtcataaattttgttgtgactaaaaaataaaaatttttgtagtggaatatacatctttcctatatatattatttaaggagttttgtgaaaaaaaaatgtaactgtataccttcatgtactataagagtattgttttagtttatttttattaaaatttaatatgtaatttattcttacatttaacttctaatgataaatataattaacccttctatcaactcaactattaaaacccatatacacccaaacgatagatacaaaatctattcttcaatatatgacacatcttcaaaaaagtacaataataagaataactcaataataagaacatttaattataaaccttgttaggactgataccatctatttcctcattattcgttttaggtgtaattaagaaaacaaatcacatttccaaaaagtttcatttcaatagagatagtgtccatccttatatactcaatatcctttttatatctaaacaatgcgagactttgattgtacatccaacaatccactcatcaaacaaatgaccacctcgtccccttaaatgattacaaatctaaacatgaatctctcgattctaacactcaagaaccccttgagtaagttagatgaatcccctcaccagctagaaagatcttcttgaataagttagatgaatcccttcactagtaaaattcgaaatccctccgtagcctcttcactagcaaaattcgaaatccgttcgaatcagatttaaacctcagacgactctaacaacaagttttatctttctttgtttgacaattcaatagattattctcatttttaaaccatgtgggactttaattgtacactcaataaatctcaataaatatatgtttactaaaatagggcgtacccaaatacgcagccatacaaagcgggttagaatcgggcgcctatatttatataaggataggatagatattatacacagaagcatgctttggaaaaaggctggctgtcgaaatatgttcatatatataatttaaaggaggttgacaatacatccatggacccaattgacatatatcgatatatatatatatatatatatatattgatatatatacagacacaactccttaaataatagcaaagaaaatttcatagaaaatgacatttcatgtgttcctattaagccagaccatgattttgccatgatatagataatatatattcttcttaataatattcacgtagacaaaatgagaaataatattacatgagaaagttgtagctataatataattaatatattttattatagagagagacctaccctttaattaaaaatatttatcttaaattaacatactatatattataaagtacaaaataaatcatcaaacaaacaaaagaagaagaagaaggaaacaaaaaagtgtgtaatggttatggttgtagtgatttaattatgtactttacaagttatccacta

SEQ ID NO: 59609 - DNA, 1418 bp, Cannabis sativa
  modified_base (1346)..(1372): a, c, t, g, unknown or other
ttccttgccaagtgagagaagaaacaccacaagttgcagcagagaggaaatctattcttgagaaatatcttcctttgagaacacgatatagtagagattcaggattttgaaataacctccaagcttgtttagccaaaagagcttgattgaagtggataaaattttggaaaccgagaccaccttccaattttgatttacaaagaaacttccattgtttccaatgaattttctttttgtccgaagtagagccccaccaaaagttagacatcaaactctcaatttcatgacaaaatttaacaggaagtttaaagcaactcatagcataagtgggaatagattgtatgacagccttgagaagaacctccttaccaccaactgagaaaatcttatcagtccatgcatttaacaacttccaaatgcgctccttaatttgattgaacaattgtttcttatctcgttcagaataagcaggaaggccaaggtatgactcatgacactcacaaatgggcatgccaagaatatttcgaaaggattgtttagaagcctcagaagtatttggtgaaaaagacataactgatttatcagtgttgagctgttgaccagaggctttgtgatatgtatccaagactcttttaattgcaccacaagatcgatcgtcagcttcacaaaacaacaaactgtcatcagcaaaaagtagatgtgatacagatggtgagtgcctagaaacagctaatccttttaaacatccaatggactcttcatattgcaacaatcgagacaagccttctgaacagattaaaaataagtaaggagataaaggatctccttgtctaaggcctcgttgaggtttcacattgcctgaaattgcaccattgataataaatgaaagctgagtagtttgtaaaaaattcaagataagggtgatccaacgaatactgaaccccatcttgcccattacggccgctataaaagaccactccactccatcaaatgccttactcatgtcgagtttgagagctgaaaaacctttcttgccccgtgtcttgtgttttaggtagtgaaccaactcaaaagctaccaagatgttatctgtaatgagtctattaggcaagaaagcactttgtgtctccgagattacatgtggaaggactgttttgagccgaataaccaaagacttggagatgagtttgtagtctttggaatgagagtaatcagtgttttgttgagagcttcaggacttcccccctcatttaggacataaaggacagtacgtaactaagtcaccaacaatatgccaattatgttggtaaaatagagcagacatgttagaatttattttaccaggnnnnnnnnnnnnnnnnnnnnnnnnnnntttaaacaccctaaatatgaactatctaaaacgataaattaaacac

SEQ ID NO: 59610 - DNA, 4016 bp, Cannabis sativa
aatacaaaagagataccaacaaaattatcataagaaatcaaagctctaatctgatttagcaaaccatcgatgtcacggcagccattctccttattttggattagatgaacagcttgaagacaatccgtttgaacactaaatctctgtaaccgttgctgaattccaacttgaattcctttctttatagccattagttccagctgcaagggtgggagttcttgctgcagcaccgtagcagcagccgacagcactacaccagccgcatctcgcaccacataccccagacccgaaagcatcccaccctgtttaaccccagcatcgacattgacagtcacctggtcccttgcaggaggaacccatcgtcgatcttcagaagaacgctggttacgttctctgcctgaatcaccccggacatcagcaagataattgccacaccactcaatcatctcctccggctttggatgataaccaccatgtaccacattgttcctcacattccaaatattccaagatactaacagaaaaaattccaacttctccctatcccattcaacagctattctcatcagcatagaaagattatcctcccccaatatcactttcaagtcatcatataaaccactcacccgccagtaccctttacttgccttgcattcccatagagcatgggcaacagattcctcaacatggctggagcatctactacaaacaacacttgaggcaattccacgcttggccaaattgacatttgctggcagccaattatgcgccactttccaaacaaaatgcttgaccttcggagggattttcaatcgccaaagcttcttccaccactgcacaatcgaatggtcatttgattgatgttgttcagtagtgagcgaagcagccatacggtatccactcttcacagaatactctccatttttgctataatgccaaagaattttgtcttcaaagtcccaatccgaacaagggatacctaagataagatcggcatcagtgggattaaatatcgaacgaataaaaccttcatcccattgcccatcagccatcttgagatccgtaacatagagatttgcaggaagcgaaggctgatcatacaccttaaatgtcacaggacgaggcaaccaagggtcctccaagacccgaacactttctccattacccacacgccatctatagccttttaaaattaattttttaccccaaacaagacttctccacacaaaagacgcattggctccacacccagcctctagaactcctttccgagggaagtaagaagctttcagaactcgactacacagcaattgtggaaatcgtaaacaacgccaaatttgcttggcaaggagagcttgattgaacattcccaaatcccgaaagcctaaccctcctttgtcctttggtcgacacaaataacgccatttacaccaatgaattttcttttccttatccgatgaaccccaccaaaacctcgaggccatacgatgaaggctagaaatagttttcttcggcaacttaaaacacgacatagtatacgtaggaattgcttgcacaatagctttgataagaacttcctttcccgccaccgaaaacatagaagtcttccatcctttcatctttgcccacaccttgttcttaatctcatcaaggaactctcttttatttcttcccacaaaagaaggcaaacccaagtatttgccatgattttccacctctcgaacccccaatatcccagccagcagagcccgcatctcagcagtgacattacgcccaaaacaagcttcggatttatgataattgaccaactgtccagaggcagccgtgtacttactcagtagctgttggaattgatggcaactatcaacattcgcatcaataaatatgagactatcatccgcgaaaaacaaatgagatatcgaaacaccttggcgaccaaatcgaatcccacttagccggcctgccctctcttcatattgaataagactagagaacgcttccgcacaaaagaggaacagaaagggcgagaggggatctccttgcctcaatccccgctctgggatcaattttcctttaatctccccattgatcaggaatgagaaactagtggatgacacacatcgcataatcttatccacccaagcctgagcaaaccccaacttactcataaccgattgtagaaacgaccactccacacggtcatatgctttcgccatatcaagtttaagagccattttttccccattctgaaaccgatttttccgcatacaatgcagactttcatatccgattatagcattgtcatggatgagccgattcttgatgaaagcactttgcgcatctgagataatcaaatccattactccactcagccgagttaccaagcactttgaaacaatcttataaataacattacacagactgatgggccggaattcttcaactttagtcggcttctcaactttcggaataagagcaattatagtttcattcagacactccaagttagccccacggttcagaaccttcaaacatatatcaatcacatccttcttcacagtagtccaaaacttttgataaaacagagctgggagtccatcactgcctggtgcttttgttggattcatatcttttactgccttcacaatttcctccactgtaaaatcttcaagaagcatctcattcatgtcatcagtgactttcggctgaaccacatttatcacctcattaaaaacatccgaaggtataacagaagtgcggaagatagaccgaaagtagtcttctacaagtcgttgaaccatacccgcctcttgatgccaaacacccatactatccatcaatcctttaatcgcgttcttctttcttcgagacgaggctttacgatgaaagtatttagtattggaatcaccccatttcagccataaggcccgactccgctgtcgccaatacatctcatctttttctaacacggcatttaactgtttctcaattttcttcacctccatccaagctcctggatccgaactggccgatagtgcattcaaagttgtcttcaattttttgaccctttgattaagtgctttcttctttttacgattccaactatcaagagctttacctacttgcccagttttacgcttaaaatccccacccgaaatcactacatcccattcactccactgcttttctactatctccttacattgatcctcctcacaccaagcttcttcaaagtgaaagcggcttgatttggctttcttacgttcccctgtgtcctcactagccaaagggatatcgactactaaggccttgtggtcagaagcccaccattgtaaaactttaacatccgccccctcaaaattcataagccattcttcattacatagacctctatccaagcgctccataaccatattggattcatgcccattacaccaagtaagatcagtcttactagaactaaaatccatcaaatgacagtcatcaatagcctctctaaactcctccatagccccagcacttcgcaccctacccccaactttctcagccaagctaacgatttcattgaaatcacccacacaaagccacgccccatgaacctcccttttaatcttccgtaacaaatcccacgaaaaatgcctttgcgatgcatcaggattaccataaaaacaagtgagagaccaaggaaggaaattattacctgcgaccgtagcaagaatatgtccaaccgagttcgagtccactctgagctttatctcctccttccacatcaatatgagacccccactcagccccactctatccaccgagaaaaaattatcaccaaactgtaaagttgcacttaatctttgagcttggtccttagtaagtttactttcagcaagaaagacaatactcggatcaaactcctgaatatgggattgaagagctctcaatgtccaaggattcccaattccttggacattccagcttaagagtttcattgctctcggcggccttgcacagcaaggctcgcc

SEQ ID NO: 59611 - DNA, 2877 bp, Cannabis sativa
aataaaagaagctttgagttggattgttcaccatccttgggaacacgttctgttggagacagatagtttggtctgcgtccaagctatccaaagtaaaatttctatgttttcccaatttggtcttcttgttcatgatgtgcgcaattttctttcatcctttccttatatttgttttgtgttttgttaaacgatctgcaaacaagttggctcattgtttggcaagagactcttgtttctcttcaggtcgtgtgcttcagttagaggactgttcttctgaaatgcgatccattattctgaacgataatattaattaatgaatgggtttattcaaaaaaaacaaaaaattcttaatatgagctcatgaaaaagagaagttctcttatcgccatgaaaaagtattgtttatttatttatttttattaagaaagtaaacaatcagaaattacgtattccacctaaacttgatcattttatttggagaactcttacagattgtttatctagtatctaccaaggtgtagttgtcaacaaaatatgtgcatgttgatagcttgtatcctgtgtgtcataggaaggcagaaactaaactattcttcacatctttgttacctgctcttttgcctgtgcttgttggagtaggtcaattgttagtgtgggtaccgtgactgccttggattttcaaggttggtttactggtggtgtgttgcaggctattcgtgtgtgtgaggagttggctatggtaacttagtggtttggaaggtccataatgaggtggctggaaggcaaaatcttcttctatagcaaaggctattctatcagttagagtggtttttaatcacagtaaactcaatgatcaatggactaaattggattttttttttaagggaaaatggagcttccattaattaaaggtccttcaaaagtaaggacaataaattaagagaaacagactacttactaatcatgcaatcaactttagaataaaagtccttagttaagaagtgggccactttatttgcagctcgctttataaaatgaactgaaacattacacaaatatgataaaatgagttttgattcgtgaattacaatgccgtatggagaatacatacgaacttcgctcttgataacatgtaccatattgacacggtcagtttctaccatcacatttgaccacccatgagattttatccaacttagggcctctttaatgcccgctgcctcagtaaattcaggattgacaacacctggtttagatgattggaatgcctcaataaaatctcctcaataaattagattttaatacgattaaaatagatgttgatggtgcaggatagtgataggaggtagtttgaagcattttttgtcaattgagttcgttgatggttttttagattaaggaagcgttgagttaaattaaatataagaattgacagcatgttaccattgaaactgaatgtttagtttttgttcaagcaattcatagtacagttcatatgtcattttttttagtcttttagtgcatgactgttaacatcttcaagttttattaaattttgttttgttaaacgttcaacgaacaaaaatgtacaattgtgttcgtgccctcttgttcatcatctgagcaatgctccattataatggctaaaactatttgattaataaatttccattttattaagacaaaattcaaaagctttattgtttccttaatccaattattaaataactgataatatatacatatatatatatgttacacatacaatttggtagatcatcaatgactaatgaagaacataatgatgttcttatttaataaaagaactataaaaaaaattggcaaagtaaatgtcaggaatatactacaataatacgtgactataaaaattatattaaaatggaaagatagaaatgtcctatataatgaacaaaaaattcctactttccatatctttacatagagaagagtgactggcttgaaaaaagagaatggtaaatactattttaaaccttgtgttttgtaaaaattacaaaatgaaccttttgttttactaatgttttactaaatgacaaataaatgacaaaataatgacaaaatgatgacaaaatgaatttaaaatgaattttatgaattttgtattattttgtattttttaaaattgtacaaataagatcctaaattaaatttttgtcaaaataaaacttaataatatctaatgtggagatgttatgacgaatctgattacattttatatgtctgtttgtgttagaaattatattaaggttagttatgttaaaaaataaaactgttgaaaattgagttcaatgtcttatttttactattttagaaaatataagatctattttgtcgtttaacaaaacagaaggtccaattagtaacttttcaaaacacaagattcaaaataatatttacctggagcgtaatcggccttttctccggcgtcctagtcgcgtgttccacacactatattaccataattgaaaaaaaaaaaaaaaaaaaaaaaccttatgacaggacagttaaaaaaaaaaaaaaaagtaaaaattggcgtgtaaaagttgttttgttattctttcgttaatatagtaatttatgcaaaaaatttaaaaagaaaaaaatagttaaaactaatgatctgactgatcttcatactatacactgaagatttattttagagacaagacacgaaccttatgtatgaactataagcatagtgtcttcagtttccgccttttttccattccaaatacctctccacaatgtccagtccacaacactccttcacaactggcatagtagcaggtacatccaattggaatatggagtcggatcctcccgggcttccccatgaat

SEQ ID NO: 59612 - DNA, 1190 bp, Cannabis sativa
tttaggaatatcataaaagttgtcaggtagtcctacaaatattagttattatttgtttaggaaattttttttaaacaaatataagcatagaaaattaaatttcccttttgagatagaaccccatattaattctcaatatatatataaataaaataattttcaaatataaaatttaacaattgttttttttttttccataatagggcctgcactaacatgaatatatatataggtattttgcgtctatattacaggtcatttggatataatactgaatgaacatcataaaagagaaatattatggtatatgtattgtcatcaaaatgaagatggtggatggggagtgcacgttgaaggaccaagcatgatgatgtgcacagttatgaactatctcgccatgcgccttctcggagaagggcctaacggcggtcttgaaaatgcatgtgcccgagctcgaaaatggattcttcaccatggcggagctactggatctgcctcttggggaaagacttggatggctgtaagtcataatatgatcccacttaattattttattttaaaataattatagaaaactgttaactatttataaaacgtcatatcatagtagtactttaatttggtatatacgacacattattgccatgcaaaaattgttaaaattttaatttttatgttatttatgttacactatatacattgttttttttatgatttattttatttctatagcattaatattaaaaaataataattgatattctataatttacatgtagatacttggtgtatatgattgggatggatgcaatccaataccaccagagttttggctatacccttccattttccgtccatgtaataatcactattatttcttttatgtcttccaataaataatttatacatatatatatatatgctttaataaatatttttattaattaaacgtgtgatattgcaaaacaataatatttttaattattaaattttaggttataagaatatcaaatttgatttttattattactgttaaatattgtaagatatatgatttattaaatatttatttttccaattatacgattattattattatatatccatgcaccttgttttgcaggcctgactctcggtataagtaggctaggccttgtttaggattcatcttaggggcccaacaaaaaaat

SEQ ID NO: 59613 - DNA, 1356 bp, Cannabis sativa
  modified_base (145)..(149): a, c, t, g, unknown or other
actagtgccattaacctctctaagaatccaatattgcattctagagccaagcatattgacataaggaaccatttccttagagaccatatctaaagaggtgatattatgctagactttgtgagcactgaattccaattagcggatnnnnncaccaagcctcttagtgatgagagatttagtttcattagaagagagttaggcatgacctacttgaattaatgaaatataaggtttgctagctataaaaatttcatttctctttacttacttatttatacatatttgttccaaatatgatatttacgagatttacacgcatagatgagaaatttattgatacttgacctatatgaactatacttgctgaaaactcaaaattataggtcattatgtggacttttggtgaactttggacttaatttcaaacaagtgaacaggtgaatttttgcatatttgactatcttgtgtgtctgtgtttgaacatgtcaaattgagtgtatttaatgcgcttataagttttctttaactgaaatatgcattgaacaaaattggttcgctacttattgattttataggtttttaggcctaaagagtgtttctcaccaaacactcttatttttcaacatttttggattccgtaagtttgtacacctcatatttcacttcattaaacgactggaaaaataatttttcaattttgttgcataaaactcattttcaataaggttctagttttcctagtaatttttggaaagcttaccgtaaatcgtcgttttcaacacatttttttttctttttcttttgttttggagcaaaattttgttttatcatatttgaggtattataaaagatttggggtcatttgggtcaaaaatatagctttttgggcatttttgaaaaatctagctggtttctacaccaaccgaaattcttgttgtctatgcacaaaacatccggaattccggatggcgcaagaactgaattctagggaattttttgtcttttcaaatgcaattttttaccacttaaaagccctaccaccgaatcttcaatccccattctaattttctagcctaatttaacatccccattctatttttctctctttttctcactttcacaccataaccttcatccctaccaacaacatacaaagttttgttcttgacattaatggcttcctcatccaatccctcctcaagagctagtaagaggttggctgatgcaatccaacaaagggaactaagggccaaagcaaggcaagaacctccattaatgttctataatgaagaggactaccaacgttatgttaacaatctctcctctaggaagattctcaacagtaaaatatgtgat

SEQ ID NO: 59614 - DNA, 1275 bp, Cannabis sativa
ttcataacaatactaattgtattacaaacaacgtactatgcagtacaatatacttttcttacgttttaatctaggttcatacattttggccaacccaagtggagaactacccccgataatctcagccctatgtcacaaaaacgataaaccaacaagtgtttatcccaaaatactgtttaatattcccataagacaatctagggttttctaccaaaccctgcagtataaatacactaaaataaaacttatattttggctctaaaacatacaacatattgtagagctcgtcgcaagcttcaaaacggtgtatagaatatccaaaacgaacacctgagtcaaaagttatgacaaaaatacgatttctgatcacctatgaatttctaaaaaaccattaaactcgaaaattcaaatttttgcactcaccgaaacactacaaaaacttaaaaacttatccaaatcactccaaacttcacagggcacatatttaccataaataattaccatccttacgtaacagaaataaaaatcgagcccttaaatggaaaatgccattaaagctcggactaagctttaaaagctcgaaattcgatttctaactcaaaatcacctcaaattcaacaagtaaacatataaactagtcccatagttaccaaagaacaattctacgaagtcataatctccataacctatttaaatcataaagcccctatataaaaccaatcgtttttagcttaaaacgtaattaaaccataccttaagcttttcctcttcaaggattttctatcctgctactactggagcttagatcgctaagtttcatattgaaaatcgaagaaaatggatatagagggagaaggttttatcgaaagagagagaacgagggttcattcgtttattcttttctgtttatatgtaaacttaatatatatataatcaaaacgaaacaatctgtttcgtttatatatatttgataataataataataatataatataatataatattattaataataatattaataaaaactttattattaatagttatcgtatgatttctcagccactaagaaatctctatatttaaggtatttggccaactttgagtatcctaaaataccccaatatttctaaaatcaacttattccaataatctcatcaatatttctaactaaagttgttgtaatatttttggtctccaatcgggtctctagggtcgccgaacctgaaaatctttttctttcacaaataactcatattatatccacgcatttca

SEQ ID NO: 59615 - DNA, 1017 bp, Cannabis sativa
acaaccttgatcaaaacttttttatccatcatgaaaaacaatttgaatttctagctattaagctttttccaaattttgtcctggacagagttgaacaagcttgctttgttatggcccgcaaataggggagacccaggtatgtctcatgacaaattactctgacaacttccaataaggctaccaatctttatctctcaagggtcgaaacattgggactgaagcacactgttgatttcacaaagttgaccagttactccgaagcttcaccataccaactcagaagttgcttgaatctcaagcaatacacttctgaagcatcaaaaaagaagacgttatcgtcagcaaacaagagatgagagatcatcggaccatttctcctataaggaaaaccaaatagtaaactatcgttacaatcgcgtttcaccaaaccagataaaccctctgcacaatgaaagaacaagtaaggaggcatggggtcctcttgtctaagaccacgatggggagtaatagaaccaatagcctccccattcaagagaatagagtattccactaaagagacgcaatcaaggacttttctaacccaatccacatgaaacccaagcttcaacgtgattctctcaagaaatttccattacactctatcataggctttggacatgtcaagtttaatttcatagaacccatcacccctctttttcttctttaaagcattaacactcaaaaccaatgagagtattatcaatgatcaaatgcctttggaagaacgcactttactcgagattatatggccaaggacttcccgcattcgaatagtcatagactttgtaataatttcataaaaaatattacaaagactaattgagcaaaaattaacagctcgaacatggttatcaactttaggaatcaaacaaataagagttttattaatacatttcaagcttgattccccattcatgaaagcaagtgtcactgcaacaatgtctgaaccacttcgtgccaattcttttgataaaaacc

SEQ ID NO: 59616 - DNA, 1250 bp, Cannabis sativa
aaaaaaaacaacaacaacaaaaaaggtttacattaagttttgcaattatgcattagagcataatactaaaaattgatgtaaatatattacaatctttttttttttttttttctgccaaatacaatacaatttttacacattacattggagatgttcttgctataataatataaaaattaaaattctaatcgaaattaataaatatatgtacattttaattacgaaaatgttaatggacacattaaggtgtcaaacaccacaaaaggtagcataccgttattagtgcatttttatatcaactcctgtaaattttaatttactaaattatttagaaaactggtacacatagatatggtattgagcaccttaaggtaccactttacaatacaacaaatcatttactaaaaaatatagtacgaagatcataataaataaagaaaaaataaaaagaaaatgataatagaactaataaagatatgtacatattaatcattacaatgttaaatggcacattaaggtgccaaacaccacaaaatatagcatattattattggtacatttcaatataagtttctacaaattttaatttaaaaaattgttaattaattattgtgtatgtgaatcagtatggtattgaacaccttaaggtgtcacataacaataatggcacaaaaaattatttacaaaaaaaagtattacaaagtgttaactgagattttcaacaactaattaattaaagttgtgcaaaatgattagaagagtttatgcaagtatttttacgtggttgggacattaatcagccttaatccacgagtcagtgctatttaatatagtggtgtttctttacaaggaatattttatactatttttttcgatccccctcttcgaatgtggttgggagtacttatagccttatgaagagaaccaaaaggtctctattgtcgcaagagttcctttggcttgcacaagttcctagatttgaatagtagggcatgcatgtctgcatagtaggttacataggtttttgctaggtgttaggtaagacaagcctttattcttccttgattaaggtgatagtttattatgtagctatcactaatcccctcggttagggtgtaattgtcgaagaatggatttaatgcgtgtgacatgtcttttcagatccatctacagacacttcctccatcccgcatttaatgctttcatatgattcatctccagagccttgagctcgatccaaaaggctttgc

SEQ ID NO: 59617 - DNA, 1306 bp, Cannabis sativa
  modified_base (26)..(28): a, c, t, g, unknown or other
tggaaaatatggtattattgaaagannnaataagtggttgaaaaagtggcaaaattataactagagattggcactttaagtgagcgactctggtgttatttttgccaatattttattctttttaaatccatataattcagccctaagccctagttgaaacactatagaaggaacatgatgctctcatctcatcctctagtcaacttgttcttcaccattcgaacccatagtgaaagagtgccatgcccacacatagctagtcaaatactcaaacatagtgagtaagacggtagtaaccaaacccaaaggagagtaagagatccaggttcagatcttgataatgctctgctacaaaaagtaattaagggctagagatcttaaacggaatgagtcattatatttcgctacaattaatgtgaggttttcttaacctttatgtgtttatttcatcattttagagatattcatatttaggacgttaatcaacatacttgttagtacatttagatcctggtaaaatattctcaacaactggcctccgagccattgtaatgatttgctttcatgtaatatgaatttaaaacgatgaatattgtttgtgttgttgatttggatgtgtttattttggtttatgtgttatttgatgaatgtatgtgaattacgaaatttttccatgaaaataattttatttttgttttgaaaatattttatttggattccttgtaaaaaattaagcaattttggtttttacgaaactcaattttgataaaaattagaaaagttatgaaagtttgaaaatcagggttcaatggtgtcgagtaggtgcatcgagtgcaccaggcactcggacaagaccctctcgtgcgcgcgcgtagggggacacagatgcttgtctgaaatcgtgtcacgcccgtgtcttcagacaccatggatgttgcgcgggcccaggaccctacaggtgccgaggaaactcggtgtgagaccctgcatctccttcaatccgcgcgcggacagggtgcgtgcagccctcctgggaaaccagccaccaaacccgaattttgtgggattttttcaattttttcaaattttcccaatttcaaaccctaaaaatcaaaataaaatattatttttaatacatttaaacttaaatatcaattttaaattaataatatttaattttgaatagattattattaattctttgatattttgatgtttaaatttaaaaattgattatttatttatttttttaatttgtggtcagatttgaaaattttgttaatttctttaatatttatatattatt

SEQ ID NO: 59618 - DNA, 1069 bp, Cannabis sativa
tagtattattgggtaagtctcacttcacttctaaatggtgttttggtaaattctttatttgttttaatattttttaaaaaaaattaatctaatttttttttatgatcagctacgttgtaactatttagtatcacttgtaaatttttaaaaaatttcgagtagtttacagtaataaaaataagatttatatattttcaaaaaatctcaagcagtttaccgaatcaaaaataagatttatatattttgttgtacatgcgattatttttttatacgtgtgataaataattgtttaaactatatttttggtgttataaactattcagaatttttaaaaaatttataagtagtcttaaaaatgtacacgatctaaaaaaaaaaattaaaaaactctcattgatggcgaaattttctataatatttatttaattactaaaattttatcgtaggattaggattagatatgaatgtaatataaattttacaaattacccacacaaacaatatgggacaaaatacacacacaaatttatttttcgataatttaaatcacaaacataatatttatctaactattaaaactttatcataggattatgacttaatagttaggagtgtttggacaaaaacttatatactagaaacattattttttgatttaacatattaatttgataattactatttgtcattagtaattttttttataatttattaaattaaaatatgtaaaatatctgttgttctaaaaaaatatatcataataaaattcattaataattatatattatctcttgcaatgttgtttcacatacattatgagactttttgcaaggttcccttgaaatttaatggattataaaaaaaaatatatttttagcttttatttagcataaaatatgatatcttttaaaatcagtaaaacatgtgtaatttaaaaaaaaaaaaaaaaaaaaaattaacccttaaactagtgagccctaaacacagggctaacctatctatgcccaagaccaagcctgagcacttagtatggggttaattaacctggtagaaataaaaactaatttaa

SEQ ID NO: 59619 - DNA, 605 bp, Cannabis sativa
atttctattttaatttatatctgagaaatctagctccagtgacttttctgacgacgataaatttaaatattgatataactggataaatattttacgaacttttttttgatttatatagcatattttatgattttatatagttttaaaaaataattaacgtgatgttaattttatgattgtattagataactcaaggataggttttaatataatgttgaaatatgattcaatgtggtagtgatttataactaatttaagtaatttttcaaagctattttttaataataataataatataaaaaatattcattactaattattattacatcttataatgtaaaagcctgcagtatctacattaatatagacatttacatcggaaattgattgtgattccaacaatgctaaaaaatgagcagtgtttaaatggcttattgactctattaaggggttaagtgtattaaaactaaaacataagggaatttttgccaaaaaaaaaaagagaattaagtgtgaaaaaattaaatataaaaggttttgccgcaaattattcaaaatgttatcaataaaagttagtaaataatccaactaaggggtttccctta

SEQ ID NO: 59620 - DNA, 778 bp, Cannabis sativa
aactatgtttggtatggttttagtcgagagtttatgtttttgttgtcttaactttcaatttattcattttttaggtaatttcaaactctttaaacacttaagtttgagattcttttagtctcaatttctctgaattaaaaactaaccatgtaaaactcttacatcaaacacactccattaatattattctatcttttgtaatttccgttctttttacattataagagttcaattttatattagacaatatctataagaaaaaaaaaatatgtacatgaaatactaaagttatccttaataggtgatgaggggcatttgaactagggttatttacaaaaatattgggaaaaaaacatacaagctttgatatatatggcatataaaactaaagtgtataaaatatgatcttttttttttaaaaaaaaaatttaatatggaaaaaactattatatatgaggtgaaatactaaaaaaaaaaactttgaaattgtatttctttttttcttttttttttttctttttaagaaaataatgtaaactgaagtagttttttttttttttacaaaactcaagcaatagcaaaacaattttatttagacaataaattaataaactaattaattctatgtaatcaaaaactagtttattaatgaaaaaaaacagttacaaataccaaaactcatataaattttacaagtttcttagagactttgagacatgacaaccgagccattcgtcagagttactgctatgccaaaaaagtcgatggagtttgctga

SEQ ID NO: 59621 - DNA, 723 bp, Cannabis sativa
atcttaccctgtcatttctcttaggaatcacaagaatttgactgtcacatttaatttgctaaaagaaatgaagtatgataagtttttctactaaaatttttaattcaagggttaagtgtaacaaatataaaaaaatggagagttttgctgcaaacttttctttttttattatttatgtacagattaataatggctaaagttgttgtgaataatcatatggattattgattaaaaaaatcaatacgtgaattataaagtatgtctatttaactcctttaaatcattaagtggaaccttaaaccatttccatttcttatcgattgagtactttttaagaataagtttggatcgtcttaataagtcttttatgtaagtgaatgattgaatgaaaaatctcatgaaagtacttaccaactgtaacattataaacaaaactttttatgattctactgaaatgataaagagtcatactagatattaaaagtaaaatttcatgaagtgttatttcataacacctagaaaaaaatacataaagaaaataataaactcaaacatgtaatattattttttctcaccaagactctaacattgctagaaaacaaaaaagaagaaggcaaaaatcaattatttttaccgtaatttcttcgaggggaggagttctttaatgactttaaaagagaagagagatgtctttgggaagaagaagatttttttttttttttt

SEQ ID NO: 59622 - DNA, 541 bp, Cannabis sativa
aaatacttgtaaacacctcattagataacattaagcatagtgaattgcttattgggctcaactaattttgctcaaatatatgacttttccctttaaagttatactcccattgtaaaagggatttcaaattttagttgttcatctaaaatacttgtgttttcggaggaaaatagataaaacctataattgtgactattcaagcaacaagaacattcacaaggagaactgtgagtatactattcacttaaatataaataaaagtaaaatagcgattgataaagtaaaatagcgattgatagaacataaataataaatatgtaaaagacaaaaaaaaattatgatggtttagtcagagtttagaagatagattatcatcttcttactgaccactcttttatataaaaggtaagtgatcattccattacataatcgaccatataggtttgttacaacattaattacacttaattaaaagaaatttttacaccataaatacaaaatgcattctttattactgaaataccctcacacggttattgtt

SEQ ID NO: 59623 - DNA, 1187 bp, Cannabis sativa
tcattacactaaagttaatattatttctgtaagtattatattttattataaataaatattataattaactaaaataatgcatatacaatttttttttttcggatttgagctcaaatatacggatcgaagtataatgtataacaccagatttatttcattagtttctgtcaaaatatatcttacagtactatgtatgtattatatatatatatataatatatataaaaaatatatgtatatatattaaccctagaaagcgaacaatatagatcatgaaattaaatttcttccctagcgtcgacacaaaatccgtgcgcaatatatataatgcatgaaatcatgcatatgtgtttgtttgtgtaagcccttctttcattcttcttcgatttcgtagatcccttttgattttcttttcttttcttttttttggcactttgtattagtcatctcatttttttagcaatgcacgatggtctagatttttcttcttttggctaattattcatgatacaatactccaattaacctattatagttggtcattataattgttcctacaattattgaaaatgtttgggacttgagaacatgttgggtctaaatttgccaatgaaggcaagtagaatgactttagtgaggaacattatagaagggtttaggtcgggtcgggcaactatttttttaacacacttgattgattgaaatagccatatacataacgactaaaatctcttattataatatgttaaataattggtccctcgccatcaagaagctttccgccatttcttttgtcatataacatattggaagtttgatccaatcggtggaaatatttcattttttaaaacatgatgaattcataattaattttttatatctatatgtaatatagaagattggatatataacaactcgttttgtttttttgtgtcatgtatagatttattttaattttttcttgttttatttaattattaataagaatgcatcttgataatttaaagaattttgcatttttggattttactttttttttttgaaaagaaaaatattgcaatttttttttatctttattcataatttaaattttaacatttattttgtctgattttttttaatatatttaatttttatcgttttattttaaggttatttttttatagtaaaacatagatttatcaaat

SEQ ID NO: 59624 - DNA, 1156 bp, Cannabis sativa
aataataatttcaacaaaaatgtataaattctttcataatagtttcaattgaaatgggaaaatgaagtgatatatataaagtccattgtagtgacatttttcatttttatttatcatattaattcttcttttttgcgtgcaagaataacttgttgaccaactatatatatttatataaataaaaatttatgtgttttaacataaaattattttataggtttcttttggtaattcaatatttgagagaatgattcatagaaaaagggataaaaataaaataaaatgaaagtttttatgctaaaagtaaaaaccataggataattccacaaccttttatttgcttcaacatacagaatagcttttgagtctaattttctttcataatcgtgtacgttataattatttagaaacacctataaatttttagaaaattttaaataatttacaattccgaaaataaaatttacatattttgttacatagttacatataagtaaatgtttaaatcttatttttagcatggtaaactattcaaatttttttaaaaaatttacaagcggtcttaaatagctacagtgtatgcgattataaaaaaaaattctaaacaccgaaatagatagaaaatttaccaaaacaaccttttatgaactctaatacataaatttcgaaaaccatatatagataaaaaagaattttaaaaaatacaaatacaaaaaacctcatatatatttatatataaataaatatattataggtcgaatgcttgaacaattatttaaccacattttgttatacaataattgatgtcattctaagttgaaaaagaagaaactaggcaaactagagtagactctttcacatagtgattggtccaatctcatgtacagttcgatcaattatataacgatttaaagaaaagtaaaattaaccttttataaaagagaaatgttaaaagacaccagtaatgtcgtacattttttttaagtgtcaatatcgatattagtacaattaagtatcgaatgtcatgtaacttcatgaaataacttttaaaaaatatcaataacactcataagataacacgtctaaaagatactagaggaaattacactctataccctttttatgttgttctctttcatttttactctctttttta

SEQ ID NO: 59625 - DNA, 1053 bp, Cannabis sativa
  modified_base (996)..(1000): a, c, t, g, unknown or other
gttttagagaattcatatttagtaaatctagatctaggtaaaatatttccaatagggacttcattgaagaggttttggtggctttgaattttccatggaagtttattgatctggttatgatatgcatcaaaactcccaagttctccttaatgttcaatgggaagatgcatggattctttgcctcacataggggattgaggcaaggggatcccatgtcccctctgatttttgttctagggatggaatatctctttagaataatgaagaaagtagcaggaaaatctgattttcagttccatgagaggtgcagaggtttgaaactcaatcatctctgctttgcagatgatgtactgttattctccaagggaaattatagaagtttcatgtatatgttgcaggggctgaagctattttcagctacaataggacttcatcccgacccatcaaaatctgcaatttattgcagtaatgtgccacagaatgaaatcgatacgattttgactgcttcaggtttctctctccaaaagactccttttacttatcttggggttcctatttgtgcaaggaagatatcaagcaaggagtgctctatcctggcagaaaagatgacaacacgaattagagttttgagctctaggcacctgtcttttgctgctcggacagtgctcataaactcagtcctactttgaattcatgcatactggagccaggtaatggttttgcctaagaaagtcattagtgagattgaagctatttgtagggcattcttgtggaagggacaacatgtatttcaaggagctggtgcaattgcttgggatcaagtgtgcaaacaaaaaatagagggagacttaggtttcaaaagagtaaaggaatggaaccaagtagctatgattaagtatgtatgggccattgcaaagaatgaggagaatttatgggtacaatggattcatagttgttggattatattttacgaggatctagatttactaccatgtnnnnnatttaacatcctaaatatgaatccctaaaataatgtaaataaacacatataaa

SEQ ID NO: 59626 - DNA, 2442 bp, Cannabis sativa
  modified_base (904)..(910): a, c, t, g, unknown or other
gagaaaagagtttggtgtttatttggggaatgtgatcttatccatttccattattatatgttgttattgttgtgttgagttaagatgagatgaggccaaaaccatcaacttagttgtgtggtggagtgaatggttgactacatattcaaaaacaaaaaataagaagggaggtacttcatatataatctattaaattttttgaaaaaaaaaatatggtttaagttacttagtggttactttggtagcattggttattaatattatgtaaattttagttgcgatttaggttgttcggttggttgttatgtggttgctatgtagatttccgttaaaatacacaaaaaaaaaaaaaaaaaaactattttgaagtgtaaagataaaaaataaaaaaacttcaaaataaatatgagcataactaactaaaattttaagtttgtaaatgctataaattcaatatttatttttactcagcatttgtaaaactataacttttctttaatttcattagtactcattacaaattctattattattttaaacaagatacatataaaactaaattttaaattactggctctatataaaaacatgtagtatcaattacttttaatgtttttttactaaatttaaaatagagtctacaatgacgaaattgaagaaaaattacaactttataaatattgaatacttatgccgctaataataaatattaagtttatgtcacttacaaatttaaagttttagatacttatgcaatccctaaattttttttttatcttaaattatattagttttttttttattattatttttttttttgtaatttatattcttaaaaaaaatatacatatcaaacaaattatattttaaatattataataaaaaattatgtgaaattttattnnnnnnnaaaaataaaaaatatatatacatgattttaaaaaatatgaaaataagtattgtaattgacacaaaataatatgagaaaaaaaaaagtttttgaaaataataaaagtgactttcaaatattttaagcttactttttttaaatattggattgtagttaaggtgcaaatagttttcctatttattatatatgcaaaactactaaccacataccaccatcataataggtaatttctataactactaactactttggctatttcttaaaaagataatagtcttgcaaacaaatacaagtttttttgtgcttagctaccaaaaagaaaatacagtatattagtataagtagtactcattaatccctttaggctaacttgttaattgggtgtgccaacaagtgttgcttattcaacctatttggagtgtctaaataatcagctcatactaatgttctacacgtacaactactaagcatctaggatgcgcactctgattatctttttgacacaaatatgacttgaatttttaccttactttattctcactgtcacaatcactctcttttaaaatttgatgttctcgttagccacacttttcattgggtccaagctctgataccaaattaagaaatatgctctatagaaaatgagtaatagaatgacttctaaattattcaaatattgtgatggtctaaaatttcattcgagtcacttgacactatagtattggcctataagccaacaaagctattactctatactcttacatatttttgatcaattttataatattacatgacttaaaagattattttagttattcaatttatctacttcttattgttaaaaaaattatatattttatagtagtttattttttgtctcatctattttaaacctaaaaattaattattatcgattaagattaagaaaattatttatatctttcaattaatttatatttttatgtattatatatatgggatcaaaattttaatttaaaattgtaaaaaaaaattattatttaaaaataaaaaagagaaaaaaaaagtgtatatctctattaaaatgtagctcgcgatccaccttgcagttgaagactaatagtatatactacgtgtatcaaaaaccccacttcaatatagagacatactaaatcgacatattaatctcattccatcaattgaaataaaaaatgctcaagtaaaattcacaactttaagatagttaaccaccgagtgtgtggtgtaattagttggatgactttatgctaagtctctcatttagttacttttcggagttcaagtccccatagcaacacttatcatatgtcttaaaagtaacgctcctttgagagtaataaatattgtgcgccctattaaattatcatattcgagagcctcagttgacaactattatcaagagacagtgtaaaagtaacaattaactattcactaatcttcaaaattactattaagtcaaaagaacaaggataggaagtgcaccaactaatccctatcaatagttattttttttt

SEQ ID NO: 59627 - DNA, 979 bp, Cannabis sativa
cttctaaaaaggctaagactgaggaacctccgattatgttcctggaggaagatgcaaaacacgtgaggtatcctcacattgacccactggtaatcaccatctagcttgccaacaaaacgataaaaaaggtgctagtggacaacggaagttcagtgaacatcctttataaggatacactaaagaaaatgggacttgaaaaagccaaattaaaaccttgcatggtaaatctgtgtggatttacaggcgacattattgccagtcaaggaataatcgagcttccattaaccatgaatgaagcgcctttatccaccacaataatgcaagaatttttagttgttgacctgccatcagcttacaacatagtgctgggtcgactagtattaattggactaagggcaattagttcaattaagcacttatctttgaagtttcagacagtgacaggtcaggtgtgggagtggtgtgacgtggccaaattctagctcgcgaatgctaccgcatagagctgtagaatagaaaagttggccaccagcaaatgacagacatgactgaagagggcgagaagaaggatgaggatcttgatcctcggattcaagacgagcagatctattgaaaccaattgacgaatcggaagaggttgttctagacacaggaaatcccacaaagtgtgtattcattgcgaagaacctggatgaacaattaaaatagcaactaataagttttttgagggcgaaccaggatcaattcacctagagccaagcagacatggtagggattgaccctaagattatctgccaccatttgaatgtcgatccacattacccagttaaaagacagaagagacgacccttggattcttagagacaaggggccctcaagcaagaagtggagaaattgttgagtaacgactttatacgagaggcattttatccctcgtggatatccaatcctgttatagtcccaaaaccaaatggtactt

SEQ ID NO: 59628 - DNA, 1440 bp, Cannabis sativa
  modified_base (28)..(33): a, c, t, g, unknown or other
aaaaaaaaaaaaaagataaaaaattaannnnnnttttttttttttttgagaattttattttaagtattgtatttcatttgcattattgtatgttggaataaatagttgcgaattgtgatttattttattttatcttattgttagatacaaagtcaaaaatgaagtctcaacacaataatatgcaccttcccattatttttatttatatatttattagttgaataaaatttaattttaaattattacttagtttaaagtgatgagcctatgttggaacttgaacatttattttctttctaatcaattttttttctttagtttttcctttttaaacaacatttattttagttatatatgcacctacatacatgagtattattattagacattggtgtcaaacactttctataaatcgtattttataaatagttagcaatattttttaaaagttattgtcttaagttatataagactcgatacttattacttaattacattaataacgatataaaaccgaataaaatgctaaacaacaacagtatcttttagcatttgtctatgaaaattactaaaatgtactattagtacctaatacatcctcctccaggggcgaaggcatgattaaatatttaggggggccaataataagcgccacatgcaaaataaaatttcatatttataaatttttatttttagatggtgttaattatatttattggtgatccaatatattattctcctagattcaatttaaaacttttataaatattataaattaagataaatatataaaactcatcatttaattaaaattatcatacatatttttttaagtatctttaatttattatgttaatttatatagaaccacacttgcacatattcatttaactaattatatacattgtctttttgaaatgtaattaatcttttattattatcaagaaaaattatattttattatatatatttaaatattatttttatctttttaaaatacatagttaacaattctcttaatttatttgtattgattttactatacttacatttgacttttcaacttagtttttttatttaatattggttgttaattattattacatatgatatatttcatttgtagaaagctaggggggccaaggccaccataaattctaatgtacatccgcccctgccctcctcgatgttatactactattagtgtcattagatatcgagtctcgtataatttaagaaaataactttcagagaatattattaaccaatcatgaaacactttttataaaaaatactaaataccactaatatccaataagaataataggtagttatacacaaactttctctacatattaatcaaagaatcaaacctataaatacacaataatgcagctttaaatatccacatcttccaacacttttagctgaattcacctt

SEQ ID NO: 59629 - DNA, 1327 bp, Cannabis sativa
atcccattcctcgtttagatgatatgttagatgagttgcatggttcttgtgtgttttctaagattgatcttaagagtgggtatcatcaaatacgtatgaaagatggagatgagtggaaaattgcatttaaaactaaacatggattgtatgaatggttagtcatgccttttggattaactaatgcaccaagcactttcttgcgataaatgaatcatgttttacatgctttcattagagaatttgtttttgtttattttgatgatattctaatttatagtaaaagtttgcatgatcatgcttgacattcgcaatcagttttggatgttcttcgaaaacagaaactatatgctaactgttgacctcgcttttagccaacgacaatgagtcttaattgtaagggataaataatataatataggtgaaatagtaaaataaataaaggacacaaaatttttaaagaggttcggccccgagcagttcgtaatagcctactccccttgatttgtattaacttaagaatgaagaatgcagtgattcttcccttaaagtttttacaatagtatctctgagaatactctcttagatcattcctccgaccctttgcccagtgataatagatcactatttatagggccataagcttgagggaaactttcccctctatttacaatgtctataactggtaagattacacattaaatacagaatacactgattaagggatttggacaacttgtcatatctctgtgatatgattccaaagttatggggattgcttctgtgattcacgatgcaagtgttgaagttgctaagtgttgacatgttgttcggaccatccattgctcggctaggaaggcttcatccgtgcagatatgtgcgatgttctgttcggcagatctcattcgagcagatatgtgaagtcgattccacgtgtcaccagcatgcgatgccatgtcagagtgccaaatttgggataacatttgccccccaagtcggtacgagacttccgaagttgcatgtagacttcatcggagctgcctttgcatttgaatgggtgacatgtgttaggcacgtttgttcgtgatttgatgtgaggctaattaggcgtctcttcgattttcgactaattaatgctctaacttaattagtggctcgaaactcagttttctactcatgctttgacggttacacttgataattattaatttcccaatagtagaacctctatccaattatacacttgggactaatcaaattatattctaattgagaggtcataactaaatagagttacactaaaaaaaaaaatcaaaatataaaaaaatat

SEQ ID NO: 59630 - DNA, 817 bp, Cannabis sativa
ccaacattttctccaaaaaccagatgtatcaactggtgcttgctgctgtttgttatcttggagaattacataggcactcttcacggtatagtggccaaagttctcatgcttccaataccaaatatctggttcagaagcttgaatagggatgctgagaattagattaatgtccctctcattgaaaatgtcatatagaatatccatatcccactgattttgctctatagacatcagctgggagacatttttatcaagaagagagtcactaaccgtatgcacaaatggatcagcagtatcaggaagccagggatcatttaagatgctcactgttgcaccagaacctacacgaattgcagcaccttgtttgaccagttgttgtgcttccatcaagcttctccacacaaagcttgggctcccaccaatttcagctgaaagaaaggagctgtttgggaagtatttggctttgaacaattggctagctaaagattgaggttgtatcaacagtcgccatccttgtttgcccaatagagacacattaaaatcataaagattgcggaagcccaaccctcctttcatctttggtttgcacatacgatcccaactcatccaatggatattgttatcctttttagatgaagaactccaccagtatttgcacatagcacgctctatttctctgcttgtttcaattggcaacaaaaagacgctcatagcgtagttaggaagagcttgggcaatagttttcagcaagatctctttgccggccttcgacaatagtttcccatgccaagactgaatcctcttctgcaccttttct

SEQ ID NO: 59631 - DNA, 1525 bp, Cannabis sativa
acaacttgcttcaaagcaaggccaaagtgatattttgaaaggacaggcagagattatgcattacttgaagaccttattgacactcatgggagatccgagaaggcccaatgcaaaggcagagccacagccaaaccccatctcttcgggagatgagttcattcttcccaatgattacaaacctaatgatgtggaagatgtactccatacacctcaaaacatgtcgatcatgcccattaaagatacgcaagattcagaggtgcaagttttagagaccgttccaacaccggtggagaagagactgaaaaagaggctgaggtggtttgacgaatacaccaaaataaagaagaagatgaaaccatcgatagctcatgtgaatgttgacccacttcgacccgttgatcagaagctactacatagtttctgaaattggttagtgggaaccattggagacaagtatctgagggatgtcttcattagtgtacatggtgtggcttggttccataagctccttactaaaagagaatggctttctgatgatgtaagtttcttaactaagtattatttgatgttatttactattgttatttgttttattttttaatgctctaaagtgctcgtgttgacttatctgtacgaattatgcagcatttggatgcgactttcgatatgatgaggaggcggcaacacttcttcccagagttgtacccacgtaagtgtactatcatgccatcttggtttgcttcatcgttgaagggtcgatgggacgcttggaaggaaaatactgaccacgctggctttgtttgggatgagtccatcttggaactcatttatggggatccactccaattcatgcaatcttggaaggatatggagtgcatatacatggccatcttcttggaccgacaaaaacattgggtggctatggaggcgaatcttgaggtcttggctatcacaagatctgggtctgggactttgggtttgttggggaaggaggacgaagaaagagaagaagataaagaagaaaaaaaagaataagaagaagaatatttttttttttattttaaatcacttttaaaattttaattaatttttataataataaaaataattaaggataaatcaaaacatgacacatgtataattgtgtacacatagatttactagcttgtcatttaactttgaaaatttaacggaaggataaagaccacaacagaaattcggaggtttcaccaccaaaattttgatttgagggattaagtgtttaaaaatatataaattgtttagtttagccgctaatatgccaataatttataaaatctcaaaactacaatcaactagtacctaatgacttatcgtaaatatcactttcttttacggaaaatttgactttttatacatttattagattaaaattattttcctaaacctaagttaacccatattggtagagtaggctaacatttcataaaatctaattctacccatcccatttcaaacacctaactcaatctctctctctctctct

SEQ ID NO: 59632 - DNA, 1771 bp, Cannabis sativa
tgtcttgtgtcctggttcgggtctcaagtcaaggtttgggtctcgggtcctcagtcattggtccatgtccccgattcaggtcagggtcctaggtcccggtctaggttaggttcctagtccgattgtaggtcccggtccatgttctgtactagtccttatctcgggtcttgaccttgtcagggtataggtcacagtttggttctcaggtcctggtcccgatcctggtcctcggtcccagtccgagtacttgtcccaatttaggttcaggtctcggtgctagcctgggtctgggtcccagtcatgatctcgatccaggtccaagtcctgggttcgagtctaagttatgttacgagttcgggtccgggtctgggtttgggtcttggtctaggtttcagtctgtgtttgggtctgggtcctggtcttgttcttggtctgggcctgggtctgggcctgggtcagggtcagggtctgggtctgggtctgggtcttggttctggtacgggtctaggttctagtgaaggtcctaagtcacgggtcctaggtcacaggttctagcccaagtctgggttcaggttcgggtctgggtcttggaaatggttccaggtttgggtcttggtacgattccaagatttagacaccgactacgagtttggttgaagcgttgggtcgtgggtcaagatccgaatcctgggtccctgcccatgtctgtgtttggctccgggtctgggacaaagaacgcggtctaatcttggatcccagtcctagtcctaagtcctgattttggttctaatttagagtttgtacccccaatctaggtcttggtattgggccaggtttgagtctccaatcccggtccgggtcttgggtccaggtctgggtccaagtccacgtctgggtttgggtttgtgtcccgagtcccgatttgagattttattcgagtccgtgtcccgattcgggtttgggtcaggttcctattcaaattctagttctggactcaaacttagattcatacttggacctaagtctggggtacgggtctgggtttgggtttggttctaggtccgagtttgggtctgggtttgagtccgagtatgggtcccagatccaaacactgactatgagtcaggtccaagcccctggtcccagtctagttccacttcgggtcccatgtcccagtttgagtccaaggtcagggtccgggtccgggattgggtcttgggtctcggtcccagttctgatgcctatttcctgagtctaggtccctcatttgggtctaggtccctcatttgggtccaggtcctaggtcccgctccgagtctaagagccggtcggggttcaactcctgctctgagtctgggttcaggtttcgatctaagtctgggtcctgatttgtgttcgggtcttggtccaggttcggttttgagtctcgagttctgatctatatctgggttccgaggcgtaggtcaaggtctgggtcctaggtctcagtctaggtccatgttcaggtttgggtcctagtcctagtttctatttcgattcagtgtttgggttcaagtttgggtctgggtctgggtcagggtctgaatcctggtttgagtctgggtccgggtctgggtccaggccaggattccagtcttggtcttggttcaggtctaggtccgagttcggttcccgggtgttggtccaagtctaggcctgggtcagggtctcggtcctgatctaggtcccaagtttcgatcctggtctaggtctgggtcttggttcgagtcta

SEQ ID NO: 59633 - DNA, 1183 bp, Cannabis sativa
cccgcacaccgtcataaacgatattctcttttcccattaggtaatgtaactttttgaaccttcttttctcttttgggtttggcaattgaaggattatctgttgcttcatattcttcccattttgataagcgtgctgcacgtggttttgtaaccatctccatgttatttttggcaagctcgtcaaagaacattgcctcggccatgtgagcttcgcctttagcaaaaggtgccttagtagctatgatatgaacatcttttccccgaatgtgcgccttgacgcattggtgcaatgttgatggtatgcaatgatgtgtatgaatccactgtcgtcccaacaagagatggtatgaagtgtctgcttctatcacatggaaccgagtgggtcctctgattggtccaacctctagttcaacagttacatacccccatggtttttacagacttagcagcaaatccagtgagcatgattggttgcgggattaacccctcttttacctcttttatagcagaatatattccaagtggcatgagatttactgaagctccattatctactaaagcacgtttaattttcaggccattgatcttcgccttgacatataacggtcgattgtgaaggaaaggagacgtttgtatgtcaccattggtgaaaacaattgctccttcagattttttagcaatattatgcattgggcgccccaccatataacaagaagggctgtgttgttgggaaattttaagcaaaacttctgtagcctcagttcttgcatctttcccaaattctaagcaatcaaaaaagttacgaaacaatttagtttttaacaacgaatctaccatgctatctgttttggtggttcttctataatttcctcgatatgtatgccccgtgatatctatattgaaatgaggggaaactcttctgtgcacgtcatagcagctcctcagttttgatgttggggaaacggcatttgttccacttcatcttgatccaagataattttcccttttgctaatcgctcatgaaaatttttcctcagagtgtagtatcccatggttgggtggttaatctttcggtggaagtgacagtagagttcatgctgcttttcctctaaagtaggtagttttgcgacaaatgatagtactacctctccatccttgatccatgcctccaataggctacaga

SEQ ID NO: 59634 - DNA, 1373 bp, Cannabis sativa
ttattaaatattaaataaattaataaaaaatatctaaatcatatactatttaaatttaaatttgattagatttaattctatatttatttttcttattattaattaataattaatggactttatttagtatatttggttagttaatttattattttattttatataaagagcaagcttattgtaaagtgactactgacggctacagataaaatatagcgattatagtcagggccgatcctatgctaatttaggccttaggcaaataaaaattgggggtagtaaaaaataaggttgttgggatttaaattttgaacctcttagttgttaaactaatcaaattaccactatgctacaacacatatatagtattaagagtattattatttattttattactaactatattttaatttttttttaaatggggcctgagcagctgcctcctttttcagttattatatatatttttaatttcaatgtatattttgaaaactaataatatatgtataacaaataagttaataaaaaaattggtagttattatatttaaaataattaaaaaaagaattaacactttacaatatcaaaattatttagaaaaaattagtagaatagttactaaaaatttaaaaatttaatataattatatgatttattaatttttattaaataaattacaaccacacatgagcggtttgtttgatagtttgataaataatcgcacaaatttaaatgcacgcaagcgcggattgtatcctacttattatcgagttaataataaaagtttgacatcccaagagaaaccctgtaatgaccggacgaactcaaagcaggttttctttctctctctctcgaattgcttgattctgttcaattgtttcatatcgagaaagcagcttgtaagttaatccgaacttttcttttcttcccacttttatttaatcctttataaccgccgatttgccgtattaacacctgataccataagcagtgttaattcatctcttatttttattaagaaagactcaattttgaaaataatcacggggtttatcgaagtattgtatttagaaggtatcacatatattttatatgggctaaaataggattgcccttgtcccactttattttgaaattcatacattttcttgctaatatcatagattttatcaagaaatattaatacccacttcgttgattctgccttgttgtttgaaattcggttagctttttgttgtgatttcatcaggaaccgtctcatgcttgttttgagatgtaaagtgttagaatgataagcgtctcttcactagctcaaaaccttcgagtacatactatgtaccaattaatattattctcttttttttttaaaaaaa

SEQ ID NO: 59635 - DNA, 1477 bp, Cannabis sativa
  modified_base (50)..(53): a, c, t, g, unknown or other
ctgctattacaggtcaaagaaaaatataaccatatggttacaataaaaannnnaccattgaatagtcacccatatagataaagaaaataatctcagtcaatactacaaattaaaaaatatttaatggttgaccgataaaaaaaagtaatttacggtgtaataaatacttatatttaactttgggttataaataaatatggtattttaatagtggttgctctaaacatatgacagattgtaatatcccgaaaaacatattttaattggacatattttattagatatgtaattattttggtaatggagtaagattatgatcttacttagcgtaattagaaaaaatttattaaatgattaagtaaagcgtaattaattaattacggagattattttagaatatgtgagtatcatggataccatttctgaaataaaatatttttgggcttggtgactgtggaactggacggtgtgatccaaaatgtcacgacatttagggatggattattttgaaaatattctagattaatttttagaaaatcagtgtggcggattagctataattactaaaataccctaggtttaatttaagattaaaggggtataatggtctttatgatttagatattatatatttatattagtggctgcttttaaaaaaatagaaaatttggttagtaaaaagggagttagctttgttagaagcattggtggttttgcttcttatgcttggctgaaccctaggggagctactaaggtaagtattcaacacttttttctttgtttttttgaagttttagattggtttaagctagtgttttaggagtttttggggctgtggtgttaagatgggattagagtatgtttctaagttaatttatgagtttgtttaaacttgtggaggttagatataagggctgtttggatttgatatgattggtgaagtatattgagcttaatttccatttgagaatgtagttttgagaaagtggaaaaattattgtaaattagtgctttggatacattgtatttatggtattgaactgctctgggaagtttggacaggtttggagctgatttgtgtggtttttgggtgaaaaccaatttttcccgtttctgccagtagagaaaccggttaaccggttttactggtgttgtaaaaccggtccaccgattttgccagtagaggaaaattctggttttagcctcgaaaccgttttctgctcgggatgtttttttagagcttaagttagggtattttagtgatgtttgagttattctgaaccagtggagagttagatatgtccggttacgaagttagggttattccaaagtttggaataagttgtttattgagctttgttgtcgtgacataggacccgggatcgagggtagttccacccaggtcggcccccacagctgactattgaactgaggtaagaaaagtattatgcactgttcaatctcaggagtgctattc

SEQ ID NO: 59636 - DNA, 2393 bp, Cannabis sativa
  modified_base (679)..(680): a, c, t, g, unknown or other
taactgatcttaataagtaaattacttataatttgaaagtattttgagtttcatctataaactacaattaaataatttatttataattcataaatattttattattttgtatatatattataaaaaaacatttttttatataatttaatttgtattaatgatgcatatagggatcgatgttgggtgttgttgatgtgatatatattggtggtatatatccacagaaaattacataagtatgaaaattcttaagagtggaatcgcgattgatctcataatagtaatacaaaggtacacgccacagtattacttgctatacacaatatagtgttataattttactactgatcattatgaaagaaaagagaaaaaggacaacataactaatattggtatacattttgtcaccgtacgtacattatatgtaggcagcaattattttaggaaattctgtggagggactcaacttccatcctcaccaaattaatggcttatataaataacctcgtagaatggcagatagcggctagactaagaatagtcgctgagtaaacgtgcacaataatatttaatagctttaattatgatttttgtccaataaattttagtaaataaattttagtatgtatcaaattatatctttcaaatttttttaattgttaaatttaaagacttttgnntaatttcattcaattttactaactgtaattgtttatgtactaaatcatgctccacagatttttgatatctaccaaatcatgtcattcgaactttgacatgtatcaaatcataccccttgaactttcatctatgttaaaatttctttactaaaattagacaaaaatatttaaatccaacaatctcaataattcaagtgaatttttaaccgacttaaaagttcaaagtaatttttaaccgctttaaaaattcagagaatataatttaatacatgtgaaagattgccaacaaaaatccaatattacctctcaaatgcaattggacattatcataaaagacaaaaaacatgttgtaaaattaatttattttttcgaattttaaccgtccttgtaaaaaaaaacaacttggactaaattaattagctttggctgactagtcgtactccaacaaatatataaaggggtcgtgtacgttctatttttgcataaagccatatatataatatattctccctgttccctcttttattagttctctcatttcactcaaaataatagtcaatttttcttattatattatataataagatgtgtgggagagactaggtagtgactaaaagctgatcagcagagaaaaattatgggaagagctccatgttgttctaaggttgggttgcatagaggtccatggactcctagagaagacacacttctcactagctacattcaagcccatggtgaaggccattggagatccttgcctaaaaaagctggtaataattaatattaatatattattatatcaaattattaactaaccattatattattattttggttaaatttaattttaattactacagggcttctaaggtgtggaaagagttgtaggctaagatggatgaattatcttagacccgatatcaagagaggtaacattactcccgatgaggatgaccttataattaggctgcattctcttttgggcaaccgttggtctctcattgcgggtcgccttccgggtcggaccgataacgagatcaagaactattggaacacccacttgggcaaacgtatcgtaggatccgacccggaaaaattatcgggtacccgaggaaggtccaccaagaaaagagggaacattaataataataataacaagactagtgcaaatgcaaagaagaagaaaatcatgaacaagaagaagaacaagaagaagaataagagcaatgatgagttggagatgcccaaaatccatctcccaaagccagttagggtttcttctttctccttggttaggaactacagctttgaagggagcactactactagtaataatattaataataacattacgaataataataataataataataacgttactactattactcgatgtgagtctagttcgagccaggaaataaaaggattagatcatcatgaagttgatgatgataataatgatgtaaatgatgatgaacatgttccttggttgagtttcatggctgatgataatgatgatgatcttgataatgatcatgaccttgtcattaatggtagtaataattctactactacagctgcttctgataataatcatagtaataataatgataaagatcatcataataataataatagttatacactagaaaagctctacgaggaatatcggcagcttctgaagaccgaagaatttcacgatcagcagca

SEQ ID NO: 59637 - DNA, 1079 bp, Cannabis sativa
tacatgtgcgaggtagatattttttgaagtttcattgagctcggtatattcagcataaagagggatatatttgttgtgtttcttctgtttcttatcattgggtagccttttggaatcaacttttctttttgatcttgaggcttctgattcaaactctttaacggaatcatatcccgatttcctttcaggttccttgacttgttgtctttcgaacttattctccaactcgtccattcgcaaatggagtaaattcctttgttttggaccaagtcgttgacgaagatcaggttttctcaagttcaaatattcccgtaggtcacaacagtcgtggctgctgtggaaccttactcttcctatatgctgcattatacctttttcattattgctgcgatgagtgttctctcctcctcgcatggattgattatgagataatgtacgcctcgtggtacccctctcctcttctcattctactattcctattaaggtttgattcacctcgttccccctataggggtttcctttcttttgaacttggagagagggtttgcgatctccgtctgatgttccacatatcccaggctgcttccccagactctcctcagtttcctcagcttgcctctcctgagagttttgagaatatctttgggttgtctcttgccccttggtttgtgagttgcgaggtttgccttattaatctctgcttccaaggtcaggttgattttgggaactattctcctacgctgcccttactgtggctatttcacgttctaattcggcgttacgccagtttgcttcctccaatcgacgcctaagatggcgattttctaactccacgattggtatgtacctggttgggtcgtaggtgccatccacatcaatctagctaagaagttactgaccattgtttatcctaggtctgtcaagccagggactccaatactgggttttcccggggattgcagtctgttcatgtgataaattaatagtccctgaggactcaatggctcttttccaaggcgatgattgattccttcatgaggattattttcttcggtgtcatccattacttttacgtcagg

SEQ ID NO: 59638 - DNA, 1096 bp, Cannabis sativa
tgcacccttagaaaataggaaaacgaaaatacatggtacaatttaatattaaatctataaattttaattttataattaatataaaaaattgttaacttcttataaagaattatttttaagtggtgatgaaaatatacaaaagttacctaataacaataatgttaaaaatatattaaaatttaatacatgcaataatcatattttataactaattataaaatacatattattggagaccataatttgttcagaaaattaatgaacaaatagcctcgtttgtcgttttgattgtgatacgaaaaatgttaaaaagtaccaaaaaaaaatgtaaaaattattggattttacatgttaatgaggcatgttaaatactattatacttaatagtaataattatttgaggtatctaataccatcatcattaaagacaaaagtgtgtagaaggaaccaatggcctctaatttttaattttttttatactaaaaaatgttttcacatttcaatgtctttcaaataaatataatatttttaatcattatttttcatagcctaaaaaaaaattcaactccaaatattaaatatctcaacatatataaacccttcaatctaaaattcaccccttcatacaaaaaaaaattgtaacaataatagcatttaattatatcatcacaactttttttgacaattaaaaatttttattgaacgaaactaaaccagaatagaaatcacagagggggctgataggaatttcctatcatttcggtacacacaatagcaaagtagagaaaatagagctgatatattgatattggaatgaaaagaaaacaagttgctgggtattcgagagacccagctctctcccaagagctaatgctcactttagcaaaataattctctcccctattactctccttactcactcatatatatagcatcaatccctcccatacaattacccaattaccctctttatttataccctaaggcctaacagtaacatctttggtcgatgattcaatcctacaaagtgctttaagactattttgttatatttattaaattatgaaatcaattgatttgctataaaagtatttag

SEQ ID NO: 59639 - DNA, 827 bp, Cannabis sativa
ttatatttgcaccccataaaactttaataacacttcaaaaatatatagttaaatttaattttttataaaatgaccaaaatatatatctttaatttttttttatttattaatttattttttaataagtatactcaccactaaaataaaaatccaatgttaaaatctttccaaaaaaaagaattaaaaaaaaactattcattaaaaacttttaaaccataaaatcattcttcactttttcttgatctttcaaactgcttgtttaaacctttcatatatagatgcctgcaaataatcacacatagtcagtaacaaaatcccattttttttaattattgtgcaagatttgagcagtctaaaacctattaacaaaaacactctcttggccaatcaaaaatatttaataataaaaaacaaaaagtaggagtgttcataaaatagttgatccaatataatctgcacgatccaatccaatcagtaaagtgcagatatttgcacttgtgtagattggattggattgaaatttcaaaatccacactcgtgtgaattggatgttgattacatgtaaaagtaaccgatataatccaatccacaaatatttataaaaaaattaaaaaattatatatacaattaatattttaatgtaaagaaaatagtaatttaaaagtttaatacatataatacaattatattcaaaacttaataaatgaatgtatatgacattcttatatataattatttttacatacaattaaaaataaaattgaatatttttttatacatacaatttttttcttcctttgaatttataatttgttattttatttatt

SEQ ID NO: 59640 - DNA, 753 bp, Cannabis sativa
tgatgtcaaattcttccgttgctttgatgatatcttcaaatgcaatttttccatcaaaattccaaattgaaaatatatcgccatttcttgtacttgatctttctccaggctgaacatttcttcttttaaggcgacgtttcaaaattacaacaaacccagtaaaaaagaagaatattgagatgatgatgagaagaattttaactgttgtaatattctttttacttcgggaagatcttgggcagttagggaagacacttatggtatcgcaacataaatccttatttccaataaataagtcagacaataattcatgtccagatgttggtgtagataatttattgagaagcgcatcttgtattggacctctgaaattattgtgtgaaagattcaagtagtctaagtatgataagttgacaaattgggtcggtatgatccctgatatattgttatttgacacgtccatagagtccaattctgaaagattctcaatatccttacctatagaaccattgattctatttgaactcaaggcaagattttgaatacttgataaaccaatcaaagaagggaaaattggacctgtgatctcattaaaactaaggtccaaatatgttagattccttaaaaattggaattctaaggggatggaaccgatgaatttgttttgtttaagatccaatgttactaggcttctcaagtttccaatttgtggagggagagaaccagttaaatggtttagacttagctccaaat

SEQ ID NO: 59641 - DNA, 4219 bp, Cannabis sativa
ctgttggtgtggttatggagtcgtactcgttgctgctggtgcaagccgtgcaacaaaagaagcgtttgttgtctccggtggggctttttaatttcagattgtgttgcttttattcaatcctctcttttgtttcatatttcaattaattttgttaaacggtccgggaaccaggcggctaacattttagctcgttcttctagttctattcctggctgtgtttcccgtgggggttttgtccctgttggtttggaagctatcttggtagcagatttggtttaataaaagttaattttttggctcagaaaaaatactctctatttttatttaaattttagctaaaatagctaaaagattaaaacagggaactaatttactttaatcatgtttttttaatatttaattattttaataatattttatagtttaaatttgttaactgtaaattaatttcataacataatgaaaaatagtagcattgttttataaaaaaatagcaaaaatgtatagagtcattgtatattctatattatagagttatttttataggataaatatcattttggatcacgtgttttgcaaaaattaccaattggaccatctgttttgttaaatgataaaatggactatgcattttccaaaatggtaaaaataatttttgacaacttttttttttttaatataatcagcttaaagataattcctaacacgaacagatacaagaaatgtatacaattttgtcataacacatttagatcggattattattaaattttattttgacgaaaaattaattcgggatcctatttgtaccattttagaaaatatatggtctattttgctatttaacaaaacagagagtctaattgataatttttgtaaaataaaaaatttaaaatggtaagttcatttttaatttattttaattaaaaaaattgtgtttaaagaacagtgttagatagtactgaatatcaacattaaagatattgttttataggcctacatgcatagttcatgcatataatgaatctagataaagtagatatataattaaaacaatattagtatatataacaccgttgatagagtctaaaattattgaaagagataataataatgaatcatgaaatacttattaacaaaaaaattaaacatcatgataataataataataataataataataataataatcccattaaataattttgtccctttgcttatttaaaatttaattatatatatttaaacaaactcaaccaagatgaaatgccaagggttttaattacttcttcatgtgctatacacagttacaataaatgcaatattatccattggaatcccaatatggaggaataatatatccttgacattatccttctccaactagctagattccttaaaccaaataataataataattacatttttgcttgttccatgaaagaaataaaaattgtgttaagtattttattttttattccatattatccctaaatatgttcctaaattttttgtgtcacatctatatttgaccaacttcataatcaagcttagaagaagccaagtaaacttcaagattatgacttttcgtccacataaacctacaatcccaccataaaaatacaaaaagttattaattttcttttacctaataatcaatatgaacaaattacacacgaagtcaataaccaaaatttcgaagggtaaaaccgtcaagaataatgaatcaccactccacgtcttccacgtggcaatttttggctgagacggtgggagagaagtcgccttctccatttttcccatctgacattcctaatcttaaaacaaaaagaaaaaaaaaatgaatttattttacttttaataattcccaaaaatattgctacaatatttcccaatttgcccctaccatttgtttaatatttccttttcctctcgtcttctccatttctagctaataatgctatacacccaccaaaaaatggctgttttttcaagatatttatagtatatatatatatatacactaatcttttgaatgtcaccacgagaataaacccccttggacttttcttttcatagttcattgaaaaggtatgccttcccacttcctcttattttatattttattttttaaaattattgtttcaggtgaaaagctttgttatctttccgtttttgtcatcgtcttatgcttttgaatcaatttgagaggtcaaatgcctgttctgttcaactgcttatcgtaatttgatggttatgtatatgggtttttgtttataattcatcctatggatttttcgtagctggtttgtttcaatctgtgatgtattgaaatatcgatacctatttgtttcttttttggtttaacttggttgcagagatcttactggagaacttttagtttattgggtttcgttttaatttcctgtttatatttttggttttccaattattaattattgatgggtttcagcttaaattaaaagttcgttggctgctgaaaattttgttcacaagcaaaatgataaagattaaattttgatgttgttactgcttttggttttctgttttatgtgcttttgtggtggctttaatgctgaaggttgatttatatcgttgctattgttttgaagtttcatatattataacatgttgctattattagttatcaactgtttgattcttatgtatacttccgattcaaacattggtgcagctaaatcattcgatcttttctatattctgggtgcataagatgcctggaatagttatggagggaatgagtgaaggtggggtgctgaattctatgaatggaagttctacacctccaaaggaaaacccagctgtagataagtcccaaaagagtgatttgagtccacatagtcctcagaacatgggttccaatctccaaggtgatgaggttattgacacctcaattgagcagctatatgaaaatgtttgtgacatgcagagttctgatcaatcaccatcaagacgtagctttggatctgatggtgaagagtctaggatcgattcggagttgcgtcatcttgttggaggagagatgagggaagtggagatacttgaagaagaaattcatgggaagcccacagatgattctcgtagtgattcaggttcgaaaaaggaaagctcgtctgcaggtaaaaaagcagaaaaggctgagaagactcaacctgcaagtgcgaaatctgtatcttcagggaaatcaaagaaagcttctgctgtgcagttggaatctgaaacatcaccaaaatcaagttctaagggcaagacatctcctgagaagcctccactcgataagaaaggtgataagaatccgcggaaacaaaattcgggagggaagaaggtgagaagtttggggtcaaagttgcagaatggaatggatgatccaactgatttaggcttagaaaatccagatctgggcccatttttacttaagcaagcaaggcatttggtttcctctggagagaatttacataaggctcttgattttgctcttcgagctgcaaagtcatttgaaaagtgtgcaaatggaaagcccagtttggaactagtcatgtgtttacatgttactgcagcaatatactgtagcttaggccagtacaatgagtcgattcctgttcttgagcgctccattgagattctatcggttgaggagggccaagagcatgcccttgctaaatttgctggtcaaatgcagttgggagatacttatgctatgctgggcatgcttgagaattcactgatgtgctactcaaagggactggaaatacagaaacaaatgttgggagaaacagacccaagagttggtgagacctgtaggtatctggctgaagctcatgttcaagcattgcagtttgatgaagctgaaaagctttgccagatggctcttaacattcatagagaaaatggtgcccctgcttctcctgaagaagctgcagatagaaggttgatgggtcttatatatgaaacaaagggagatcatgaagcagccctggagcatcttgttttagccagcatggcaatggcagcaaatgatcaagaagtagaggtggcgtctgttgactgcagcatcggagacacatacttatctttgtctcggtatgatgaggctattttcgcctatcagaaagcgctgactgtgttcaagaccactaaaggagagaaccatccatctgttggttcagtctttgttcgg

SEQ ID NO: 59642 - DNA, 1909 bp, Cannabis sativa
  modified_base (867)..(869): a, c, t, g, unknown or other
cgacatctctattttatagaaacacgtggaatcaaagtgaataattgaatcgagggaactggtcctgccatttaaattatatgtttcttttcactattggtacgtactcgtttctttctattgttaattatgtgatcatggcaaaaccaaaaacgacagaaaaacaaatgaagtcaaggtcgtcttggaataattatggacccacgccaactaaatcaacatgctcatatataaatcgtcccaataatttgtgtgtgaagtattaatgtagatacttttttttttaatttatttattaattaaaaatatttttatattatatttcattattaaaacatattcactttttgaatggatttttcaatatatcatcactttctatttaagtctagcacatattttatattaacctaaatagtattataagaacactatctataaaagtaaatatatcttaaaaaatatgaaaatgaaagtaaaaattaaaatagataaagataaataaatatacaatgcaattttctctatagaatctctatttaagaatactctatttaagaataatctctaatttattatataaaaaaaaggattatttcataaataaacaaaaacaataaaagaaattacaaaaatacgatttcacggaattttaaatatttttacgattttttattttatttacagtacaatctttttatattgtactcttattaatttattgttgattttttattatctgtatgttattttttgttgttatttttatgttattttcatattatttttatgtaatttttttattgttttcgtgttgtttatatgaaaactataaaaatatatataaaaaaaattctttaaacgtannnatataatttttttttacaaaaaattgtgtcttatgtaattatctcataataatcaaatctcaatttgggctagttataaataagaataacctttaaattgtaattagttatacattttctaagtctcgtattaacaaagtatacttttatataagaataataaacgtaataaaatatacatatattttgtaaatttatttacgtaaaattaaaaaaattattccaaattataatacatatataaatattatatttactctaaaataattctattatgatatagtattcataattgtttattgttattattgttacatgatatttttcagtattttaatttttttttctagtgtaactctatttaattataagctcttaattaaaatataatttgcttgtcccaaatcatgtattattggatagatattctactgtaattctaattaaaaataataaaaaactataaaattgaaaaaataaattataaaatgtaaaaataatattttgaccattttaatatatatttttttctcttggattcacttgtacgtatttgaaaataacaatgcaatttttttttaagataagctaaggttatcagttttgaaaaaattatatatttatatatattatacatattatcttattttaaacaaaaataattttttaaaataattatccacctataaataaataattaatatatttattttacaaaagagagtatagttgtgataagatgataatattatgtttaattattaagtacaaataaactaatattaaaatataacatttatcacagttattaaatgcaaattataatatccaatatatattattttattttatttttgagcaatttctttcttttctttttaatatacaatttattaaaaaaaattgtttatctacactttttcttgtcagaaattttatttttagtattattatttggtattttaaaatgtgtaatattatactgatgtaacattttaaaattagttagcaatttttcttattaattattaaattaaaat

SEQ ID NO: 59643 - DNA, 1306 bp, Cannabis sativa
ctggtaaaatattcccaacatggttgtttagaaagtttgagtttaagaacttaaacgtgcctcaacaatggtagaatttatatttttgagttatacttgtgtttactacttggaatatgtttgttggacctctattaggtgttttggagagttttgaaaaatttagggttgatttgtaaaagttgtatggagacttggtgtatttttgcagcaaaaaacgacaggtcgtttttgagaaaacattctaccgtttttactggcagggacctagaaaaatggcttgccatttgtatagaaacaatcttccctatctcaatcacaatgtctcattagttgagtacacattttgattacaaaactatattcatccaaattgaatctaagatcccactctattcctggagtgttgaggctgacttggaagaccctggtgtgaactcttcaacaagttcttttggattgtatgttcaattgaataataagaaaagatactgacaaaacaattataggcaacaagaggtaaaatctctaaactaatagttaagttcgtattatgtataattgtgttgagatttgagattatggtttatatcagattcaacaattattttttattaaatccaaaattttattctacttttgctgcgactctaatatgaactataaaagctaacagatgcccgtatttggtaggagattgtgtcccaatgtcatgacttgaatacgatgacttgggatatgtttcagaccttcttctatgagaagtactataatgaatttatctatgctgctaaggcagaagagttcatacagctggctcagggtagtatgatagtgactgagcatgtaaccaaatttgatcgattggctaagtttacttccaacaaagtggccactgaagctgctagaaaggccaagtttatctgaggtttagaagaacatattgctcgggatgtaattgtactactaaacaacaataagggttgttcgatcttatgctcaagaggttgagttatcccttgctgctaagggtgttgaagatcagattcaaaagaagagcaatatgaggagagattcttggaagccctcttccaatgttagtctgggtaggggtttttaccccaatgatcgaaagagaagacccaatgatccaccatccacgtgtcccaataaaatgtttcaagataatcaaggttttcgtcaaggcatgaatgaatactagaggacttatcctacgtgcctcagatgtaagatgccatcaggacgaatgtcaagctcgagtctgcttctagtatggggtagtagg

SEQ ID NO: 59644 - DNA, 1238 bp, Cannabis sativa
cacattcatatatgagcaagctcctaaaaagcttaagtggtatttccttaatgatcccgatcaaaaaacatggagtttgttcttatatgttctatagataccttattactctgaacatcattttattaacaattacctcaatcaatatgtctttggccttgtatagcttatgttattactaaaatatgcaaccttattaatttattatcacaacatatatatatatatatattttaatagttttcaatactatcattcctaattttgtagccacatgtgacaaaaatcttactattaaaaattttataagatcaaaatcagaaatcttaatgacctccaaacattttaattattgattagtgaacatgtagtctcttgttctccataaattcattgtaacccttttggctacattccaaaagttccatctaaggttacttaaatatttatccaaaattcttaatatgtatgttaaatacaaatacatacatgcttaagcatatattagattccaatataatttaagaatcttctatatttattgaattctaaggttgttttcagtaaaatgacatagaagacttactctttagctacaagcatttcacttagtatagtatctttcgtgctaaaaattttaaatactttattgatatatctattttattataattcaaagatatcccaataataatctcaccttatcttgaattgctaatgcaaaatgggtacacattaacggcaagaaattttttttaccaatatataataccaagattatatatttactcttactgaacctgtgatatatacacaatcatcaaaagcttctatctcaaaaccaaatgagaatacttagtgaaaattgtgttatcattgacgagaagtttacttaagttttgttataaccaaaattcggttggaggacatgtgtcaaggtaaaggaaatgggaatcggtgcaatatcttttatagaataactcattaattgtgtaagtatcagagtatatgtgtaacccgctgactgtaaggtcttaggtgagaaatcaatgtacgaactggcacttagtgtattaacgaaaaactatatgtcgctgaaggagaatagcgaggcaccggagaaaagtaaaaaataccctatcttgcaataagaaaactaactgtaaaagtcggatcagctcgaagaacaagaatgcgagatgacaatctcgctacgaggaaacttcctatagtttcat

SEQ ID NO: 59645 - DNA, 792 bp, Cannabis sativa
  modified_base (27)..(31): a, c, t, g, unknown or other
aatacaaaaaaaaaaaattattttgannnnnaaaaatgaaaaaaccccaaaaaaatattatacgtataacgaaagtgatataaagaaaaataaatcttgaaaatatattaaaaaaattgttgacatggtaaaaatattataataataaagtatttctttattacgttgtaaagataaatatataaatttattaatattacttctctccaagaacaaaaaaataacattttctttttacttgaaaatagtaataatttcctttccaatttttcttatgaacttataaaaaaaataaaatattaattttaagatatttactttttgtggtacacgaagagcttctaaggtgacataaaaaaaatactacaacatttatcattattaggggcggagccttccgccgctaatgatagcaaaatccgccggtaaaggttaatagcagtggagcccgccgctattaatccgccggtaataaccggtcgttattaacatgtattagcagcggactgatacaccccgccgctaattataatgtcagattcgtaaactgatactattattagcggcaggtcagtccgcctctaatggtttttttaatttttttaatataaattattcatcaatatattttaaataaaaaaaaatagtattgctttaaaaaaatacattaaataataaactttaagccaaataattaacataaacataaattaaaattaagtttaatattgaatgataatagtcattacacaaattagttaatacaatattctctaagtaaataattacaat

SEQ ID NO: 59646 - DNA, 668 bp, Cannabis sativa
cataactggataaaacgtgacaattctccaacatatatactatagtatactatggaacttaaatttaacatttggactgcaataacccgttagcagtcattttagacaagacatgcattgcagtctactgttttcatcatcaaactcaaatagataccctcctcttccctccccactctaccatcccctctcctacataaacacaaaaaaaatttagtagatacctgattaacaaacgtcctttgaaaagggcttttatcactgtttaactgcaaaggaaaagaaaaattaactgtgaatacaaatgtgaagttcattaaataaatttatcgggaaaaaattatcacaagctaagtcgcatgctcatattagatatatatatatatgtgtatgtgtatatatgactatcaagctatacatatcaagcagtactgtctaaaatatgtaagagttatgttggtgtgggcgtgactcattaacgatcttgttttatgaacaatgaagtatatgatcccaagcttcataaaaatatgtgaaaattagttccccgagtcaatgttcagatacaccttacgtactagtctagttatgagatgtagtaatgtagcttggataagatattgataaccttgaaacatggatatcaaacatccagatttggaaagaat

SEQ ID NO: 59647 - DNA, 685 bp, Cannabis sativa
gttctcccactgtgccgcatcagccaccactaccacactccacctttcaggtctccaccagccgccactccaaccgcgtcgttctcctaatccttaccacaatttttactttcaggtatctttttgtgattttatttttctatttattatcattgattattttttttaaaaaaaaattatattttttgtcttggtttggaagataattagaaacataatatttattgtggaagaaatagaaattaaaaagagtatattattttttttgataaagaaaaagagtatattattgtatctatgtgatttttttttttttaggttaataaaaaatgtttttaatgagtgaacaatgattagaattcaaattgtaaatataaaaataaagtataaatgtataagaaaaaaattataaaaaatgaagaaagtgtaaatataaaagaaaatattaaaattttagggtgggtatatgctacccctagtcctatattgggtacgccactaggcatccacattaatttttacagtcccatactaggtggcatccagatagaactagtaaactatttgaatttgaaggcgaattcccagccgagtaagggccactggaacccttgtttaatctctaggtaattatgaataaaatcacaacctcaaaaaataataatatctagagcaattaacttag

SEQ ID NO: 59648 - DNA, 1360 bp, Cannabis sativa
caaaagtcttccccgaccgtctcccaataatgtttgaagaatagtacagacatcccgtctggaccaggagctttatggttacccatttcaaaaagggtacgcttaatctcatcctgagaagggcaaataactagttcctccttttcctcttcctgaatccgttcttggaaaaactggctacagttgaaaccctggccaacatctgacccattaaatattcccgtgaagaagttcataaattcacgaccaattgattctctgtccgaaatccaaacaccctcattgtttaaaatgctttcaatagcatttctcctatggcgaatagtagccgagagaaaaaagaacttagagcacttgtctccctccttaatccacgaaatccttgcctatgcttccagtacatatctttcctttcaagggcatcattaagagatcgacggatcgatctttcagtggtccaatcacgggagcctgcaggtaagctctgaacccagttaagcttatttttaagttctttaatgactgtgtccatcttgccatattgagttctattccaatgcaaaagagcgaccctagtagcacccaccctcctaaaagcgcgggcaggggcccaagagtggaagactgaattccaggcctggtcaaccaccaaataatcccttattacacttataataaaaatgcaaacaagaaaaaaaaattaaatagaatctttcaatttttttttaaaaagtcaatgtgaaaagtaaaatagcatttaaaaaattgtaaaaagtgaaaaaaaaataaatacaataaacatcggatcatcattcattgaaattttttttgaaggaatcattcattgaaattgatgtttctaatttcacaacataattcatttccaaaatcaaaaaaaaaaaaaaactaaagaaaacaaaaaacaaaagacaaaaacaaaaaaacaaaaaaaaaaaaaaaaacaaaaaacaaaaatctcacaacataattttggatggtgatttaaattggatttttggaaacaatctactaattgagcacacactatctctactcttcaaagaaagaatagttagaatttttattgttacactaaaaattaataatactaatatattttaaaatataatttttacataaacttaatccttttcttatattttatttatttatttcgtaaaataaaagatacaataaattgataaataaatacaaattacatattttactctttttacgttaataaataatagaataaaataatttttttataataattaaaatatttatttttagttttttatttattaaagtaaaaaggttgaaaagtatataatttgcatgtaaagaccgcttagtt

SEQ ID NO: 59649 - DNA, 764 bp, Cannabis sativa
catcttttaaaaaagcattaaaaagcgtaatattttaataatatttattcttatttattttttaattatacatcaattgaaatggtagtaaatattcaatacttatgattaatattttttatatgattatgtaaagaaaaaatatacaaaagtaatggaaattataaaattattaaaatgtggaatacaaatttaaatttatataagatacgagttggtctattaaaaaaataataataattaaggctcgaataaagttttacacaaacatacaagatatatcctataaaattgttaccacgatacgacacgatcactatccatattttttcatggctcgtcatagaacaatttatatttttgtggcctttgcaaaatacaagttgagtcgacaagcatgtatttacgatgcattctttgtaccttcgatatccaaattattttaatcttaatttgtttatatgacagtgtaatttaagatttcttgtagaatttcaaaaaatttatattagtttaacatgttaaaaacacgattcaaacaatctgctaatatataatgagaaaactagtaaattttaaaatatctcacactagtaactcacattaaaaggataggaaacagtatttagtgttctttaaagaggatcactaaaatctattttgtagcatgagatatttatttcttatattagtcttaattttaacatgaggacattgttgggtttgcaaaatatattactttaatcaatagaataatgctcaaa

SEQ ID NO: 59650 - DNA, 1240 bp, Cannabis sativa
aattttgtaggataacttaaatagatataacgtacatgaccatgaaaaaaaattagactaaaaaattcctctggatgtcgaaacaaatttaaagggaatcaatacatccattttaaggtgcatcctataatcaccccataactttatatatgaaaagtgattatttaacatcatttgttgggtaaatatccaataattaacccaaaaaaaaaattaaacaatttaggaggaaggagaaaggagtggcggcgccggagaaggaggtgggggtttgatttgattggttaatattatgtggttgaacagtgttggagctagattcaatggcagtgccggtggtgctgtgagttctttcgtcagatatttctaaagaaaacgcgccgagaatgtgagaaaaatcaatcggaaggtgagtcctcaagaggcttcttccattgctcgcaatctatacgatgtcatcaaggaacatggtccactcaccatccccaatgcttgggttcacgccaaggtcctccctttcttcttcttcttccttgtatttgttgctatctgatctatgatgagaatgcttaaaacattgtaatgatagatacttacatagatatttagctgtttataatcaagcttctagcttggtccaatccaactccaactatttactctatttcgtttaaaagctaatttcttccatttctaataatgttttcaaatttgaacatggttcaatattgtctattttagcagactggtggatttggaaatatgtgttctttgtttgcttcacttgagttgaccaagtatgatcatttgtgatctcttatgaataaaaatcatgacttgccgttgcccatttgattgataatgaatctccaaacaattatacaaaatttgtgtagcataaggtaattttttttgtctaccacaaacccaatttgtataaattcccctaaaccttgtttagacttgttgaatattaagggtggctgcatctttgatagtttgtactgttcactgtaaatgttaattgtattgatatgctcttgtcaagtatgtggtgctttggtttctagtctatgcaggcacttgtttgtatgtgacatgtgtatccatttgtagtttatgtcagcttcagaagttgagtgtagatttagttgctgtaattagtttctgtgggattcatcccttttagttcagagttgaacattttaaagtttaaagatgcaaattgaagataaaaaga

SEQ ID NO: 59651 - DNA, 1456 bp, Cannabis sativa
ttcttctcctatgttaactcctacttttatttattatttatttatttttgaaatggtcctacttttaattattgacaattatttttcctcctactttacatccacatatcttatattgaactaacttatacatcaaaattccgaatctgagagaaactggccaaataagatttcaggcattctacttgtgtaaataccattaattaatgaagataaaaaaaagtcagttgtgctttgtaaaatatttaccttaatttttgtactttaattaataagttatagttaaagatgtaatacaaagagcaatgaagttatagagatataataataaagtgaaagtatagtatgtacctctccataacgattgccacgaagaagatagagaaaacaaaaggaacaccacacaaggaccaagacccccagtttcatccatggaagtccatgttcacaatttctttctgaacccaaaaggggttctttaacactactattgatctcttcatgatgaactccttcaataatatctttcctagaatcattttccaaatctgcacacgatccttgtctctccatcactacagtttccaatgtccaacacacaaccccatttctacaggtcttggaggtggaccaagcaagaaagatagcgaaaagaatggtaatgagccattctgggaacataaggttacaaatgaccccaatactaactccaagtaacatagaaggttgtgacaaaagtgctatatcaaaatcaattaatgtcttcccaccaaacctgggaatagttgagaccaagttacatataacatttgcaattgaggctccagtgaccatgaaagctgagaagcttgaagcagttttgaggtctaagcctgcagttatagttaggattggtatgaagagaccaccaccaccaactccaccggcgctggatatagaggcagctaagaaacagaggactccagcaagaacaacgggagctgacaatttgagttgggtgtcagtgtcatgagattgtggttgatgagtttggttaaagaggtggctaatgttgaagatatctgagatgggtttagattgttttgcataggaatcatcgaaggtggtgaaaataaggaggagaatgatcagccatttactcttcatttgtgtctctgaaattaaagattaattagattaatgtgtatatatatattgaaggagagaaatggtctggtttgatgacacagtgacaaaggagaggagagctgtggttatagtgtttttgagaagagctgtaataagacatcttatatatatagtgacaaggaacatgtgtcccatggagcatggagcactggagaacccacataaagccgagaaaaaaaaaataatgagaaaaatgtatatatattttagttaatcatttgtttttagttaattataacaattctagggatttttttatttttacact

SEQ ID NO: 59652 - DNA, 791 bp, Cannabis sativa
  modified_base (605)..(610): a, c, t, g, unknown or other
tgagagactcctcgagtttaaacctcgcctgaactagactcagcgagatgatgcggatatgaccaagtctaatcgcattcgtgtggctcgcattatgcaagaccaagggacagatttaactcgcgtataccaagatatatgcgagtatcccctcaatcctcccccgaaaaacatagaggtcgattccctatgatgcaagctggtcccgatgacccaacaactgcgataaaccaaaacggactcgcatgtcctggttatatcagctcgttgtgagatgtttgataaagcgaccatgaaggaacacatacatcttagacttatttagtctcgaatgtcctgtaggcctgcgagcttgtacaagaatgtgaacagccaactcgcactgtagaagtcgcatacgttgctgaatttagtgaatagaaactgttcttcatttattaatgtttacgttttttagcttaaattattgtaaatcaatgtacgaacgaattgacaatgaacgcaatccttgtgtaaattatatgacacttgctttgtatataaaggagtgatccaccgtgaaatggacggatactgaatcctttgtaacagtggactaagcagannnnnntctgactgaaccactatattccttcgtgttctttgtatttctagttttttgttaagtacttgtgttcccggttcgagtactcgccgttctaggttgaatactcgcacttattcatattattattattactattattcattttgatgttgtaaaattccttcaacaacatttggcgccgtct

SEQ ID NO: 59653 - DNA, 1381 bp, Cannabis sativa
tattaaataagttgaagaaaattgtcactaccaatttctgagctgtcacttaatgggcttaattgacatttaacaatcaaaaaatagtactacgacaacaaaatcgtaaggtaaagtacttctgccaccacttttttttattaagatcatatgtgtaacaattacaaatgttaaaaaatagtgttctagatacaattttagtcggattttattttaattgagcttaaattagattgtaaatgatttaaaaattttaattgtttaaaatagacaatactgttactctttttaaagaaaaaattcactaaaaatatgttaaggacattatttttaacattttaattatcagatgatcctttttatcattttttaaaacagaatgtctaaaataaaatttaacatgatagggcagaccttttttttttcaaatctattttactacaacatttttatttcacaagcaaagtctataattcaatcgatataaatttttattattttatatattttttgttccaaacttatttattaacacattaaaattagtttagttataaatgttgagaaacatttaaattacacatattttacacattatctgtataattaatctcaactacaataaaatgtgatataatacttaaaaatatatatgaataatatttaatacacattattgtaagtaataaatgtgttttttacattctcattatttatatatactatataattgaagctaaacactttgagcatttggttgccatgtgtattgcattaatcaaattatttaaaagtattactaattttaaataagaaaattttaatttttcagtttacatttaaccaaaaaaaaatataaactaaaattaaatacgctatttaattatatatgctacacgtgcaacgcacgtctaaaaactagtgataataataaatttgaatgcagtagcgcgtgtgtaagctacacgtgagatatgcttaattttttatatttatttttttttttttttttcaatttacacatataactaaaatatagtttttgccttaaatatattgtaacttatcacatgagataaaattttgtagttttaagtatttaacacatttttgataaacacatcaaagaattatgattttttttattattatttttgttagttataaagatttttaattttaaatatttatacgaatttaaaaattaaacttttatttaggattaatttttatgtttataaatttacataaaaaaatatattttttaaaattaactagacttaatagatattatttaaaatatttatggtatataatttgaattttataataaatattaactaaaaatattcaacaatttgttatttcattatttttaaaa

SEQ ID NO: 59654 - DNA, 952 bp, Cannabis sativa
acttaattatcactaaataaaaaacaaccgcacgcgaagcgcggtttgtttcctagttctatataaatgagaagtataaggcggtgacttggcggtctaaaatttctctaattagtcttatttattctcttcttaattctctcattttttttttaattttttattaacttcttaaataataattgatataaaatatatatctttatttattttttctttgattctctcattttttttaatttattttaaataaattataacttcaaatttatcatcaatttttcattttgtttttttgatttatttttactgtcacgtttttttacttcttccattttttttaaattaaaatctataagttatatataatctttatataaccagtacttggcatatatattaagtaaataaaagaattaatttaatgtataggtaattttttttcttttaatatgtaatttatatatttatacataatattatattatacaatatgttgacaaaatatactaactacgaaataattttagaaagttctttcaattgccacagtgtaaattacgtttaataatatttataaactttgtttttaacttaaaaatatctattaaaatttatttatatatctacaaaaatcatttattttggaaaatcaattggcatagtgctaattataactttctattacaacctcttagtcaaccttcacgcttgtaattacatgccgaaatatttttttttataacggtatattttaattatagtatcatgcctataaaattttaaatttttttgaatagtttacaatacctaaaacaaagttcttgatattcttattttcgacactgtaaaccattcaaaaatttacaggaatgcagaaatagaagtgttgaccgaggttttcggcaactagtaaaatatgattataataatgagctgtaagaaagcgaga

SEQ ID NO: 59655 - DNA, 1784 bp, Cannabis sativa
aaggttgcatcagacaaaagtttcgataccatgaagcatggatcgtgggttactgttgaaactgtactgcaacaattatatatgccgcgagccagctacgtgcaatctaattgcaactaaaaaatataaaatgtgaatgggtatatgtaagaaattatttatcagtattttatttttttactgatcgagaattcttgtaccctaatagtaatatgtggagaaataattgttagctaaatgtttatacaactgttatgaaacattaaaaatcagaacaatattttcacgtacgtcactctatctacatgtctcttcttgatttaatatgatcaaatttaccattaaaaatttagtaaacaacaaaaattataatatcccgataagcctaatggtaaataattagggtttttatttatattatggattaatcaagtaataagtgggattatgacaatactaatttatttcagcatgaaatttaaatttttctataagtaaataagcgtaatttgttaattacgaagatttatatagaaagtgttaatgtaatacgagctacatgtgaaataaaaatattttcaggttcggcaaccctgaagactcgataagtggatatataagcgtaatttgttaatgatgaagatttatttgaaataagtggataaaatatagattatttgtgaaataaaaatattttcatgttcggcgaccctagagactcgattggaggctaaaaatgtcacaatagttttatttagaaatattgatggaattattgggataagttaattttttaaaaatatcgaaatattttagaatactcgaagttgaccaaataccataaaaatagagatttgttagtggctacaaaataataagataactattaataataaagtatttattaatattatattattataatattatttttatacatacataaaaatgatcgttaatcttagttacagtatatataatattatttatatatattatcatattatttttacatatccataaatgaaacaagtaatgaaaccctcgttctttatcatccgataaacttttctctccttatatttattttcttcaattttcaatcaaaaacctaactatctaagctccgatagtagcaacatagcaaatcttagatgctggaaagcttaatgtatactttagtttcgttttaagtttaaaaataattggtttcgtatacgggttttatgaatcagaacagttatgaaggttctgaccttataggattgttctcgggtagatgggactagttccgatgttttgttgctgaaattgatgtgatttttctaacgacataccgggcataggtaccaacgttagtgatatatgatgagcaccgagcgtaggtacgggctcacctgattaggtgatgcaattttcttggcaacttaccgggcgtaggtacatgcgtcagtgatatatgataagtaccgagcgtagttacgggctcacctgattaggtgatgtgattttcctggcgacgtatcgagcgtaggtacggccatcagtgatatgaaaatgtcttgttatggtatagatcaaaatcgttgtcgggtttctttctggcgatgtatcgggcataggtacgagcgtcagttatatatgataagtaccgggtgttggtacgagcttgcctgattagacgatgccatatattggtgtcaagttgtggcacgagctcacctgattatgtgacgcagttatgtgatatatgggtgcaggttattagcacgagctcacctgat

SEQ ID NO: 59656 - DNA, 1359 bp, Cannabis sativa
aaaagaaaagatgattaataacaagagaaagcaagaaatacatatgttatatttttttacagagatattgatatcgacataatgtttaattaattatgcagtagttttagagtacaaccattattatttttttacattataatatcgttattaattcaattaaatatcgagtcttatatactttaatataataactataatagaatatccttagttaataacaagacgacaagtttatagaaggtggtaggcaccaataatactcaaattttgtaagaaaaataaatcatataacatttttattttcttcttaatatcgagccaaatagtagaatggatataattcatgttattattggaattaatcatgaaaggaaaataggagatttttttatagatattaataggagaaaaaaaaaacataacaaatatctaaaataaggatagtaaataaaatagaaacaacatccagaaaaatgacaataatatcgacaaaattgttaggtatatgtatttatatatacactaaagaatttatatatatatatccaaaataaaaggagagaaaaatataaaatacatccgatgcaaacataataccgccaatcaactatcaaggttataacacaacacaagtagtttggtaaaaggatatgtatttgaatttcattaaaaaaaaagttatgaatttgatttaaaaaatccttttgaatgaaccatatatattaccaaaaaaattcactagatacaagatactgccagttaaaaagatcttctatgagtagttttggtaaaagaatatgacaaaatccttatgaaatcagcacctagtatttttacctatataagtagcattttcattaaaattagattgtatactaaataagttaaattcaattggatttcctgcatttcatagatcttttaaaacctataaattctcatggcaaatactaagaaattcacaacttgcaaatactaagtaattattaatacttagaattacaaattattaaacaaatagataatagcaatggaattaggtggggtagtcatgaaaaggtggatggtggtgttgattgtggtggtgggactgatgttctttgtgggaactgaagctgttagagttcttgatcagtgccctaaacaagaagtttttgaattcactatcaacccatgcactccctctgcatgtactcaggaatgcaaactaactgttggtcaatcgtttttgaaggcctactgcaatgctgacacactctgtttgtgttatggttcagaaccatgccactagacactattacgaaacaaagcctttataattatgtcatattgtcactcaattatgttgcttttttt

SEQ ID NO: 59657 - DNA, 827 bp, Cannabis sativa
tgtgttttaacttttttttagatattaagaatattatgtagttcctttccattaaactggtgttattttgttatgttttagcttgaaacactagatttagttttctctcaaaatctgaattttttgtagtttatcgattgattatcgataggatatcgatataatctcaatgatatgcaagaaagggtcatggatgacgtttatcgataggatgttgattacttgttgacatattgtcgacaatccaacaagaattaaatcaattaagcattgtttgttgacagtatatcaatattatgttaataatattcaaaaaaatatttatccgaataaattgacgatgatttgttgattatttgtcgatactttaccaatgatttgacgatggtttgtaaaatttcagtttgtaattatatttgttatttgtcaagatattgttgataggatgtcaatagaatatcaacaagattataaaaattggctaaaacaagtaaattcttttaaacataaataaagataaaataatcaggataacaattatgaactttaaaagtaacccctaaatgttaaacttaaaagtctcgatagtttgggtgatcaatgcaacacatgtacaaccacccaggagtggccagttcacctttaaccaaatatattttgcaacgacgtcaccctttggggaaccctggtggataaaagagaacaccatccatttacatgtgttcgaaccgttccaggagtggccaattcccttgccctcatgcatgtgtcgtaatattaaaaataaatacgagtgtatactgtaacaccccgatttcccgagatgt

SEQ ID NO: 59658 - DNA, 663 bp, Cannabis sativa
ttttgttaatatagttttattgttcaaattttgggagcaattttatcccatgtgactcgcgataagaattctgcagttcatggtttgacaaaacatatccttcccctttagttagacactgagctattctggttcgaggaggtttgacgcctattatagtttattgttttgttaatcatgtatgactttattcactacgttaaaaaaaatatgcgagtcagaggacaagtgtacaaatatacgagtaacaaatatcttgttatttcccaatcactaatcactagtcactagtcactggtcactattcttattattatcttttttatcatagcaacagtcaaacagttggaccatgtatagtttcattggattggatttttgttaatgtgtatcagtatcacctatcaaaatgttcctaagaaaatgaagaatggccaaacacacaaggacaaagggaagtgtctttagtgagaaacatattaggtagcttttgtgttagattgatatacttgtaattttacaacacacaacaattccacaacgtatatgtaatctcagtactcctctttcagttgaagccccacagaatctaaacactgtgaccaccctagataggtatgtacaattagggtttacattttgatcaagacaaatttaaaaaaa

SEQ ID NO: 59659 - DNA, 1193 bp, Cannabis sativa
  modified_base (1124)..(1151): a, c, t, g, unknown or other
aaaacatacccaaagcatgctacataacaataatattgcacattatttcacaagctttgaaactcaaagcttcaaatctcaacccagaaattcaaagcaatttccaaaattgagacattaatacaacatttcaaagccttccaaaataactaggatgaatcaatcaaagtcctaataacacattcatacaatattcaccaaaatttccttaattttcataaacatgcatctacaaacaaagaacattaagaacatccaaaaacacaattatgaagcttcaaatatcaaaattaacataaagaaaagagattaaaaatatttaccacaaattcatcaagctccaagcaagaactagcacaaagccacacccaaaatttcaagcatttccttccaaaattattttgaaataccaaaacggagagggtgagagagagagatgtggctagggagaagtgaaacccgaaaaaatgttttctaattttgccaaaatcagattttgttgaatatacattatttggtcaaatgaccaaattgctccttagacacacatataagcatattcacatcaaaggaccattttgccatttccactcacacatataaattatatttttctatttaacatataaaagccataattatatcccaaaaatatattaagggcgctgaactcagttcggcccaaaatactcggttgtgactataccgtatcgacttgtcagaaaacacatgtagaaagacaaaataaatatactatataataatatagtctataagcacaatgtgccataacattataattttacccttcccaggtcaaaattacaaaaatgccttgatgcaccaactatggtcttaaaatgaaatagctcataaaatttcacaattaaatcaaataataatataatttttcattaacacttaacttagtagttattagggtggttgtgctaatccagttattaaaccttagggtattacaaatctacccgagattgtaggagcttcaacaatcgtaactacaccctataatatagggatatttgctttcaggttactccttttgcggagctaattgtagctgctagtttttatggtccatattgttggaatttattttaccnnnnnnnnnnnnnnnnnnnnnnnnnnnnttattaacatcctaaataagaactttctaaaacgataaatta

SEQ ID NO: 59660 - DNA, 1260 bp, Cannabis sativa
gtatgaatttatttgaaccaagtagtttatttttgtttattgatatttgtagtgtcaaaatgaacaatcctcaccccaatcctcaactagtatatgcctttacaaatgaacttcgtagtgtgttgatgtctgctgcttagagcatcatttcacacttatttttgatgaacttgaaattccaaaatgtaatttttttgggaattgtcctatcaaaagagcaatgtgttcagtttaatctcaacaacctatcacttgggcataataaatttgttgtatcttatatgatcaacaattggaacttgtccaacatgaataagctggatgctgaactacatgcttatgaaaggacgttgtcacttgtaaggagggcccactctagtattgcagataagggaaaaaagaaagctgaagatattgagaatgattcctccgacaatactgcaactttgagttcaattatgaaagctagaattcaaattgaaccagcaatacagactatcgaagaacagctaagcagatgtattcttctattttcttagtgtggagagaagggacattttaaagcaagatgtcccaaacttctaaaccataagaatgaaggtaaagcctttgtttttgagtcatatgttttagagaatgacaaatccatttggattgttgattctagatctactaactatctttgctcttcattgcagctacttgaaacatggaattacttaaatccaatggagttgaaactcaaggttggtaatgatgagtatcagtccaagctagaggaaaagctcacctaaagttttagaataaatgtttgattttagacaatgttttgtttattctaaattttagtagaaacttgattagtgttttatgtttacaaacataaagttttcaattgaatttttcgagttctatttccattatttctcgtaatggtattatgtgtctcacatggaacaatggctttatgctttcagaccagatataccaattgcgctcatgaacaaacttcttaatgttgctaaacctagaaaccataaaaatcaaaagattgataataataatgaaacatatctatggcatttacgacttagccatataggatacgatagactgcacaggttaaccaaaggtggtccattaaaaaatttcaccttgggtgacttgctagtttgtgagccttgcctagaaggaaaaataactaagcgttctttctctgcaaagtgagagcgtgctaaagaacctctagggttagtacat

SEQ ID NO: 59661 - DNA, 7447 bp, Cannabis sativa
ctttttgataatgagataaataaactgcttctgatagagagatctagggaggaagacttagttggtagtattgcactatcgaattaaggtaattgctatgaatatatcaggtacgcatacctaattattattgtgttctatgttatatacaaattgatcctggatttattattaatttttctaaaaaaaatttcatcacctttcaattttttcttactcggacataagtccttaagaaatttagcaatgaggctcttctttaattacctcaagatatgaattttttacctcaattttaggaagagttttagggatctctttgatgggctcctctttctcaattattttcaatctacttggaaaaggtggataagtgacataagttggtacaactaatttgtatgttttttttttttcagtgatggtggatcaactaaagtaggagattcaacatttggtagagatgattcttaaagggatgaattgttgacttctccagttgaaatcaaatcattaacttcttggtgtggtggtaatttaagttgtgtaccacttcggatagtgatgtcactgacattctctattgggctactctccacttgtgaaagcatagtgtttgaacatttaattttatattcacacatagatgtttcttttacttcgcaagattcttaatattttgtaaagatttttgggtgctctgtataatatcctaaaatttttgctaaatgtgcaaggtattttgttcaatcttcaagttattagttgctataatctcaattagctcatcagtagttggtttttcactatatggtgcaacatgagtaggttgttgaaaatgtgcattattttgttgcctctaaatagtagaagccaccaaagtattgagcagactagtaaagaatgatcttgatcttgtggtgctacagaggatagtgagatgttggttgaacataatcaaaattattatttttgtgacgtaaatacttaagcttacattctatttacagataaatagctaagttaattgttaacataatacgtaagttatattttttaaacttttgtaggtattgaccgttaagtatcaagtcattgacagcatgacagttcttgattggtctaagtcattgttaatattattactggagccactgagttttgagattggttggaagaagatgaatgagattaatgggaacgagtttgggttgacgaagcttttggcaaagacaagagagattgtggcagagagggtgagagaggaggcgaagatgcttaaagaaaaaggagaagtcgaagaaaggtattaagttagagcattactgagatcgatcagtgatgtactcgccgaacatagtagcaacaccattgggttgtctagtactactaccacgtctagagacgaagatgatacatgcgaaaaaacaataaacacatttattttgttattttctttctcattttcttttgtttagatatgaagaaatcaatttcagttctgttcttgagcttctatagcttcagatctagatggttgtaatccaaatccaaacacgaaactatatcagggaaggattgataagtgatcaagtcggtattattttgctttaactgagttgggaatgaggagggtttcatgcagatgtgagagattgatggaggtagaagagagatggtcaaaagggatgtgtattaagggaattaggggttttcttttttttcctatttattcttttatttattagttaaaaagaaaaagaagtgtttttttaacttacaattttttattttaaattagttttttttttaattttttttaatgtaggttaataatattgtgctaacagaacacacatttcaggggttttgagattttttttttttgattgaaaagttcttcgtatattttaatttttaaatatgctaacaaaatagtatggagatcatttgggacaaactctccactgaatcgacgacctaaaaaagaacaagtagcacgagccaaacaattagctgccttaatcgtaaattatttaacaaagacaataaaaatattgtttaaaattaaagaaactagacacttacagtaaaaaataatcaacccaaatggagaattcatttagagtgtatgacgaattgtatgaacaactacttgaccgtttcaattataatttgagaaaaattctgatgtttgatctagctaaacacctctttaactcccacaatctttgccattgtcggttgtatacaatctggcaacaactttgaatcagtttcaatgatatttcctccatggtcacgcgccatctaatcaatcacaaagctatcattcccactaacaatagaaacatctacattgattttaatcatcttttcaacaagtaacatccaatgctcgctacttctagtagaggaagaggtagaatcccctacactggtgtcaattttttgagcattttctattgattaagataagcaattgtagatgaaacaactctattagcaacaaaagttttactttgttaaattaacccactacgagcacgccacaaagcccaatcattgtcacttgactagctttggccttcaagaaaacaatcaaaacattagaaaatcaggatacattgtccttagaaccgaagcatcggagttttgagattaattgttagtaggggtgttcatcacaccgctcgcaccgtataaaaattacggtttgaaatcttttgcggtacggttgcgatttgtattttttccaaaccgcgcggtgcagtgcagtttgcggttttgaatttaataattgcgattcaaaccgcactgtgctatatattacaaagttaccaatttttacaatataatttttattcttttttcatattagagaaaatatatgtatacattagagacaatttaatataataactacataatgattagtatgttaaaattttaataagattttttttttgtattgttaaaattttataggttgatttttaaatttttattataatgttcgataatgatgatagtgtaaatcgctcaaactgtagcgcaccacattatatttttgcagtgtcgtttttgcgatttaaaaatctcgtggtgcagttgcagtttgagaaatgagaaaaaccacatatattgtttgatttgaaaaaaaagttacaaaccgcaccacctgcactgcgaacactcctaatagaatttaaaattttattagtttttatttttatttttttgtttatatatttttttgatgtgcacgtttattatttagctcatcttctccaatctccactctccgacgaggactgatcataccgccaaaaccataatggcggacacaaactcggttccttctgcttccaccatcgacccgatccaacacctccctctttctcttttcagatcagataccatccctccggctccctctcgttccgacccacctggatccacaatcgattggctccccaacttcgctgacttctcctggctcgcctacggagcttccaatctattagtaatctcccactttccctctccattatccccgaatgaaaccgttattggacccattttccggcagttcttcgagctatccggtgacccttccttggctgtcaacgcggtatcctggtctccggctactccctcggtcggcgagctcgctgccgctgccgaaaactgtgtttgggttttctgtcatgactcggcgagtttgaaaggtactctctacgaattgaactaaattgttaaggatttttgaatgggtgatagtacttgaagatgatcgtgttatttcctgctagctttgaattttcatactagtaaatgtggtggcgtgtttgtttgcacattgcgatcgtaatttggagaatgaaatatatttaactatttaaaacgttggtttaattttcttcccaacttaaatttcaaaccctttcactcatattcaggttctttttgttggagccagaatgcaatacttgttcaatctagtaaggtggatgctgtcaggtggagtggttcaggagatggtataattgtcggtggagttgaggttgttctatggaaaagaagtaacaagttttgggaaattgcttggaagtttaaagcagatggacctcaaagtctggtttcagcgacatggtctatcaagggaccttctgcaacggcagaatactcaagtaagctgcaaactgaaggatcatgtaatgattacactagcagatgtgtatccgtatgtcaaagtgatacaaaattgggatatgtcaaagttgagctacatcatcctttgcctgtgtctttgattgaatggaggccagcaactggtagaaactcaaatgggaattttaggaattcaaaaagaaatgtgctgctaacttattgcttagatggaacagtgaggttgtggagtgagattgataatggacgggtcagaaaaagtggcaaggatgatcataaatccactcggctatcattttgtgttgctgctgtaattgagattaaccagtcagtaaatgggactttaggcatggatttttttgtaacatgggcaacggaaattgagggtatatacgaagatgttgaaggaactaaaaatttgatctcttcaaatgattatgatcgtaacaaggctggcagttgtgagtggatcattgggtgtggtccaggaaggttggttagtctttgggcagtccattgtttagatgatgtctccccattgagatttccccgtgttacattgtggaaaacacttgaattacaagatctcgaagttgggcatcttcataggactgatctaccgaattctaaagagaaaatatttctcggtaaagccacagttttgaggaaaagtttgtctggtccaccaacaatgtgctcatttattcagttgttacctagtaattcattggtctggtcacttctatatacacaaacacccaataatttagaagattcatcacttaataatcatcaaatagaaaacagatcttctaggactgatggatacttaaatttagatggtcattctggaaaaatcttacaagtagttgtgcatccttatagtgctgaagttgaactggctgtttccttggattctaatggattacttttgttttggtcactatcttcgatctctaattgcatttcgggtccaacattagttcctacatgggagctctatgggaaacttggaactcataattcatgttctaagtacacaagcgtgagttgggctcctcccatattggatcaagagctggtgcttcttttgggacatgctggtggaattgattgctttgttgttaagatatgccaaagtgaaggcaaatatatagaatgtcactacttttgtactataccttttagaggtcatggtccgtatgaggaaggtccaaccaatatatttgcaattcatttgccttctgttagacatgacatcttacagtcacataaatttctgcttttgggtgtatggatgaatgggtttcaagctctatcatgggaagttactatgcattcctatgatttatcaggtagcagctgcgaatgtgattttgagactacaaatgctgctgaatgcaacatgtggggttttggaattactttttctgataaaagatattgtgttagtttacgtccttcctcatcacacttaccagaacctcatagtcgcgatcatgttacaagttttgctgtggtgtgtccagatggtttggtttcacaaatatctgcttctcttagtgataatttatctagtcatcctgcatataccatggctacaggctgtgctaatggttatttgaaattttggagaagtaaacttggtgaagtaccaacttctgctacaccatgggagcttgttggcatggttatggcacatgaggggcctattactgctatatgcttaagtaaatgtggacggaagattgcaaccatttgcgaggaatctcattcaaatattgtcagcaatctttctttatgggaatctgtgcacattgcaggatcaggggctttcattttagaagataaaattaaccttgataaacaagttattgctttaaaatggttagccttaggtaatggtcagttcttacttggactttgccttcagaatcagctgtgtatatatgctcagggatggtctggtggtcagactttgctaaacactggaaaatcaatgaaaggggaaatttggcgctgcattgcgcgtactcatactttatctcctattagtgacttcctttgggggccaagggcaacacctgtggtggtgtatgatagttacttgtctataatcagtcaatggttgttcataaataaagagcatcaggctggtgttgattcaaataatcttaagacacgttgcctagactttgcaagtaaaacgcaggacattcattctgcaatattcacagattgtgacattgctgcggtggcagtattatcacctgaggatgatagcaaggacaactttgtcactcctagaaaggttaatacaaaaatgggttgtggatccagcagtttgttgtcagcaaggacccaattggagcatgtttgggataaaaaacttggtttatggaacatgctagaaatagtggagaggtttggtggatctaaacaattttatcatcctgaggcactctttatgaacatctttgcaggtattagaataaacttcttcttaacaattttgtttacttttatctagttcagaagtgggactaagctacctaatactagttccaattttctttggtgtagtggaagtagatagaagtatattatatgtttctttttacaatattactttttattggatttcttgcttactgataagacctggactctaaactcaagaacacaataaaacaatagccaaaacagtaggaaattatagaagattgatattgattgtatgataaaagctagttacaaaacatgggagctcttagacccctttgatgcaaagagttttactcaatacatttcataccccaattcttcccttacctatatatagaacctattttcactcacaaacccaccctcaatacaatgactcaaataccctctttatctaatctcttatatcttattctactaacttgaggtctaacacttactttgttccttttttcttggaagtgaatgtttatgctaacaactacttgcttaaatatattccaaatagttcgagggtagacccagtggtgacgcccgataaattttccttatctgtatcaccatgactttcctaactaataaatttgatgccttgttatgaagctagggaattatattagcctgtcctgttctacaattcactgtcatgttgtatcttgcatttgagttcttttctttaagaatgattgatcttttcttggtgataacatagttcctgattcaaccatcagtttcaacaaaatgcagacct

SEQ ID NO: 59662 - DNA, 800 bp, Cannabis sativa
ggggaaaggatgtttttggtaattcttttctagtattaagcaatgtaatcgtgatcttaaataattcaaaaggtgaagagatgaagatgggaagaaattattttttaaagctaaaagggagctttttgtcgttcttaaccaaagagaaattttttagaggcaaagatcaaagcaattgtggttacaaacgggagatcaaaacaataagttttttcattctaaagcctctactaaaaggcgcaataatcaaatttctagcttgaaagaccctgaggggaactcgagatagtgggataatgtaataggtgatattatgttagattattttagaaagatttttaatgttgaaccagtaggatgggatgaagttctagattgtgtttcctgttattcgagaagagcataatgtggatttgcttcggcctgttcttgatcaagaagttaaagacgatgcgtttcaaatgcatcctgacaagtctcttgggccagacagtatgaatccaaaaaaattccaaaagtattggtctattgttggtactaatgtgataaatactgttaaaaaaaatttcatgactgaggagatgcttgtggggatgaatcataccaatatagattctaaaaaaaaaaagaagcctgaccaaatgagtgaattgagacctatctctttttgtaatgttattgctaaggtcattactaaagttcttacctggacgtttgattacaaataatattatggtctcttttgaaatattgcattatctaaagaggaaacaagtaggcaaggatggttatatggcatt

SEQ ID NO: 59663 - DNA, 1235 bp, Cannabis sativa
attttttttcaatagagggcaactatattatattgtatttcttgcaacatttaatttatgctattttatgtatatgttgtctgtttggttcattaatcaaaatattcatactcgcatacatacgatatttataaataaagaagtaacatcaatcttttttctttctttctttttatgaaataattaatgctaatttatttctgtttaatttagaaattcaaaaagagaaatgctaaaaggcaccagtcaccttcctatgtgtcaatattgctattggtccaattaagtatcgggtcccatataatttaatatgataacttttagggagtatcgctaaccaattgcaacgcgacatgtcgcaaaggtactaggcaccactggtgcctaatagtaatgatcattcaaaaaataagtaatcagaagaaggattcttctacttaatcttaaatttggtattaactatatatttatgtgtaattaagaggtctctttatatgaaatacaaaagttgtgaccagaggatacttacatcacacatgtttaatattatacgtatatcagagactatcacatactaatactatatattcgtattgccctttcttttttggatttgtgtattttttctaatgaaatatgctaactttattagatatcactcaaaatcactagtacatcaatcaacttaaaaggggcaatagattctgtgagtacaattagttattgaaacagaagttttaactaaataatagtgagtaatacgggttgcagatcgttttatataatctaaaataacattatgtaaatttgaaagtaatgtttgacaatcagcaacacaaaaaccaaaagcataattaagagaagccaagagattgtttcacttgatagcttaaaaactattttgagctttaaaaaatatagagaacagtttttaaaaattaatagaggtcattttgcagaattttttaaaaataattttaaaaaactagaaaatagattacatcaaaatgttattttcaaatttcaaaaataattttttgtatcgaacatattatattttacatttttgctcatatattcacatcttagatccagaaccaaacccgaacttgaaccgcgatgggttgatgtcatgatatggtgttaacatattaattttttatagaaaaaaaaattaaaaatagtttaaaaaacttatatcaaataccattaaaattttaaaatgacaaaaaatt

SEQ ID NO: 59664 - DNA, 1560 bp, Cannabis sativa
  modified_base (558)..(562): a, c, t, g, unknown or other
tatgtcttatgaagaacagccaatgcagatccttgacagaaaggataaagtcctttcggaataagaccatagctttggtcaaagtcctctggagaaacagcagatggaggaagccacttgggagctagaatcggacatgagaacccaatatcctggattattcaggttagatttcgaggacaaaatccttttaaggggggggatagttgtaaagaccgcttagcttaaatttggatattagcatataattagattttaattatgaaaattagttattaattctaaattattaatttatgatgacttattggaattcagaatgcattttatatgtcatatatagaaatttcataattttgcatgttcagtgtccggcaactttagaacgcggtgtatggcttagttaaatcacatcttagtattttagtttagcggggcggtatatttagacatttggaatgtcgagaattatcgagattttagaatttcccaaattaccccttagtgacttttagtgatttttagtgttaaagggcaaaatggtctttttagcaagannnnntttgtcttttgtgggttatattaatctgatttttaaagtttaattaaatggatttaattgattaaaacaaatggggttatctcattttcaaggaaaaagcaaagtaaagacaaaaaaaatcacatttcactctaaattctctctctcttttttgaaatccctagaatcagctagggtttgattttattcttcaatctttcaagtttccagcagctctaagttttatccaagctgttgtcgatagaattttgcaacaccaaaaataaataataataataagaagaagaagacgaagaatatgatgaacaagtgcgagtattcaacctagaatggcgagtacttaaagtaggaacatgaatacttaataaaaactggaaatacaaagaacacaagggaatatagtggttcagtcagatcacggtcagcttagtccactattgtaaggatttcgtaggtctccatttcacggtggatcactcttttatatacaaagcaagtgcccgatcatttacaaggattgcattcattgccaatccgttcaaacatcgatttacaataattaagctaaaacgtaaacattaataaatgaagaacagtttctattcactaaatacagcaacgtatgtgacttctaatgtgcgagttggctgttcatattctggtgtaagctcgcgggcttaggatacacctaacttttagttaagtctaggatgtctgttttcttgtatagtcgcacttacggacatcgtttaacgagctgatagaacctagacatgcgagtttatattggtttatcaaggctgttgggtcatcgagaccagctcgctttagagagaatcgatctctatgttttcgcaggaggattgaaaggatactcgcatatatcgttgtatatgcgagttgagtccgttccttggtcccacataatgcaggcctcgcgaatgcgattagacttggtcatattctcatcatcccactgagtttagctcaggtgaggt

SEQ ID NO: 59665 - DNA, 597 bp, Cannabis sativa
gccaagccatcaccatagaattttcagcatcccaagtttcataggttgaatcagtttctgctggagccttcttttcaccagtcaaatatcgcattttcctcaacttttcatatacatcttcaccgattgataccatctcagaaagttttttccattcaagcgaatggtagtgatctagacagagtgagacttagtagatttggtagaaagaacagtggaattggtttggatggggatggggttggttttggttataccttactcagaatttgacatggtgcaaaattataggacagaggtgattagggttagagtgcgattagggtagagtacgattttttttctttttctagctctgatttaaagtcgacaaatttagggtttttctgttattttatttctaatacacagtaatgtatataacatgtacaataatcctataaagagaaacaaatcaaataataaagatacaataaatccctaaactaattttctaaaaatatggtacaataaaaatagaattattatacagctatactttataataataattgaaaaagctgattttccaatagacatgaatctggtggcttgtat

SEQ ID NO: 59666 - DNA, 568 bp, Cannabis sativa
attttctaagaataataatatttttgttcagtttgttgaaattaaatataaataaagttctataaattattctaaaaaaagttgtgatttagtggcccaacttaatatattccaagtttgtgctggatataataaataaaataaattttctaagaataataatatttttgttcagtttgttgaaattaaatataaataaaattctataaattattctaaaaaaagttgtgattacactaatctaaattaacataatttttgtttaaattctatcatcaattcattaactaagaattgattctttaaaaggatgacattaatttttgtagattctttctttttcaaaatgatcaacatttcaaacaagtaatattatttttactatttaagaaataactataatatgataatataatgataaaaatatggtaaaaaacttctatgtgtgtgtgtggatctttagtatcaagtataaactcttgaaatgtgttcatcccaccttctcaaatattttttttaaaaaaaaaatatatcccatatattacttttaacaaaaaaaaaaaaaaaa

SEQ ID NO: 59667 - DNA, 1069 bp, Cannabis sativa
aagaccttggaaacttccacaagtatcgcctcataacattaacccctactccaatcctatctatttatctataattaatgcatgtggcccttctctataatatcaacaatacgattattctaaatgaagtgattaattttataaattagtaaaaaataacttccccatctacactacttacttacttaccctaccattccttactcgagaccccaccaaatatttttgaaagatgaaagaaagtagatatagccgttaaaatatagtcgttaaaatatttgatgttaaaatatagcctttaaaatatagctgttataatatagccgttaaaatataatctttaaaatagaactgttaaaatattatcgttataatgtggttgttgaaatgaaataatttaaataaaggataattcatttaataaaaatatagtcgttacaattagataagagcaatacataggaattgcaaatttaatataacacataacaattagataaaaatacataggaattacaaatttaaaatattagtcttaatatgagctaccaaattttcatgatcttttttttgctcaagagtcatatttgatgtgtccaagaatagataatccatgtattttgccattacttttttttttcttgtaccgccacctaattctccaacgcatttgctttccgttgattaatatcataaaatgtagcaagtttctcatcttgctttctctttccctttctctttgccgccttttggccaatagggcgctcttcacgaacttcatgctcactgatgtctgcattggatgatgaagtatatgtcctgatcttgacacctttgctctcttaacaccttctgattggtacattgcattccatttcggctcatcttttaacaatctccaatagtctacaagttgaaaatttgaattattattttcagacttgtatatctcatgtgcattctcaataatttggtcatcagaccaaccactgtgatgtgcttgttgtactcgcttgtaacacccattgaaacgtgtcacctttttattcatcttgttccaatggtcttt

SEQ ID NO: 59668 - DNA, 862 bp, Cannabis sativa
cctggtaaaataaattcaaacaatctctgattcgagtagcttcttgaagagtagctttgcaatacaaataactgtcatcagcgaataacatatgagacactttcggagcaccgttcgccactttgcaaccatgaatgagccccatatcctcatatcttttaatcaaagccgaaagtccttccacacaaagaatgaagatataaggtgacaacggatagccttgtcggatacctcgagtaggagtaattggccccattgttctacctccatgaacaaccttatacttggccgagttaacacacttcatcaccaaagaaacccacttttcagagaaaccaattctcctaagaactgcatccaagaatttccattctatgcgatcatatgctttgctaagatcaagttttaatgtcatgaacccatccttaccttttcttttttctcttcaagtagtgaagcacttcaaaggagactaaaatgttgtcggttatgagtctcccgggaataaaagcactttgagattcttaaacaatttgatccatatatggctcatccgattagccattactttagtaatgattttgaacaacacattacattaaagcaataggccttaaatcaaccatactttcaggtgttttcttttcagaagcaaaactacatttgcatcaccacaaattgaatcaaactcacccgtattgaagaaactctgaaccacggctgttacatcattctgaacaatctcccaacatttttggtaaaaggctggcgtcataccatccggacttggactcttgtcggggtgcatggtgaagacagcttttcttacttcctcggcaataataggttggtggagatcttc

SEQ ID NO: 59669 - DNA, 2495 bp, Cannabis sativa
atatagaaaaatcaatataaaatatgtataacaatgaaatttattcttttaattattgtaaatataaaatacgtatatatataatcatatttaaagagcatacaccaatataaccgcaatagttaaaaaatttatcaaaaatcaaaatctcaaatcttattttaaaattaaaaaacaaaaatacgttatctaattaaaaaaattaaacatgtattgcacttaacattatttaattaaacttaattaaaaaaaataattatacttgtattgtacgtaacatcaactcaggcctgaccctgggcatagacgggctaagtttgtacttagaacccacctagctcaaggacccaaaaaaaaaatttctctatctaaaattatatattttttttactcgtgactttgaaaaatactacatttttgccctgcatcaacctatagtaatatatataattatatataaagagatgtttagcaagaataacaagcattataattatttatatttcaaaaagaaaaaatcaggagaaaaagtaaaactacaaatgttcgagtcattaaatagagtcctagctaataaaataattaagaataagacctaaataattaagaaccaaataatatagaaaaattgttttacatgagttttttagtgtgaattttttgtattaaaaaactcagtcatgctattattaaagcttaaattatgcaattctaatcctttatcactattgctattattaccattattatttactaataattatcctaaaaacaatatatatatttttgttttagtggatcctaaaaagtaaaaaccatatttaattaaattaatagttagtgggtatatatattgtggagcccacaccacacaatttcattaattatgttccattaaaccacaactagtaagggttcttgaatcatggatatattgtcaaatatattaattataaaataaaatacattaatgtacggtctatacatacatgaacattcctaactgcaaactcatcatatattaattaataacttaaaattaatatctcttcaaattcaatattttaattgattttttcttctgttgtcctttagatctttgacactgttagtggtcttcttcttattattcagacattcttataataaaatactatatgcatattttaaatttgtgtggttttgttttattgtttatatataattattcaataatgttatttttgtatattttaagatgtttaatattatatcgatacgatacttttataatattttgtaattttttatgatgtatagtattttagaagaatttaactaagcattattattatacaccagtactatatacaatactgacatgaatctcagttgataatagacataattatttctatcgatataagatttttttgggaattaaggttcctaatagtaaaactgtaaaagcttgagcctaaaacagatcatattttcagaaagtcaaacaaaggtgatgagtctcaaatttaaatacaaaacagataatatcatactaaactcgattggtgtccttaattattaagagggggaagaatgtgagggaaagatacatttgtaataaaaacctttcatgtccttcacaacatgaaaaagaacaattaccccactttacaaacacccatttaatgagtccacacctatattggtatctaatcaaaagaggtttttattaaaacccaagaatgtttaaaaagccaaggtacaaactatagacacataagacttaatctttaatgaccccacaacaagcctgcaaaactttaagattattattattagtattaaagtatagtttatttttttatttttttgggcattcaaatatttaaagctgtccaaaacacatttttaataatgaaagcctctccataatttaatttattaatgactgtctcaccaattggcataaggagatttaaagcccttttatgcatataaaatatgattgggatgtagtcccctacacaggtcatgttttttttttttaattatttttattattattattattaacttaattatttgagaaaatatagtctattttcaattaaatatttgagcaaaaaatcacaaacatctcacatgggatacatacactgacattaatcacagatgtttacacatgtgaatcacataataaggaaatagattaacaagagtcaaagattaattgtgcagagcaaattacaatcacactcatgtttttttttcttccttttttatactcacaactcataaacacaacccaccaaacaaggtgttataaaaagtataaactacagaaagaataatattaatttaaggaaattatgtggtgcatcctaaaaaagaagtgtatcaatgcacttaatttctttgtgttttgtctaaataattttaattttaatttttttttatttatagtgtatattatagttattttataagacattttgtaatattttgagaatgag

SEQ ID NO: 59670 - DNA, 1110 bp, Cannabis sativa
taatggacttgaagtccctcgtgtaggtttgaaagggggacttatgttattgtggagtgatgatgttgatataactctactttcaatgaatacaaatcatttcgattgctatttgatgtttgacaatggtcctagatggcacttctcagctgtttatggctttcctgaaactgataataaaaagtatacatgggctctaataacacgacttgctgatgtctctccactagatccttggttgttaactggtgatctaaatgagatttttttctaatgaacataaaaatggtggtcctttaaggaatgagttgcagatgaaggaatttcgaaatacactggatagatgttttttaaatgaactaccttattcgggtgatgatttcacatgggccaagaacaagaaaaatccaagtgctcttaaagaaagattagattggtgttttatcaacaacttttggaaagatcaacttccacaatcggctgtcacgcatttggattattatggttcgaaccatagagctttactaattgaggttgtgttcaatcctcatcaagatcagtctggtagtttgcaaaaaagaagatctcggtttcgctttgaagagatttggctaaaagaagccgaatgctcagatattattcaatctagttggcaggtggattctcattgtgaccctgctgcaatgttggtacaatgtttaaataattgtgctgaaaacttatagcaatggcacaccaggaaatttggatgtatgaaacatattataaagcaagcacaaaagcaggttactatgcttaataattctgcagcaactggtaggatcacacccaacaaatcctcatggctgaagctattttggatgaattgttgtcaactgaagagaaatatttgaagcagcgttctagaattgattggcttaaatctggagatcgaaacactgagtttttcatgcgaaagcatcagctaggaaatccaacaatcagatcaaatttttgcatgatcatcagggaaacaaagtatcatcaaagaatggtattactgatattgtttcttcctatttccatgatttattcactgctggggaagaagatcattgggctctttcacat

SEQ ID NO: 59671 - DNA, 1271 bp, Cannabis sativa
caaagttatggccaataggttaaaaggggtactcctgaatgttatatcggagactcaaagtgcttttctgcctgggcacttaataacggataatatcttaatctcctttgagattatgcattatttgaagaggaaggggtcgggaaaggatggctttatggtagtgaaaatggatatgagtaaggcttatgaccgcgttgaatggggttttcttcaatccatgttgaaaaaagttggagtttagtgatcactggattatgttggttatgagttgtgtctcctcggtctcgtataaaattattgcaagttgtcaagatattggtcccataatccctttgagaggtttgagacaaggcgaccctttatcctcttacctgtttattttgtgtgcggaagggctttcacttttgattaaatattatgagagaatggggaagattcgaggttgtaaggtagcaaggggagcccctgttatatcacacatgttttttgcggatgacacctatgtcttttgtaaggcaaatgaggagacggcttgtaatgttatggaactattgagttggttttagcaggcttcagggcagcagattaatgtgaataaatctaccattttctttagttctaatacaagagctgaggaacgaacaagattgtgcttaaggatggggatttctgaggtaggggataatagcacttacttgggactgccaaatattgtggggagaaataagacggctttgttgggctttcttaaagaaagattgagaaagaagattcaaggatgggcaggtcgttacttgtccaaagcgggcaaggaattacttatcaaaacggttgctcaatcacttcctagttatgcaatgaatgtgttcttgctaactaaggaaatctgtaacgaaatggagcagatgatgtgtaatttttggtggaagtcttcgtcgaaggatagcaaaggtattcactggaagagatgggaccgtctgactttacataaatctaaaggaggaatggggtttagaaaccttcgagatttcaatgttagtttacttagtaaacaaggatagagacttctatctcggtctgattcccttgtggcccgtttgtttaaggcacgatactattctagaggtgattttttatttgcagaattgggtcataacccgagtttcgtatggcgtagtatcattgaggctaaagatctagtaaaggaaggggcacgggtttgaattgggaatgggtcaatgactaggatctgttggaaattattttac

SEQ ID NO: 59672 - DNA, 1156 bp, Cannabis sativa
ctcccatggggattagtgagaggagcttgagtcttgtgtgtggtttgcattgggccttgctcttgggggagggcctcatgtgaggtgccccctagtatgagacctcttgagtggagtctctttctttggctataggatgtttccctcatagtaatctcgatatagtgcgtaggcttcagttgtctcaaccggcccattgggctcttttctagtgaaaggctccttccgtgcccatctattggggtgttattagtggatgacagggaatcacctttgttggcttgggttttatctttgagtattctattcaacaccttttgcataccagccatagtagtctctagctttttattaccttttgcataccagccatcgtagtctctagctttttgttttttggcagaggttgcttatctctacttcatagtagtgagccgagagcttaaaccccctgagcacacctgtttttcccttctatgtccatacctggatgtgtcggggcttgacgatgtagatgatggaaggcttcgcattagagatggctttctcggtagttgaatgcttttattgatggagttaaccattggagttgtcatcgagtcctgcagtgttgggagctctcttcgagcattaacttggcagtccccacattggttgttcatcctttggccttctcagcgacggtggcctctaaatatggtggtcgactagtttttatctgagtgtcccttattttctttgaaacgattggcatgtcttgacatttcaaaagtgatggtgaatgatttgagaaccaacgtagctaaagcttgtcgttcccatagacgacgccaaattattaacggctagaactcatcaatgatataatgactatttggaactatctcttaataaaaaaaaacttaataaaagaatgtttagagtagaaatctcaaaagcttttctattccaagaagctcctgtttttattcattccgagaagaaaaagcctctctttacaatgaactcaagggctctatttatagtgagtacttaacactttataattttaccaaatcccaaccatatgatgtgaagtcactttcacacctaatagtattggattctaggtggtttgatatacctgacaccctatgttaatgttggaatttatttt

SEQ ID NO: 59673 - DNA, 904 bp, Cannabis sativa
  modified_base (61)..(82): a, c, t, g, unknown or other
ctttatccagctcaaaactcactggcgttcaacaacaactttgcctttacctgcacataannnnnnnnnnnnnnnnnnnnnnactcagtaaaaaaagcataaaacataaatatataactaaactatgacaagtgcccatacacctatcaacaagtcataaactatgcaaacatgtataattgagtctccaacgttcttgaccatagcataattgaccataataccacatgcactcagtactctagtcgtactggtgttggtagcatcattcatactataagtacaactagacataataccacatgcactcagtactctagtcgtactactgttagtagcatcaattcatactataagtacaactagccataataccacatgcactcaatactccggtatactagtgttggtagcactagttcatgctttcgaaagtataaccaaccataatactacatgcactcagtaatctggagtactagtgttggtagcattggttcatactttctgaattgccaaacacatacattcacgatatcaagatgcaaccatatgtacaccaactatcattttaacggatatgtcatccatctggctaacataaaaataaacatttacatatgtatgtgtgctatactagtcttacctcaattttaatttcaggtgtgccggacaatcttagtggaaatagctgctggtaatcgaaggccctaagtcacatttccagaaaaacaaataagtgttgccctaacacttttggggacttaaattgacaactaaaactttccctattgatatacatcatggaaatatcctaagtacatagaaaacactcaattggggtcctgggaaaagtcttaagatggacccccaaattctgcctaaatcggatcgcccgaaactc

SEQ ID NO: 59674 - DNA, 854 bp, Cannabis sativa
agtatagaagaagaatatctattcattcaaaacaaaatagatatatataagaacacacacagaaatgattatatttgaggcaataaatatgacaagcagcagcatactaccagataaggtggcccataaaattaattctaatataataatgataatatcatcaccctaacctaactttcaatataccccaataattttcagtcttatttatttatttatttatttgtaataattctctaccaattgaatatttaaccctacattccaatcattggggattggggagataggaaacaaattagtttaaatgaactctatatatcttctagagttaaactttacgcattacggtcgcgtttggttggaatgaaggaaaacataaaaataagaatgagaatagaaataacaaaaaaatgataaaaaaatcattaaattttttgttgtgttactttgaaatggtttttcctttcaatacaaaatggaataatcattctatcaaaataatagaaatgacgttatattggaatgatattctagtactttaaaatacaacccaacagataaaataaaaattattttcttcccatttcattacctccaaccaaataccacttaaagaaaaattattgtggtacggaatttcataatgaccataacaaataaaaagaccaatatggttttccaaatttacttcaatagaaagtttaaggatcacttacacgtttggctaaacttctacttcaacttttatcttcttttctcataaaacctcttccttaaaaagcttttaaaactagtaaaaaaaaatcagggctaagaactgaaattcaccgaaaaccgaaacagcggccaat

SEQ ID NO: 59675 - DNA, 923 bp, Cannabis sativa
attaaggtttatgttcaattctaaaagtttatgttcttttttctttcctttagttttggtgcaagatgattagtttatttacatattcaaataataatattaaaaatatatcaccactctcttaaccacatatatcatcaactattttttttcaacactccacatactttttctctttattctatatcacatttaactctcaaatttctatattgttattataatattatatttataaggatataattttgtctcgttattgtacttttacggattgtaatccgtgatgtacgacagccgtcagatgagggagttattaaatctgacggctgagattgatctaggaataattagggttaaaaagtaaaaacctaccttgacactcatttaatgtaccatgtgacccatctaatgtaccacagaatacattccgtaaaagtacatcataggacaaaatcatatccctatatttatattactactatatttattcaaattaaccattgctttcttatttcaggggtttgaagactcataaatgctattattatagtaaatatagattgtactagctatcccgtattattagatgattccaatctcagaatgatgtgatattattttttttcctatataaatatatcttatgcacatatattactattagactctctcatttttttactgactttaatcacacacatagtattaatccaattataccgaaatcctattatctctaattttatttttatttctataatatatcattttaaatataacaaaataagattttttttttccaaattttcactctttaaaatgtcaatctcttgtgttgattttttttttctctcattatacaataatgtaaaccaaaaaaaaaaaagtgctaagggtgtcaaatctatatttttatatat

SEQ ID NO: 59676 - DNA, 588 bp, Cannabis sativa
tgagaggcttgggtctccagtgtggtctccatagaatccctcatggacctcttgcctgatctgactagcttcaggatccgacacacaccttaaatatggcatgttaaacccccttcgatagagaacatcattgatcattaaatatcagtgagcttggtactatatctttctggaaacggtcctttcttacggcagttctcctgtcgttatgtacttaatcataggatccatccagctcgacccttattcattagtagccactacttctttggtcctaatgctaggttccgtgaggtgttcaagaggtaccacccccagcttctctatctcgctatttgaggctagcttagccaagcaatctgcatgggcatttcattctcgtggaattcgttccactttgtattccttaaactcttgtagcaattctctgacaaccaacacgtaagcatccatattttctcctcgagtcagatattcccctaatacttggttgatcaccagttgcgagtcactgtatacctctaccctgttgacccctacagccttagcaaattttaatcctattatcagggcttcgtactcagcctc

SEQ ID NO: 59677 - DNA, 819 bp, Cannabis sativa
  modified_base (32)..(35): a, c, t, g, unknown or other
ttgtagagatgatctttgtggtgattttgggnnnngatcttccaagaaaacaagacttacgattttataattttctctcttaatggggaaagataggactagaaattggctcttgtttcttggggaccactactaatttatgacctcatagctaggttattaattttaagtatttctaatttagcccctcaataaattagaaatatcacgtagggtatctacatatttagtccatgacactttaatactcaataacccacaattactaaaatgatcattttattttgggtcaaactttaaatagcaatacactaatatacatatgaacccatattgaggattttaatccaacaaaaatttctttcaagataattataatgtagaatttacacaatatatgagaaaattataagagtttacatttttataacataaataaataaaaaaaattatggttcaacttgtactctccatttccattaattattatttatttacttattaatttttttttttagaatagtcaatttaacgagttatgtctctcaaaacgaaactaactaaaattaaatgacttgtttgactatagagcattgttatgttatggggtactaatatacctaatattaccattaaacgaggctttataattagttaactattttttataatatttataaaaataaaataagagaattatcttatattttatttttttttaacttttttttttttttcatatttacggtttgagtttctaaagtagttgcagcgttagttgcaataggaattttaatacgattttttgttgtaatttag

SEQ ID NO: 59678 - DNA, 1168 bp, Cannabis sativa
agattgggatgattgtatgaagaatcttttgtaaataaagaagattcttgaataagagtgtgagagttgaaaactttgagagaacttattagagactcgatctcgattgtaatgtaccttgttcttgctcaatcaataaagaaaatttcggtggtgttccagaactgaaatagagccatagatcacattgatctattagacttgaactagtatatatcttagtgttgattttattattcattgctttaattatttctagttttagataactctgttcatccatgttttctccgattattgtttgtgatttgttaatcttgtcattgctaattgtttgattgtttaaagtttagttgatttgattttgcaccattagttgtaattttctcacaaatcagagcttggtaatcgatcaagaatgtagaattaagattctttctactacaattattgaagaaactttaaatgccatcaatggtgagattctcatattagagaaatttgatagagcgggagactttgcgctatagagagaaagtttgaaaggaatcctagtacatcagaaggtatctaaggttctacgagatgagaaacttttagctaagaagaaactagaggaaaaagaagaaatagaggagatggtgtattacacgatcatcatgtatttgtcaaacagtgtttgaagaaaacttatcgtagagaagacagtgaaaggagtctggaacaagttggaagaattatacttaaaaccatcaattgctagcaagatcaattttctaaaaaggatgtatagttttagaatgatttcttctatttctttagatgttaatattgacagatttaatgagattatattgtagaattggctaatataaatcacaaagttgatgaaggaagccatgccattatttttctgagatcgctcctaattgcttatcaagaagtaaaggctactatcaagtatggaatagatgtgatcacattagaggatattcttaccgcacttaagttgaaagattttgaattacaattggaaaaagaatccaagaaagaagaagtatacttggcaagaggaagatcactcaagaaagaaagttagaagagtaaataccatcactctcaattaagatcgaagttcaaagagaagaaaactcaaaagtgttatata

SEQ ID NO: 59679 - DNA, 823 bp, Cannabis sativa
aatttcatctaaagagagttgagagagcgaggaagcccgaactccaataccgaggctatcgcaaggattgaagctcaaagatcaatggctgcaggtattgtttaatctttcattgcatatgtttacgatatggttatagtttattttctgcattacgtatcgttatatatatgttgtattttatatactatattatagtctaacagttggtatcagaacgggtttatctctgccttgatttgtttttgagtttttctgtgcgtatatatatgtatatattgtggtttttgggttcttcgttcacggcgatatgatttcttcattttgatttcattcatttattcatgttattattaattttattctatattaatattttatatatacatacatatatagtattcagttcatatatatattcattcatacagcatatatatatacgtataaattcatacatatatatatttatatatattatatataattttcataatttctttgcatataattaattattatgatatgtttatatattattttatacagtataacaaaacaatatatgcgactgtatatatatatgaaaaaaaaatcagtctgtgtttgttctgattttatttttcgtttttggtatttgtttcaatttctatatgcatcactacattcatatagtattgaaaatcgttctaagcatgaaaactcattttgaaaaataaagaaatctcaaaattttttggaaaatattcttcggacccgaaattttttgttgattttaaagtctttgttttacgtattttcgatgcatgaaatctatatgaat

SEQ ID NO: 59680 - DNA, 1339 bp, Cannabis sativa
gaattgaagccttttattggtgaagctatttcagactctcaaagtgcgtttattccatctcgtctaatcactgataacgtacttattgcctttgaactgctacactctcttaaacatttaaaaagaggcaaggaaggttatgcagccatcaaattagacatgagcaaagcctttgatagggtcgaatggcattttattcaacatatgatgtttgctttgggttttcatccagcagtggtcgaccttgttcagcgatgtattcagagtgtatcttactcatttcttatcaatggttcggtgcaagggactgttcatccaagccgtggtattagacaaggggatcccttatccccttatcttttcattatatgtgcggaaggtttatcaagacttttccaacatgaggaggctattggtaatttacaaggtctacgggtctcacgttctgctccaagtgtctctcacttgttcttcgcggacgatagtttggttctatgccgtgctaatcgacgttctgcagctgccattaaatcatccattgatatctattgccgagcttcgggccaaaaactgaatgtggacaagtcagttttatctttctccccaaatactctcccttcaatccaaaagtgtctacaacagattttgttaatgccaatacaaccgtgtcatgagcgctatttgggtcttccatcatattcaggaagggataaaaaagtcttgtttgctgagattaaggaaaagctatggaaaaatctttcggcttggcaagagcaattattttctattggtggtaaggaagttctcttaaaagctgttgctcaatctattccgacatatgcaatgagttgcttccgcctctctaagtctctaattaaccaaattgaagtgatgatgaataaattctggtggggttcgaattcctctggttcgggcattcattggaagacttggtctctgctttgtgctccaaaggtggaaggaggtttaggttttaagagcttcattcattttaatcaagctttactagcgaagcaggcttggcccatcttctccaatccttcttctctcctaagtcgcatactcaaaactcgatattacacccattcctcttttttagatgctggtcatggctcatatccctcccttacttggcaagggattcattggggaaaagatttgctttcaaaaggtctaagatggaaagtgggagatggtcacagcctcttgtgtaaaagtgatccttggctgcctggtgtcaccaattttcgtccattggttgtggctagaatcgatgaacatattcaggtttcttctctaattatagcagagaggtatt

SEQ ID NO: 59681 - DNA, 1230 bp, Cannabis sativa
tatggatacatgagatttgatatgaaaaaaaaatttatatgtcaacaggagaacccaatctaaaagtattttatgctaaattttatgctaggtattttctactttatttaaaagtgataaaattaataattgaagaaaaaaaatttcaaaaaaaataataattgaagaaaaaatattattaattattaggtgaaattataatataatatatgatacacgtatacattctaaaaccttcctcgtgtctctttacttttgaattgtgaatccaaatggttataaacaataaacaccgtacattataaactgataacaataagtaacaataagtacggttacaaaccttgcctttttttaaataaaataaaataactgaagaccattcatctcctctgattttaatagaaaacaatcagagtaaaataattatatcttaaagagtaatcacagagatttgaaggaagaaattgcccaaaagccatttggatattataatgactatttaccttcaaatagtatattaaatcctcattatcatctaatgagagtgtcaagttttctagaatcatactataaagtacattattttctgcagaatacataaataaaatatgattgagaagataaatttttagtgcaaaatataaatcatgcatcaatcaaatttacagtaattacctcagatccaacaatatttagttatccgtatctcctttcaatgagagttctaatagccaaatcaagagcaatgaaaacaaattaaatataaattctaatagccaagctgagttgagcaaatcaagaagacctaaatataaattctcaattatcatcaaaagttaattaaaaaaacaattagatatatatttattgagattagaccctcaatatctctgtcgtcaagaactgaacaataacagagtaaattcacttgatagatccaattgaaaaaaaaaaggagtctaggaacttatatcatggtactgcattttcaattagggcaatcatcatgcaattaaatataaaatactaaccatccaatctaaactgagatgttgagtaaacaacaccttccatggtattttgaagtataaaatgatctcttgcactaacgtgatgatcaacatagttactgcaagacgtcacttgtcagtaattaaggttgtttcgcatgagtgtaatgagctaaactgacactttattatcaatttcagataagaaagaactaac

SEQ ID NO: 59682 - DNA, 998 bp, Cannabis sativa
  modified_base (27)..(34): a, c, t, g, unknown or other
ttacagttaaaattctgcatagtccannnnnnnntcttattagatttctgatacaactttcaggcattttctcttatgaatttttttgtcccctttctcaggatatcctgcctttatttataattaaataggaaggcgattaattacagtgttgactgatattttacaacaagtatcccttgaaattatgggatttgatcacattccaagtagaataattgcaattaatatctgttaatcacatagctgtgattggtccgcttttattgggtcaatgaaaacgtgtattaaatacattgcaaatcgtatcgttcagggacatctccctgggaatatagcaacaatacccttggtagcgagctagagcttttcccacatttttccgaggttaataatgtaagtattgtcgcttctgtgcttgaagacatggtgctccatctgacaaccacagttctaggttacaaggtgaacttcaaagccaacatcaattgaatgatagcttctatccaagagaactaactcgacggagctgtgaatttcactaaaagatgtctggagttgattagtgaaggtacccgagtgtgcctttttatagcgagatggatgcctcgctaatagtagtatgagcttagctgactgttacacttagtttgtatattgtgtattgtacgctaagtgccttatcggccattatatctctcctacgcctcttgatgcgtgacgagattgatgcctcgccttacgcatcaaatatcgtatggtttctcgttaacgcacgagacaaaagtttgtatatctttatctcgcataagaccttatagtcagcaagttgtaaatatactctgtcacttccacattgaatgagttattccattttcaaatataattatcattatatttgttgattcgtattcttcccagtttggcacgtgtcctcatttgaagtgctagccgaatttcgggtataacaaaaaaaaaatcaacataaatataatttt

SEQ ID NO: 59683 - DNA, 1719 bp, Cannabis sativa
  modified_base (1313)..(1314): a, c, t, g, unknown or other
atcctcaccagcgatcaaggcttcatactcaccctcgttgtttgatgtgtgtgtcgaattgaaatctcaaggcatagtgaaaaataaaccttctggagaaattaatatcacccgtgcacctgagccatgctcattggatgcaccatccacgtataatttccaagtatctgcatctcactaaacaagcagattttcctttagagttattcattctatcaagaaatctgccaaggcttggcccttgatggatgtttgtgggtgataagttatgtcaaactaccccagttcaattgaccattttatcactcttccagaagcatttggtttttataaaacttgtctcaggggttgatcagttaacaccttaatcggatgtgcttggaagtaaggtcgtagcttgtgagatgcgtggattaggcataaggtaagttttttaagagggggatacctcgattctgcccatagtaacctcttactagcatagtaagcaagttgctagtgctttccctcttcttgcactattgtagcactaatcgaattttccaagacaaccaagtagaggagtaatgtctctccagttactgctttcgccaaaacttgaggtgtcgacaaatgccgttttatgttcttaaaggcctccttgcactcttttgtccactcaaattttttgttgcctcgcaatacattgaaaaatggtaggcacttatcagttgactttgaaatgaatctgttaagtgctgccattcttgctgttaaggcctgaacttccttcagtgtggttggtgatggcagatctgtcaaagtcttaatcttctcagggtgtcttcaatgccccttgcgttgactatgaatcccaaaaaatttcttgaggaaactccaaaggaacactttttcgggttaagcttcatattgtacttttttaatatctcaaagcacttcgcgtggtctgtagtatgatctccactctttatcgacatcaccaacatattattaatgtagatttccatgtttcttctaatttttatcgcaaacatttcattcataagtcattgatatgttgtcccagtgttttccaaaccaaacagcatgactttatagcaataaagtcccatgttggttacgaagcttgtatgtttgtgatcatggatatgcattttatctggttatatctagagtatgcatccatgaacgacataagctcatgtccagcagttgcatccactaacttgtcaatccttggcagtggaaagcaatcctttggacacgcctaattcaaatctgaaaattcaatacaagttctccaagttccattnngttttgggacgagaacaagattagacatccacgagggattaatgccttgcgtatgaagtcgttaaccaacaacttatctacttcctgcttgagtgccccttgtctctcggaatctaggggtcgcctcttctgtctcttggtcgagtaatggatcgatgttcaggtgatggcagataatcttagggtcaatccctatcatatctgcatggctccaggcaaactgatccttgcttgccttcaaaaaacttattagttgctattttaattattcatccaatttcttcccaatgaatacacactttgtgggatttcttggatctagagcaacctcttctaattcctcaatcgctttcaataaatttctttcatctcgaatctgaggattaagatcctcatccttcttct

SEQ ID NO: 59684 - DNA, 1191 bp, Cannabis sativa
agcaaatgaggaggaattatatggtgtggtaaggtttttgggttatcgattttcttcaataatcccagccgtgggtattggaggagggtttgctctattgtggaatgaaggtgtggatttggaattgataaaagttagtaatggaattttccaagtgctaattaaagagcctttactaaaggttcattggatgttttttaaggtgtatgggagaccctatgaaacagaaaaaaaattattctgggaagagttggaaaaaaggattattaaagttcgtgttccttgggtggtgattggtgatcttaatgtgattgcgcatccttgggagaagagtggtggtagaagattaactgctcgggacacttgcatctttacaaacttcttgcagaatacagggggagttgatcttggatttcatggttgcaagtttaaatggcaaaataacagatttgtgggtggtttgactagagagatattagatcgtgcagtggtttcgggggattggatcacatattttcccgaggcaaaagtcactaatgctccaatctccgtttcggatcatggatatgtgcttttggacactgtcgggggaaggaagagggggtttaaaccatttcggttttttgaagcttggtctcgggaccaatcgtgcgaggatattataaaaggtgcatggagattgaggggagttaggggtaagaatgtatgtggaagactgaatgatacgaggattgctttacaaaaatggaaaaaagatattttcggggagtgcgatacgatgattaaagtagcggaggagagactaggttggattcaaggctagatttcgaatgcctctctgttacttgaggaatcgggattacaagccaaaatttctgagctttggattcgaaaagagtctatgtggaggcaaaggtctagggagatttggttgaaagttggcgatcgaaactcaaagtttttccatgtgtctacaataattcggaggagaaggaatgaaatttctgcggtgaaaaataataagggtggttgggaaacgagtgagaggcagattgggaatgtgtttaatgagttctttagtgacctctacaattctcaagggacgagtctggatgaagatttctatgctcttctctccccaaccatctcggatgaggagaacagaatgatgaagagtgttcctacggctga

SEQ ID NO: 59685 - DNA, 691 bp, Cannabis sativa
  modified_base (164)..(164): a, c, t, g, unknown or other
ttcaatccatcaatttaaacgaatgatttaaaataatataaatttttgttaaaaaaataatataaattaattggaaatattctgttaaagttaacggaggaaacaaaataatattgttaaacaaagaattgacgttaaaccaagaattgccgttagatagacanttttaatatataaagatattgatagagatttaggatttatagtgtagtataattttaactgttattttgtgtattttttgtaatatattttttaaataatatattaattaataatacatgtatgtaatttatagtttatatttctgactaataatttataatttatttagttttgttagaaataatttttttattgtattaacttgatagtaatattaattttttattaatttataaaatctgtaattataatttataaataatatagtgttaaaattaacagaaaaataagtttattcaaaaattaattaaaatcaaaatataatgaaaaaaatatgtaaataaatttttatattaagttcatttatataaaaaaaatataaataagatctttaatggaattaaatagaatatattcatataaataattaaaaagtaatttttttaattattaaataaaattaatatttgaaataataaaatatgttttttgaactaaaaattataatataaaaaatataagaaat

SEQ ID NO: 59686 - DNA, 1374 bp, Cannabis sativa
taaaatcacataaaaggtataaatattgtccacaccttatggaggtatttatataaataaaatattaatttatattttctatgtaatgattcctattttttatattattaaatgagaattcatattttatattttttaaaatgataaaaaatgataaattgaacttaatttttgtcaaaataaaatttaataataatttatactagaggttagggtatgaatttatcatttcttttaatatcttaaactcaatttcatatctctaatttctaacaccctgaagctagtgtttagcacgagcatgtgtaaccaatatattatttttataataatatatatttttttacatttgatcggtctagaaactagtttcatgattatattaaaaataaataatgaaaattgagtttaggctattattttataatattttaaacatataagcaaaatagaaaattagataaaaaaaacttgtataaaatagaagtctaaaatacactaataataataaatattattattattattagtgctaggtttatctaattcacaattcactgttcaacaaagcattgcacctaaaaaaaaagtttcccatgatgtgaattatgttaggatttatgccctgtctataaaaatatttttgattattaaataaagagtccaatattttagtatatggttaaatgttaaattgttaatatttattattgaataatttatattaaatatcaaaaaatttcttattcatatatgaggttgttaatttcttatattaaatattgaataatttcttattttttattctataaaattttcatattttaaacttttttttagaaaaatataccatgtttttataaacaatgttaattttttcaataatttcgtaaatagcccattaaaaatatagaacccgacccaaaaaaatgggccttaagaatattcattgaaaataatgagcccacttcaattatattgaataaggcccgcaggctatccctataatataatgaacatatggaaatttccatggacttaataatttctatggattttaagcaccaatcgatatattgatttaaaaaaaaaaaagcactactcgtacataaattatagggtttttacaaaaaatatattaaattttgaataaaaatttataattttattgctacacagacttttttacaaaatttttttttttttttataaatcaacttaaaagaacctttaaacaataaaacagaacaattaaaaccaaatagaaaaactaaaaaacaactgtacaataatagtaaaaacttaatacagtatacaatataaaatttaggaaaattctacaatacaccaccttaaaatggatatattgatgca

SEQ ID NO: 59687 - DNA, 1766 bp, Cannabis sativa
actaaaattcatatacttttttttttttcaaaagaatcaattatcccgcctcgcttctatgtgagtctgctcctacccgtaatggttgacgtcatgaagtgctgggtattttgttcagaagttaagaaaaattaagttttaattattttgagattaagaacaaaaaatactttaaataatattagagaaaaggagactatagtagatcaatctggaattccttttcttcatctttaatttgatgtgtaattctatatttgtgtgtgatttagtcttgaaaatgaattaaatttttacttaaaatttttaattaaatcttttcaaaattttattatgatttaatgtaattttttatttttatacatttaatatttactcatgaacaattagaaggtatgattatttgttatataaaaatgtttaaatttagaaaatgcatataagagataggaatttcactaaattagtaaaaaagtttattttaagaaatggatttaggagattaattatagtgatatttttcattaataggtatgatgattatttgtcttataaagaaaaatagttagtttgtacttatgagggccgtgcaagtcacttgaaacgcctacctaggccaacacctctaacgctacctcccacagggttggtggcgtgattcaaggcttcggccactgaattctcaatccaccttaaaggaatggtgccacgtccccttaaaggtggccggaaccttccagacgaccacggccaacacaatcgcatcctaaccaattattgccccacttggttacaggcacacgttactggacccggcgatgtgttcatttgccataatctatataaacttcttcaaaatagtatatgtgcccgatgtgggactttctacagaatctcatatatttagaaagaatcaacccacccattctatgaatatgcgttcaaaacccattctttctatcaaacccttgagcttcaattcggttcagttcagacctcttcttcttcctcttctctggttcggttctcttcaattttttgcggctgattttagggacttgattttatcccttttgttccatcgttttttttagcttaaacacttttgttctatcgttcagtaaggaaggaaggtgaaatggtggttttttagaacattatttagtgacgtaataaaaaattagttgttagcagcgtggaccgttagccaggtgaaatggtggttttatcatgaactctcagagggtcacatgcctgcctagcccaactcctaactccccagggttggcggcgtgcggtgctttagacttcagtcactagaagctcctaaccatcttataagaatggcaccacgtccctataagggtggccggagagagcaccatccatatgactaggacccacgccagatgcatcaaaagttgttcttctcagttagtgtaaatggtttaactcaatctcagatgccatccaactcctcactcctcaccctcaatcgtaaacttgctcacctcactcgtgcaaaccgttactcagacgccctccaattttttacccaatctcaatctcaatctcaatctcccaaaccagatcactacactatctccactctcattactgccacttctaaccttgcccacatcactttcggcaaccagctccacgcctacgccattcgaacaggccttaaagcctttcctcatgtatcaaacactttgctttctctttacgccaaagcacaagacctaaactctctgaattgggtt

SEQ ID NO: 59688 - DNA, 1312 bp, Cannabis sativa
tgcttgctgttacaatcagggttatcccaaggattttggggagaagcagctttaactgctgtttatttaatcaacagaagtccatccagtgcaaatggattcaaaattcctgaagaaaaatagtctggtaaacctcttgaattatctaatcttagagtatttgggtgtgcagcatatgcacaccaaagcattggaaaattggaacctagggctatgaaatgtgtttttctagggtatcttgagggagttaagggttataggctttgggtctgggaacaaagaggttttaaaacaataaatagcagggatgtaatatttaaggaagatatttttccatgtttacctattacaactaacccaagtgcagatacaaaagaaactgaccatgcaggtagcaacattgaggccagacctggatctgttcaggtggaacaaacagggatcacaccaaaacagaaccaaggagatcaggttcaggtggaacctgatgaagacaacactggaattactgatgaagggactcaagaagacttgggggattaccagttaaccagggacagaagcagaagagtaccaaggcctaatcctaaatacagttttaatatctgggatgaagacattgcatatgccttcatgagtgagttggatatggtcaataatgaacctcaatcttatgaagaagccattaatggaccaaattccaggaaattgaacggtgctatggatgaagagatggaatctcttaagaaaaataaaacctggattgtggtgcctaaacctaaagataaaagtattgttgattccaaatggttgtttatggaaaaagagggtagaactaaggaagaacctataaggtataaggccagattagtggccaaaggctttacacggaaggaaggggttgattttaatgaagtattttcaccaattgcaaaatacaagacaataagaattatgctaagtctagctacacagtataatatggaagtagaccagatggatgtcactacagcttttctacatggagaacttgaagaggagatctacatgaggaaacctaaaggatatacagaaaagggaaaggaaacctatgtctacaaactagtaaagtcactctatgggttgaagcagtcacgtagacaatggaataaaagatttgatggttttatgctaaaactgggtttttctatgagctattatgatcactataaataaagtcatatatctacttctatatgtagatgatatgcttataatcagtaaagaaagagcaagagtaaacaccataaagggcttactcaaaactgagttt

SEQ ID NO: 59689 - DNA, 1541 bp, Cannabis sativa
ctacttgaagccataacacaaactaggaacgccaacaatctcaccaggaaaactcaccagaaaaacaaacctcaactttctaacatgtcaattgacaagactttttaattaataattgttgtattaatactcaaaaccccactttacaatagtttacattctcttgttaataagtacccactaacagagttactgttaaggacaagtgtagtcgtgtactgtcttaactacttttttcacctaattaattaaaacaaaactaattaataaatttaaaaaataaaactaaaacaaaatcagataatagtttaaagcatatataataaaaaaaattaaaaaagacaaaataaaatcacacactattagcgaactgcgctggcaataatgacctttcttgtagtggctatatatactatttgggaagaaaaaatcatacactattatattattaatttcaaccaaattacatttattttaaaaactaaaataaaatagtactaagcaaacataaatctacaattaggacacttcttaagtctactatttaatatatcttgcatgcactcagggtgaaatatatgaccgcaaggaaattttcttacagtcactccctcttcgtatacttctaaacatattgggcattcttctccttcagatgttgtgttatctccacacagatatttgtcttcgggaaatgcctctatagaaagcacaggtacaatttcttcaggtgcattttgtgcagataaatctacggccggtacattattttctggtgcattttgcacagttaattgcacggatggattttcatcgtcaccgtgaaaatcagcgctatatacggtatgcatgcatttaattatcaaaattaagaaaaatacaccgattaaaaaaagcatgagcaaaatttctgtcttttgattcaaatagtcatcatggttattttctgctagtacattaggaagtactatacagataacaaagtaaaaaataagtgtcattgctgcaaaaaaaaaaaaacataaatactaattagtataaatatgaaaaagaataaaaaaaattacacaaacaatttaattaaagaaaaaaaatttactcattgaacaattaaatttttccttcatcaccacttatatatttttatatataaatatataataaaaatgaaattagttgtgccaaaaatgtatatttgaataacagcatcactaaagtaaagacaaaataacctcactttccttgacaaaaaaaataattaaatagataataagcagatgaaaatgatattaatttatatcaagtaataataataatcgatctgatgtgaattaacccaatatattaattaggtacgtgaatgtgaatattatgtgtgcttattaaatgtatatataaggcatgcatgcatgcagtagttataattaaatttcataatatatattatgagaaaaataagaaataaattacaaacccaaaagcacagaagcacatgcagtagttttagatatatcctttgcaatagtgtatatgtttatata

SEQ ID NO: 59690 - DNA, 813 bp, Cannabis sativa
aagaaaaacacagccaacagagttgtttctagctggggattaggtcaaacttttatccaaaacttgtgattgaaccttgttaaattttgtctatttacttttatgttttagtttatgttttttgttcttgggttattgccgttgtttggaccactttcttgtttttgattgttgggaacaagtgtgtcatttggccttccattgccacacccaagaggaaaactgtgtagaaaataacacttatctttgtagtgtcctggtttttggaaatgtgtgcaatgaggacccattcttttatttcttgaagcttgattggctgttggatttgaattaggtactgtaggagtggtaagggcagttattgtagtagcaagagatggggcagtacgatttccaagtgttcttttccttcttggtgtatgatcattgaaaaaactttattatgaggtggacagagatcgatcagtaaaatttgagctcaaactgcatgatatgattcattaaaacccttgaggaattgaagaacttgtcatgattgaggtggtcttgattacgtgcagcaacatcagaagtgcaaggaatctgaggccttaactagctgatttcatcctacatagccatgaattttatgaagtaggtacgtacagaatcatcaccttggtgaaggtatttcaaggttttattgagcttaaagattcaggaccattaccctgattgaatcgactgttcaactctgtccacatctcaacaacagtgtcaatatacataatgttgctcttgatttcaagagataccaaatgtaagatccaagac

SEQ ID NO: 59691 - DNA, 818 bp, Cannabis sativa
aaataatttgtggtcacgttgttattcagttaactctaacaaaatagtattgtgatatactcttcaatgtgcacatttcaagatatggggagcatatgtttttttgctatttccaaaagaaaaaaaaaactatttggttattaatatagttgtaacgtcttacttagagtagcttcacgtgtcatgataaaaatatgctaattccattaattgggatctataagccaagtgattaaaaataaatatctaacttaattaaataaataacctgtaataaaagcatactttactataaaacaaaatattaaagttacatctttgggatcccgtaaaattgattttcaaaatattacaagttatttcatacaaaccgacctaagcgaaaaaatagaatttctatacaattctatttggacccaaccctcgtgatctagtttggccagaacatgtaaattcatcttcaaaaccctcaaactcacccgaaactgctttacccatgcttgtacaatagagcacccgtgagccaaggcccaacaagacaaaacaataatacagtatgaacaatcataatagtcacatatcatacattacgcctctgcgtatataactgtgtcaatgcactgtatatcacattatttcatatacaatgatgtcgctgcatctaatgtctatataacatagactacgtgctactctcacacgtcccttttacatataaggccttcataggatttatctcggttttacttaccaagtctaacctaggtatgtcttactcacataattcttctcatttttacacataacatattattaca

SEQ ID NO: 59692 - DNA, 1116 bp, Cannabis sativa
  modified_base (992)..(992): a, c, t, g, unknown or other
cggtttgaattattctatattatttgttattattcattatgttatagattcagttttattttaatttatatttgaaacatcggtgagaatatacttgatgaagttcttatatagaaggagacatattggcaacaaagagtaaaagtggaatggctacaatgtggtgattgaaatataaaattctttcaagctcatgcttcatcttgcaaatccaataatgcaatcaaatctttgacaaacattgttagtgtctgttgatgcagaaatctgaccaacacacgctcgttagatttgcgagttgataaatatatggttatgtatgtaaatagagagacaaaaaatttatagcatttcacttctcaagtctcaatggtaatagagctacgtctatttcgagtttatatttctcacgagaattacatgaaaactggctaagcaagaactccaaatactagaaagagaaagtaaagagatataatgactgcatacttagaatatgaattagtaatgtagttagcattgataactttaattttatgattatacatgattatgtatgttgtgggtcttatttttaagaaacatgcattagagttataatttctgaagttcgaaaattttattaaactctaagggtattttatatatcatatgtgaaatttactatgtttataatttttactcggtaacaatggaaaatgcgacggatgaccgttaaagtcacatgggttagtttagaacattttatctagcgggacaatcatttatgatgtttagaatattacgattaggcaagattatgattttggactattttacccctaaatctttaaatttcttacacttgaagtaagggtaaaatagaaaatttgcctagccttgtctttagtgagttgctggcattttctattcatttagctgaatcttttttaattaaaaactcttatttttattaagtaattaatcaagaaagaaaagacaaaaaaaaaaanaaaaaaaaaaaaaacaaacatcacctcttgcttctctttctctttcaatcggcctaaaaagaaactagagaaaaaccagtctcttttcatcaattttttgagtaatctaccgggattcaaggtt

SEQ ID NO: 59693 - DNA, 917 bp, Cannabis sativa
agtagatttagagccataaacaaacagtgatgtatctgattttgatgactgtgtaatccccaactataaagagagtgattcagcttaaccaagaaaaatacattgttgggatctaaaatccatttcaagctttatagaccatgccatccttgttttcacacatatagcctttgtgatgagcagaataaccaagaaaaatacattgttgggatctaaaatccattttttgtgaattgtaaggtctcagatggggataacaagcacatcaaaatggtttgaggatggcatgagtaggtgcataatgaaatagagcctcacagggagacatattgttgagcactcttgtagggagcctattaattgtaaaaattgcactattaaaagcatgccacagttaagagaactcaagaccagattgagccaatagtgtaggtccactttcaatagtgtgcctatattttctttgcaggttggacttcttttcaagtcacaaagaaagtttatgtcatgaggagttggaatagaccaattcctaaggcgatagaatatgaagaaggtgccaagaattctatagccatttagatttatctagtaagggtagacaccgaagaaatctgctatggatatgaaccatgtatccaagggaaagtaagcacctgcattcatgtggaatctcgaccaagcactacagcaagtattatgagagcccttgggagaacaatgtcgaagcttccaaacaacagtttcaggaagacagtaatcatctcaaattgtttgagcttgaaagtcagtgagggtcctagacacaagaggccttagcttaaaggctcgatctctctaatcgtcaccctcaatggcagctttaagaagctcaatttccatcaccttcgcatcacgcgccttgtccaagttcttag

SEQ ID NO: 59694 - DNA, 1581 bp, Cannabis sativa
ttaatcaattgcttcagataccaagttcaaagctactctttaggggtgaacctttagagaatcattctattccccaaatatatggtgatattaaatcaacattacactctcttctttgtcgaatcaaaagaagattaaaactcaaccattaagagtattaacttttaatttgcaacatcgttattttcattaattaatggaatatacgtaaaaataatttcaaacaataactaaaaatatttttttttcaattatctattgtattattttaaataaagtaaaaagacctaacataaaactaaatatacgtgccttgcacgtaacttttttctagtataaagatatttatctatatactatatttataaataaatacatcgtatatacagtagaacgtctatttaagaatacactattcagaaataacctctaatttattataaaaaatattaactctcaatttagggcagttataataagaataacctttaaattgtaattaattatataatttctaagtgtcatactaagaaagtatacttaaattattttaatttttcttcactatagcgtacatttgaaaatattttcttgagtgctttttttatataagaattgtatgatatttttttagaatattttacagttgtctaaatagatttattatttttttaattaatatttttttaaaaaaatatacatataaataagtttgaaattatttaataccattttattgttcaatttataatatttataaataattttaaaaaaaaattataaataaatgcacgcaaaatacgacctgtaattaactagttatacaatataagtgttatgtcccataaagaaaatcagttggtaattattaaaacacatgatttagaaagaaaaaaaaatatactaaacgatatacgggatccattgataaggtgagaataatttttggaacaaaatacattatcactttctttattttctttaatataagagtttgttcaaacagaaatgaggtagaatatttattaatgtttgaacaatgtatgaaaatatttggtggtatttttgttgtaaaagtattagctagagagaaacgaaaaacttcatgcatgcgaacataataatgaattttaattatacaatacaaaggatgttaaaaaaatacaaactataatcgatagaaacttgtaactatatattattcaatcacacgtaacaacaataatggtagaaaaaattgtaactatgctgggatatcaggattctattggtaacaaaagaaataattcataaagaaacatcacagattgatcaaagcaatacttcaattttccactgcaagcgcttgtttcataaatgctctaaggcttactagtgtgaggtggagtactgagggaaggaatagatttatccttaggaaggttaggaatggttggcaaagtgggcttagaaagctcatgtgagagttcaggtaattttggaatttcaagcttaggaaattcatggggaatttcaggcaatttagggacttcaaattttggcagctcaggtattttcggagcttcaatttttggcaattca

SEQ ID NO: 59695 - DNA, 1609 bp, Cannabis sativa
  modified_base (1319)..(1321): a, c, t, g, unknown or other
tggtttgaattccttcttttatcaaaaaaattgggatactctcggacttgacctctgtcagggtctccttcaaatccttaacaatcagggggacatcactcaaatcaacaacactattttggtccttatccccaaaaagaagaaccctaaaattgttcgtgatttttgacccattagtctttgtaatagtctgtacaaatgtctttcaaaagttctggctaatcggctcaaatcggtgcttcactctgttattagccccaatcaaagtgcttttctcactgggcggcaaattactgataatatagttattgccaatgaaatcatccatgccattcattctcgaaaatcaggcaaattaggttgggctgctatcaaattggatatggaaaaggcctttgatagagtggaatggtcttttatctctcacttccttcatcatatcggggttcctcagaggtttacctctctcatcactaaatgcctttccactgtcacctaccaattatctctaaatggtaatctatcaaatgtgttttcttcttcccgtggcattcgtcaaggcaatcccctttcaccatatcttttcctaattgtggctgaaggtttttctgcagctatccgtctccatgaggaagctgccctgttttctggcattaaaatttgtcgaggggctccctctttttcccatcttctttttgctgatgacagtatggtatttgtccctatttcaactcaatcttcagaagctataaataatattttgcttctgtatttccaagcttctggccaatctgtcaatagagacaaatcttccatcctcttctcaccaaatacttcccctgattcccaatccagattccgatcctccttgctcctcaatggcgaaggtttcattagtaaataccttggagttcctcattgtgttggtagggttaaaaattctatctttcactaccttattcagaaagtttcctccaagctcaacgtttggaatgaaaagctattctctcgggttggtaaagaaactctcattaaatctgtcattcaatcaattccttcctttgctatgtcttgttttagacttcctaaatccacctgtgcttctatttaaagtttaacagctaaattctggtagggctctacttcgaataagaggaaaattcactggaggaattggtctgccctctctgcctctaaattctttagaggtttgggttttcgttctcttacttcccataaccatgcccttctggctaagcaggcttggcggatttggtctaaccctgattctctactctattctcttcttaaagctcgannntttaagcatactgactttctccatgccccaaaaggtcataatccttccttcacctggagaagtcttctgtggggatcccaactcctcaaacaaggcctcattcggaaagtctgttctggccgtgacatccctatttctgcccctaattggatccccaacatctctcacccaaccattcttcaaccaattgacccctctctggccactgtctctttttttgtcaaccctgaacgaacctggaatactgaaaagcttcaccattttcttcctacctatcaagctaatgtt

SEQ ID NO: 59696 - DNA, 3700 bp, Cannabis sativa
atcaactcttctcaatcacattgcaactccatgaagaaagcaaaacagaaccgaatcaaagaaaaaccgaaaacacaactgagtaaagctagtaacaagggtattcaaacaagaacacaaattgaaaacgaaaataaaaagctaaacatccctaattcagataaaaaaaaagacctaatatttccaaccacattcttgtttaagcatgtttttcctaaattaaaatgactacaactttatcatcagacaaaaatctcaaagactcgattttcagctcttcttcaggagtttgttaactctaacccaatcaaatgatcaatctcaaatacttaaattccctaaaaaaaaaacaaagttcatttatgattacaaacaactctctacaactattgaagcattacataaaattctctaatgatattgaaagtaaattcaaataaattttccaaaacaacaacattaacattaacaaacaaactaagtagaagtgatcatatcaatactcaaaattgttaaaacaagaaactttaatcacaaaccaaataaatcgagttattaattaaagagaatcaaagcttcaaaccaataaaacattaattattaaatttatgtattatattataccatgaggttgatttttggaaaatgatctcattctgtggtaatcttgcttataagcaccgttagttcttcttctccaaaaacccatttgaaaagctttcactgaagaaattgaaaaatgggtgagattgatcgtatcgtgggactatatattatggaagctccgaggtctaatgtttgttcgtcttatgattttgtgttttgggtttatatgtatttatatagatcagactcaaagattattagtttcttttttgattaggattagataacaaatatatataatataatttatttaaatgttaaattgttttgaaaatgggatttaaatttatgtaatattataataatgattattattattatcttcttttttaaagtttttaaagtacggatttaatttcggattaagattagaaaataaatatatattttttaaaatagggatttaaatttatttccttattggaatgttaatattatataattcttttttaaaagagggatttaatttgggattaggattagaaaacaaagatgtattttttttaaaaaaaaaacgagggatttaaattttttattaccatattagaataatattattatatatgataattattattatctttttttttttaacaaatttttcttgttgaataattaaacaaattattattatttttaactataatggattttttatttacgagataccaatcctaattctaatagaatgataattctctatatttaacgtgtaaaattgaaaagttgttatatttaaatatgttaaattgtttttatttgtacaaatatattctatctttaaattttcgttgattttttttattattatctatctttaattttttttgcacgtgattaaatttattagcaaaaattaaaaatatatattataagagttctatttttttttttaaaaaaatatgtataattaggattaaaaaaattatgcattttatgaaaaataattataaagttattttaatttaatttttcaaaaaatattttgtaagagaagttaggactaaaaaaaaataattacataaaatattaatttttgtaaaatttttatatttttacgtttaaagtttttttccttacatttttatggcattctataaaaacacaagacaacaagaaaatcacatgaaaataacgagaaaataacataaaaaaataataatatacaaataacaaaaaattaacaacaaaataacaagagtacaacataaaaatataccaaaagtccgtatcttacgttaaaaaatcgtaaaaatattgaaaactccatatagactgtatttttgtaatttttttgttgtctttatgtttttttaaattatgtaaaaaaattctataaattaaaaaatactaatttttttttatgttgaataagaaagagtcgtggtttattcggttaaatggcgagaaaaatacattatatatttcttttaaattgatgtctttaatttttttaccttttttttaaatttattatgtttacctctttttttcaatcattttactaatttattatgtttttttctatttttttttttttacattgtgtcattcttaaatgacttgtactactttgtatctaccaattactacctccgaagtagggcaattaagaacctgttttgtcggggatattgtaattaaattatttttattttatttttttgtttggttgtagttcaatgtattaaaatgttatttcaataaaaaaataaaagtgaaaaacaagttaacaaaatattaatttttttaatcacattaaattttattttattttattttgttcctctatctaaagtttatgacataaaattcttaaagtgaaaaagtggggtcaaattagtttgtaaaatcttcaactaagcaatggtggatgtgtcaaggaagagttgttagctacctatgtccattgcttacatacaagtacatggaagaccttaacaaagggtactttttttatgttgttacaagcagtatttgttggtcataaccatggtctagattggtgttgcgcacacaaccaactctggctttgctttgcccgacacaccggttatggcggctatggaagctgggctagaggatctaggattgtagaaatcactctgcattctttttctatcagatcttggataagaatggaagatggtcatgtacatagtgaaattgtccttgaatgaagtgtttccacttgattattttgtaacatgaattggtattgtcccacatagtggtgtttgtatgattgtatttgttattagatactatttatattcgttttgggtctaagctcttacaataacatacttttttcctatacaatttagaccgaaaatgaaaactagaaatgttatcttcaaccaaaccaaaaatgaaaaaacaaaactgccctatacacttacatactttttccctatacaatcaaattgaatattaatggcttaattttgtgttacttagacattctttcatactcttacttatattttttttttattactaataattagtcaaaacacttacaaataaaatttacaaattcaaaaaataataatgtaacttatatatatttttaaaaaaaattagacaaccgtgctgggcgcagtttagtagcctagttataatcataattgtgctgccaaccatgttgaccatcatttcttggattcatactaggcgtggaagtttctcgggcaacatcttcttcagcatcaccccatccagttggggtaatcttgtcaatgctaccaaattcaacattgtaccaaccatgttgaccatcatctagtaacatcttcttcaacatcaccccatctagtcgggataatcttgtcaatgccaccaagtgcaacattattgttccagccattaccgtcagctcctttaaaatcttcttcatcatcacctcatccagacgagataatcttgtcaatgccaccaagttcagcattgttgttccagccattaccgtcagctcctttaaaatcttcttcagcatcaccccatccagacgggataatcatgtcaatgccaa

SEQ ID NO: 59697 - DNA, 611 bp, Cannabis sativa
ttttttttttcaatatgcttacaagttacaacatcatgcttataatttttttaaaaatttagaataatttatagtgtcgtaaatacgtttgaagttttttgtacatgcatagtaaactggaatatcaggaactctattttcagtactgtaaattattcgaaattttttaaaaatttaaagaaatgatattgtaactataacaaatacaaatatgaacaaaaattgaaaaaatttggcatgtaattttagaagtaaagattgactaagagattataattaacattccttatttagtattaaaaaaagaggattgagggaaggatggaggtatggattctaaatccatccaccaaaaatttggagggattgtataaaaatgttaacacacctttctttcctctcaatttaccaaacaacttctaaggatacatcaaatccatctattacttttttaggagtgtacattggtcggtttgatcgggttataatatatttttaccaatctagtataaattttgagttgcgaatatctagttgtaatcatctcaatcataaaaataaaaataaaaattaacctgtccaataattttatcagtttggtcgggttaacc

SEQ ID NO: 59698 - DNA, 654 bp, Cannabis sativa
tggtaaaatatattccaacataaacacccccaaacacagtgtaataacctggctagccatgctaaataggctaaacacacatgataggctgatcagatttggtgttcaggtgaatggaacttactgcctgtgtgagctgcatcctgaaacctgctagcatctattttttgcatttaaaattgcaagtctatggctgttggaggtgaagaaatggctcaatgttcgtgcccaaaccagtgatctgcagcatttgatcaggtggatcaggaaagctaaagttttgaaatttcaaaaacaagtgctggctgctacaactgcagctagccttgttttacaacccgtggaaggctaaaaatgctttgatttggaaaaaaacaatggttgatcctggtagaataattgaagaaataaaatggacactcaagacccgaattgttatgttcatgcctaggaaagttaagagcatcgatagagattggtttcttgctttgtaatggaaatatagatgtcatgtgtagattttagccgaatgtatatagattcttgacccttgttttgggtgtctataggttgtaaaaatcttgtttgtgcaatacaattcattgatttataaaaaaaaaatatgtgtacatatttaattaaatttaatgatat

SEQ ID NO: 59699 - DNA, 2025 bp, Cannabis sativa
atattctgaaaagaatgctgaacaagtggaagagtatttggagagaaagacataaccgatttatctaagttgagtttttgacccgaagcacggtgatagatgtttaaagcacgtttgatagacccacaagatcgatcatcagcttgacaaaagagtaggctgtcatccgcaaaaaataaatgggatattgtaggagctcttcttgaaacagcataacccttgagtcgaccaactctttcctcatattgtaataaacgagacaatccttctgaacaaatgaggaagaggtatggggaaaggggatcaccttgacgaagaccacgctgaggagtaattgaaccaaccaccgaaccattgagattgaaagaaaaggaagtagtatgcaaacatctcataataagggagatccatcgaatattgaaacccatcttacccattacggcagccaagaaagaccattcaacacggtcaaaagttttgctcatatccagcttaatagcagcatatcctttagaaccttgcttacgatgtttcaatgaatgaatcatctcaaaagcaaccaaaacattatcagtgatcaggcgattgggaaggaaagcactctgcgtttccgaaatgacaaacgggagaacatatttaaatctgtaaataatcatcttggatacaagcttgtaaacaacattacaaaggctaatggggcgaaagtccttcatagtagtcggcttcttaactttaggaattaaagtaagaagagttttgttgaatatggtagggtcaccattgtcattaaggatatgtaggactaccgatgagacaagatttccaacaatgtgccagtgatggtggtagaacatggccgacataccatctaaccccggacttttatcagacgccattgatttcaaggtaaaatagacatcctccttagtaaagtcacgaagaagaaaatcattttgatcatcatttatggtagtaaggatagtagatagtacatgtgagagagcccaatgatcttcctctgaagcagtaaatagatcttgaaaataatgggaaataatgtttgtaatcccctcacaattagtaacaagattaccattagcatccttcaaagatttaatcttattggtggagtttctagcactagctttggcatggaaaaattttgtgttgcgatcacccgattttaaccattcaatacgtgacctttgctgccaatattgttcctctttagcaagaagttcatccagaattgattcagccgtggtaagattgtgagaatgtaacaaatctgtagctggagaggaattaatacattgtacacgagattgagcttgtgaaatatcattttttaactgtccaaacttttgggagtgccactgctgtaggtttactgcaacattctgcagattgagttgaagattggaagacaaatcacattcggtttgcagcagccagttagtagaaactatctcagcacactcagcatctgatagccacattttttcaaatcgaaaacgagaccgtcttggttggatagaatcggttgtgctgaggaaaaaaggttgaccaagagagcgcgatgatccgaaccaaaataatcaaggtgtgtaagctttggaagaatgaaagcatcagtccatttcttattaataagacaccaatccaacctttcctttaaagctgttggatttttccggttcttagcccatgtgaactcatcaccctcaaatggaaaatcttgcaaaaaacatctatccaaagtgattcgaaaggcagccatttggttatcatgccgtaaagggccaccattcttatgagagtgagagaatatttcatttaaatcacctatgagtaaccatggatccaatggagaaacatcaacaagcctattgagaagttcccatgtaaattttttgttaacagattcagggaagccatatacagcagagaagtgccattttgggccatcatcataagacacaaagcaatcaaaatggtttgtattcattgaaagcagtgatacat

SEQ ID NO: 59700 - DNA, 798 bp, Cannabis sativa
  modified_base (30)..(33): a, c, t, g, unknown or other
aagacttacccttgtgaactccttcaagannnngcccaccagcagctccaaagaagagtcattttcggcaccagccagatgctcactaacctcaggaaccaatcgattcatgtagtgagcgagcatcgccttaccctttttggcctccggaagcactggcaaaggtggagtagaggtctgcaccagttcagacccacctctcggttggtcagacctatccgaactccctcctcgagactccgtctcctgggcatcttttggagtggaggggtttgcaaacgtcagctcctcagaaagatcgatgacctccctagcaggcgtcttttccttggaaaaagttccctcaccatctttagacttcttggccggggagatgcgtgggagcttccaccaatcctcttccttagagcatcgagcatcttctaagacatgtctgcacggaacaaaaagcaacatggttaaagaaaacagacagcagaaaaatgaggcataatagtcaagaagctcaaaaacaagacgaggtagtgtgcaaggtgattgtccaaaaaagcctcaaaagtccatcatcacctgacatgcctcttatttcagacataatggctttcccttttcttagtacgggagggggtggccgagtaggagaaatgggttccctgatgtggattgcatgttcgataggcctaggctaggccaaaagcttttacctccttttgagcggagtcaactgctcttcctcagcttcacctttaggattcaagggctcctgagcatacggctttgcccttgcacctcccttca

SEQ ID NO: 59701 - DNA, 936 bp, Cannabis sativa
tggtggtagaaataggaatagaatgcaatggaatttctattattttgtttgttaaagactatggaatcaataaataagaattgtgataattggtatagtatagaataaaatgaaatttttattattttgaccaaaatatccattactttttttaaaatattttttgttttataaaattaccatggtacaaataaaaaaataatatatatttatgtatcactttcaaattgtatttttcaaatttaattatcaaataataaaatataaataaatatttaatttaatagacaaatttatattaatatttaagtatcaatagaaatattattcatatattataatcatcacacatcgtttatctatataattataataataatattgctttcctataattatgtaaaaaaaaaaatataataaacatattattgtaatattaaatattgtagatatatgttttaagataaaaaatgttacctatattattataattttaatcatttatttatgagaagggtagataaggaaaaataatttttagttggtatggaatggcttttcaagttattttatttaggaaaagtaattccttaatttacatgaattacaattcctatgaaatgagttttccaatgacaataaacaaaccaaacactttaatgatctttctttaagaatagcaattccattcttacactcattcatgtaaaccaaacactacctaaagttgaaaactatttctattctaactataatactaaaagttatactaaaataatattttttattattatgttatttaactaaaatcatcacaattaattaaaatgcactatctcaaaaaaaaaaaaaaaaactaaaatacacccctctaaataaaagagtcacgattacaacacacactttaaattttactttcgacatgttaattttttc

SEQ ID NO: 59702 - DNA, 2234 bp, Cannabis sativa
tgtacaactcttactgtagtttcattcattatacaaaaagaaaacataaactgcagaatgagacctttatttataatctcacgactattattacatagttgatacatatagttgaaaacagagaaaagagcctatgtgagtaaaaaagtcccaaatactaattcccctcttatgtaatatatatttctttctaaatatatatatatatatatatataatatatatataactagcaatactaattcccttcttgacataaatatgagttatatgatgatacaagaaagtataaataattgtattataaaaaaatatgagttacatggtatcatacttgagttgatttatttttttatataaatttttacttttccatattttatgtttataattagtgagataattactaaattatatctattttttacaatgtcaattatttttatataatttttcaataattttataaaaaaaaaatcatataagaaattaattagaatttttaaaatttaaatattcattaatagttactcaaattattattattattactattattaaattataaggtttttaacttcttatgctttcgagccttgtttgggtgttatacttttcagaatattgtgtttaaatttatattttttcatatcgtgttataccaatttttaatatattattgtgtcgtactcaaatttatatttttttgtgtttaatcattatcgtgccttccaaacttatatcgatttcataccctatcaaaaaattcagctcgtatttagagcatagaaccatcaaaaaatatataatgcatgttatcttaaaaaactagtaattttaatgtgaacaatctacccaattcaattactataataatgcattagttaatgatatgacatgatatattgtctaattttgtaattttgttaaaattggaaattttgacaaaataaggtgggctgaatgaaaatcattttctatgtgtagctgactcacttcccaagtggtctatcataagtatcattaattagctatttgatgtaatgtaaggcaatttggcacatgttgtcaagtaaataaatctctttctttttatgagaaatctatagaacattgaggaattaacttttcaatttttggtgagactactttactttcttggtcaataagtaagaattgggtgttttggagaaaatttgctaccatcactctcatcgattggattggtatacagcacataaaaatgtagtgcttttggattattggttagtcaaattcttttttgcttccttttgcctataatacaattgatgaaggaaaagtgtattgatttttagctttcaatttttcatacttattaagttattaactcattaatgtaagaacaaaaaaaggcactttattaactaagttggggttgtcagttatagctttaatttaaattatataaaattcccaatagcaacatgataagaacagagtttttttttttttttatgatttttaaataatttatttatttagttttaatttttttattaaattaaaattataatttaaactaataatattttgatacatgaacttctcatcgattcaggagcttctcaaatggatcttcgatactaatattttttagtatttctcattcaatttagatggaatgaataaaagtaaaaaaattaaaaacctctcattggaatgtaaatacgtcttggttgaatttcatatcatctctagtgactaataagaattaataaaagagttatctgctactttatgtgtaaaactatttcaaaggaagaaaagtaagtgatgaaaaggtttcaattcaaccaaatattcaaatggaataaaatcaataatgccctcttttttctctttttcaacaccaacttaggtcttatgttaatttgctttccactgctttattttctctccctattgactagagacatataaagttatcaagaagagtctctaccatgttattttgttttgaataaagttcacaataattgattagtcatgttattattgttaatgaaattataattaagaggtggtcaaactctaaaatctaaaccatatagaacaactaaaggtgaaaagtaaaagtcccattctgccctcctattttaaattaggctttgaagctttattggtccaagcccaagtccacttaatgggctggatccaacaaaagcacaatgttgtattaatgcttctcacta

SEQ ID NO: 59703 - DNA, 1418 bp, Cannabis sativa
agagagagaaagaaggagctgggtagtaatagtatggtgttaatacaatgaataagaaagaaaaaaacagagaattgggttttggctaggtgggttggattgttccaatgtgaatactaataatctctttctttctctttccttcttcttcttcttcttccttttttttttattcaaatgcagtcttccaatgcttaaaataataaaaaagcaaactttgaatcgaatttttttttattatttttacagatacggtcttgtctcccccttcttctccaatatctatataaactattctctctcttctgtaaaatattatgtctttttcaaaccactccctttcctccctttttttctttgtctctgtattagttttttctactctctcaactcagctagctcacattttgacaaaaatggtggaacttcattttctctcttggccaaagaaaaaaaaaagattgaagcttttgaaagaaagaaagaaaaagatgaagatttaactaaaaaacaaataatgggtcatcttgactttaaataaataaattaataattaaatttaaataattgtctagttttattatcaatgagtggaataatcacaattagttactttccatattttcaatttttttttaagataaatggaatttccattaattggaataatcacaattagtttttttttggtgaaagaataatcacaattagttactttccatattttcatattccttggagtttatttattttacttttttactttaaaaaaaagaaggaaaattacatttataagatcttttgatatttatatcaaaaagggaaattaatgaaaacaattaattttttcctcaaaaaattaaacaaacaaaaaaaaaaatctagtgttacactatcttatatttcctcaaaggaatttctaaagaacaaattgagaaatttctttttttttttatcaattaattaaaaatattatcatattaaatttcattaaaatatactagattgtccaatatagtttcaccatccacttaacatataatttacattaatctaaagggtataatggagatatcattgtttaatatacccttggcctccacttaagtgtagcatattatttaaattaacctaaaaagtataatggagatatcatctataaaaaagaagtaggtgtatatttaaataatatgaaaataaaagtaaaaattagaataaataaaataagtgtagaatgtaattttcttataaaaatgtaatccaattataataaaaaaaaatgtggattaaattgaattaattgtaatcttcgtattttaccattttagcgttcatctgtcttaagattactcttaattaaatatgtttaaataacatgaaaataaaagtaaaattagaataaataaaataaaataagt

SEQ ID NO: 59704 - DNA, 1091 bp, Cannabis sativa
  modified_base (777)..(777): a, c, t, g, unknown or other
tatattcttatgtataaagtttgactatgtaataaaaatttaatttgatttaacaatttttatttttatttttcaattaacggttaaacctgtcatcgcaactaaaaactcaaattacaaatatatttatatatttatatatatagtgtggttatgtaaagaaagttgttaagttaacaattttttgttatttttctattaaagttaacattaaaattaagggataagttgagaattactttttttttttattacacattaattaaatataaatgtgaaataattttaattgataaatatattttcttttttataatcaaagtattaaatataattttacataacttatcaaaattaaaatctttaacgtatataataaaaatatgacttataaaattgtatataaattaaaaaacaataaaagaaaactaaaaattaaatagaaaataaaaagtgagtatacaatttcctctaaaattagtaccgtcacaaaaaaaaaaaaaaaataataagtaaaagatttaaaaacatatgatagaatttaaatttaaatatacatgtttaagtctatgtttaaaatattagtctaaatataaatttgaattaaatttcatgtattttaacaaatattattaacgcagattttcattaacgattatgagcctattttcgtaatagatttggcatagaaattataagtgatctaagaaaaataatagaaacataaataacaccaggtttttacgtgattttgcagttaactctgcatagtccacnagtcaatcttattcagatttttctaatacagaactagggttctttacaataagtgtattttattttctctaaggattttccctccttttttctatataatctgcccctatttataataacataggttggcagttaattacattcaaattcaaatcccacgaccatattttcccgaaattgtgggccttaattactctccatgtaaataaatgcagttattatttaaaaatcacatagttgtgatttaaactgcttttaaagggtctaagctgatgtggattaagacacgttgcaaaacatatctcgttgaggca

SEQ ID NO: 59705 - DNA, 2355 bp, Cannabis sativa
  modified_base (2272)..(2310): a, c, t, g, unknown or other
aatttgagatcacatatcaaccgagagtggcaataaatggccaagctcttacagacttcgtggcttaatgtacaagcatatcttttgaaatctctccagattcaggagaaattcaacaaccagaaaagaagcgagagcaagagcaatagtaaaaacatgaagaatcaacatggaaattgcatgttgatggaagctgcactgaccaactgtatggtgcaggcatttccctcatcacacctaggggcaatagctacacggggcaatcaaatttggcttgaaagcctctaataatgaggctaaatatgacgccctaatttttggcctcaagctggccacaaaggctgaccacctggacatatacaacgactcttagtcgtaaattaagtcctaggtgaatacacaactcgaggtgaaagaatgatagcctatttgagcaagatccaagacttgctaagtcagctcataggctacataataaggtagatcctaagagaagagaatgctacaacaaatgtactttctcgtctaacaagcagcaccaataccgataaagcaaacttggtgccaatactgttcttaaaagaacacatcattaccatccttgaagaagtcaacatgttggatgacagtccaacctggatgacacctattgcagcttacctccaaattggatccttgctcgagaacaaaaatgaggcaaaaaagatgagaagaaaagttgctaggtatctaatcctagacggagtaatgtacagacgaggcttctcaatgccactcctaaggtgtgtcactaagatagaagccaagcgtttgttgatataagtgcatgaaggcttctactacaatcatgctgggggcaaaacctatccaaaaagaaactctgataggggtacttttggccaaccatgatcgaagattcaatggattatgtcaaaaaatgtaagtgccaaagattctcaaagatctcaagagctccacccaacgagatcacattgatgcaagctccttggccctttgccatatgaggaatagacctcattggtcgactcccaaaaggaaaaggaggagtgcagtatgccatagtcgttgttgactactttaccaagtgggaaaaagttgaacccttggcagcaataacttccaaaaaatacctcaaatttgttgtcaagaacatcatatgtcagtttagactgccacagaagattgtatcagacaatgggaagcatttgacaattacatgttcactgatttttgctatagacacgccatcatcaaaagcttctttgtcgttggtcatcctcaaacaaatgggcaggtaaaagctgtgaacaagaccctcacggacacttcaaaaaagcatctagaagaggcaaaaggcaattggccaaaattgctcccagaggtactttggtcgcataggacaaccaagaagacagctaccgagcaaactccattcgctttaacttatgactatgaagcaatgttacccgtagagctggtgccaccgtctcacaggaggataacctatgaccaggaagtaaacagcacattgctggcaaaatcccttgacgaaggagaagaaaaaatagaccatgccaacctaaagctacaacatctggattgctaaggagcttgctagccatagcctctgcaggctggccagccatgtgatcagccacctcctccataggctggtcgaccataacctcatcaagatggacagaaaatgacccctcaagctggacaacagtcttgcctgccacctagccagcctggtctatttgcatcctactctcgtagatctctttcccttgagcaagtgctctctcatggaaggaagatcccatgtaaaagaggtcgatattggggttatgaagataaacctcatataagaccttcgaagacaagccaacatactcttccttgatggcttattgccatcaagagaaagttgcaatgtttgacacttgttctcaagctccatctctaacctggaggcctcagcaacaagattggtcactgcttggttcctaataccaatgaagcgctccaggacattatttagatcatgagactttttcaagcgagcatgtgtctaggcatatgcatccctctccatctgaagctcggtctccttggccttcaacttctcttgatgagcgctagaagagccaagctctaccatgagtaagactgaacttcaacatggcctaaaatcaaaagataaaactattgtcgagtaaattacgcaacaccaaaaatgaataataannnnnnnnnnnnnnnnnnnnnnnnnnnnnnnnnnnnnnntaataataataataagaacaatatgatgaacaagtgcgagtattc

SEQ ID NO: 59706 - DNA, 1086 bp, Cannabis sativa
aaaaaaaaaaaaaaaccatctaaagagttaacacctgaaaaaaaaaaatgtaagaagctcagtgaataaacggtaacgataaaatgaaaatgaaaaggtctaactcacgacaagaacatgggttgggttgagttggaggaagagagagaaggggctgtcagccaaccaggtcaccctatctttactcgtggtggaaatgatcctcctttactaattcctcttcctaattcttaaaataaaataataattttattattttctattttctttttaatttaaatattaatataaatttggtgtaaatttcatttcatgtgcatttcaatacccagctatataaagagccaaatctctaactcctgctcctccttattgtcgtccattttcatctctgccgaccgagactaccagacccgacctcatcgcattctctacagctggttcgctttctcttcgattgtctttgccattctctttttcaaaggtatcaaataatctaattccatctttttcttttcattttttttttcttttatttttgctttgaattgtttcgaattcgatttgttcgataggtgagttcaatagttcgcttagtgttcatttctgtgctgatctgtgttttgcacgatcagtttttgagctaatttcaatatgaaaccatgatctgtggcgtctttcaatgatggatttgttgatttttgttttagtttattttgataaatttagatcggagtcgtttagcttgctgatatggctctcaattttctggatctgctgtatttttcacattctgcttgtctaaatcgatgcgatttaaagttcgtgagtttttttgttctagatctaactttggattacaagtaaactgggatttcattcgaattttcccccctttttttctagttttggattacagaagctacgcagtttaatatgcacggacattactataattaatcataagatagtgactggagttgagactctttggaatagaagtaaaaacatggatctttattataaatttatcgttctttcttgtctgttgatgagttagagaatcacttttttgctgcacaactc

SEQ ID NO: 59707 - DNA, 930 bp, Cannabis sativa
gatcgacctcactcctggtgagtttactacttgtaacgatacgtacacttgcgtgtgcaaaatatcgcaacaaataataaacacctttttatatatatatatatattataaaatatggtaattgaattatgtattgtattccatagaataatatatatttatatacaaagttaggaaactaaataggaaactactaaatacaaatagaaaactactaaatacaatttaccctaattcttacaactaatattctaacactccccctcaagatgaagcataaatgttgaccatgtctagtttattaccaagataatcaactcgcaccttattcaaagcctttgtaaaaatatctcctaattattctccaatcttcacatatattgtggagatcagaccttgttgaattttctcaaatgtactagttcgctcgtggaacacagaatttgaggtaatataaagagcaacttgattattacaccacaattttactggaatagaagtcttaaacctcaattcaatcaaaagttgataaattcatattacctcacacacagactatgttatagctctatattctgattcagcactggatctatacacaacattttattttttactcttccaagagatcatgttgcccccaacaaatacacaatattcttaagtggatcgtctatctaccttggagtctgccaatttgcattagagaaacactcaatttgggtatgtccatgatccttgtaaactatacctgatcttggtactcctttcaagtaacataaaatttgctctaatgctacccaatgatgaattatttgagaagacataaactgactaatgacactaactgggaatgcaatatctggacgagtcacagttaaataattcaactttccaaacaatttatgatatttctcaagatcttcaaat

SEQ ID NO: 59708 - DNA, 922 bp, Cannabis sativa
ttataatactcgtgtgtagagtttcgaagagattaagaaagacgagtttagtaatcgaggtattttaaaatgaattttgctaatggtttttttttttgttaggttatatttgaaaattaaattttgatgataaagacaaaaagtaaaggcgagttaggtttttggagagcttgaggaagatgagtttagttgaattgaggtattatagcttaggttattctttcacaagaaaagcacattggtaggaaaataaaaaactttagtctattggggtgagacaaaggaacttcagtcatatgcgggccacgtgagatgtttaaggagagctcatattgtttctctttgaaagagaaaataaatcaaatacaagtctttcttgggagttttagagtgaacaattctattccaagatgaatttgtacaagttcatcttcttcgagttttaatactcgtgtgtagggttttggagagattgagaaagatgattttagttgaatcgaggtattttataatgaattttcctaatgtttttcttttttaggttatgtttgaaagttaaattttagtgaaaaaaaaaagaaaaaggtaaagacgagttagatttaaggggaacacacattgtttatctttaaaaggggaaataaatcaaatataagtctttgttgggagctttagagtaaaaaattctattccaagacgaatctctataagtttatcttcttcgagttctaatactcgtgtgtagggttttagaggggttgaggaaggcgagttaagttgaattgagtattttataatgaatttttctaatgcttgttttaggttatgtttgaaagttgaattttagtgaaatagaaaaaggcaaagatgagttaggtttttggataggttgaggaatatgagtttagttgaattgaggtat

SEQ ID NO: 59709 - DNA, 661 bp, Cannabis sativa
gtcgaagaatttgtccaatgtgatagttgagacagattgtattgctgttgttcaagctcttaatagctcggttgctcttccatcagtttttggtttgtttgttcaggagtgtctatcgattctttcttctttacttaatgtttctatttgtcatgttaaacgatctgctaacaaagccgcacattgtgttgctcacggtacttgtttttggtctgatcgtctttttactgagagcaatgttccacatgctcttcagtctattgtgatagcgaatattactgtttgatgaattaattttgttcaaaaaaaaaaaaaataaaaaaattataaatatagttaaatataatcattataaaactagataataaaactgtaataaaaaataattatctttgtttctccattgcaattaaataaaatctacaaattgcataaataaatatgaattgcaaaacattaacaaatatataatataagttttaaaattggaagaaaaataaataaattgaaaatctacctgaatcaacaacacttaaataagtaaactgataaatttaatacaaagataatattagagtttagagtattaaacaaaaccaataaatagacatatagaattgtctaaaaagattaacaatagaataaaaacttatttttagtt

SEQ ID NO: 59710 - DNA, 1231 bp, Cannabis sativa
actatttaatatacctaaaaataatttcaaacaataactaatgatatatatattttttaattatttattgtattatttttaaataaagtaaaaaatacctaccataaaaattaagtatacgtgcttcgcacgtaacatttaactagtatatatatatatatgggcagtacaaagaaggaggagggtagtgctgctgaagctgattgtcctaataagtagtagttatttggtacaaggattctcattgtgtaggagacttttagaaggcacaacttttatctttcttttgttcttttgaaattatgactacagaacgtttcttttggaatatcagatctcatctgaaattttaccaattttaccaagggttagttaataagttggtgcacattatatacgatgaggtgtcagcggggtacacttacctttttctataatttaatttaaataaagatcaatactatttataagagcattgttatgggctctttgacatgtagtcttataagagcatctcctcataataaaaaagagtagttcgttctttctgagcactatacctcgttcttactggacagcctccaacaccccatcctgaaaaaatttcagtccaaatacgatttgaaatttttcaggattattgattataagctctaatgtaacatcttttagaattgtaaaactttcccatagatgagttgacaattattcatgaaacacttttttctgctgtacaaatccgaggaatgtagtattaaccactgtatccaatgatctttgaacaatgatatatataattctatgagatttttgatgttgatgatataaaactcaaaacttcttaatgtaacttaatataccactacatatgaagtctttaagttaatcgagctaggacaaatgtcgtaaatttatacaaaataaatattttaaaattttaactaagtttttagggtcttccattagaaagagcccttcaaaatgccattagtattctttagtaaaaggtaaaagaatagttcgctttgtgcttaacacatggctgcgtgaattttagagactaaatgccaccaactatgtagttactctttgagaggaatgttatgctttttccaatgtggagtacattctttctacaaagataagatctcacattatgaaaaaccgtgtttttacaaatgtcagttatatataagaaaatataaaactgtaagcgtttgcagaagcagaa

SEQ ID NO: 59711 - DNA, 1371 bp, Cannabis sativa
aactcactcaaatttaattgaattgatcacaccttcgcctaatatctccgtctttacttccggtcttcactccaagaatgctaagcttctccattgctcgaacaaaatcctgaaaaaacctttcttggtttttcccgtacaaatcaacgaaaggccttgttcttggatcactgtggagtccgtgatccgttttcagaagccctagtcccttttgtatgttctggtaatacatgttgtcgaacttgtttggggtcataatatcgttgaatacagagagagtagggttcttcttgtaatcggcacaagctttttgcaacccagaagcgaatctagggttgtattggggatcagtcgacgcagttttgctgtagttgtagatcccactactaaattctttgcaatgcgaaaacccaatcgtatgagcaccgctcaatgccaccatttcctgtacagagaaacctctggattcaaacaattgaatgattcgcgacatcgaatcggtcgttcgagggaggtgaccatcaacatccgaagccctagatacgcggccgtctcttcggccgagtagaacgttgtaatgaggcccgccgagcatggtgacgaggtcacgggtagcgacggcgaggatatcagcgcaagagactgtgttagggcaagctagctcgagtgcggtcttggcccgaacgacaacgtcgaatgcatcaccgggaagagagagattgatatcggcgtcgcgctcggcggtattgaagggcgtagatgaaatgagaatggaggcgtcgcaaccgttgaggaggcaatcgtggaagaagagccggagagaggcagcggcagtggatggactggagatctgtttgttggtgactgtgtcttggatgatttgctcgaatctagggcaggttcttcggtagtagtttgggtatagcttggtggacctggactgagcttgcgagcttggaagagctaaagaagtaacgagaatgatggtgataaggtggagcagtgaagccgccattgttgagagaaagaaagcttagctcaactcctcagctttcactgaaagagaagacagagtatttttagagagagaatgagtgggttgtgattatagagagatagagagagagagtggtaaattttagagagagaaagtgagagtggggaaactctttcttattttcctccaatcacgggaagcgtgttgtttggagataaggcctcactttaatctcatggcgcgtggattgatttatttattttattaaacaggtttttaggttcgtgtcccattaagtcagaattttgttgactaattagttgtttatttatttattaattatagtgctgtaaaaggtcggtttgggcagttta

SEQ ID NO: 59712 - DNA, 559 bp, Cannabis sativa
cccaattagggaaattattcaaaattatatcaacaaccttttcatgacagattttggtttcaaaaaaggtactaaaaccaatcttatacaatctatatatatcaaggatagtttttttatttactacctttattttaaaccctggacattccacctgatcatgttacactactccatgacgtaaagtcatagaagtagtgaccaaattccctcaatcaggcacttgaagcgctgcataaacattactagttgtggcattagatggttgtgaaccaaaatttttaactcctttccttctagaagtgatccaatcacccccaatatcagtaactatttcaattggtacagaaactttcacagccatcgagtctttaacctgcacatcagaagcattagatacaacttcattagaaattgaagttgttttttaggctcagtttctactggtttatccttaacggaattatctactcctatctctgatttatttagcacaacctgctttttcttgacccaaactaggccttgatctttcgagcaattggcaacagtatgtccc

SEQ ID NO: 59713 - DNA, 642 bp, Cannabis sativa
atctttgatgatttaatgcgtgtttgcactttttttgatgatactgcagtttgatcaaatatagagaggtctctttcgatactgcaaattaagtacctattttacttaatattgtgaggtctgtcattagtatagtctttttcacggggagagaaaatttatcctaataacatttatctataacattaaattatgaactatttatatatatttttttaattattttacacagtaaaataataattgaattaatttttttttttatatttttaataaaaatattaattaaatactattgcatcaagttttgtaattgtacaataaagcacaataatataatttgatgcaaatttatcacaaaattactttttgtactaaatacatcttttacctaagagcattattttttaggatttttttcataagtgtagaataaaactaacataattacaaaaaatgcgccaaaaaataattttaaaaatatatacatttaaacacatatttacataaaaccattcaaaattgatcttaaatattatattatgaattaatgagtaaacttactataaataaatttttatgaatatatataacactatcgtgaacaataattatttttaaaattgtaatacaatacaataa

SEQ ID NO: 59714 - DNA, 560 bp, Cannabis sativa
aaaaaatcttaattaatttcttttcacttataactaaaatatgattattttaatttcatcactgttcttatatttttaacactctttctctctcttataaaaacacaattaaaagcacttctcttatgatttttacacatgtgttgttatttttctgttaatttataactgtcttttattttataagtatttttatgtcatttttaaagtattttatatagttatctttctattgtttttgtattttcttacatttgttgtttaatttatgtgcatttttaatcgtgtatactttcagtttgttccaaacaatatttttgttgtgtatatgtgtatttattttgttatttttaagtaatttctataaattttttgttgaataatattttttagttgttatttttttattcatatgtattttttatggtgtatatttttagtttattcaagatttttttttgttgtatgtgtgttgctttgtatatgtagatacatatatttaatttattttgttcacatattattcagccattttgattttgatataatagaatcagttc

SEQ ID NO: 59715 - DNA, 827 bp, Cannabis sativa
agttgatttacatgtaagagagactttttaaaattaaaattaactaaactctaacctagctccaaataattgatgagatttgtttcatgaaagaaaataaatattataatgcctttttttatttttcccaaagcaatgtaattttacccaaataatgtattattctaaatcatacacaaagcaatgaaaaattaagtttttttttattaatattaaccgaaacaatgtatacacacattacagttaatagctcaaataaacattaataaataataacactagaagccatttaacaaagaataacactataaagtaatatgattcaattattaacgaataataaaaccataaaattacaatatttcatcttttatttgtttgtgaagctatttatgtttccataagataagaagaagaagctatcaatgatacttttcaactacttttttattttactcttaataaatttattgttcgtttatatgttgatcatattcttcttgttgctcaatatttataggtaatttgtagaaacttatgttaaaatattatgtagagatagctagagacatcataaaatatttatcttcatctatactaaaggattcaaaaattagaatgcgacaacatttttgaatggtggaggtggagggtagtccatcatctgtttcctccgtttcttctcaaagaaatattattgtcgtggttactcttcaaggtgaagaaacaggaggaaacggatggaggactaacaaccacgaccaccaccaaaaaatattgttcaatcgaattcttattctccactaagatttggatcttttagtaaa

SEQ ID NO: 59716 - DNA, 1266 bp, Cannabis sativa
  modified_base (908)..(917): a, c, t, g, unknown or other
aatattgttatataatgaaaagattaattggttaagcaatgataatgtaatgatactaggaatgtgatatacgggctcacctaattaggtaatgtgattatcctggtgacgtactgggcgtaagtatgagcatcagtgacatatgagtaccaagtgtaggtacaggctcacctgattaggtgaggcaatactcctggtgacatgaagatacaggtgtcaatgatatgaaaatttccaaattatggcatagtttgaaaccattgtagagtttcctcctggcgacgtgtagatacgagcgtcagtgatatgaaaaatggtcaggttatagcatagattgaaacagttgtagggtttcctgcaaagttatggcatagaatgaaattgttatagggttttctactaggttatggcatagaatgaaattgttctagggtttccttatggcatagaatgaaactgttgtagggtttctacctgaagacgtgccaggtgtaggtaagggtgtcaatgacatatgtgtaccgagcataggtacgggctcacctgattaggagatgcaattatgtgatatgtgggtgccaggctatggcacgggcttgcctaattaggtaatgcaataaaggatgatcagactaaagcatcgacttgtttgattaggcaatatgatgtaatgaagatggttactttatgaggtaacttatatataatttatattattaaatgaatataattccaattattagtataatgattttgtattactagatatctgtatactaattctttttcatggcagatgccagtagtgatttggatttcatcttatgaacaatgcgtaatggtttgattcttattatgtataaatgataatattcgaataataaactatatgattattattattattnnnnnnnnnnttacttttcttgttgagtccttgtgactcaggtgtgctccgtggtgcaggtaagggcaaggagaagttagagctaccatgaggtaactaccttctccagtaatgtacatattgaccccgccggcctgtgtgccgagttgccaggagttgttttggacatgctgtatctgttgtattgtggattgtattttgaattgttattgtatattgtcttttgattaaatcttttttgacagggatccccacaacacctttttactaccgttatgatgtccgtttttagtattttatcttagtcaagtttttaataattaattaatgattgttttgcggaaaaattttctcaacta

SEQ ID NO: 59717 - DNA, 746 bp, Cannabis sativa
acagttaattaatattacaaccttctatagttctgtctgtatatgctgaagtaatatatttttattttaatttttatggtggtgtttagtgtagttaaaataattttttattaaagcttaattcaaaaaatataaatagtttatatatagtgctgtaaataattttaactttttttaacagaaatagtataaactagaatatcataaaatctgtggtaactacaataaatattaccatataaaaaataaaaataatccaataatatatatttttgaagtcaaagatgatgaaaagataaaagataattgaatgttgaacatagcacaccttttagaactgtttttgccttataattataaatataatcaagccaagaaatcaatgaataaacggacaaaactatgtgatgtgcatgtatatgtattgctgattaattatgaattagatacacgaacaattaaattcattaaaaaaaaagatacacaaacaattacaatatataggctgtctctattctccacagaacaaaattagaaatcaattagaaacacgacctcaaaaatagacttatatataggacaactacgagtaataatgccacaaattttttgtatgcacgacctcaaaatagaattaaaaaatattatattccaagagaagagaacaatatagctgtataaaattaaaagagtgaccacttaattatggacaagtgtccttctacacatttttttctttttttttt

SEQ ID NO: 59718 - DNA, 1075 bp, Cannabis sativa
tgaatttaattatttatgggtcccattattagaaatgggcattagagttataatttctcaatttcagagattttattaaactctagggtaattttatgaattatatgaattatgtaatttttgtaatttttgctcgacgacaacggaaagtgcgatggatggctagtttgatcacatgtaagtttagaaccttatttcttagtgggatatttattggagaaaaaaaaatatcagggtttagcggggtgatggtttttgactattttaccgctagttttgagaatgcttaggttataacctaaagggtaatttagtaattttaatagtggagagtggtggtagccctaggtgttgacacctagccagagaatattcagccaaggtttaattagataaaccattatttcatttagaaggaaaataagaaaaataagaaaaagataaaccaaaattcaagagaagctctctctttccttcctctctctttgaaccagcccaaaacaaaggaggttgttgctgatttttgggtgttttcagcaagaaatcaagggaattcaagccaaggtaagccctagcatctctacctcttagtttttgaagttgttacttggttggtatatgtaattttgagaattagttgttgttagggttaggttgagttgtagttcgaattatagggttcatttgagttggtttcaagttcttgcagttggttttagtgtataatgttggatttatgcaagtttgggtttaaaaacctaaactttgatctttaatggcatattgttgttcagtgagattttctgtgaattgcttgttggaaaatattttttatgaattgtttaggtgttctggaatgtatggatgcatttggtggggtatttatcaagaaatagaattttttgggtgaactggtgcaaaccgggtaactagttttaccagcacaaccggttagccgatttttgtagggttccccgaatgtttcgtttcctcaattctcgtccatttcagtgtcgtagttgggtgtttctctatttcctgagttagagtaatccctaaagagtataacagaacc

SEQ ID NO: 59719 - DNA, 1183 bp, Cannabis sativa
ttggggcagtccaatccaatgttaaaaataaattactcttgtcaccaaataaattatattttaattgagaaattacaattaaataaaattaaaaaaatcaaaataacaaaaaatattaatgtaacaataataataaataatcattaatactatattgtaataaaattatttttgaataaatataatacttatacatatattataattgagaataaattaggagctgaaatatgggaatataactaagagggtaaccacattagacgagtcaaagtaatatctaagttgaattaatctgagataattcccatctcagatcgtgttgagaaacactttatctcgctcgaattggaaggaaggtgcctatctcagttcgttcagtcttggactcctcttatctcaaatcaattcgaaatatatttttatctcaaactagtctgagatatgacctatcacggtcattccgagatatggcctacctcggtcagttcaaactcacttgtctcagacgggatgacttgcatatcccagatgggatgacttagaatcttagacaagatgagtcacatatctcggatagaatgactcgcatatcccaattatgatgactcacataccttggcgggatgactcaatatctcgtacatgatgacccacacacctcagacttatgactcaccttttatataagacacttgtaaagatatgtaatgacacctcataagtaataatagacacatgtcaaaggataccttaagaagttgacacctacgaataaaataggagtataaatggaagtgagggcaggagaggaaagggggctggatcgggggaaaggctgagagaagatcaagaatgaatagagagtaaagggtttctcaaaactaaaaaaatttggctggttttttgatcaataatgaaccatttttggtcaaaacaaggtgcatgggagaagtgtcttcctattgtttaggtagcttttagaaaaatttgtagtgttgcttgtaatagattgcatatccataacattcgaaacttgaataggaaagataagggttgggtggaagcttttatataaagctttgtaagtaacttttattgattctttgtaaagattgtaatagttttgtgatgcaatatacatatttcgatttattagaaaaaaattattcatatatatgtt

SEQ ID NO: 59720 - DNA, 2153 bp, Cannabis sativa
tcattagcaaggatttcacatttgcttccgttttagaaattttggtactcctccaagctccaataggtattcaattttgattttgagattgattttcccctaatttagagttgtattatattgtatctgttgattatgcttttgtgtaaaaacttaatttttttttctgtgtaatttgccaatgtaatttggataaacatgttattgtgcatataattatttcctcatcacggcgattgagagtttgtctgtatagctttaatttaagttgattgaatgcggaagggttctaaaattttcagtcttgaatggtttcaaatacctggctggatcatgcctggctggattccatgagcagagtcgttgaagaattcattcgttaagagtatatatataatcagaagttggtcaagagagctaagaagcttcgtcatcggcgatcaacaatgacgggtgtgatagctgttaatgagcgcaaattatgttatttttaaattatttctataattattatataatctgtttcttaaattattttgtagtcatgtgtttattattaataatattagtttcttattgaatttgctattcattaaaaagtctactgaatatatatttattgatcgtttaaaatgttgtaaattgattttctatttcatttatttttataatgtatatacttaaattatagttacgtatttcaattttttaatgaagtgcatttataataacatctaagtaatataactgtttatcgcgcggttaatttaattttttttagtactataatattatttttttattattattttttataaaaacgattgaatgataaatagtttttcctttcaatcatatagatatatttttcctatcaatcattttgaattttttttgagatcgtatattctttttaaaatattttttcatcattaaatctttttatctaaagtagttaaattaaattactacaaatataatttaagttattagttatttgagttataaagttattaaagttataatagttatttaaatgattgaattagtgctcgtgaatcttcttcaattactaattgcatttaacaagataagtcatttcatatttttcgctgctgcaaattcttgttttaacgattttttgcaatgtttttattttttttatatataaaagaaataaatggttttttttatatatcagtaaattcaactacttttaattatttaatatctattcatctattttctcattttttacatgaaaagtgcaaaatacataaattaaactattgtctatgtcgaagcaaaggaagattaaaatccactcatgagtatcattatttttcttatctacaatttttagacagatgttatcttcaactatcaataatttagagattgatttttaattttcttttttatcttacacacaatttagattatcttaggaacatatttaaattatcaactttcttaaacactaatatattacatttagtatttacttttaattgtcaaaattataaattatattatttagatatatataaaaataatctcatctaataattaataatatatttttttttaatttttaaatgtatcacttttaaataaaataaaaaacaaattaaaatttagtatcggtgcaagctttttactagttattacatatatgtctaactatattgcaagaatgtcatataccaaagcaatttctacttcatagacgcccacttggatatatgatatatattctcaaatttctctttatctctcaaattcttcatgtagcattttctcacattaagatcattgttgtattgtagttagggaggagacacaactttgaagaactactattgcagttgtcgagtcgtactctgtttttggcgttaggaggggacactctagagtcggaaaaattggtgccaatggtgatcattatcggagacacaatcacatgcattcaacaatcacatttcaaaatctttaatttattgataagttttccattttttttctgatttttcattttactgcgttaattgattattattattatagttaatattaatttttatatatattaacaattttaacattatcgaactcatttatttaattttattcaagaatttttaattttgaaa

SEQ ID NO: 59721 - DNA, 819 bp, Cannabis sativa
aaattcatgcaattagtattgtgtataccaaaaaataatagagaattaaaaaacatgaaaatggtggaaaaattgcctaaaaccacccctgcacgcgcccccatgcgcccaatttcctttttttttaagtctgacgtgcgacgtgtcgttttcgaaaaacgacatgtcgttttgtgaaacgacatccagcagggtcataaaacgacccgtcgtttttctctgcaaaatgggcagtctccgtgcgtacgacatgtcgttttttggaaacgacatgtcatttttctgaacgacatcccagcgtaccagtaaaatgacacgtcgtttttggtcggagggggctgatccaaacgacgtacgacatgtcgtttttgcccgacagtggcaaacgacacgtcgttttttgtcgtccctgtcacccaaacagcccacacacgggtccgcgggtttgcaacgcggatcggcgcgactcggtttgtgacccggtcgtatagaccatctctggccaccaaaaccgatgcggtttgaggggtttcgttccattttcaattctctatcaattttcaacatccatttcatccatttttacaaaataaatattacccataaaacatacatccgaaaatgggttttacatcatgacaatggaaaataaacaaaatatccatccaaaaaagtacataaacccatttaaaatagtagatctcatatttacacttcatcaaacatataaatccgaaaatagcaaaaaatataataaaatttcagatttgaaaataaaatggattagttcaaaaaaatagagttctaaaatcaaatata

SEQ ID NO: 59722 - DNA, 3042 bp, Cannabis sativa
  modified_base (774)..(775): a, c, t, g, unknown or other
ggcaatatctataactcaaaacacaactatggccataacaccataatcaatctaaatctcacaagcatacaattttaagaacataatccatgatttcacatatatttcactatgaattacagcaataaactcaagatagaaatggtagaaacactaccttaagctctttcaaagaccaagcacaaaattccacaaatctaagcttgaatcaaaccactttcacaccaattatcaagtgaaagaagaggaatatagtgagagggagagggtcagttatggggtatgaaataaaatagatattctcattctatttagtagaaatttcttttattacaaataacacaaacatccaaaatgacacaaatgcccctagggccatataacatacatacatacatacattccaagggcaagcatgtcattagccacatgttatttcaaatacttttagaatgttcaataaaatgccaataaataatcccgaaaatgaatttcggccccgaacctagttcgactcgaaattcccaattgtgaccatatcgcgccgacttgtcagaaaacacctaaaaaaggacactacaaatatactatataataatatagtccacaagcacacaattaagttaaattcacatttttatccttctcgggtcaaaattataaaaatgcccatggctcaccaacggggggtcttaacatgtcatatatccaattaattcacatataataaattatataatgatataattccataataatacacatttaactagnnagggtttgctaatccattttcttaatcgtagggtattacaatacaacatctcataaggagtcaatccctattgtactttggtagctgttgttgtaggagaattcaatcaaaggtaagtacttactccatgagcccccaaagtccatgatacaggctcgtaataaatctcctaatatatgaatttttctttctaattgcccatcagtctgagggtgaaaagttatactgaacttcagctttgtgcccatagctttctaaagatttacccaaaattttaatgtaaactctggatccctatatgaaacaatggatttaggcactccatggagactaactatctctttcacatacatttcatcgtactaatccactatataggtaatctttactggcagaaaatgagctgatttcacgaaaatgatccattatgacccatactgaatcatacattcccgtggttctaggaaaacgaactacgaagtccacacaatatcctcctgctctttttcaggaagggctaatggttgtaataaccctgccagtctcaggtgcttagttttgatctgctaacgtgttaacatctagtcacataatccactacatttttctccattctatgccaccaatgataaggttttaaatcttgatacctcttgatggttcttgggtgtaacaaataaggtattatatgagattcattaaggatttccttcttaagctcaccatcatctggaacacaaagtcgagctttaaatagtaacattctgctatttgagatcaaaaactctctaggccgaccggccagtatctcatcccgaattaactagctcaggatcttctaactacggtcttttgctttttttttttctaacaaatctgattatagtgtcaggtagtaacttccaaaccacaaatttaatttcactcttaaccatttctaaacatagacctttgtactcaaggcattcgccaccacattgactttctcgggatgatacaaaatctcagaatcagaaaccttaacttactctggtcactgtctcgacctcatttttaaatctttttaattggtaaaatacttgaggctcttaaaatctgtgtaaatctcacattttcaccataaaagtaatgttgccatatttttagaacgaatactatagcagtaagctttaaatcatgtgttgggtagcgctgctcataatccttcagttgacgggagacataagttataactctgtcagcttgcattagaacacatcccagacattgtctagatgcatcacaataaacagtgaacctttcttgatctgatggtaaagctaacactagtgctgttattaatcgatgtttcaacttctaaaaagtcgcttcacacttgtcagaccatatgaactgtgggttcttcttagttaactcggttagtagcatagggttcttagaaaatccttcaacaaaatgctaatatttccctattaaaccaagaaaatttcgtactttcgtcactattttggcctcgaccaacttttcactaactcaatcttcctcgggtcaatcatgatttcatctttttcgacaatgtgtcctaaagaagacaccttcgataatcaaaattcacactttttaaattttgcatacggcttgtgatccctgagtcattgtaataccattcagagatgttgctcttgctcttcctctgtctgagagtacacaaggaggtcatcgataaccactataatacggttattgaagaaatccttgaatactctattcatgagatctgtagaggccgctagagcatttatcaatttgaatacaattaccacaaactcataatgactatacctggtctaaaatgaagttttcagattatcttcttcccaaattttgagctgataataaccaggtggcaggtcaatcttaaaatatacagactttccatgaagctaattgaacaaatcatatatcatgggcaacaaatacatattcctaatcgttaacttgtttagttctcgattgtcaatacacatttgaagggaaccatccttatttttcacaacaaaactagagctctccaaggcgatacactgggtcgagtaaaccctaaatcaagcatcccctgaagttgtattttaactccttaagttttgctgaagccattctgtatagcgcttttaaaataagtcccacaccaggtgccaaatcagttatagaatctatttctcgttgtggcgataatcccagtaactcctcgggaaatacgtcgagaa

SEQ ID NO: 59723 - DNA, 836 bp, Cannabis sativa
  modified_base (782)..(792): a, c, t, g, unknown or other
agatccaagactgagatccgaatttggacctaaggctttgacctaacccgtagtcagtgtttgaatctaggactcggacctggatctgtgcctatacctggaccgagaaccagacccgaatccagacccagactcagacccagacagggatcaaacccaatctcagacccagaattggaatcagactaggtctggactagaaccctgatatgagacagtaacaagacccaaacctaaaccaaacccatactcagacaagaacccatgctgggacttgcacacggacggggacttgtgacttgggacctaaaccaagactgggacctaaacctagactgaaacccggacctagaccaagaactgggctggaacctgaacttagactcgaaccctaaccaggacctggactcggaccagacccgaacccaaaccgaaacacgaacttggactcggactgggacctaggacccgaacatcgaggggggaccaagacctggaaattagggccctaaactaggaccagaacatgggcgtcagaacttggatcgcgatccgggactctgccccagagccaaacctggacctaggacccacatcgggacttaagatccaagacttaatgcttggaccggactcgtagtttgtatttggatctaggccttagacaagaacccgaacccacaatcgaactcataccaggatccggacacatactaagacccaaaccacactagggaaaaaaaaccaaaacttgaactgtaaccggacagggatcttggaannnnnnnnnnnccaagacccagactcgaacccgaaactggacccacccttggacc

SEQ ID NO: 59724 - DNA, 747 bp, Cannabis sativa
aatttttaaattataaaaccatacaaccttttatagtgcaattttcctttttttaaaaaaaaaaaatatatattcacttttctccaatcaaatcagcaaaatttattcttctatttaattttctctccattatggaatcttactaaaaattcaaaatatatatattaaataggtaatttctcagaactaccgtaaaattaaatgacacagagtgaataatcatctttaaaaataaaaacgatagagtactagagtgcatttttccttttccgaatagaaaaattaaagaaaaggagtttggtaaagtaaatcatgcatcgttagattttaatcaaacgatgcagagaatctcaggtatttccacgtagtcgtaatccacatcatttactgtccgattgacacgactcatcattataaatattttttttcatttattttgtatccatatccaatcaaaataaaataaaataaaataaaaaagtccaagccttgtgtttatgtaattctctctctacatcatgcaaagatgagaagaaagagagaaaaagtcatagcaaatcagtcagtcagtctattatatcatatcaaatcaataataacacctatctatctttcttttgtcttttcttttttactatttattttcatacaaaattattaatggttatttttttaaaaaatatttattatttatttaagcatagttttcgaggcaaacaaagatgatcagatcagatcagatcagct

SEQ ID NO: 59725 - DNA, 1183 bp, Cannabis sativa
tatgcagttataacagattaaaactacagatacgactggactcactattaatataatctgtcaaaataatgacccttacatgtagcatgttgaaataaaaaatgttaaaagataccaacaacgtctaacacatctaaaaatattatattattattaatataattaagtattatgttcatataatttaatataataatttgtatgaaggccttccttatacaaatagtgtaaaatttccataactttgaaaaattctctataggtaaataaaatggaaacattcaaacattttcgttattattgtcaagggtttaaatcaaaattattaagtatgataaactagcctagaggaaagataaaatcatgggaaatatggaggaagtaacagatacatttctatattaattaacgtgttatttactttcctagtaatttgtacactattacgtttgttacgtattttcctagttccaaatgttatgtttttcttttgaacatttgttatactatgatgagataacagtttcagcatttttcttttttatttttatttttaattttcctggaaattggtgagcgactgagaccaaaagaataactcaaactgcattaaaggttcaatcacactataaattctagcttttaagaaccttgtttctttaactcacttatcaaagtacccaaaaaaaaaagaaacatcacacacgcgctgataaagagattgaatcctgatacataaataataggtgggcttaatgcagagaataagagctaccaagatcttcccttaccttttgaccaactctaccaaaagtttcacagcaaaatcttctcatttaattccgctacttccaaacagatcttctcttgctccattttccagaggtatatatggatgtctatgcacatgcttttatagtttttgactagttatttttggtggtaatgaaaattgacttcataacaacattgttttttttttgttttttttttttttcattataacatagaatagtcaattgatcagtcccaaataaatgggcaaatgttttggtaatgtacccattgcaatggagtttctattgaagacagaactgactctttgcattttacagaaatatattttaaaatgatttcccccatgtcatattgttctttctcgtaatgagttttcatttttttt

SEQ ID NO: 59726 - DNA, 765 bp, Cannabis sativa
ttatcaattatcatccacacctttgaatttgattcttaatataacgccaacattagtattcttgtatcgatcaaaaaataaataaataaaaaataaaaactaagtattcttgtataattttaagaagaaaatcttaaagaattttattgcaatgaaaatcttatgtactactactattttattttaagataattagtatttttgtttgtttaattatgtaccttttaagatataaggtttgtaaataatttctctcaaaattttttatattaacgtgattcttttgtgataaaaattagttgttcaatagatagaaattaaggtatttcttcactattttaatgttaatgaataatagtataaaatatattttttaaaaaaatataaaaggtatttaattcaccgcactacatttttcacaataaaattaaatagaatatgatgaaaggactatattattgtaaaaaatgaattgcgacataaatacttaatatttcagattttatacacttaaatatcttatctttatttttgaaggaaaaaatattcaatgttacaattctcttacaccgttactaccacttccgttaactcataaatatggacacatagatattattgtaaaagatgaattgcgacataaatacttaatatttcagatttaatacaattaaataccttctttatttttgaaggcaaaaatattcaatgttacaattctcttacaccgttactaccactttcgttaactcataaatatggaca

SEQ ID NO: 59727 - DNA, 2042 bp, Cannabis sativa
taactaaatgtgtttttagtcacaataattgttgtaactaaaactaaattagtgacaacttatatctaaatcttatattttagtcacaagtaattaaaattatgatgtgactaaagagttgttactaaaaatagctatttgttgtagtggtggttttgctactacgattaatcttgtttctgtgacatagttttgattgtctttttattcaagttactacgattagttttgtctttgtgacatggttttattttattttatttcgttgttggttcgtctttttgttcttcgatgtctcgccatcaaattaatgttaatggttgcaaatgacaatttctctgtggttgaaaaggttgttagtggtctagttacgtaccttaaatataattgaatgcttaaaaagagttgaatattaatatgctacaatagatctaatgtttgtcttctgactgggggagtaaactgaatataaaattttttaaggttcactgtgatgctacaatatttttcatctgactttatttctagtttcttttgtaaaacgatttgagaagcagataactgattagttggctcaaaattcttgattgtatttctaacgagagagatgtcctgattgaattggagattatgttattaataaaattgcatgattttttactaatatatattagctaggttgattacgtacaatgcacgtataattattattttttaattaggtaatatattttttaaaatttttaaaatagagtttgagattttgatctttgatgattttttttaatattttaaatttaaatttatttatataaaatatttacataatttttattttaatatacacaataaaattaattttttatataaattatctatataatttttatttttaaatatatataataatattatataaaattaataaaaatatattctattatgtaataacatattaaagttaacataaaaaaaaattaaaaacaaatattattaaatcaataattttattacatacccacataataaatatataatagctagaggcatgcatgcatatagaaagatgaataaattttattaggacaactatcctatatataaatatatatttatattagggggtcaatgtctcaaatctatggccatagaaggatgagccaaggtgagggttgttatacataaaaaggggtgaccaagaattaatatatgtatttatgaattaaattaactgagaaacggtcaaaaaggccccacacgggttaagtggacagcccagaaactgattctagaattgttagctgggttaattgttctgagtctaatgatatttttaaatttcttattactgagattaattttttttagttactgttggtagtactgtactattctgcatgttgccaatagtgtagcgcatacattggtaaaatctgttcttaattcggtaaaattttgtgtttagatagagatttatcctaaatttttatgtactcttataatcaggggcggagctacatacaccccaacaggggctgtggctctccctgaatttttcaaaattatttattaacattgatatacatatatatatatagataatcatacgtaaaagtatatgcaaaaatattaatacaggcacaattttttatggataaaaaaattaaaaaagttaatgtttacttattcaaatataattcattattaagaatatatatagttttattatatatatatatatatgaatgtagatctcgtaaataattataataaaataataattatattatttttttactatatttaattcgattagttttaatttaaaaaaaatgcaatttattgtttaattaatagtagtaaaattaattaattatactatttctaaaattaatataagttttttttttataagaaaccacatattaatattaattttagtaatatttaattgaaccctgtcaaattttaaagtaccactcgcaatttatttttattttaattacttaatttattttttttaaaaaaatattgtataaatt

SEQ ID NO: 59728 - DNA, 1785 bp, Cannabis sativa
aaaggatgggtgactgacactgctagagagacattgatatgttttaagcaaatattatcttctttatattctgtctaaataaattttataattaatttaaatattattttatagtaggagaaaataactaccatacatgagacacaacaaacacactccacctaaattactaaagagccaggaaattcatcaattcagaagacgaatatctatcacttgtccaaattgtttttggaacacatcgtggtcaccaaaaaggttatgagcatataattagcacaagagagatgacagcaccacttacgtttacctaacctcctccacctcaggctggtgtatatgttggagctgatgtcatagttgatatgcaggagtggattagacagttggaggaactggttaaggaaaattgttactccaggatcgcagaatccgcttcaacaatctgatcatcctaatgatggaggactgagtcagcagttatgtttatatgcagtgtctatttctttcatgaacccttatattagcatgtttagtattttaggtaactaaatttataaccttgaaaatgtaaaaacgtaaatttatagtatttttattaatgaattatatttttatgattttttgagcaatattaatgtgaaaatcaaaatgtatatgatatatttattatgaaaattaatattaaataaaaaattgtagttttctttaaagcttatgttctcgataaaagattatatcgaggagaatgtcctcggtataaatgagttagttaggccaaaatgaaagacaactactgagaacgtatctaacttttgctgacaacatttgttctcggtatagtctttaacgagaacatcatcattgtccttgatagaaagtagtttctaacgacgagtctctaacgacgagtctctaacgaggacatttgtcctcgttataaatcttgttttttgtagagacaagtgtagattttagatttttcaatctaatctaattcgcacaagtgtgaatatttacactttgcagattgaatttgatcaaatcgtgcagattaaattgaattgactattttatgaacaaccttagtataaaattttagatatcaatagtattttatatatatatatatagtctatagagtataataataaattttaaagaacctttttaaaataataaaaatatttaatgcaatttgattctttaaatattaatagatatttacttagaacatatgatagtgtttaaaatttgtgactatttggtcaaagattccaaaatgcatgtataattcattattgagtattctaatcataaaaggctttacaagttgagtttttaaaatgaccccacgtgattaaaacaaaatttaggatggttattatagtcgtgaattattagttgtatggcagccttactaaatttatgtaataaacaaatgattagtagtacggcggctaatcatgtttggataaatataatatttttttgataactaatatattttttaattatgtcttttttaattattttttttaacatgaaatttacggtacaacacatttttgtgttgtattcgtgcattacttttttaaaaaacatatgagcctattttttttgtttgttaagtattcacaatagtcacggatcttatttgttaacttttaaaattgaataatttacactaataaaataaaatttattaaccgcacattcattgtgttgattcccaaaaacaactcggcttcattgttcgaagactataggccgataagcttgtgt

SEQ ID NO: 59729 - DNA, 2391 bp, Cannabis sativa
  modified_base (33)..(63): a, c, t, g, unknown or other
tgcaacataaaatgatttctaatctttattaannnnnnnnnnnnnnnnnnnnnnnnnnnnnnntatttagggcacaaaacccagcattatcttggtagaaataggccccaaaaccatcaagtcctggagccttactcccaggaatggaaaatatggattccttgacatcttccttattgtattctcgcaagagaaaatctgcatcttcagctcttaaaatcggcccaaatgaacattccccttaaaaccctcttcctattctgcattttagtactaagcaaatgttggtagaattgtaaaaaagcataaaaaatttctattgaattatacacccaattgcctttcatgtcctgaatcgagtagatatgattttgtaccctcctttgccttatgctcgcatggaaaatttctaaattttcctctctctccttaacccaatgtagctttgccttttgatgtaggaaggatatatatattgctcattgtatttttttttggtagctctttctttgtcattaaggaccttatccataggatctacttggatgttgctataaccatgtagagttagttggcgtaaaactcatttcagactctcgatcttctggaccaccctatatatagctgttcctaagtgaaaattattccatttctcttttaaaacctcatcaaacttctctagtttttaccacattctaaaaaatcaaaatgctttctttccctcggtcaattcaagatacactataagaaatgttggagtgtgatcaaacaagctttcattcataaaaataacttcagtcgaagtgtacttatctagccaaaattagtttgccaaaacacaatcaatttttgaataaacatgctccccttgctcttgtttattattccaagtgaaaaagaagcttgtgtattttacatcttccaactttcatcattcaacacaatcacgaaaagttgttgatgatcatcacttgcgcctttttcctaactctcttttctgtcttaagaatattattaaaatctcctaaaattaatcacgggatattaatgttggctgccaattgctttagatctgcccataaaggttctctctcattagcattataaaaagcatagacaaaggtgataagaaatacctccttagtcgcaatcgtggttgcttccaaaatgcatacgttgattagtgaaaaattgaatattaatagaaaatatatttgaatttcaactaatcaaaatatgtccattgtcacaccgtacattattagaagaaaagaaccaccctaaaaatattcgaacatatgaggcccccaagttatgaggtcttatcctcatttccaagagaccaaaaagccccactttcatattatcaactaatttcttgacttccatttgtttctgagacttattgagccctcagacattccatgccattattctatccattaccaagaggaggatctccccctcaattagtaatgtctccccctcgttccatctcgacaaccttgagtttccataagcattgaacactttccaacttttccaagaacttgaaaattatttccaagtttagttggtgtggctaccatactcttaacgtttcctcaatttcgtaccattaaattcctttcttgatctacttccacatttaaatccaccttaacttccttttttaattttttctcaggaacccatatagctcgaacatggtcattctccacattcttcttcatacaatcattcgtagagtgccccaatcctttgcaatgattgcaaagtatcagtttccattcattatgtaacttataaccgtcaattcttcatcccattcattcttgaatgagacttcctcaagaaattcttgattcaatccaacttcaatcataatctgagaaaaattaacaggctatttctttttcgtgaagtcatctagcataatcagtttcccaacttgcccaatgattttgaaaagagctctctcactccaatccttaaatccgattcatgaatttggacccaagttggagcataattcacattctccttcttgaagttcactgaagcatcccatgctttcattacaatgggcttcttatctaggaaaataaaaccattagtcaaaattcaatctctggtttcctcatccacaaatcgcacaataaacacaccattagaaatcagtcaaaccttatccactttttctttccaaactcttcttataaaactagcaaaaacacatataggagggttagctccaagaacataacataccaaagtaaagctccaaaatttaatctcatcagaaatatcatccatttcaatcttaactccattacctatattgtgtatattttcgtttcagttctaaaacatagaattcagattttgcac

SEQ ID NO: 59730 - DNA, 1067 bp, Cannabis sativa
  modified_base (123)..(138): a, c, t, g, unknown or other
  modified_base (730)..(735): a, c, t, g, unknown or other
cttggattggccgaaatgtatgaacctggatgaaaggtaagaaaagtatattatactacatagtacgttgtatgtaatacaattagtattgtaatgtgttgattaatattgagatatagttannnnnnnnnnnnnnnnaaaagattgattggttgagtatcgataatgtgataatattatgcatgtaatatatgggctcacctgattaggtgatgcaatttttctggtgacgtactaggcgtaagtacgggtgtcagtgatatatgatgagtaccaagcataggtacgggctcacctgattaggtgatgtgatcttcctagcgacgtattggacgtgagtacgggtgtcagtgatacatgatgagtatcgagcgtaggtacgggctcacctgattaggtgatgcgatcttcttggcgacgtactgggtgtaagtacaagcgttagtgatatatgatgagtaccgagtgtaggtacgagctcgccagattaggtgatgtgatttatcctggcgacgtactgggcgtgagtatgggcattagtaatatacaatgagtaccgagcgtaggtacaggctcacctaattaggtgatgcaattttttggcgacgtgttgggcgtaagtatgaccgtcaatgatatatgataagtactgggcgtaagtacggtctcatatgattagacgatgtgatatattggtgcctgattgtggcacgggctcacctgattaggnnnnnnaattatatgatatatgggtgcaagcttttggcacaagctcacctcattaggtgatgcagttatgcgacatataggtgccttgctatggcacgagcttacctgattaggcaatgcaatacaagattatcctatttaagcaccaacttgcctgataaggcaacgtgatgttatgaagatggttactttacgaggtaacatatatatataatttatttgattaagtgaatataaattctatagattatcctcttgtcaacttgacttttcaaccaaactaaatctagtttttattctttgagaactagtagatgagatgttggaaattattttac

SEQ ID NO: 59731 - DNA, 1798 bp, Cannabis sativa
tcataactaactcaaattaaatcgaaattgagttctgtaaaaagatttattaattagtaaatcttattatattgaaatatattttatttagggcacaaaacccaacaatcctgaccccaaaatcgaaccccggccctgaccctagactcggacctaaccccagacccagatctagactcggactagacttaaataaaattaacaaataaaaatgaaaataaaatttacaaaacacacttttgttttctatttttaaaattaaaagtaatattggttatagaacacattttttttattcaaaaacaatttttttttttaaaaaaaaattacttttatttttgtgataaaaaaatttaaaaataaaaatattaccacaagtcacctatatttaaataaaataaattatttttatgcttcaaataaagatcattgaatactttgtaatttggaactgtatatattttagtactttaaatttaaatttattaaggtagagtaccaaatcaatatatttctattaataaaaaaatagtatcttacactgatttttaaattatagaatacataatacataatattttaaattacaaagtgatccacgtttatcagaatatatagggtaccaaacttatatcttattaagccaatgcaccatcccagcaaaaaaatgccaatgcaccaaatagtgtactattgtgcgtgtagaagccctatgttgtgtttaacccttgcttattcttatctcttcccatttaccaccttttactccttttatcactcttactctcttatttccctttgaacccctttgtgccttttatttttttttaccactttttcactctttcgcatttgtcccttttgttttgtcccctttggtttgactttgtttattcttttcttggttgtacttgtgtttgtcttggggcccctattgtatatttttcagtgcttaaatatcatggagtttgtgaaagtaaagagtgttttgttagcaggtcgatgtgcctttaccaataaggttaccttggctttgtacccctatagcttaaggtttccatttaatcaaagatttgatgaacaaaatgttaagaactttttggataggtcatagaattttcttgttcaagtattaagtacatcccctgctattacagtcagtagtcccgtgattcgtaaagaaaaataccagataagctgtgtgatctcacatcgcctggggaaggttaagtgtgatgattctatgactgcataggtatagaactacacagttgaagggggcttaaatggattgattggtactatctatatcaacaaggtgcatcttattttctggtagcccatcacgaaagaactccacaattaagtgtgcttggcctaggataattttaggatgggtgacctcctaggaagtttttctaaagaagcgtgccagtgaggagaaggtacactgaaaacactcgtgttggtttgtagggttagtcatcattccaagatgcaaccaaagtatcgtacttgtgtataagagctatcattctgtgggtgtaagagcctaatgaaggcttgaagcaggaacattacaaatggtatcagagccttgactcagttagaagtatggtcgacgaggacatttgaccctgtaaggggggtgatgttacccctgtggaggagtatgttgtatctcttccacatgagccatgagaggtgtagcttgaaactatagagggttggaacagacctctatagttttggaattaaatgccctgattcgtttgtgctctccaaatttcatgtattt

SEQ ID NO: 59732 - DNA, 1085 bp, Cannabis sativa
ggttacctcttaccacacctacacgcgttggtgtttgaaacttcagagataggtgtttaattgaactaactacccctagtctaattagcacttgtcgacccaacaatatgttgtaggccgatggcaagtcgacaactagaaaatcttgcattatggaagtggataaagccgtctcgtccacagttaatgggagttcatgattgacgacattgtcgcctgtaaatccacacaaatttaccatgcaaggtgttaactttgctctttctagtcccattttcttcagtgtgtccttataaaggatattcattgaacttccgttatcaaccaacaccctttttatccttttattggcgatctgaattgtaatcactagcgggtcgatataaggatatctaacatgctttcgtcttcctcggagagcacaattagaggttcctcagtcttagctttcttagacgattttggagcaaagactgactgctcattcttaacttccttgacatatctcttttgggcatcgttactttcttcagcgagatgtggccctcccgagataaccagaatgtcctctccttcaagaggaggaggttgttatctctgattgcttgggttattgggcgaattcggctggttttgtccattgccttgtcaattctcaaactgttggaagtaaccacgtgagatgaggctttctatctcgtcatttcaattgataacattcttctgtcgtatgccttatgtccttgtgaaattttcaaaattttattgcatctcttttgtatctcgcatgtctcacgtgcttaggtttgcggaatgcgaccctatgctcatgtgcgaggtagatgttttcctgagtttcattaagcttggtataaattgtgtagattggcatgtagttgtcgtgcttcttatatattttcttatctttggctgattctttagagtaatctttcccctttgtagtagagcctcctggattgttagcctttgtcgatacggtgcttgtcgagacagtgctgggtttacttcccgagcaagttttgaacaacttcatatccttccttgcttcctctttcaaacaaaca

SEQ ID NO: 59733 - DNA, 841 bp, Cannabis sativa
ttttttttgtaaatttaaggtatattatggtgatatttaattgaccttttaaatttatgaaataaagaataaaataagagttttttgcgattaaaccctcttaattgtcgtttcacttgcattttaccctctaactataaattttgacggtaaaaccgtccaaattattgaactagtagcaaatttaaagtatcatctattttttataattaactgtcaatatagactgtttatgtggacacttttgcacatgtgtcaaatttatattagtacagtcaaaatttgacgagcttagagagttaagtggaagatgagtaatagttgagagggattagccgcaaaaaactcaaaaaaaaaaaagagttaagtgtataaaattaaaaggaataatagttgggaaactacataaattctatgattataaaaacttaaccacataaaccgatttttagttagtaaaaccctttaaatctcacttttgttaaatttttagtgaaagatattagcggcaaaattatgtgaattcgacatttaactacataattaaaccaatttgttgatggtaaagtgacacttaaccggccacacaaaaaattagtttatgtggttaagtgtcactaattataaaatattcaagtaattttaccattatcgcgaatattttttttaatttgtaaataaaaacattttaatcgtaaaattataaataaaacattaaaaaatatatatttttaccatatataataaataaaaattagagaattttattgttaaaactaggagtgttcatcaaaccgcccgcaccgcaccacaccgcaaaaaaaaaatacggtttgaaatt

SEQ ID NO: 59734 - DNA, 679 bp, Cannabis sativa
ccaattatgccattgactatcgactaatttcttgttgtaatacacattataaatacatctataagatgatatgtacaatattggctaatctgttacctgtgttagtgaatgatcatcaaggggcctttatcaaagacaaatcacttgctcataatgttatgatattgcaggattaatgttatcagaggaacttaatttccccaggtgcttgttaaaaattaatttgagtagggcttataatactattgattgagactttcttgagaggcttctcaaagcatatcacttccttactcggtttgttcaatggattatggtatgtgtgcggggtacgtttcctatgcttaagtgctgaatggtagaatacaagatcaattcaaatgtgttaaaaaggccccaaacaaggagaccccatatctcctctacttttcattcttgccatggagtgcttaactcgactgctcaagcttcattctaattctattagagtatttcttatgctcttcgagggtactacattgaaaatgtaggtagccactagaagtgtgtatccctagaagtttagtggaagtgatgagtaacactccatcgatctaaccatgtctaacaaggtttgatttcttctctctacaacaccattctactgaggtgttctaggtgttgtaagttgggacaagat

SEQ ID NO: 59735 - DNA, 965 bp, Cannabis sativa
gcacaatgatcataacaaggaacaatactcattaaagataacaaagcacgtaactcgggattaaaggctacccggtcagccagttgtcttaaaagtgaaaaatatattccaactttaaaaaccacttggctggtcgttttgtttcaaaaagaaggcccatagaccgaacagacatatataaacaaaaaaaaaaagaaaagaaatatatttagacagcaggagtcccaggctcttgatatggatcaatttggtctgaaggagttcgagaatcatcggtctggatggaaggaacttcggtgctctggtcggtgggagctgtagaggtggtcgcctcggggttttctttggtcgcctgggccacgcagaaattaagatacatgtccttggaatcacaaaggtaatcaaagttttcttcaggattggccttccagaagtcatagaaaaccttaaaggcagctatctccaggacgtccacctccttcttgagctcttccaccctgaacttcttgtctccgacctccttcacaagttcctcctccttggtctgtttgttcttaacatcctcctccagttttgaaagaagagtccagagattctccctctcatccttgagactattgacctcttgggatagagaaacattgtcagcctctagttgcgcgatcgaaggcatatcttgcagctctttagtcagctcatcaaccttggtgttggcaggaagaagcttcttatttacctcctcaagttctttcctcacgacctcgagctggttctgtatatcgtcagtttccttcttggccaagtccacatccctctgcatcgtgctgatggtggcaaggttcttaacagcattttatttggcttgggagtaagcgtaagccatttttacaccagcctgcacggcaaatgtgttaaaatctgagctaccccaaagagaatgaaataaaaaaaaagggtaaatacca

SEQ ID NO: 59736 - DNA, 974 bp, Cannabis sativa
  modified_base (552)..(567): a, c, t, g, unknown or other
ttttttaaaaaaattaattattcatgttttatatatttatagaatactatttatttgatctaaatatattttaataattgttttagatttgaataattcttttcatagagaatatatatgtattaatattatatatttaaaataaataaaatatattaaaatttggaaaaaaaaaataattttttggtaatatattttaaaaaagctaatgtatagtgtaatataaaagtttgatgtaaaattaaaaaaaaaattaataatatattttaaagatagaattgagaagctaatgagagtattttatttttgttttaattaataatatatatatataaatatataacatttaaattatgtagagaaaatatgaaaaaagaatatgatgtaatagggtgattctacaatgcactctttaaaagggatgtactgatacaccctctatttgtttcggcattcaaaaaaataaatttagtctattttttttttcatattcatgtacgttgaaggtatttaagatatcctataaaattttgagaaatttggaataatttnnnnnnnnnnnnnnnntgttcaaacagtctattttacactagtataaaataaaatagtcatgtgcaacacattgcttgaacgtaattttcgacgagttaaacttttttgaatttcttaaaattttagcggatgtcttaaataactataatttacatgaccatgagaaaaaaattgactaaaaaattatttcgaatactaaaatagataaagatgtatctgtgcattatagaatttccctataaattgtgtggtgaaatataagaaaaaaataattaaatattttaaagaacaggttgagaaatgagaatggttccgagtgatacattaatagaaagactattcttaaagttatattataatttatccaatttattattctttttcttttattttgggaaattttatttacactttaaaaattt

SEQ ID NO: 59737 - DNA, 949 bp, Cannabis sativa
cattttgtcatttaacaaaatacaggggccaatctgtaacttttgcaaaacacagggtctaaaatggtattttccttttttttttttttttttctcattcacattatttttagaagtactccaccacttaacaactctaaaattgctattatagtcgcacacactataatttaatatatcattcattttaataataaaaactatgacaaatatacattgaaattcatatattaataaaaataaatattacatgaaatttaaattacaccaaatttaaaaataactcaaaaataatataataataattaactaatccaaaataattaaaaaaatactaattaaaattatttccaaatttaaaccatttgtgttccattaagtctgcttgaaaattgcagtgaatgtttctattacgaatttaggcatttttttgaagcataaagtcaaaaataggtccatggcatacttcaactgttagagtatcggtagagccttcatcataattaaaatcaaataactcataagtttgtctttcatcttgacaatcatgttgtgcaatatgatacatgaatacataatatctttaagagcatctctttgccagaatcgagctggacctcttataatggcataatgagattaaagtacttcaaatgcccgctcaacatctttgcgtacagcttcttgacattgggcaaataattttctcttctcaagacaatgagatagttttaacaaatgtaccccattctcggtagatactatttgctagataataccccttgttgtactgtgtgccatttatcataaaatcaactcttggagcttgcccttataagatgtcagtgaataatggtgattggtttaaaatattgagatcattattggatctcgaaacaccaaaaaatgcatgtcaaatctaaaattcccctcgaactattgagattgt

SEQ ID NO: 59738 - DNA, 1387 bp, Cannabis sativa
  modified_base (1318)..(1320): a, c, t, g, unknown or other
atccatctaaaccctaatcaagtgtttagctactcatgttcttggaagcaaaatcacacatattaacttaagaaaagagaagaaaatagagacaaaaagaatgttcaaaaccctctgaagaatgcctacagtattgtagttgatctctagaattcgtactccatattctgctgtttatttcttttcgaattgcttgacgaaatcaactgaaattcactccttatatattcattgagagactaaaatatggaaaaacacacatgctaaaaatcctattcagctttgaattagggagccacaccaagcccacgtgagagaaaagatgaaattttcgctgttgtataggggcgggccatggcgcccactttgctgggccgcggcccgtgtgtggttttcatgcattggtgaatgatttttgaataggcggggtggcggcgccctcattgttgggccgcggcccgtgtgctcaattgaccacgttttccacgcgtaatatctttttctaggcaggattctgattttttcacattgatattttatgcgttcttttatctttttctgttgatatttttcaaatcttctattttaaatctataaaaataaaagataacaagcttaaaattgctgcaaatacgagtaaaactaaattaaaaaatatacttaacttaatctaaaattaatgctaaaaataaccgaacaccaagttctttctcaactttagttaggacttcctcactttcagaagagacatcatcatcttctatagaaattgtttttcagaagaaaaagtctgaactttggaattacattcctcataagacacttccataggatcttcgccttcatcatcactcaaggaggccgagggagtattgagcttgagctttttagcaacatgaataggtctgtcatgatgcctatggttcgtgcttctttttcaagtgaggcttgctaggcacgggtccaagatgaaggaccttttggggttgatgctgcagaaactacaccaatagcagtaggtggtgactgagaaccacgagaaagagagctctcaacagagggagaagaagactttgaactagacctagaactattgagcaattgggtgtgcctcacagatttttgagctagggttttaggtgttattttgctagaagaaggagttgacaacgaagctttcttgattgaagctttctttgattcacactgaggaggcaatgaatcaactgaaatcgaggcagttatagtagcaggaggcgattgtgatcgctctagcgaggcattctatgatgggcaaactgttgggttttgtgccctnnntaaaacccatttcaatataataatcagatatacttattaataatatcagaaattgcattttatgttg

SEQ ID NO: 59739 - DNA, 856 bp, Cannabis sativa
attgcataatacatagcacactatttattatttattattttttaaaagggataccgcacttttggagtactaacttaacacagaaagaactacttgagaacctcaagtgatcataaaagagtgtacgtttattggaagtctaaggtttgaatttcaaaatatatattgtaatatataaatatttaaataaaaaataaaaaaataaataaaaaaaacttgacacatgatgatctaaattcgtattgacattttctttttctgttttgttttgttttatttatttattattattttttttgataaattcatattgaaaaggcaaacactaccacactccaaaataaaaaggaaaagactcatatactacacatctaatctaactatgaatggaactgctattactgaattaatattataaatacatttatttgaaagctgttaacgattggctcaaacaattatattatataatataggttaattaaaaaaaaaatttctccgaaaatgtactaaattatgtccctgaatttttttagtcattaaaaattttccttaaactattgagattgttagatttaaggactattgtctaatttcattcaattttactgtttcagtaattgtttctaccaaattatgcccctcaaattttgatatgtactaaatcctgctccttgaactttcatcatggttagaatttttttattaaaattagacaaaagtccttaaatgtaacaatcttaatagttcagagagaatttttaacggcaaaaaatttaaaaaacataatttttggtactgtcaaaattcggaaaaaagaaattctaattaacctataatcttatacagcaaaata

SEQ ID NO: 59740 - DNA, 565 bp, Cannabis sativa
gtagccaaaggctacactcaacaacaaaggggtcgattactttgaaacatatgcccctgtggctaaagttaatactctcaaactcttgtttattaaaaattggcaccttcgccatatggacatcaacaatgcttttctccatggtgatctccatgaagcttcctcaaggatacacacctaaagcaccgattccaaaaaatgcagtgtgtaaactatagaaaagtctttatggcctaaagcaagcctcaaggcagtggtatgctaaacttagcaccactttactccaacaacaattcacccactctaaaaatgatcactctctgttcattagatacaaaactggcatttttcttgccttattaatctatgttgatgacatcattgttacaaccaacaatcttgaagaattgcaacactttacatcaacacttgatttccatttcaaacccaaagaccttggaagtttacacttcttcctaggccttgaaattgccaaaaataacaaaggcgtctctgtcactcataggccttttactctgtaattactccaagaaattggctgcct

SEQ ID NO: 59741 - DNA, 1078 bp, Cannabis sativa
aagctacttgactctacttagttgcgtttgcattttgtttatttaaggataagaacacaagggccaatcactatcttcatcaccatgctcatgttgaggcctaaattagcttatcatccacaaaggttggtctcatccatgcaatttgatcttttaatattaatttattttatttataaaactttttttttctcttttatgggttatatttgtactcatccaaaaaaatatatataaataaaaaaaactcaaagtagtcaaaaattgtgataatagaggattagttggggtccatctccatctcatacacactcattcatggccctaactagttaagtcaagccttctttggcttacaattaattaaattccaaccaatcatgtttttcaaaaatacaatttattgttgctcacattaattactagtctgtcttttatgtcatttccttgcccaaacccaactaactaccctactctactctttcttctaactcattgcttgtaaagaaagaatatataaatatagtttgttggcttggccatgaccttaaagcaaaaaaccaaaaacttgatattattgaattgttacacaatatcttatttcatatcacctttagatacaataattaatatcattttcctataataagatatctatatatacgtactttttgtatagaaaaaaaatatatttatcccaattgcataaattataaatcattattattcttatatagtgactaacatatagaatttttgttatgtgtcaagttttttattgcataaattttaaatttttatgttacattttgacttttatattgttatttatatataaacttattacttattattatgttaaatataaatactttcaaaaataaaagtgaaaaacttagcaaatagtacaaacgatttggtttggtttggaattatgctaaaactatagtttcaaaccaaactaaaatattcttaatggtttcgttagctttagtttaattaaaagtttattggtctgattttgtttctaatacttaaaaaattattatacttgtttcgtttaaaaaatataaaaaaa

SEQ ID NO: 59742 - DNA, 847 bp, Cannabis sativa
agactgtacacctaacgtacacctaacgagtgtcacctaacgagtgtacacctaacgagtgtacatcggtaccactaagtagaaccctgattcggtatcggttagtgggtgactctaatacactaaacctaacttgattacagattttttatcacgggacccttaaacacctatatttatagtgtaaatacggcgagtgtacatcgtcacaactaagtagaaccctatttctatatcggttagtgatttcattacgaaactggtgattacaataccctacacctaacttgattacatactttgtgtcatgggacccctaaacatctacagtgatagtgtcactattacgattgtacatcgacaacgctaagtggaaccctatttcggtatcggttagttatttcgttacgaaactagtgactccgatacactacaccttacatgattacatactttgtgtcacgggacccgtgaacatatactgtgatagtgtcactacaccgagtgtacatcggcaccactaagtatcaacctgtttaagtttcagtttgtgatttcgttacgaaattggtgagtctgatacactagacctaacttgtttacatactttgtgtcacgggacccctaatcatctatagtgatagtgtccgtgttgcgagtgtacatcagcaccgctatgccgaaccctatttctttatcaattagtgtttgttttacgaaactggtgactcttatacactacagctaacttgattacatactttgtgttatgggacccctaaacatctacattgatagtgtcactactgcgagtgtacatcgacaacgctaagtggaaccctatttc

SEQ ID NO: 59743 - DNA, 896 bp, Cannabis sativa
gggttcgttgctagggttggggctaggttcgagtatgttcgggtctaatcggagtccaaaatattcattaagaaaataaaactgtttaaaaaaacattcaaattgaattttttttttttttcaaaattttgattctcaattaaaaagctaaaaagtgaaaacaattttatagaatatgatttcgaaaaatatttttacttttctaattttaaaaatataaaactgattaaaaaaaggtgttactaaacgccacctatatatattatgtgttagaggttacattatatcatatatatatatatatatattattgtaataaacataaactttgtgacatattagaagttataaatttaaaaatagattgtaacttaatgatcacatttgatactatgtaactgagtgagttagtacatatgaaagttaagaatcaatagaatacgtttctagctgttagaatctgttgtacaatacaaatttatatcatttaaataggtgttgagacattggacaaagatttggcttggataggagttacaaggtttttctggaatgattggttaatggcttatgacatgtttttttgtggttgttttttgatcacctagaactgatttttgaaaatgtccataaaaaaatatacattaaacatattttaagctttcttatccaacgtttctatcccattaaaaaccttgtaatactggtataaccatatggtgaaaggatttttgttttcaaagtgatcctcaaacatcattatttattgagatttttaaaaaccaaattaaaatatgattgagctaaaggaattatgtttatgaaataaataagatgagatttttaacgttgttgggggtattaaagaaccttaatccctaagtcaatattattaa

SEQ ID NO: 59744 - DNA, 908 bp, Cannabis sativa
  modified_base (34)..(35): a, c, t, g, unknown or other
caacttgaagacagtgttggttcgacaatctctnntatctactccgttaacccacaactccttcaactcatccaccaagggtcttaaaaatacatctatgtccaatctcggtgatttatctccaggaataagaatggtcaacataaaattattatctttcatacacaaccaaggtggaagattatagttcgccaaaactacaggccatatactgtaagcttggatcatgttgccaaatggattaaagccatcgacagctaaaccgagactgcaccatccacagggtgtcgcatcacaccctcatcttttgatttaccactgtggtgccataccatgtatttttccgtatgccttgaagtatacagtctcttcagtcacagaattaacggattgtaacgcatcaccttatgaggcaccttttttgctcctgaattttctgaagttatccatctactagtgccacaaactggacatgaatctttatttgcatgttcattgtaaaataaacagcaattgtgcttgcacgcatgaattgactcataccccaaccctaattttttcaatcttttcttggcatcataatagtttgatggaattttattttccttttgaaaaactaatcttaataactttagtaattcatcaaatatgttgttaggaatctttcccctaactttcaaatgcaataactttgccataaagttaagagaagatatccaatcacaacctggatacaactcggcctcaatttcttcaaataattcgtcgcgccattgatttgcatttaacggttaggtacctacacgtggatataatggattatcatcaatttcgaatgacagctgaaggaagtcatccactatcggaatcatctcatcaatttcaggatcatcatcagcggcatcatg

SEQ ID NO: 59745 - DNA, 773 bp, Cannabis sativa
  modified_base (723)..(728): a, c, t, g, unknown or other
aaacttacaattctcaattcacaaagcatagaacttacctcaatagcttctaggttgagtttaggtacaaaatctgctcaaattcaagaaaaatggtgaagaatttccccctggttggctggtgctatcttgctcgagaaagagagggagaggtgatgcattatgttccttagttctaagttactaggttattctttcaaaaatataatattcaacatatatatctaatactaacctagtaaataaaattcagattatcaacactaaaaacaaaataatatttaatctaagaaaatgaccattttgcccttctaaaagaaaattaaactatctaaaatctaggggcattttagtaattctaactaatccaccaaaccgacaacctaaagttctatcctagtccgatataattctcattctgatccataatttattatcgtgacatatccaaccattccgccaagttcccacgatcgccggacctgaagatattttatttcaaatatagtatccacgatacccacaaatcttaataaaatcttcataattaataagttacgctttatttattcatttactcaaattccactaattaactcataactagcttaagtaagattataatcttactctaatatccacataattatatatttaataaaatatggacaaataaatatcattataattttcgggatattacatgtaaagcccgcttagttnnnnnnggaaattagcagttaattatgattgattatgaaaattatttatag

SEQ ID NO: 59746 - DNA, 916 bp, Cannabis sativa
ttttctatagcttcactagctttctagactacttcgggtctaagataccttatttcactcgtgtcatcccagtggataggtgatcgaaactttctcttgtacaatatttaatatggtgttacactaaatgtactttaataattgttgtatgaaaactcaatcagaaagagatacttattccaagacccttcaaagtctaacacgtatgcttgtagcatgtccttcaatatatgaatagttctctcagactgtccatcaatcagaggatgaaaaacaatgctaaattgcttgctgtaaactttcccaaaatttggatgtaaactttagatcatgattgaaacaatcgactttggagcaccatgacgtcgaactatctccttgacgcacaaatctgcatactgatccactagatggcagaaagtgcactgatttggtgtatctatccactattacccaaatggagtcatacaactctgtggtcttgactcttcagtaacccaaccataaaatctatggttataccttcccatttctacttaagaatcttcaaagactgaagtaatcccgctggcctctgatgtttgccttaacttattgacaagttaaatattttgatacatgttataccatgattttgcaaaaaatagtaaagacaatgataaaaaaaatcacctaggtgatgatattatctctaagggtgacttcatgtctcatccccccacctaggaccaaaaatgaggtatctcctcacctaggaccaaaaaagaaagcatctcctcacctaggaccaaaaaggagacatctcctcacctaggaccaaaaaggaggcatctcttcacctacgacaacaaaagtgacatctcctcacctagaaccaaaaaagaggcatctcatcacaacacttcctcatcacctc

SEQ ID NO: 59747 - DNA, 885 bp, Cannabis sativa
ggcacctaccctagtgtagggtgttcttatcatttttatctttttgggttaattaattaattaattaatttaattagataaatatttaaatttgaaaagttattgagatatttcaagtggttgagagattccctaaatcggttataagatataaatatctataatcaaattcagttatattatttattcaaataattaaatatgatttaatgaattgattttaatttatataattaattaaataaaacttttattgggtttatttaatatattgtataacaaaattctgaatagaagttttggaataaaatttcacataacctttttgaaagccaaaaaaaaaaagtttttgttagatttttttttctctatcacaaaaataaattattcttgctcttgtactgagataaaaattagaacttcatatacactttgtcctaatagcccacattattctttgtgtgtggtggattgatttagaagactacggtgtgagtttccaataaacctaaaaagatacaacatacgaaacgaatcaaggatatcctgatagacatcaagaggtaaatattattttcatctatttatttttagtttaatatatatacatatggtataatgatatttagaaacaaattcaactgctgctacctgatttagtactataaaactaataattggtacgagagcagttccattatgtatatatgtatatatgaaatattgtgtgagttttatgtaataatttatatatatgtaatatatattgtgaatgaatagtattttattgtgaatgtatgtgaggtgatagatcgttaattttatgttaaaattagtgtaggtttcattattattttttttaaaaaataatgtaacccaattatg

SEQ ID NO: 59748 - DNA, 625 bp, Cannabis sativa
aaaataataccaggacgcttcaagaagcggagatcacagatctggtcttcattttggccttcggtcgtagggggataacaagtgcatctcgttaatgtttggcatggagtccaccgcgcgcgtagtgagaacaaagagactgagagagaaggtcttgcctggtctgtcgtgcgtagagataagagagaggagagacgacggttctggccggagataggtgattgtggacgattgtgcacagagagaggcggcgcctatttgtgtttgaagaagaagaaaaaataaacctaaataaaaataaaagattttgaaagggtttttaataaaagtattttatcttttaaaaaaaataaaaagcattttgtactgttagagaaaaaaaaattaatttaattgtattatatataaataaataaaaaaactattattaaatttataaattggctttagtgacaccccatgtatgttgggatatgtttttgcagtcccgcgtggcgcctctctataagtcagtatttttcatttaataaaaattaaaagaaaaaagatttcattctttagtgacacttaaaatatttagtgacccacattgtaggagattaacaaagattgattagagtctaat

SEQ ID NO: 59749 - DNA, 1441 bp, Cannabis sativa
cactataagaaatgagacttttgcgcaaaacttaggtattgtgctggtaaaatataacatacttttgtcagcatatttttgcgctcgtaaaatgacttggcaaatccatgttggtgttgaaacttttgtcatcacaaaatgaaaaatgctagcgaaaatcactttttccagcacattttcgcgctagaaaaagttcaacttttgccagcacaaatgtgccctaagaaaagtcttacttttgccaacacataaatgcgctgagaaaaatcttacttggcccgccaatgcttaggaccgactctgataaaagtaataaatttgatttaatttaaaataaactaaccttggacaaccactgcaagctgtaagaagagtgaacaatatgcagattgtctggaaaaagccttccatagaagctccctggcatggctgtgatgaagcatggtccaaacttgtcacccttttcttccttaagcttttcatagaagctcgataaagattggaagacggcattaaaatcgttcctaggaagatcgttaaggaaaacttggaaagttggtgtgttgatgttcaaagattggcaagaggcttcaatgatgtcaaaaatgttgggcaccatagtgagtgtgttggggcctgaggagcagcccaagtctgctattctcaaacactttggcaacactttattacaatacactttaattttttttgtatttgaattaattatttattagttaaaaatatataaacctattttcatcccgtattcagaccctcacaacacctaatagtttgttctacctaattataatcgttcgaaattttatctcttgagttatcctcacaatctaaatatagtattaatttataatatgagtgtttattttattcaatccattcaatacttcttattactagaaaaatagtgtatatctttaattttttacaataaaaaaaataaaatccaaagacaaaagtaaagagaaaaaaataaaataatggtggacctatgtctttacttatttcgaaataaccaaagacataagtcctagagacataattaaccaaaaataaaggtcttcaatactctaatagtaccatatcatatacgcgtggagacctatatgttcaattatttcataataaccaaaaataattaaaaacataggtttataaaactctaatctcatatctaacacaccctcatttcttccttatattttctagctgtcaacgaaaaaatatactgccactgctcctaaatcttcacattctccacatatacaccaataaataagggtgtgcataaatcatccaatctaatggcaaccgatagacaaattaaaattgattgccaaacattagatgtccaattatagtcggatcgtatctataacgtcccgatattttaccttacttacaaaaatattattttaaatgc

SEQ ID NO: 59750 - DNA, 1384 bp, Cannabis sativa
cttcataaaaatggggaaacaggtccttcaaatggagaagaaacaattcttaggcagaaaaaatagggctcggcgcctaggttgacaatttgccaacctgggccacaaaaaatggagttttcccaaaattctttcgagcatcatatttttctagagaaaatattgaaaataaactattttcggggaccaaacagaacttttgaaggagtagaagagggacccaacggctaggttgacccgtgcgactgggccttgcgcccaggttgccattttgtcaacttgggttatttctaattcagtttagcaaaaagtgcttcggccatctctaccgtcattagaaataatgaagattcaagtgaacttgtggagaaaaccacaaactcgagtccctggaaacatggccaaacgcctaggttgacttggttctgagcctagcgcccaggttgacaatcaactttggaccatgccttcaattactgaaattccaaatctgctgtgaccattgaatctggcatggtaaaaaacaagggaagacacctatcctcaagttaaaaagacttgaaagccttggaagcatcaaaaacataagcccaggatatctttttaaaggcctagttcactggattctgcttatccgaatgtaattctatcttaaccgaccagcaagtttttcacaagtgcaatgatctattaaagtcagatcagccaaaattaacaacttcaattttggctcattcggaagttggaaatttcgagtcttccgtttctacaaaatagcagtatctccgagaacaagtgaccagctttaccaaaacatataaaaggtctaaggggtgacaaaccattacttatgcatctcaaagcactcaccttggacgtttttacacatttacaacgtctaggttgacgtcatatgtcaacctaggcgctggaatgtcaacctaggcgttggatgtcaaactgggcactggatactgaactaccttcaataaaacaacaataactcactcaatttttatctgattgatgccattgaaatttcattttgaagccatttacaccctctataaaatcatgtttgacagcctaggtgtaattgtaaagctatcatcaccaaaattcatccccaagcgagttacaaaaataagcttcgggtatctcgcaccgtgacccgccagagatcaaaaataagatatctagcttccatagatcatcaggtggaaaacactttatttaaatatttacctcctatttttttgggcctcctttatctgtaaaaggagagctcccttagctcattattcattcaaaaaactacccacaaggtcaaagcttctctctctaaaattcgaatcttctaattcttaaacaatttctataatta

SEQ ID NO: 59751 - DNA, 623 bp, Cannabis sativa
agggtctcggtccccgagctcctcacttattttgaattcattcaacaaatttcatctaaagagagtagagagagtgaggaagcctgacctccaataccgaagctatcacagggatataagctcaaagatcaatggctggagatatatcaatcttttattgcatatattatcgatatgtttatagtttatttccgcattacatatcgtatatatatgctgtattacatacactatattattgtctaacacactattcctaacaccctacacccaagtatcctgcgtccaggtgaacacttgggtatagtgctcatgttgttagtgaacgtgcaactcaatggatgtttaacctaattatgacccataatatagacattgtataactaccgaggactacaagaagacaggtaacacacacttggcgccaaggtggaccttgcacctaggtcaacatatcctccgaggaaaggctccgagcaccaaacattctcctgtagcagaccaaatgctttagcaacatcaagcacaaattagggaagctacaacacacttcaacagtggtgctaggtaatgggtgcccaaatgatctcttacacaattaccttgcgcacataggagttgtt

SEQ ID NO: 59752 - DNA, 1495 bp, Cannabis sativa
accttcagtgaaagacactataatccaagagggatacccaatcaaaaagtataatttgtggtgtaagcatttaactttaactcatccttataaatacatatttaaatttaatttttaactattataatttctaagttaactaaatttaattttttgccgttataatatttaagttattaagtttaatttttaaccaaatttaatttttgacgctaataataattcttaagtgatctatatcattaaattttatttgttatttaaaaatttatttaaatataccaataaaaaatgacatatagatattaactttctacttaaatagtacctatagaagtttcaaaaatatgatttaagtattattaaagtaaaaaattaaagatttattcataataagaagttaaacttaaatatttacgtcaaaaattacactattttaaaattgataccctatatttttaataatatttgtatactataatttaaaatcatacatatcaatatgtaaactcaaatttgttcaatattatgtttattattttatttatataaatattaataagttcaaatttaatatttacataaaattagggatgttaatttttggaggcatccataattcatgtttgatgtacagtgcatgcacttggaatggatggtgaattagcttaataagagtttaaattttctttttaaaaaaagccaacagttgagtaattaataaagttttaaaattaactatgagtttcacactattattaaagagcatggttactaacatcttaaagtctctaatacttatattattgattaaattaaaatttgtggaaactgatattgaattctatcaataatagtatactaactcttatagggcgacacttttaaacatgtcttagcatttctattaaaaatatagaatgttagagcatctccaatagagtgctataaagatagtgcaaatgtgtttatgttcataaaattcaactttaatgctagtgtataatgtggtctaaatttaacacatgctaaaagttgtatcaaatttggcacaaaatatagcatgtgtcaaatttacaccgcaataaatatatatttttttttaatttttcttagcaaaaaaattacttttttatttacttttttaccactcattaatgtttctaataacttttaacattctatttatatgtttaataatttaatgcatttgttaattttttttacacatttttatttaaaataaagttaattgatccctgatgcattttaacacaaatttaaaaattgagtcaaatataatacattaactcattttttagtcaaattttataccactcaatacagatggttttttagagcatctctaatagagtgttaaaaaaatagtatattgctaaattttagtttaattaagaaaaatattactcttatgatatttttaaaaattgtgtcaattttgacacatgctaaaattgtgttaaatttagcacaa

SEQ ID NO: 59753 - DNA, 2522 bp, Cannabis sativa
  modified_base (1161)..(1171): a, c, t, g, unknown or other
aattgtgatatataagatgaatggcctactcctcccattgccaattggttttgagatggaagctcattcatcttatcctaaaattctaacaacaatcgctacagatgtggttcatgtcttctaaggatgtgcagatggggaaatatttatatctaatatataataagtctcttcttcacctccaacttcttttacaattttacccttttaacatcttttatattaattttttcacaaggattttattgtaattcaaaaacaactttcttatttaataaaaaaaattaattccttttatttattttaattttcacatcttttacaactttacccttttaatgtattttattttaattttttcacaaggattccattatgatattgttaatttattgtcatccccaatactcaacacctcatccccaataataagtctcttacgatattgtatatttgtattagtttttatttctttttatattttctataagcatatgcattcatatttttctagaacttgcttaggcttaatattgtagaaattataagaagaaaatatggacttactatactaaacgctaatgttgggtcgtggactatttatttttgagctagaataattaacgatttgcaccctgaatttttgacaattctaattctgccccttaaaatatacaacttattaaaaatctctcctgaacttttacatttacaaaaatttagtcattctgttagattttgtcccattattttgtttaaatattgacgtgtctttgaaaattagcagctttgcaccctaaattttgaaaactatcaaattgtaccctttcaaaataaaaatgagaatgcttcaatattttgttagtaaatcttaaaaaattaatttagatcttaaaagaaaattattttgaataattaaaaaaagttaaaaaggaaattaaaatttttaaactaattaagcaattaaaaaaattgtttattttttattaaaaaatctatttagatataaaaaaaaaatatattaaaaaattcaatttttataaaaactaaatttaggggaacaagtttgagtctatttttttctccaaaaatttagatctgttgaagtaaacataacatttttttagtttaatttctaatttttttaaaaaataattttannnnnnnnnnnaatttttaattatttttctttatttcttaagatatgagtttataaatataaataactttgattttttctttaaaaaatattagtttgtttaaattatttattgaatttttaataattttgatttgattttttaaaatacgtgtgtataaataaaataaaatttaaaatttttttttgggaaaaatttagattttttagtaaactatatactttttaattaattaaatattttatcaggtgttttaataatttttatcatttttttcaatattaataaaacattataatttttaaggttaatgtttttaataaaaaaaaggaaaaaattatgaattaagcaaaattcaaagggtaaaaatactaatttttaatggtaaaagcaacaaaacataacaaaagatgcataattatgtaactgttatgttttaggaagaaacaagccatatattttaggggacggaaacaggtagtgtgaaaatttgaatgcaaaaatactaattattctttgagctattactgatttactaaaactcaaaaaacaaaaaactatttttaaatcttcatgttttacttggactaaccagcattatgaaaaaaccaacattttttggaaacatagaagagttaggcatgaaaatcatagaaattgcaatgagctctaacaaggaaaatatgcagatcttatgtttttgtatattatttctcgttctaagagtgtaatcacatatcactttagaattgggattcaggtagttttaaaaattttctcccattttttcccatgtattctgatcacttttttgtgttattttttaaagtttacaccatgcatttatagatttatctatgctaatttaatatttcaataattttgttaaaaaatttaagctgataatgacatttttaatttataattagagagtgatgtcttttacacagaagttcaaggaaaaatatgaaagtgaggattcaattgattcgatcgatggtagcaattcttgcttttgcaacaaaatcccttttaaaggtgggggctcgtgctttgttttgagttttttgtattctaattaggagatttacaaaaatattagattttgggtaaaagtttacaattttagtgtcacacaaattttttaaccaaaatactatctttttataaaacaatcataaaataacaaaacaagacaattaaaaataacaatataacagctaaaaaataacagtggaataacagtaaaaacgtacactgtatttttgaaaaaaagaatctagtccacaataaaaaaagaaaaaaaagtgagaaattttagtatgtggtgtaaaactcattctaattattatgtccaattat

SEQ ID NO: 59754 - DNA, 779 bp, Cannabis sativa
ttttttttcatattatatatatatattttgataatgagtagttgaaaacagacagagagaaaattaaatagccataactttgtaaaaaaccaatgttatttatataccagctgataataattatggaagaaatacaaatattttaatgggaaaaataatagtaaataaatgatagaaaagattaatgtaaaattgctacaaataatctaattttgctccaaattctaaattagaaagatgaataagatttaacatatatatatatttatataatactgatttcgtggttaaagattaactaaaaaaatattaaaaggttataattaacacttttctatataattattactgaaatataattgatattgttatatatacctgcgcacgccatagaagatcactgctaggcttgaccttatggcaggtcaaaaatgcagtttcaacattagtggacttaagtgtttatttctccataaaaaaataggaacgcatctgggcatagaaaaaacaaaatagctgttataatcaattgttcaccaaaacattaccacaaaatgagaccagaaagaaagaaaattaatatggttttgatttcagcttatactcactgctgtcaaaccaacattactaggatttgcagcgcatctgggcagagagagaggcgacgcgcatctgggcacagagagaggggaggcgctccatatgtctaggccgccggagaggaagaaagagaaaagaaaggataggtgggtgaggtagccggaggtggctgggaggtc

SEQ ID NO: 59755 - DNA, 773 bp, Cannabis sativa
tttgcttgctaaaaaggtcattgtatggcttaaagccgtcacctaggcaatggagcaaaagatttgatgatttcatcaccaaatcatgtttcaagaagagtgtctatgacttttgtgtgtacgtcaaaacatccaatactaagagtactgtatttctactcttatatgtggatgatatgctaatagcaagcaaacatatgagtgagataagaaaagtgaaagacatgtcgagttctaaatttgaaatgaagtatctcgggcatgctaagaagattctaggtattgagatactcagagataggtagggaaagagacttatgctatctcaaaaggactacatttcaagagtgttatagaagtttggtttttcagaggttaaaccagtcagtaaacctatgacacacatgacaaagttatctcactcataggcacccactacagaatctgatctgaactacatgaagaacataccctactctagcttggtagggagcctgatgtacatcatggtgtgcaccagatctgattttagcgaagcagtgagtgtcataagcaggtttatgggaaatccagggatagagcactagaaggaagctaagtgggtggtaaggtacttgaaaggcacatctgacatgggactgatgtatggttcaaattctcaagcaccagaggttaaaggctatgtagattctgattatgcaggtgatatggacactagaagatcacaatctgattgggtttttcaactgggtaactgcacacttagttgaaag

SEQ ID NO: 59756 - DNA, 1095 bp, Cannabis sativa
cttatattttataaaaattatttatcggaccatctaatttgttaaataacaaatagatcatgtattttttaaatggtataaataagactttgaccttaattttcgataatctcattttaatataaccaacttgaagataattaatacgaacagagtaaacgtaatcagttttgtcataacacctctaaatcggattatcattaaattttattttaacaaaaaatcagttcaagatactatgtagtattattttagaaaatgcaaagtccaatttgttatttatcaaaactattgatgtaaatacgggccagacttttagacacgagcccaaaaggcatgaaaaaaatacaagtttggatgcaatacggcacgatgttacaaattggcacgacacgacacgaaaagtatgccctcaaacatgacatgacagaagaagcacgaaagacactacacgtaaacacgaatagactaaccagaaaagcgcgacacacgacaaacttaaaaagcacgatacgacatattaaaaaaccttctaatttattaataatactaataagatattaatttaccaattataaataagttaaaataataataaaacttaaataaaatactgaatattataattctataattaaaattattaaaacatgaaaaaataaatttatatattaatttatttataaggtgtgatgtaaaactttgaatatttataagtaaatattcaaattttaatgatgtgaataattttttttatatgattatctgtaaaatattattcaaaagttatataaatataactaaagttttgaaatatacatataaattagtaattgtaaaaaaaaatatatgaaaaataaaacatgaatttaagtccaaatatgaaaattggctagcctcttaaagaaatacaggtcgacagaatttatatttttttgtgacacaacacggcacgatcgaatttttgaaaagcataaataaatacgggtcgagccaacacaacatacacgaagttacatcacttatcaaaacaaagagtctaatcattaacttttataaaacacactgtctaaaatgatatttaacaaaaaaaaa

SEQ ID NO: 59757 - DNA, 1203 bp, Cannabis sativa
gggtacgatgatgtccgatatagggatgatataggtctgatagtctcgtattcagaagatgaattacaagttatgtaaaaatggaacaacaaggtacaatgtaggtctgataaaggtacaatggtagcaggttaaaaatgatatgttaggttgaacatgatagccctatatattgtatgatgtgcgatgatagtcggtccaatggctttttttttaaaaaaaaaataaattggtgtaggtacgacatggtacaatagagaacgacgttgtgtctaataagaatctgatttattattaacggacgatgctagtccaatgttggtccgatgattttgcccaattgtattgagggtaaataccattttggaccctgtattatgcaaaagttaccagttggaccctctattttgttaaatgacaaaatggacctatattttctaaaatggtataaataggaccccgagttagaagagcgggaagaggcagcctgaatctttagcgatgctacaccatttctaccaccagatgcacgttcagttcccccagcaacatcttatcgcagcacctcagaggttcaggaaccatgttattctactattttggaaaggttggagaatgttgagagggaacaaattgctctaaagcaaggtcagagtgctcttttgaaagagaacactgatattattggacttttgatgaccttaatggtactcatggaagaacttagaggaccaaatgcagaggcaaagccacaaccacaactcaagtttcttggaaatgatttcattcttccaaatgattatagacccaatgatctagatgatattctttatacacttgagaatatgcagatcatgtccattggagatacttaggattctaagttacaagtgttaaaaacaactccataaccaatggagaagagaccgagtaagaggcctaggtggtttaatgaatacactgaaatgaagagtaattcaaaggcatcaagtgtaccggtaaatgtggacccacttcagcccgttaagaagaagttacttctaagtttctacaatcaatcggtagtctcctttgggaacaagtatccacgggagtgctactctagtgtatacgattcgtcttagttccagaagtttctttctctgaagacatggatttttgacgatgtaagttgctataactaatattttaacacaatttatg

SEQ ID NO: 59758 - DNA, 10482 bp, Cannabis sativa
tttatttttgtaaaatgcccttttttattggtatgcattgtgtgttgttttgattatgtttgtgattagtattttgttagtgctttttttttttttttgtatttttgtatgtgtttttcttttttcatttttcatttgattgtttgatgaaactggtttaagttaactttattatttaacatttatgattttttatagcgtcaaaactggtttcacagggtcgaaattagtttcacaggttttaatttttcggtaatgcggttactctatttttataatgttatgtataatttttggtttgtataaaatcagtttttgaaacacatattattttattattttcataactggtttttttaaataactagtttttataactatttttttttattgttgttcataattgagttttaagttttaattttttatttgattatttgaggaaactaattttatttatttgtttttgttttttctctttctcacattccactaatttttttttttgttatttttttatggtttttattgtatttttgtctctttaattttctttgttccttttattctctttgattttaatttctgattctctttgttatatttgttgcattcaaaacttatcatgattttaagcgccaaacggtctatacttttcccttaaatttactaaaagcccatcatttttctcttcggttcaatttaggtgggcgtcaaatggaaacgagattgatactgactctgaagtagaagaaaataggggatgacgaccataatactggcctgaattctttttccttcgtaaaaaaaaatggcaaaagtaaacaataactgaagacaatattgtatacatctttttgataagatttaactctttataactccattaataataacaaaaaaacaaaagtacacataaattataggctaaattatggagacaaatcacaaattgcaacaaacaataggtagatgttgcgagacccaagatggaggtagaatatgaatagaacattttattattatacctcaatcacaaattaggagacttgttagtgctcacttaaaaagctcagataggcagtagaggttagaaaagaggtcaaaatctagacctcaacatttcttaagccagaaattgggcttggtttcctctctccaatatgtactatgtgccacacaaaccacaaaagaatcatcaacttggggcggccaccaccaatgctttactctgttaagaatattcactttctcaaatttacttactattttataattcttggaagaacctcactcttgacgcaccggttcactccatccaccactaagatcattaaccatattatgtaatgaatggaacttgagatcgatagactttttcttttcttctcctttttcttttcatatttatcattattagctacagaagtctaccatctaatttacatcccaactccttgaaacagagccaagctggcgaggaaaaaaaaacagaaaagaattggtgaaagccagaagaatgcaatgagcttattcaacgatttgatcagaatgaaattgaccaaatatatcagggcatgaatcccaatttcccttttctcttgcctcccagtatccaccagcatactgataagaatcacttcctttatccttagcaaaccactgtggtttccaaccactctcttgcatcttccgagcctgcatttggattgagtgaacaaacaaacatcgatatttatccatcatgtctaataaagctcacaacaaaatattaaagcaacaaaaggaacgaaatcaataacttacctgccgctgtctctgctcaagtcgtaacttctctgaattagccatttcgtactctccattttctagatacctttgatcgggtctgagccttgaatcagttggaggcaacttttcctgcaagtcatatataatatcaaacttccatcccgacaacagtgtcttttcagttttcaatgtaactgcagattataacacccacatagtatcatcttaataaaatcaaaattataaaagacaaagctccacagcagaatttccaaccacgggagttaatgaaatttgaaatgaccttcaatccaggggtaagttcattcagagtgatggcaaaacgcgtcaaattatatcttgtcggatacttgggcagcttgctcctcttccagagaagatgtgcttcagacaatgactcaaatccttttccctttccagaacagtcgccaatgacataatgcatgctctcatcccattttccaaatagtgttgccactgtctttccattcttatcttggacaacaccttgtacctgattcgaagataaaaatgaaagataaacataaccatcagcattaaaaatgacaagaagaaaaaacaattagcaaaagaaatctaaacttcacataaaatttagcatttcattaatccattctaatattctattcaattttactatttccggaaaatatatgtagttgtttcaccttcttagaaacaagttaatccagaaaaatgctcaaaatgtacacatatacataaacatgtttatgtacatttgatttcaaatccagtacggcattcaaacgttatactactcttcacattttcttcatttttaatttacatccttggacatattagaaactaatgaaatagagaatacttaaaacagtgtaccagaagaagattaatccacaaactgaagctataatgcatactccaataagtcaagtaatactcccttttgttatgttttgttatctttgttgtttttctattcatagttaaagaacatggactagttttctcaaatataaaagaaagaacaaacgacgataaagaaccaactaaaattgcaaccaagtaccaccagtccctgagaaaagtaaacaaaaaatatcttctaatcaagttatgttcacaatcaaattcccatgccaaaatgcataggaagattttgtaagattcatttgcagttttctccaattaattcattttaaatgaaattcataacagtaaaagataatttcaatttcaagtgctttgtcaactcctaaccttcaagcgacattttctaaacaagagaacaaacacatacaaaagtaaaataaaatcaacacaactagtattcgcccacaggttcagtaaaaagtaacagatatcagagtttatttcaatataactaaagaaccagcaaaacctgtatccaaagccatttagcatgttaaaagcaacacaattagtaaaactgaaaatcgattcagcacccaggttcacaagaaacccacaaaatcagttgaaaaagcatggaaagtacctggtgaggatttcgctcaataatcgactgctccttaaactttagcttgcatgaataaccatgagttccttctatacgcattgtaccataatgatcacaatacaactttcccaatatgaggttgtaaattgatgttgtaacctgagaatgtagtccattcaaagatgagctacaataatataataatatcaaagacatcaggctgcaaataatagataattgtagaaccattcaccttactccacttaaaaacttccccatcttcaaattgcacggttaaaatcccaacaggatcaagctgaattgaccgaccccagaatttgcttttcaaattgctatccccccaaaatttccatcctgtaccctcacaatgacaagcaacaaccattggatggtgactgacctgagaccaaaaataagaatttacaagtattaggttaactgctatttataagaacatgtttacatagataagaactgccttaaatttctcctaaatgtgtttgtgtccacattatccgctctttctgcttttttaccccttaaacacccctctctatgcccccacccatgggccaagtggaaggaaaggaacaaatcttgaacttccatcttttctaactctaaatactttgacctccttatggatttcctaatttcagaggcattacactaggaatgcataaaagagatatagaagacactttcatatttgcttaagcaaattaactataagttttaccttctcagagaaaaatcgaaggcctttgtctggatagtcagcttcatatgtctcccctaataatggattaaatggtttgcaaattcttccttcagttgaagcatatccagatactgcgaaagcagctacattaagaattctcatgaggctattaccctgcaaaacttaaaaagaaaatgacaaattagtaaacagagaaataataaataaataaataaataaaaatctaaatgggagttggcaacagtgcatcatctctaaaaaaattgggaaatacaaattataacaaccacatgaaacagaatgcaaaacatttaaggtgtttcgagtttggataaaattaaaccacattaagtttgaaactccattatttgtcatagtgacctacaaaattactaggagagaaaaaaaaacatgacatatgaaacacaaacacatttatgaatggaactacatattaactactaattcacagaaacttaccctttttccccactcataagcacggtcaatgagataagaatactccaaatcttcaaaacatttttgtagagaggaaagaggttcgttaaaatatacaggaagacaaattttagtgaggtcctttccaatgttatccttaatcatcgaccaaagactaacacccttctctttttcaatgggatctggcaatttcttacgccgcttaacacggggatagctagtcccaacatacctaatggctggatcaatgtcatcttcagactcaacagcataaaagccatcatcatcagaagaaaacgatgatatcctataatctgaggcattacttttgaaagaacttgacgacagaaaatcgcgagtatcaaaaaatgtattatcttcatcatctgtttcttcctctgcggcatcaactctttcattatcatcatcagactcacttccacttccttctggaaaaagaatgaacgcaaaggtaagatcacaacataacataaaactaaaccaagataagatatcaatacctaaagaacttgacatcagttatagcaactttaatatcaggggagacaaaacctcatcaaatgtcacaaatactttcttcattttacaaatttataaaacatggagataaataagaactgaaaagaatcaaatgctacatattacaaaaagaggaagaaaagaagaagaccgggtgaaaaagaattgactagcttcaagtttcagccattttaaaactcactctttattcttttaatgttgcaatatagatattggaaattcatgtgttcataacagcgcctttcatgtgctcacaccatctctctcttaccaaattaaaaaaataaatttgacacttaaaatcttcagccacctttccactgccatgtggcgtcaaatgctaaactggtaaaatatatgggctctagtagtaaaatagatcattttaagttttaaacttgataaattcactataatttttgaaatcactctctttcgaatttaacatttaaattttgcaatatcagttcatcttgaatagactaacttggaaattttccagtaccacaaacaaagactatataatcaaggcaataaattagtactcagtacagaagaagagtaaaatcttttgaggaattgtgctctcttattacaagtcaataccccacaatccaaagaaatgataaagtgactcggtacataaaaatgttgctacaagttctcataacttaccactaaatttatcctgcctcgacctagaagaaaccccacaatccttccactgtctttgactctcatcaacaactgtattctctaaatcaaccttttctgtctacagaatccaacataaacagcaatttgtaagcaaaaaatagtgacaaaatcaagaaaatgctaaaaacttttgttaaacaacctgagtacaaacacaggatatgtttcctaaatatagtaaaagaagaagctcgtctgtctttgatgacaagaatcttttaacccaaattagttcaatttggccatactgcaaacaataaaaaatatgttcgcaaaatgcaaagaaaaagccagcaaatgttagaaagagaatttgaaatagtaatgacaaaatgcccagaaagatcaatatcaaataatgaggaaaacaaaaagaaaagacaggtgtaaaaagaaaaaagaaaaaaaaacaacaacaacaacaagaaacagacatgatttgcatatgtttcgaccattaaataacttaaagtttcttgcaaaagaataaataaaaactaaagtcagaataaaaaaccaaagattggatggtataaaccttccacaaacctcaccgcacatattttgatattcaacttaagcacaaacactatcattatgcagatcaattctccatggacattcttctaacttttgatggactacagaaaactaagggacatttttattgtaaaataaaagcgaactcaaaaaggtttatctattgataatttgtatcatcaccccaaattaacataacttatttcaaatctattcaaaatctgtttctttgtgtcctcagcttcaaaccttataagatagtcacatgaattccttaatccttaagtaaaacatcaaaattatcaatatgttctaacaaggcatattcttagttaatgataataatgaagctaatggatgaaaactggttaaggaagtatttttttctgagagaagaattaagtcggcattgtagtagcgaagcttgtgctctaacaaatataaaacataaataaattaaatgtatccaaacaatcattgtcatttatatgatttgataggtagtttatccaatcatctaccaatattttacaaataactgactgctaagtgcaaagaagttagaactgatggatgatttttaactagccattttttagtggaaatatagatatacatagcgattatcttttctaacagcttaaacacttgctcctaaaaatgcctctcatcctttggtaccgtactaccacttcatcaagcagaggctagcaattgcctcaaccaccactatagtttatctcccactcgtacagcacttaaattcattttctaaatgtttaccctcagcatggacaccagggatttcaacaataaaaatggaaaaagacagctgcagaaactatattgattttctttatggatctaaagatttagcaggaacaggttaactagactttggatacagcaaagaccagtataaaccctcctaaactaatcaacagattctatcgcatacacaattaaaatgctaatttagttcaaaaaatagtccacaagtcgtgcactatttatatatactataaatatatataatatcaaaaaaaaaaattgtatataatatttgtacatgtattacagtttagaataaaattattattcatatttatcattatatgtatatttattaagatataattattcttatttatagttatagttacctcaatcgggaaagtacatgtttttctttaatatagtattctatatatacgtgtatatatatataataacaaaaaaaaattgtatacaaaaaaaaaattgattattgattttttttttttttgagaaaagaaaatgaaaaccaccgcgaagatttgatacaagaagaataacattacaacacttcttgcaagagacaaaactagcccaaaaaaaaaaaaacaccccagcctccaagcaaaattttgttaggtggttagagtgattaagaatactccggactagaaggggaaagggaaactgaagaagagttctgaatggcattaagtttccgtacctctagctgtctcagagtgtcgaagaggagccattgtttctgcttgagcagaagaagctggttctgtagagcagcaaactcactcttcattatatgctcgctttcctgaatgattgattcactaacgccctcatccgtaagcagctgtctcaacttctctgttgaaacagccacattgtcaatgggagccattagctcgctattcgacagtctcggaaacatgtctttcacagcttgtaatgcttccatccaagccacacgatcttcccgcgtctccgccctcaaatgcagcctcttagtgccagtaaagattgaaaatctcttatcgtcagatctactttcacggatgctcgaaacctagagatacattcttcagaaatcaattaacgatatatacaaatgaatacatgattacactaaatcaaatgaaaaggaagaaggcaattacatcaatcgatcttaagggaggtaaaaaaaaaaagcaagcgggatacttaggtaactaaaagatgcaaaagtttatccaggagttgattgatatgagggatcaaaaacgtaaaattgaaatggaaacagaaaaatcaaattatttacttaaatttgtgctatgaaaaagagaacaacaaaagagaatcttaggagaaacacatccaaccagaatcaaaacaaataccttgagatggacttcgccgaatggtttccggcggttctggagagaattggaattcctctgacgagaaatccttctcaaagattcttcgccgataaccttggatcctttctccgtctctggggtaacaatgatcctatcaggtccatgaatcttataatacgaaaggactccatcttgcaacacgaaccaccgaggtcgccaacctttaccgtaattcacccacttatacagtataccagaaactccatttccaacgagatcgttgatcttcacatcgactggttgttccctcatcgacggaggtcgagctagggcctccgccgccgccacagctgcagcagccgcggtcgttctttggctcagccggccgtagtcgctattaccaaggctgttactactactatgattgtgattgtgattctgactctgattgtgactgtacgattggtgatgatgattgttgatatggctagccactcttccggccgaatcggatctagcggcgagcgaagtcaccggagacatagagagttcagcgaactgagacgaaggtttacccggagagtggtcagagacggtagagacacaacaaaaaggatgcatgtagaattatatggataggcataaaatcaaaaaccgcccaatcgagtacatctaacttcgccggcaatagagattccggtgatactgacggcggttctagaaagaatcctttaccattactccatttttttaaaaaaattaaacccaaaagaaaaaaggcgaagtttgcgggattgagaaccgagcagttatatatgttccgtttagggacagaaatggaattttgagaaggaaagaagaaaagagtttgggcaagaaagaaaggaatcgtcggacgacgtcgtttggtggtggtcttttcggtcaacacaaaagaaagagaaaaaagtaagagagggggaaactacagcaggtgcttctatttctcttcttcttcttctgcctttgctatgatgccaaaaaaaaaaaagtttttaaaatatgaggcggttggttacaaactttgggactttctatctctcagataggttctggttaagtacaccgaggacacaggaagctagtcagtgaggactaccgccgcctcattcaaacgatgacacgtggactccgcgtgtgaataaacttgacgagtgagtggccggggtgtctgacgacgagtctagcttagctagagctctggttgcgctcccgagttattgaccgctatttatgactgttccaactttgaatttaattttatatttttttttaaagttataaaaaaaattattaattggaaaatataaattaatattttatttacaaaaatacatttggataatatttatgtacttttagttaccaaaatacctcttatactattacttacacaattagatgatggttgttggttggttgactgaaacttacatcaaacgaaggtttcaattagacaaaagttgttgggtggttggccgaagattacatcagacgaatgttactaggtggttagttgaaggttgcattagacaaaagtttcaatcggacgaaataactgttagcaaaatatttatgcaactattatgaaacattaaaaagcaaaacagtgtttccacgtacgtaacactatctacatgtctcttcatgatttaatatgaacatattcatcatttgaaaattagaaaataacaaaaatacagtaggataaatattttactatagtattgatgtaatttttttttattatacttgagttggattgtttgagaactctagttcaactttttgagatctgcattttactgatctgaaaattaaagtcaggacattagttttatgcaaattaaactggattgtcagttgaatttttattttatagtagtttttctacatttttttttcatgaattc

SEQ ID NO: 59759 - DNA, 1036 bp, Cannabis sativa
gttttattttttagttggaagtggggttgtttgcaatgtaaatggtgaattggctgtcacaataaataaaggtgagtttatcttaaggtatatgaaaatcattgagaaggtattgaagccaagtaatttcactttaggtggcagccaaagcccgatactctgcttcagcggagcttttggagatagaagattgcttatttgtgcacaagtgagagaatcaccgaggaagatgcaaaaaccttcggttgatcgtctcgtagtggggcaagaagcccaatcaaagttagaaaaaccttttagatgtaaagaagatgtgactaaatacaatagtccttggccaggactacctttgaggtattaaagtaagtgatgaacgacttgcatgtgtggagtgcaaggggttgacatgaattggttgaggttgttaacaacgtaggtaatgcctgacctagatagagtgaggtaaagaaggcgcttaataagttgtcgatatggagaaggatcgtcaagaagttcgccttgttgattatctaatttgattctcagatacatatgtgtcttagctggtttgttatcggtgtaccctgtatcgtcaaggagttggaaagtgtacttggattgagagagaaataaatcgtccttcgcctgagatatttcaaaacccagaaaatacttcaattggccaagtgctttgagcttgaattatttgtgtagtgagtcttgtagctagtgaagtaaagtgagattaggtctgatgatgataatgtcgttgacgtagacaagcaaggtaatgtaagtgtcatcagatccttttgtgaagagtgcgtaatcaacatgtgattttttgaacccttcacgaatgagagcatcagacaacttcttgtaccattggcgcgatgattggcgaataccatatatagatttgtgtaactggaaaaggaggttgttatttgcacaagtagaagaaggtacaattaagcttttaggtaaactcatgtaaacttcctcatggtgatcttgttgggttttatgccct

SEQ ID NO: 59760 - DNA, 1089 bp, Cannabis sativa
cactccaataagttatttcaggatatatttttttatttgtttctgtattcaggtaactatttttttaatcaagattcttaattttacaacaactccttaaaaagatatactgatgcattcacttgttttaggatcaagaaaaaaaatttattttaattttttttcatattgatgtacgttatagctatataagatatcctacaaaattttagaaaatatagaataatctacaatatagaaaataatgttcaaacaatctattttatacgcatataaaataaaataattacgctcgtacaatacactgtttgaacgtagtttttggcgtgttaaattttttcgaatagtcttaaaattttgcaggatttttaaataattataatttacatgacaaaaaaagaaatataactaaaaatggataaagatgtattgacttatttttaaaaaatttgacttaagttttcctaatttttttttttaaaaaataaattaatatttttaatatttgaattacactacacttataatgaaagaataattgctagtataaattaatatttgaattatatttttagtaatatattatttaaaaaaattgaaaaatttacaagtatttctaacatacaccattattaaagaagaaaatatttgttagatgggaaatagagtgtacccgtaaaaagtacctagcaaacacttcgcagtctgaatccaattaatcctatatggatattttctttattctttcttattatttaattcaaaaactgaaaatacaagaaacaagatgtaaatattctattggatgttcttctttttgttaaaagaaaaaccaacgcaatttcaaaatatataccaaatttttcggaaccacaaataagtatttgaaaataaaatgtaagtgataaatactatatataatatctattttaattctataaatgtttttgtttttgaaaagtctaaaagtaactagccatataacaagaatacacaataatacaaacgatactgtatatgaattaaaattgactttctgaacttagccatataacaagaatatcagtacgtactatttttttttttaat

SEQ ID NO: 59761 - DNA, 807 bp, Cannabis sativa
gagtgtgagtgttaatcatggatgcagacatctagagcttctatgattatttagaagtgaaacgatagtttcctttgaacttagttaaacaagattaaatggtggagtatccatttcagtagttatattagtttactaaaatatcatttacaattagctaagtgtttaaagaatgaaatacattgaagggcaagtaggtaattttgtccctactcgatgtagaccacctatagaaggtccttgcttattttgactataacaatggataatttataacatatctacattggagatatagagtgttctatataattaagagtgtaattctgagtatataatggagtcatgatgaattattaagttaaaaaatttacgagggtaaatttcagattaacttattggaagcttgattatataggctcattgccccaacaatgcatgagataatatcatcttgtaaaactcaattaattgatttagttaatcaattaaaattcataaacttactatctcacatttaataagttacactaagcctgtgttaaattgataataaaagataaattaggttttatttgttaacatgacactttgtgaatctaattaataaatatatttaaactatattttgtttgataattatttataattattaaattaaaattagtgtttaaaaagtttaaattgaattaataaatagattagtaaaatacaaatttattttaaatcaagatgtgatgtaaaataaatgactaaattccaatttggccctacaaatgtagtgggcagacaagcattagacttttg

SEQ ID NO: 59762 - DNA, 846 bp, Cannabis sativa
actatttcacccttctaattacctctttatcatttagtaccattaactgactagtaaaatctactttacgatctaaatttgtgcatagcttttcagtcccaaaattaacacttaaagggaacaaatcaagttcctagccatctacattattagactcccaaaataaaagttatgaatcttgtctctgaaggattttaacaagtgaatcaaaaaatctaataacatgaacaagagttcatgatttctgagaatttacgctaacttaagttggtccttatagtaaagagaggctaattgcatgttggtcatgttatatataatctttcttatatacaatacttttaccgagatccaaactacatcaacaatctaaatcaaaatttcttgcaccgagtgacgtgcatcagtaaaacgtattagcaactgtttattatagttcctgaccattttattcacaacgtattatcttagaaatcttgtaccgttacaatgtacgaatatgaatttcaatcttttttcaaatcttgtttattgctttcatttttcaatttttgttatttctttgttagtttaaaatctaatttttgattgccaaatagaaataagaatttaattaattggtacttagctacaaatctcgtgaaaacaatcacactttattcgagttatttgtaaaaataatacgtgcacttgcgtgttatatcaatatttttcatattgttagacaaatatttaggatatttataaattttcttaaatttctgttgatattgaaaatacctctgatatatccatgaagttctagtacaatatttccatatattttttcattgcttaatatttttt

SEQ ID NO: 59763 - DNA, 894 bp, Cannabis sativa
aagtgcacaggccactctgtcattgccgatgacacccatcaaattaaaaattcttataataactcagccactgctcagctttcatcacatcataacctcccaaaagactggaggttcctgcttgcgaaaccttacatatagtggttccattcggttcactacagcaatcggccctgcctgcacagcaggggcatgagccacctgcacttctggagcaagcattgtaggagcaccttgctgcctcgggcatctaatttcttcgccttgtttgttaattctggtttgcattgttgcaaccaattttttcccattcatgggaagcctacagcgggttagcatctccccaattgcgtgccctaattcttgagcctctacctcggccacatctttccggagcaaactaaactccctgactgccactgtatctgaccttacctcctggcttctcgcatttttcctgacattcattctaataaaacagcttgcaaaaccacgagctagcctggtcagatcacaatcaagaataatttactaactatctcttattttggaaattaatacatgcccctattcaattatcgggctactaacatgcttctatcaagcttttctaatagcatactattaaaataaactactaaggcaataaaggcttactgaaccgtgagtcaagtcgatcattgatgatgattgtacatgtcgtgatgatctttggaagacaacccggtgactctaataccaaattgtaacaccatacaagttttggcgtgctgtcgttattttatattaactgttcagctcgttgctaatcaaccagtttattgaaaactatgaataattaaaacttttactgaattacttttaaaacaaaaaataaatatgttttacataacc

SEQ ID NO: 59764 - DNA, 3086 bp, Cannabis sativa
cgacgtcgtgtacagccagtgatgttgcctttgatttcgcctctgtgtcgtgaaaataagaggccacgtcgttttgtgttgagaaggtcgtcatctgtggatcaatctcatgtttttcttaacatattacagagagaatgtgactatgatcaatataacaataataataatttgaacaaaacgacaactttagcggttttacacaggtcgttttcgcaaattcaacctaaccaagtctatgatagtagtaaatagtaataatagaaattgttggttggttattgttagacactccattccttgcagcttataaaattttgggctgagatgaaaaatggtaaattaaattaataaatgtttctttttataaacatttactaaaatagtcatttagatacaaatttgatgatattataattatgattttagataattaattttagctttctattattttttgattctcttgtattgttggaaccatttcgcctcctagcttagtaaatgtcttctgtttctttaaaaaataaaataagctataaattattaagttaagtaaaactttaatagttacattgtatttttcttttcatattttttaaattgcactaaaagaatcttaattttcaaaggatttctatattacaatacattcatatttcagtatattattttaatagtgtagtattgcttttctgtagagtagtatgtgaagagcgaaagacaaaaatattcgagtatattactttaatagtgtggtgtaatatttttatggggtgatagtacgaagaaacaaagtatattacagtatattcatattcgagtatattatttcaatagtgtggtatattatttttaagtggggtggtatatcaacaacgaaagacaaagtatattacagtatattcatatttgagtatattagtttaataacgtggtatattgtttttatgtgaggtggtatatgaagaacgaaaaagaaaaaaaatgtggaatagtatagtttaagtttgaggtatggttcaaattataaaatttagaataaatctatgtgccctgttttgggtatgttgcagatatgtttctttctaactgtttttagaattttaactacttttttcaaactttttccttttccctcctatctcattgacggtttcccttcgctccctgtgcttttctcctcgctaatctgctctgtttttccttcaactagccacaaccaataacctgcttccatggatccactcatgaattctcttaattctactcttaacttaagtgaagaagagagtgttgtgttttgtcctcactgaagaggttgtcctttcccctgctcccttctccatacacactattcttgctcgtgttataacagaaaattatatccataagccaaatagggggccattggaagggccgctttccagtggttatcactgaatttagagacgacattttcaagattatctttgtgtgtgcaggtgacaaattttgggtgttaaacaaggaaccatggaactttcagaatcgccttattgttctttgcacgccaaatgctctgcaaaattacacagcaagaagtttcaggttcacgctattttggattcaagtgtttcacttgccttttctcagcaaatctaagaccctcgcaaaggccctggagaatattattggagactatattgatgtccatgaaaaatctctttacgaaggatggggtccgtatttaaggattcttgttaatatttcagttgataagcctttgcttcgaggccgaatgatcagcctaccccaagttaaagatgagttttggattgatttttgatatgagcgtttgtcggaatattgttttgagtgtggaattattgggcatccttttggaaaatgtatctccttcatggagcgaatggatgatggtaatgatgatgacacgaggacgaatgatcagcctaccccaagttaaagatgagttttggattgatttttgatatgagcgtttgtcggaatattgttttgagagtggaattattgggcatccttttggaaattgtatctccttcatggagtgaatggatgatggtaatgatgatgacatgctatatggaccttggatgaagggtacaaaattaccaaccacaagctatgaaaaatatcttacagacttttcaaagaataatgtctggctatttgttacacgtcttgcccgcaaagccattgtatcctcaattcctcaattgaacaagttacttcctcaacccaaaaatatgtttaggggggaatcttctattgatactacttcgcctcatgctcaacaccagactttgggatcaattaactacccttccaccacgactatcttagcatctgatgttatgactgatactactcgatccctccttcatcaaacaattgtctaccatgaataccaaaaccagtcaaaatactgcagtaattaccacccatatttcctcacccatctccaacctcaatcacatttacacacccaatattggtacaacaacttccccactgattcttatttccacatacccccagactgtaactccaaatgccttacctcagtacgtgcccaacaacttttcaccatcacaaactctttcaacaaattcaacatctataaaccatttcacctctagcttttcctccttctcatgtttctactgctgtcaacaaagaaattgtctctccaaacaggtttcttaaaaggccaggcaatgtaccatcgctaagacaaacacttaaacattgtcgtaactaaaaccttgctgcccttgctccttcttcatcacaaggagacaactcaaaccagaatgtttcctccgatatcattgattttgatggttcatctgatgactcagcggtgattgcttcgcaatcctgcaaagcattatgaaaatcttgagttggaacgcatggggcttggggaacctgagggcattcagatatctttgattgctggtgtggcagcaatagccccaggtcttattccttatggaaacaaggctaagtggtaactcaatttcttgctttcgataatttttaaatttcaaaaatggtcttga

SEQ ID NO: 59765 - DNA, 880 bp, Cannabis sativa
tatatagaatagaatcccttttaagatgaacataacaatatcttaatgtgtgtccttgtgactgcctatgagtacctttcttacattaaatgtacattaaaacacaactagtatttgagaccacaattttacacattatgaaaaacatgtttgaactgtacaaccaaaataaataaataaataaatacatagtttattagtgtgttttactaaagttatcaatcggtcttagattctttatttttttaaaatagtgtaaaataatacttcagtttaatttttatcgaaattaaatacaataagtcaataatagtcacacttgaaagtattatgactaaacttgttatatttgttacatttgtttgcactagaaactagttttagattattttcttttgttaaaaaaatacacataatctaatttgtcatttaacaaaataaatagttcaattaataatttttgtaaaatacaaaatttaaaataatatttttttaaaaaaaataatatgatattgtttattttgtggcaaatgttggttttaatgaggatcaagtggtgtagattttctttcttactcttttgatagttttgacaattttgaagaccacgtatcagttataagaattttatacctgattcggtcttaattgttcagtatgcacctcataagagttctcataatcatcccaataaggatgacaccactagaacaaactagcttcctaaagagtcaaacataatctattataataagcggctataataaaattcgaaccattaactcaaaaaaaaaaatatgatagtaaagatttctctctacatctaaaccacacaacttaagatagtgtttttttacagtttttaattggacagccattg

SEQ ID NO: 59766 - DNA, 998 bp, Cannabis sativa
agcttctcacggagtgggttaggatcccccctctacttcgtactgctcctactcagcttttcctccagcatgccaaggttgtctccacttatgacaaaaatggtcttaacatgggggacttggtgacaacacagaactaccggaaggccaagctcatctcagggagtcaatcagtggacgacttcaacctctccaaggtcctctgcccaaacattcgtaccctggacgctgaaaaggtgctctgggtagacattatagcctcggtggaggaccggtatcagaagtatctcttcaaaagagaacaggagttaccctatatcaaggctcaggctaccgctgggaggacccttcgactggaagcgggtaaagaagggatgccttctcggcctaagttgctggtccacgtatccaatactggggctcctgatgccagcacatccggatctggtaagtctcccttaacggtctatcacgtcccttctgtccaagtttattctcggtgtaggcctatagaatttgacgagcgtctccttagatttaggatgccccccacttggtggggtgatcatgcaaaggcgttttatttttccaacttaggtcattttctaggccgatcccggatggggtccggacctcctgcacctattcccccagatcattcagcttatttgtcttccagctggtttctcccctcggacagctttctttgggatgatgaagccagtattgtagtgcaagactttgctagggctgagttagatagtcagggtaggactagttttaccgctttgttttcgtgtgcatattttctcatggccactctgacacttaatttatttgtctttttgaagcagccaagccaatggaggatcttggcgactcttgcccagacctacaaccctaactctgctcttcctccggcgcctgaccagttggtgaccccgggaaggtcttcttctagcgcccctctaggccaaatcgtcttgatcgacgaagac

SEQ ID NO: 59767 - DNA, 815 bp, Cannabis sativa
aaaaaaagacagttaattatataattgataataaattaaacacatctcccctatcttagtatatattgatacattttctctgtcaaagcgtatataatgaatgtattaattagtatattaattagcattttaatatagagctatatatatatataaatgctaaagctagtgttaatgtggttaattagtacatatattaagcatgggtcaagtggttggagactccttgtatttaaaacatatgtatgtatgaaaatttaatattatatatatatatatatgaactacttatttcattatcaattaattttaagatcttaccatatacctcattttaatgatatttcattatttttctaaaggaaataattgttaataaatattatctattaaataattaatagttgaaatttttgaattgtatatattagtatctacggccgattaataagacaaattagtgtggattgatgagtgaacgcataattaatagtttaattcactactataaaatgaaagatccagacctctacaagaaaaatgggagttttgtcaacgtattttttttacctagtaattagcaaaagttagatattgtgctagtaaaatagaatttttttttgctagcgctttttgcaaaatgggtcgataaatcaacatctggaattttaatcggcgcaaaataaaaagtatcgacaaaaatggctaaaattggcgcattaagactcactacaaaaaactggtacttttaatgacaatcttttaattagtcataacataaattttttgtgactaaatgtgacttttagtaacaa

SEQ ID NO: 59768 - DNA, 1144 bp, Cannabis sativa
  modified_base (356)..(359): a, c, t, g, unknown or other
ttatcaaggtcttttcatcataacaatggagtcccgcccttttcactgatcactcttcttcttcttcttcctttgaaagctccattaacaccatcagccatggcaatccattccttccatttctccatatcgcattagaacacaacacgaagaagaagaagaagaagaagaaaaagaagaaaagcgaaaatgagtacagtagataaaatgctcatcaaaggaattcggagctttgaccccgaaaacaagcatgtcatcaccttcttcaagcccttgactctcatcgtcggctccaacggtgctggaaaaactgtatattctctctctctctctctatatatatatatatctatatnnnnatataaatatatgtatatatatgacctcactgttttttttttgcttgttgtattggttcagacgattatcgagtgcttgaagctctcttgcactggtgaattgcctcccaatgcgaggtctggtcacagtttcattcatgaccctaaggtctctctctctctctctctataaatttgggttgattaattatttgaccaaacaagtaagaatcgtgaggttgtaggttgcgggagaaactgagacgaaggggcaaataaagcttcgatttaagacggcagcggctaaagatgttgtatgtattaggtcctttcagttgactcagaaagcatcgaagatggagtttaaagctattgagagtgtgcttcagactttgaatcctcacactggagaggtatatacctttgctttctttatccttttgcagaatttaggtggcatttagttgggatgaacgaaaacataagaataggaataggaacggtaatgagaatagaaatggaatggaataaaatttaaaatgtataaataaaaaattaatatatgatgcatcggaacggtcttttcttccatttcaaaatggaatagtcatcccactaaaatggtagaaagatcatttcattggaatgacattctgtcattccatgattccaatactttaatatgcaaccaaacaaaagaattgtttaaagatggtttccattccatttcattacctccagccaaacacttcccttagtttatttctttctttgtgttgattttgttgttgtggcttggaattgtg

SEQ ID NO: 59769 - DNA, 563 bp, Cannabis sativa
tttatttaccatattatcattatttaaataataaaagaataaaaaataataagttttgtatattcgcaataaaatatgaaatgaccatcaatataatgaattattttattccttatttaacatcttgtgcatcgaagcacaattgtaaatagtaagctaaatatagcacaaacttttttttgtgctaaatttaacacaaattttaaatctgttattagagatagtcttatgttttatttttatttttattatttttatttttaaaaaatcaacatacatatgttacatatgttgtatttattttaagagttaattgcatcaatatccataataattttcacctcgctagctattaactcttaaaattcaaattcttagcgtaaaatcccaaaaatcacaaaattattagctatttacaattttcattcaaatttaattgttaattgttatgttaaattatgcacgtgtacacattttattggttcacgtattattttaaaaaataaaataaaataaattatatatatttttcttttttattcttttcctttgctttttttttt

SEQ ID NO: 59770 - DNA, 1661 bp, Cannabis sativa
agtgttagagctcatgcgattacatataaagtagaaacaaaaaaaaaacataacaataaagtttaattacattggattagtttttgattaaattggaacaagttctaaaatgtttctactaagacttatccccacttaaacatcgctcgggatgactgactaatacactaaagctaaatgctaataaaataagagaggactaagacaaaaacctcaaaaaaactaacaactatctatttctgcagaagcttctcgatttgtgtcatagtgacttctggtgcatgtttgggtgcccagggttgtagccttcgactcctgtagcatgcccaatgtctgggacatcaccatcaattcaaagttgatgtcacccaatcaaagctgagagctccaccattggtcgaacatgatttatagacagcatcaaagcaataatactcataaagggcaacatctacaatgacctttatttctagggccgccacttggtcctcgaggcgaagaggaaagaatgctcctgcattcatatgaaatcttgaccaagcactacaacaaggattttgagagccacttggacagaatgtccttagttttctaacaacaatctcaggtagtgattactcatctcgtactagttcaacttggtgctaagtaatggaactaaaaataagaggtcttagttcaaaggctcaatctctcgggtcctcactttcaatagcagcattgagtaacatagtggccacgacttttccaccacgggccttatctagatctttagacttagtcacaataagctttgcatagatgaatttagtcgtgtctcgatcatattcttcatgttttcttgtaattcttctcccacgaggtatgtttactctcagcttggcttgcctaaacttgaaacagttgaatatcaacttaatctagctcaaaacatctttttccaaataaattaagacaaattgcaccttgcacgaacgaaaaagttcagctcaaacaactcatatgaaaatattattttgattttcaaagggcttgacattagagtttaaggatttccaacaagattcaaaatccttaaactgagcttcacaatagggaagaaaaaaaatcaaagaaaaaaaattcaaattgttttgggaaattacttgaaaaatgaagaacacttgaaaaattgatgaagcaggagactcatgcacttaagttcactgtgttgggcgtgtggattgaatgagaaaagagcatggaagagttctctgtttatagctattgatctcctctattcctaagccaacaaggagtgaatttaaatttaaatttaaaaagacaaaagagagaaaatctattatcttttctcttttctcttctttaattttatctttaaatgttgaattcccttgttccatagagaataggaatttgaaaattctagtctcactagaagacattaaagaatagaaaagattgcttgagattgccaaaatagatgcccatgtagtttcgagagaaacaggcatagtttacgtcattcagtcaacctcacataagtataaagtttacttggggcaaatgtttacccaaaaactgaccttggtgacttggacatcaatgtttgacacgtggcaagaaagaaaatatcccagagttaagtagtctcgagtcat

SEQ ID NO: 59771 - DNA, 663 bp, Cannabis sativa
ttttgtggtgttaatatctttggtggttgtagacatcgatgagtgttcagatcctaaaatcagaccacattgcaaaggatgcaaaaacatacctggaaattacacatgcaagtgtccacttgggatgcatggagatgggaaaaatgataattgtaaaggatttcgttttaacacatttgccacaggtaactataattgtaacaatcattcattaattgtgtaaatacatcatttacaattatcttatatcaaaatgagtatatatgacaaaataatttccttcaaacaaaatagaatccattatagaatttattttcggattatttcatatacatttatatgcaaaaaaaaatgataaattttttacatttgtatacagctactgttttttttatatatatttttatggattttttttataaaaatatagattgttgtttttcacttgtttttgaaaaaaatgttgttttaatgttgttgttaccggaaaataatgtatttttttttttgttattttagaacaatattattttaatattgctattactgaaaaataacattaaaataacatttctcaaaaagacaaaaaaacaagtgacaacatgtgaaaaaaaatctgtaaaaatatagataaaaacggtttgtagaaaataaagaattata

SEQ ID NO: 59772 - DNA, 822 bp, Cannabis sativa
ttaaatgattttcacttgttgtatggttcatattattttcttttttaaaaaataccaatttcaagcttttattgtcttgtattgttaaaattgagcaaaaaatatttaccaattcaattattgaaagtaaaaattacaaaacacatgcaaacttaattatcattttttttaaaaaaaattgtatgagtggaaaattaatctgtttggattaattataaattattgtaatagtcctttacagtctatttcatttattttcatccaattttttttataagtaattcgataatcaaacgatctattatttggtacgttattcttattcacattttggtagggagactattcccgttagattaaggactatcatattagtctatttatcttaatgaagtcagcaaacttttattaaaataaaatgcatgagtgcataaatctagcttaattaacatcaacaaaccacttatccataattattagaatttgcttccttaaacaaaaaaaaatccaattataattcaatacaaatttgtattttaagttgaaaatggacagatttcaaaacaatttgctcatgtataattgatgtggtgctaattaacttcaaataatgtaattattatatttaatattaaaaaataaatataaatcattactcttaataacattcttaaagaaaatagtgggggaagtattcttttttttattattctatatttaacaaaattcttagttaagacttaagagagagtaatatttggcactattttatcacaatattattctagtaacaaatgattctcttctcttatttattattat

SEQ ID NO: 59773 - DNA, 915 bp, Cannabis sativa
ttatttatttaatctaaaactccaataacaaaacgtcacatcaaaatggctaatgatttcctatattagcatttctcaatagaaaagtataatttcaaaagatgagatcagtagtgatgtaatgatgtgatcaggtcgtgattatgtatatgttaaaacattatattatctagtaaaaacgataacgaaagcttatagtgatgaaaaaaggaaaaccttacccttacaacacaggacgtctcctttctttttcctgggcttaacatggaagttagtcatttacacgtacggtcaaaaactaattccctctccctctccctctccctagcaaaaaatcgaaaagaagaaacgaaaaaaaaaaaaaacaaaacaaaaggagctccatctgcatggatttcacaatcttcgatcgacaacaatcaaccagttccaacaactgatagttcataaagcccagaatggtttccgagctgccatagaaactgaagtttccctagaggactctttgctagtttcctcagagccattgtcttcctcgtggtcgtcgtcgtcatcatcatcatcatcaccgtattccattagctttaccaaagtatctgaaataattaagggtataagataaaactaccgatatacttgaatcaaaacacattggaatacaaccttgacatgaacgactgttgtgatccatcccaagattaccataaatcatgccatgttaaactaatcaaagagtttgtctacataccagggacggaatcggatttagttttgcttaggatattggccttgtcttgtgttttcacagaagatgatgaagcaaattttggcgggggaggtggaggagccatagttcttgatgggggaggtggaggagccatggttcttggtgggggaggtggcatctcacgtgat

SEQ ID NO: 59774 - DNA, 5341 bp, Cannabis sativa
  modified_base (3616)..(3622): a, c, t, g, unknown or other
tgaatttctcataaacgcaagaattcagttatatagacacactttatatagaatagatataaaaattaaactaaaaaaagtctctctcaattgacaaaacaaatagaagtacttttaaatgtgcattgtattttccataaatatatatatgcccaacaattcatatacataataattaagttaattattatttttcattttttttctttttggatgaaaaatatagttttttatttttatacttgaaattattttttttatattaaatttacaaaaatacacgtagcaaccaaaaagaaacttatatattataactaaaacttataaagcaaccccatataaaaattactagaaaattcattttaaattataaaaagctttcaattccttttccttggttgttccaactttccaacattgagagatagagtggtacaaaaggtagagcttctaaacacaagagctatacgcatatatatatatagctctttctcagtctctttttatatatatatatacatacataaaaatagtagaattgaagagagagagagatggttgggccggtgagacctcaattcgttctgtttggttcatctatagtagagatgagcttcagtcatgaagggtggggttccatgcttgctgatttatactctcgaaaggtaccattttctaacttaattatctatatatttcccaatataatatatatatacacatgtgaatacacttctcttctatataaatatctgttatatatgtagctagggtttattattttttgtgtggttcttgttgttcatggtgggtgctatgctatgtacagtacacattcaaaatgatatcatatataattatatattattaattaattattaattatgaacgtaacattaattattttataaataaataaatatcccacctaataattaattgatagttgtagtgggtgggtttcgattccaaacacctatttaatgtcacgtcgttttcgtttctttaaaagttttttattaataaatgaaaaatgtaccaactttgtatatatttatgctttttttttccaaaatccaaaataatgattgatatagaagtattgttatattggttagtgatatattcttttataattatttttttaaaattatataagactgagtacttaattatactaataattatataatactgaacatactaccaactataatagtatcttttagcatttcatttgatatagtattcctagtatatgagtttcgaattttgatgcacactctaatattaaatatataatatggcagtttgttttaattttttttaataattattttatttgataattttattgtcttttttaattattatataaataataaaaaagtcatatacacattttttattatttaaaagtgaaaaatgatataagtcaatttgcatgtattattgcttcacatgtgtagtaaataaaattacatgtgtaaatattttaattgtgtcatcaaattgtagaattttattaattattattattatttattttaaatttcaaataaaataaacaaacgatttgaaaatatctaactttaatgtaaaattaaaataaaaacttacaaattcaaaataattgtaagcttttataattaactaaatatgtaatttaagaatagttttcgaactctaaactaagaggatcgaaacaatattatttcagtctaagttatagtaaataactaggaaacaaactgcactttacgtgcggttatattttgtttattgataattaagttacgaaaatatattaaagttgatatttcttttaatagtatgagtaattattctactaattttttcatacaatttcttttctaaaaaaataacaaaagatattttcaaacgttgtagtaaaataaatcaattgataaattacttacttgcccatcatataatttgtgacctaaaaaagaaaaaaaaaagaatattatcaaaaaatataaggttataaaatactaaatcaaaaccaaaactaaaataaaaataaaaaaaaaatattaaaaattaaaaaatcctcatcaagaataaaaatttcgattttttttttattttttgacaaatctgtgaaaaaaaaaaactcatcatataatttgtggtctacaaaaaaaaataagagatattatcaaataggataataaaatactaaaccgagaatagagatctaaaaaaaattgacaaatttataaaaaaaattcattatataatttgtgatttaaaaccccacaatctttgggaaccaactcatgattatataaaggtggaccaagaggaatctaagaaaacatacagatttcttgtgtggcaatgatttaacatatagatgaaagcatacccatgggtaaaaccagttctgtaaactatgagtatacaaaatgtgtcaattgcagaaacatgtatgtgtagtatatgaggttgttcaattgtgtatagatttagaaagaaaccgcataccctaaggatactcccaccagcaacaccaccttttatatcatccacctcaaatccaggctgaattacaatcatattaagaggcaagataaaataaataaataataattagttaatgtataagatggtttataaattattattattatttagatatactatgtagtttatatagaggttttttttaaaaaaaaaaaaattaataattagttaatgttagatattttataaaaattaataaaataatagtaaaatattaatttatagatttaaacactaataaaatattcaaaaaaatgagagaatgaaggagagaagagattgatagtcatattatagtgacatgtcaccgcatacttttcctttgtatatacagaagatagataaatagatagattgtaaacttttattattaacaaaatatataatttaagaatagttttcgaacctaaattgtgagaatcacactaatattatttgcattatacaaaaataagtttaaataatttttaaaaatcacttttaatattatttaaatattataacaaaaatatttaaactataatattttttataagtatattttttaagaatatgaattagtaaaaaaaaataacataattaaatatatattttataaaaaataaaaattattaaaattaaatgtatttataaatttttacgcgcaaataaaactcttcatagaatattatacctaaaatgaattactttgttgaaatttgtgtgattaaggtgtatgaaattttatttaaaaactaattgataatataaggaataacacattatcttatatatatatatatatatgatattttatttcagactaactctaatactttcataaacattcttaataaataaaacttacagcatatgctttatgtttttttaattagtttttatataattggatattttatctcaaaattaattaataatgtgtaaaataacttatatatattttggtaactggcttaatatttttagagtgattctacaatgcatccccttaaaatggatgtattggtgcaccctctacttgtttcggcatccataaaaattatttagtctaatttttttcatattnnnnnnngttatagctatttaagatatccaataaaattttaagaaatttagaataatttacaatagtcacacgtttcaagcaatctattttacacgagtataaaataaaatagtcacgcgtgcaacccactacttgaacgcaattttcggtatgttaaactcttccgaattttttaaaattttgcaggatgtcttaaataagtataatttacatgaccatgaaaaaaaatttgattaaaaaactatttcggatactaaaacaaatagagatgtatcggtctattccttttaaggcgctgcattataaaatttctcatatttttatatttgggcaataatattgtccaataacattatttagtcttttggttatttgactttaaggagttttttattttttttttttctttaactaaatttctttccttttcctgttttccttttgactttgatttatataaatatattaaacaatatatatggtatgattgaatataatttttttttaaaaaaaaaatgaagaatgaatgatactgattacacgtgacaaaaactatccacattaattcaaattaaataaaaacattatccacaaaactcatcacgtggtaataggtctatctatgctttccctctccttatatgatttttgtttctaaggaagacagtgaggttgtatgcttatatttttagttttcagtttttaaattgtttttttaaaaaataagaatagaaaaaaaaaatattattttaaaaatttaatagtgtttggcttcagctttttaagactatatttagattttttttactattctacactagggtgtacgtcggtcggtttagtcggtttattttatattttatttaatccaatataaaaatcggattacaaaaatctaactgcaacccactcaattaagaaaaaaaaagtttcaacccgttcaatgaattggtcagtttagtcgggttaactcgtccaattttttttttctacatgcaattgttatattttagttattgtgataatgagataaatataaagattgaatttaaagttcaaatcgtctaccataaaaaaatatagtagtttgaactttctatttttttaataaatatgtatataaattatataatatatagattatatataataaaaatatatatattaaaaaaaaaaagtctcttaatcgggttggtcggattagttcgggttgattgagcgcgttgatattattttcaacccgcccaatataaagattgggcggattatattttcgtcggatttttcggtttatatttttcgtcgggttatctcggttttgtttgggcgggttgttcaagttgggtggtttacaaaaatttatgtacaaccctattctacactataccacgacataaactcatcccacctcgaactggaccttgaacacgacccgggaccccaaactcaaacccagacctcagacctaaacccaaatcccaaactcgaacctaaacctaaacccggaccccgaaccccaaacttggaccctgaccccgaattcagaacccgaacctgaatctagacccagacctagggtcaggtcagaggtctaacactacagcatatcccctcattagcggcggaccactctgccgctaataaaccccaatttcgccgttataggctattagcagcgaaaatcccacgctaatagtctgccgttattaaatagccgctaataat

SEQ ID NO: 59775 - DNA, 711 bp, Cannabis sativa
  modified_base (35)..(36): a, c, t, g, unknown or other
gtagggtttatttcataccctgagtacctctgagnnatgtaccacacatactcagtacctctccgtacttatgctggtatcacggtactcttagacatcaatcactataccaatacactttataccttaaccgtatgagtgttggtaaagcaactaacattttaagcatgcatatacacataacatatacatacattcagttattgatgtcacacattatattcagttcttaccctctttccaaattcaagtgttttggccgacctgaatagaaagtctcgcgctagatggatgccctaatcacattatgaaaccgcgtaagttacacaaataaaaccctaatcccggtaaacccaaaacaataaccctaggttctgttacactttctagggattacacaaactctagaaatagggaagcacccaaccacaacactgaaatggaggaaaattgagaaaacgaagcatttggggatcctgccctagccagttttgcacatacgtgcaaaaccagttacccggtttcaaccagtccacaccaaatttttcattctttgctcaattttccaccaaatgctaccaaaccttccagagtacctaattagggtgtagaaaacatattccaatcaataaaccaaagaaaaactcactgaatcaatttatgccattaaagacctaaacttgagtttcaaagctcaagcttgctcaactc

SEQ ID NO: 59776 - DNA, 974 bp, Cannabis sativa
  modified_base (55)..(68): a, c, t, g, unknown or other
ccccaaccacgtaaaaaatcttcatctcactttcttacagctctttattataatnnnnnnnnnnnnnntgccgaaaatctcggtcaacacctctattaccagagattgtttggtgtggtcgagagaactctcgggtgtgtatactgtaaagagtgcatatcgattactgcaggagctcaaaggcgagatggatctgttagagacagccgagaacaagttttggaaacaattttggagtctcaaacttcccccaaaaatgaaaaacctggtgtggagagcgggaagtggctgtctaccaacaatgctacagctttgttttaagcatgtaccagtggaagctcgctgtcccatctgctctggtgaagatgagtccactttgcatgcacttgttacctgttctgctgcaaagaggtgctgggacagagtaggaataggcactgtagtgcagcaggatgatacatttctggtttggtgcattaacagttttcggctgctggaaaaagaaaaaaaagagatgctggtggctttgtgttggtcgatttggaatgcgagaaatgacaaggtgtggcaaaataaaagagttggagcggatagcattgtttcgtcagcaaaaaccttccttaaccaatggaaaaacgcacaagattcagtcattgagactacattttcgggttctttagccgaggatgctgctctgtgttgggtgcctccttatgttaatagtgttaagataaatgttgacacggctatgttcaatgaaaatcgacaatttggagttggattagttgctcgagatacgcaaggagtactaatcgaaggctgcactaaactcttccaaggccaagtttctcctgctacagctgaagccatgggaataagagaagttctaagctggatcaagaagaaacgttggacaaatgtgtgtattgagacagattgtttacaagtgattcaagccttacgaagcacaattg

SEQ ID NO: 59777 - DNA, 1337 bp, Cannabis sativa
aataatttttatagagtatcgctagccaattgcaagtcgacacatttagaaggtgctaggcaccactggtgcccaatagcaatgctctagtttaaaacctattataattcacatctctttaatgcttgatcatgctggtggctcattggacacatagttcaagttgctattaaggttttcttctattttattatgaacgactttgtaagtctattattggtgattttgctatgtaagttatatttttatgtaataaattttgtccaattttcctattaatagatattttcttgctctaaaaaaattaaaaattcgtgacattttatttattacattaatttattttgctcagcaaataatagtaatattactttacttacactctaaaaaagggcattttggttaaaatatcacgatatcatgaactttaaaaatataataaaattttaaagttaataaattatgcactgttctaattttactaattgttatataagggttgattttagctaagttatgatttaaggaaagatttaaaatgaatagttgtattatttaagaggattaaatgtttaaatggtaataactgtaattgacttatgttttatttaggatggattggaatctaccaatttacaaatagggggaagttttcgaaaattttgttaatcaatttctaaggatctactttaaaaattaattaagtaaattgagtggcaataataattagaaggactttaatattagttatggtgttggtattctaatccacctatataaacagtaaataaggaaatattaagtcataatactcaaattggattgtgattatattaattagttcattttaattcattttatgggaatttatattgacaataaaatatgagttttactatatataacataatattattttggtgtaaaaattataaatatggaggtttcataatgaatgggaggtgaggacattaatagtgaattgggttattttttattttattattgggatgatactgaaataaataggtagtaaaagttaatgagtattgaatttattgtttttacatgatatagataaataccaatatgaatggtttttttttttttttttgagataaaatggtgacattttattagcaaactaaatcaaccattataatgtttaaaagatcatccagaacagtactctcggtgaacatacgaactgagtgaaaacaagaactgtgagccatataatgggcacccttgttagcagaacgtttaacaaaatgaatctgaacagattttaaagaatcaagcaactctttgcactcttgaatcaccacgccaaaggg

SEQ ID NO: 59778 - DNA, 1186 bp, Cannabis sativa
aaatatcaatttataaatttatgctctaataaaatattaaaaattagagaattaaggagagaagagaaaaatagttttggagagattttacagtgacatatcaccgcctcatatctctcatttatatatatatataaatagatttttaaacacaagtttattaaaattaaaaaaataggcacattttatattcatacccataatacatttctctcttctgttctcttctaactttaccgtccatactccacattcacatctatactgatagtggtccgatagaggtccgatagttgtccgatactacttatttctttttatttttttttttacgtttttgtacataaaaaaagtaacaccaggctaccatcagaccatattctacgtacatttatagatattaagctccatttattaagcttgtcaggaaggtatcgggtcaccattggaccatattatcgggctaccattggaccttcatcttcaatctttactcattttagctacaagaaggcattggaccaccatctggcttggcaaaaaaaactaattttgtaacatcaagttttttttttgaataattttgtgtgacaatattaattgtttgacagtaattgcttataattattttacttgtgtgatgaaaaggaaatgatcggataatttagaaagttatgatattttttagactgattaatattatggtattattcaaagttcatagttgataaatcatctagaacttgaatatattgtacggtgatgaatgaaggaagtttgaccaagtgtactttagtcttatataatattacatagtaattaagtaatggttagatgactgaagatgatataaatatatatattatattcttgagcattgttattaggcaccagtggtgcctagcacccttaaaacgtgtcgccttgtgattggttagcgatatactccctaaaagctattttattaaactatatgggacccgatacttaattagaccaatagcgatattgacacgtaggaaagtgcttgacaccactggtgccttttagcatttctctatattcttgttaatttgcgtggtataactaaatgatttaagatatttataattgattgagcacaagtattgatctttttattcttgttatttttgttgtggaagtcgatgtgcagagagagaaaaca

SEQ ID NO: 59779 - DNA, 2002 bp, Cannabis sativa
  modified_base (1958)..(1960): a, c, t, g, unknown or other
atgtataaatttttaaaataattttttttttgcacattttttgtaattatgttgtttttgttgtacatttatgaaaaaaactcttaaagaaattaaatctaaaacacactaacactaatcaaaatccaaaaaaaaagtaataaaaataacaatattttcattctatttatctataaaaaaaatattatgtttagagaaattatttataagattatatttatttccaaataaatatctttaccatctggctttaaaagtgaattatggatcatacaaaaatttcaaaaaaaaaaaaaaaaaaaaaattatatgtgagaaattaatgtgaaacatctttgattaacttctcaatcatgtatttcttaaacttgcttctggaatatgaattattattcatagtataaacttcggcttggtgtcatttagaaattacattggtcaattcacatggtgggagatagagatgaagagaaaggttgggtgataagagtttcatgaaaactcttgaatagactaaatcaataaatttaattattaaaattattctttatcatattttatcaaatcacacaattaaatcacaaagaaaactctttatcaacatatcaaattgatactatctattatattacgcttagttttagttttttattttagataatttatatatttgataaaaaatgttattagtgatatttttttaattatattttagttaattaatatttataaatctaataaaaaattaaaaagatgagagaattaaaataaaaaaaaataatgtaattggagtaattataaaatgtcatgtcaccgtcctatttctcaactttatatatatatatatatattttatttttcgttagatttaaatcgctattattcacagatgaaaaataatgtatatacattatataataatactattattaatgaaaatttatttaaaaaatagaaaagaaaagagaaaaaagatatagattaatattcagttattaataatttagttattaatattcagacatttgaaaatttgattggaagaccgtagaaatgagtaaacaaagctcctagttatggtactgctacaaatggtacgaccaagcctgaggtaaacattgcctcaactttgaaatccagaaagaagaagaaatagaagaatagcaagaagcctcttaaagctgttaacacggctaataagaaaaagactgctaatccaaaggcaaagaaaaaaggaaagtgcttctattgcaacgaaaagggccactagaaaccccggtgtcctaagtttttggcaaagaaataaggtatttctaactttgttataaattcatgtgttttagagaattattatttccttgggttattaattcggggtctactaaccatatttattttcttcttatttcagctccagctacttaagcttggattgctatcatagcgagttgagtcagatgattggatagaagtgattacgcccaaatttatcttcacaaagcggttgttgtagtatagtatgggcggtcgtgtccacagagagatatcttataaaaaaagtgattagtagaactttaagcgcaaaaaaaaaaaaaaaaaagtcgttggtggtttttgagaaaatattgaaaataagattgattgaaaaattcaataacaaaagtgataaggtttcaagaatcacctacatgtttggattatttatttggattttgattaacatatataacacaattaaatcgttcactttccaaaaatttaatcggaaaataaaacatgaagaacatatataataaaatatattcgagtataataattctcacattagcatcatagaaaataatcttatgaaaaatctaacaataacaatatatcttattggcaaaaatgcaataaaagactaataaaattataatatcaatatatatttatcctaatcatattcacatagaaaaagnnngactatttctatataatactaaatagataaatatattgatat

SEQ ID NO: 59780 - DNA, 979 bp, Cannabis sativa
ataaattaggacaaaagtcatttacaacaacagagtatataggtggaggacatgactccaaccaaaaacaatcttcatccaactctagagcatacttggccaaaccatgagcagccatgttggcatcacgtttgacatgagaaacagtaactctagggaaaaaggataaaagacatgaaatatctaaaattaaatcatcaaaagctgagaaagcaggaggcggattattcagtgcattggaaaccaataaagcatccgtctctatgttgtcaacatgaatttgcatttgtagtaaccaagtgaggctatgaaacaaagccttagcttccatttcatgagatgcaaaatttccaacaatgggtttggagagggcagcaacaacccaaccagcagcatctcggacaatcgctcccacaccaattacatgacgactagcatttaaggcagcatctacattcagcttataggaaccagaagaaggaggtccagggaggcacaggcagattcggcagtgcaggaacagcagaggtggagcgggcaatggactggtttggtggcttgatttttgcttgagctgctataaagttttcatagtaagttgctgcaaaaccagcaagatgaatagcagttctggttcgcttattatgaactagttggttacgctcataccagatgcaccaaaggagacaaaagattagacccaaatcagatttgttgtatatggtagaaagatgtatgagataatctccattagtcatcaaagaagcatgcacccagtcaaagttaaaaccagcagctcgccataccgaacgtgcatatttgcacccaaacatagcatgaccaatcgattcccacgcaaggcgacagaccgaacaagaagcatcagtaatgacctttcttctcaccaggttgtttgcaacaggtagtgcatcatgcatcaaacgccaagcaaaaatcttaacttttggtggcagattta

SEQ ID NO: 59781 - DNA, 1220 bp, Cannabis sativa
taattactgaaatgagtactccactatttatctcgtttagccaagctcaaaggaaattatcattttacttttatctatttataaaagctataaattttgtatctatgattagcgctcccattcagttgtactaccatgttcccaagatgtaagtattagaaagatcaatttggtcagctttagcgaacaagtcagaaaacacaaataatacaattgaaccataacctaaccatctcaagattgagatcattgatctaagatcaactaagtgatatttacttagaaagatattacggtaagtttatgatatcttttcaatgtaaatattggtccagtccaatctatagcaatacgttcaatacaagcttactttaccaataccttagaaaagacataccactatctaagtgtaagtaaacaacattgttgattatcatatcagtggaaattctgtgtactgataaattataggattaatatttaatcacataatcttgattactttctaatgtgtagacaacacaataattatgaataacaatgtgataaggattttgaaaaatttataaatcgaacaaatgaccatgaaggaaacatgtgaactaagcattatatttaaacaagtaataaaataattctgttcctttattgataaatgaaatttaagaaaacattgaaatacaattttagttagagcacaaaacccaacagttcacgatgcagagctggcaactagcttagctagatagtttgttgttagaatctatatttcttccacattagattttgaatggatatgaacttaggtgacgtttggttggaggtaataaaatggaatgaaatggaaatgaatcaatctttattttattcttttgtttggttgcatattaaagtattgaaatgtcattcacatagaatgacatttccaccattttggtagagtgactattctattttaaaatggaaggaaagaccattccaatgcatgatgagaaaaaatttaataatttttttatcaatttttttatgcattttaattttattccattccatttttattccaattcctattctcattcctattcctattcctataccttagttggtaccaatgtaaaagtttattttgagtttggattgagattataatactaattagtaatttctaagtagtttcatttgattaggtttttattttcaaaaaagaaaagaatttgtat

SEQ ID NO: 59782 - DNA, 3814 bp, Cannabis sativa
tcatagaaattgagctgagaaatatttcttcatttattcttgtttttaactaaaataaatgttttacatgttaacttaattaaatgttatgtatttattacaaacaaatttacattgcccataaattgattatttatttatttttgaaatggaattgaggtagtggtgccgccattaattaattaattatattatttagattttgtttaatgaaaatttgttatttagatctttgaaaacaaaatattgtaggtttcataaataaatatgataatataaaagagaaatgttaaagaatatctaaaaattatcaaatttcactttttttattttagtaaagattagaaaaatcactaattaattataaagcgctacatatgctaaacaccttgtggtgtcctgcaatgttcaaaataaaataatgcccttcaacctttattaatcaatcaaaatatatagatttatttttgtctcctctattaatatttcatgatcgtattcgaatttacttaacttgacaaccatcaattaataagcaatcccattagaattggcctacgaccaattaatgagatttcaaaatgtcaaatttgtgaagcactacatatattttaacctaactctaatacctatcttatattagaacattgtctaagtgtagatactttttattcatatataacaatatagaaaatttatttttgtgtaacttttagtgttgatgattggaatgaaaaataatatgatgctaaaactatatcatttttgtgttgaactaatacaattatagctgttatgattggagttgttgggtaagaatggtgttttttgtatgtgtttattccaaattccctaataatagctaactacaagacgaggactttagataccgaagctagaaaacaacctacaatattaatcaaataagctttgtcatatttggacaatttttccttacgtacttttcaattttgaacaagaacatataatttcttccaaaataataaataaattcttgaagaaaattatttagtcaaaagaatcaaaactattaaaattatcacgtccaaatcattagggccatgaaataaataaatcaatatacacgcactatttatatatattaatggttctattgagtaatcaaattttgagaaattataataaatgaccaaaattataacactacgtaaataagtaaatattgtcatttcaaaacttatacactatgtttggtcggagagagaaatgagtacattgagtagatgagaaaaagaagaaggacagatgggagcaacaacaaatctacttgttcgacataataatttcctaaataaatactattcctcctattttttttttttttttggtaattatccttctattattttaatcattccaacaaacaacttcaaatgattccatcacaaggtacacaataatctttcattggtgtagatcgcaccaggttcgttagcttaagatttgttccaacagatgcaggcaggatctgaggagcatgctctcccacctacccatatttgtttaaaatgtgtttaactataaataataacactctaatttttatttttcacaccactctatttaaatgttctctattttttttaatattttataatttattttttattacgtacttcaccttaccttcactaaataataattaataataagtaaatattttcttctattttttaatatataatcatatatataataataagtattttttttaacatgaataataagtattttttagttatacatacgatgggttcaaagtcaattatatttgtatcatgatttatgttaggaattaaaaaaaaatacctaaaattatatattattacaattttacgaattatgttttatttttacagatttaattttaattacatttttatggaatctcatgaacgcaatatgtaaataacattatgaaaataatataaaagtaatataatgtatttcgtgaaaatatcgtaaaaactatactatccatatttttgttaaaaaaaggattatattaaatattgacaactaattaaatataataagaagaaaaaaaacttaacataatcataatcaattttttttttaaaaataatcaatcataaaattattttttttttttaaaaaagtattataattaccacgggaggcgcgattatattgtctaatttcataaataaatactctttatctttccatcactttgtcccttttaccaaacaacttaaaatgattgttattttcctttctctccctcttattctttatcctctctattctccatcattccttacaaatatagtcatagagaaataactattttacactatttattacttaaattgttttttgccacataaaatttgcatgtcttgtaaagtctttagttaatatatttggtaaaaatgacaaaataaattatatgaggtatttttgaaataaggttaagaacttattttggtgtgaaaatatttttttaaaatcagattattgcttgtttagttaataaatatttagttttcttatttagaatattttttattgactttgtattattacaaaaataattgagatttattttatttattatgatctatttaatttcttaaaaaaccatgtacatgctgtgagtttaatgtatattttcttttttaattataaaggaaacttttgttgaaaatctatctacatacagtgaatctatctaaatgaattaattaaatagattttaacatttttttgagaatatttttcatttatatattatttgattatttttttacttgtaaagcacgactcgtacgtggtatattaattgataatatattattacttatgttatgattttatatgaaaagaataaaatattttattatgtaataaatattgtatttatatatgatatttctttataattaatttattttattctttttctgatatgatatatattaatttctccatctaggttgtgtgatatccaagaaaaatttgtggggatgaacttaaatttgatggagtaaaataaattcacagtattgactaaacatattagtattttgtctgcactttctaaatctgttcagacataattctgtcatttaatgagttttttaagaaaactaattaatatttttgtattcagaccttttgagctcagtcttttatgtcatttatcactataaatatgacctaaaccagtaacaaaaggtttctctttcacttattaatttcttatatttttagaagagagtgtttcttttgtaaatgatagttattctgctatttttggtgagtttgtgtgtctttgtgattacttttatgtgaagaaaattccaaagaacataaagaacaaccttagggctaaggttcatccaagtcttgctttgggaggaagcaaacaccactatcttcgggagaagatttctacaagtcttggttaaggaggaagcaagcaccgctatttttgggagaatatttctacaagtcttgcttcaggaggaagcaaacaccgctatctttgggagaaaatttctacaagtcttgcatcaggatgaagcaagcaccgctatctctgggagaagatttttataagtcttgcatctggagaaataaatcattcatcaagtaattttaagggagttcaaaccttggtgtagattcattcagcaaataggagtacaccatgcttgtgacaaaatctttaaaaggagtctatgttttgtttaactcaattactttgtacttgttaaaatttgactaataaatcttatctctgggc

SEQ ID NO: 59783 - DNA, 1375 bp, Cannabis sativa
ataaactactaaagcaataaaagaaaactgaaccgtgagatgagctgatcggtgatgatgattgtacatgccaatatacttctttaataatagtaataaaatcgtaattataaagacttatgataacagaacaaaaatagaaaataaattgtgcaagatttaaaacttgacacaagagaattattcgtggtatcagtgttctttcaaaaactactagtccacgaggccacactcaaagaataaaattaattagtaaagtatcaaagattacaaaaactattgactcaaacaaatttagactccgtttaatgatttgtcttaaccctctataatccaccttgctaatctacaccaaatagtgaacacccttcaactatttatgtgtgcttacttcttcttgaagtaaggttttaacaaatcttctcctgaagatatatgctcaatttctcccaaaatgagacttgaaaaagtcttctcccaataaagacccatgtatgttcaaagcttctcttcaacctattctatgaatagtatgagatcataacaagaaaaccaaaacctagttcaacactctaggtttttacaactgaaacccacttctcacaaagatagatatgaaaataggagactagaagagataaaaacgtttggctgctctctagttcctatttatagaacatagaaaccctagagacaaccacaaacatgtttccccaactgtacaaaacttttctaaaaaaatccctgatttgcagcatcaaatttgaattctactacagtagaccaagatcaaacaggaaactttcaaaaatggattaagatcacgatttggtcttcaaaacttacgaaataaagataatttgatttgttatatacatagcaaaaccaaagttaatacttagagaaagggaaagccaagtttttcaaaaatagacaactttccataaaaaaattcctttacttataagacaagtttcctaaacaaaaaatactagctgtaaataaaattttccttaaaggaaaagaacaatcaaaatcaccacaaaattaacataagaaaattagcaataaattaaataatattttgataactaaattattaaaaaaagacataacaaaactcaattaataaccaatgcattaattgggttccatttctcaattgcattggtttttactaaattgacacaaaataatatttttttttgaataaaattaggatttttattaattaataaactcgttcaaaataataggacgcacttcagaggaacaaacctctaactgaagcacacaacctatagagaaacaagagtctcttgccaagcaatgatccaacttgtttgcagatcgttttacaaaacacaactcaaca

SEQ ID NO: 59784 - DNA, 1564 bp, Cannabis sativa
  modified_base (974)..(976): a, c, t, g, unknown or other
gacggtagtaaccaaacccgaagagaagtcccgttaatttggaaagggcttaatgaaaacttatcgctggtcgtgttaacatctttgggatgcggaaggatcatgctcgttcctggactctaagaagtcctagaacaaaggtttgactacttgacatccggataaggactctttgaaatgatcgcagatgacgactcctacgcgaatgcggatggccacctcagatttacatggaaatcaacctgcagatggttacacctttttctgacacaaaatcaaatcttgtcccttgtgctaggccatggtagtgctcgtacgtacccctggacacacattttttcctgacagctcttctatagggtaatttataaaggagaaacctttggcgagacatgtccctgatccagacggtactaccaaccatccttgcacagtgcacgatcaagaaggctctccaaggccaaacggtcaaataatttgacgttttattttccttcccttgcaatggactgtggtacaaaatcctaggtgggtaaagggaattcccttacccacacataagcctataaataccccattttttttaggtacaaagggtgaacaaaatttctacgagctgaacctctgccaaaattcttacaagctttcttcttcttcacgagaaacagaagaagtgcagagttagggtttatactgtatacacatacggtattatcaaaatagttacctaaagggccaatacaactaactcgtagactagggattattaatgcctgaactacgtaaaaattacttgtctactatttattgttttatttaattttgaagctctatttattagtttccaaaaatttcagtaaacaagactcctttttcccttgatcgagttttgtcccactgtattttatcggcgaagtttttaatgagactgttattttagacatgcaaaggagaatgttataaatattaataannntatggatgtccaaatcttttatttatcaccattaattgtaattaatattctcttttcttagtttcttaatctttgactctcatatgtgtataaatataaaattatctattcgaataacatcctaagaaattttttatctctattattttctctaaattataatattttatagagtaatttgcagcataaatacctaagcttaactcttagttgtaaataaatatctaagtttaatttttagcggtaataataatacttaaattatatttttaaaactatgtagatacccgactgttaaatatcaagtcattatctacgtgtcatttaatgacctagactaattaagaattgtcacgtgacattttatttaatacttaatattcaggtatttacagaagctctaaaattataacttagatattattaccactaaaaattaaacttaagtagttatctgtgactgaaagttaaacttaagtatttattcggtaaattattgaattgtataataaatttaagtaattaatgcgctaaaaaaaagttaagcatatcctcagatcttattagctgggaccgaggcgcacgcac

SEQ ID NO: 59785 - DNA, 1056 bp, Cannabis sativa
ttttaactttttttaaaaaaattacggtttaagttattacagtaatttttatgtggatttagattacgatttaggttgttttattaattgctacgtgtgttgctatgtcgatttccgtaagaatacaaataaaaattgctttaaaatgtaaaaataaaaaaaaaaaaatctatttcatatctaacttatatattacaccataaaataatttttctatttttattctctatattatttaaatattatatttttattcattttcaatacttctctcatttttaataatatttaaatttcctcgttcaacaaataatatccctagaatcggtaactgtttggaaatttggttaccgattttagtagttttgggacctttttcatgttttatcgatataattaccacgctatctattgatagggaaacttctaattttaaatttaagttcccgaaaagtgatttagcatatcatttatcagttttatgtatgttgtgactcaggggcatgtaaatcatcgagcagtagtttccacttagttgaccaacacacctgaattcaaaattaaggtaaaattagtataataatatcatatgtgattacatatttagcatgtatatttatgaatgtctgttagataccatatcaataatagcggtattagtgtacatagagttacattgaatactgacagatatatgtttggcatagtatagattgacgttatcacatcagtacgactaaagtaccgagtatagactgatattatggtcaatagtactgtcgtacgaacgttctagactcacgcaggatacgattataattaggtgtatgtgcccctagttataatccagcgtatgtgtatgttgtaattatgctttttttatcgagtctgttgactttagatattgtttactagggttgtttgaaaaaatttgtaaaccgctcaacccgaataaattctccaaaccaaaccgaataaactgacaaaaaatacaagccgaataattttacgaaaaaattcaaacctcccaacaaatatattgggcgggttgaatat

SEQ ID NO: 59786 - DNA, 1589 bp, Cannabis sativa
  modified_base (1421)..(1425): a, c, t, g, unknown or other
aggatttttaacaaaaatgaaaaatcatatattgtattattttagttggttcagtaggaaataaataatgtataatgtaatatttaatttgaatcttatgggctgaaaaaaaaaatgaatttggagattatatatcatcactttttaaaataaatatatctttttttgtttcattatttatatatttaaaagataagttttatttaatataataatcagtattattgtcgagagtcaaataatatatgggttgttaaataatgagaatttcttccaactaaaaactctccttcggtagtgcataaaaaaaattattattgaataatgatggtaacacactcaaactatatctaacttatacataatgatatatgtaattaatctcaatcatataattaaaagtaatataaccccgtatagttaaaattaaatacacattattatgtgtaaaaattgtatatagtttaagtgtgtctctagcattacttagagcatcttcaatgtaacatctttccacattatccaaaaatataatattttattttatctcccttttatattatttttgacacttttacttctaaaagcactctaatagtataacattcttcaaaaatactataattatatattcatataaataagcataacatacaatttaaatttcttaacaaaaaaaattacactaacttttaaaataacaaaattataattaaacaatctaatataaatttaagataaactatttcaaaataactcattaaataaattaattaatttactattacatatattttaaaacgtaacaaattatatatatcaatgttattaaatatataacttttttaattattattaaaattttacatgtttcttaatttttagtaacaataattttttagttttaattttttattaaagaaataatgatagcattaatactactgcagagcattcacatagattcttaaaatgacatttttttccctctaatgttatagcattttaatattttgccatttcatctatccatatcagtaagtatcccctaaatttatttttactattagagatgcttttatacttcattcttattttaagccgtgaaaatgaaaagtgtaattaagacctattaattatctttagggtgtttggaagtgactatataattactaaggtagtaactattcattataaaataattacactttattttaaaatacaatatatgtttaacactatgtttggtaggaggtggagataggtggatggaggagggagagtgatggaaggagagactaaatcacttgtttgacaagagggagagaaggagggagaggagagatagagggagacattctccctctaaatcttcaaaatttaatcccttcaaatttggaaggattgtagaaaaagacaannnnnattttgcaaaatacaataattacctttaaaaaagtaataaaattttatttttaaaaggataattttgtaattctactaatcaattttttcttcacccttcatacctcacatctaataccaaacaatacaaaggagatcaataatcctctccatcttctctaatc

SEQ ID NO: 59787 - DNA, 871 bp, Cannabis sativa
ttatgcatggaaaacaaaaaataaaataaaaattatataactataactcacgtcataggtatttccattttgaagaataaaatcccatgtaattgatacgttaccatagggatctagaggatcatacccatctgtaatatattcatattttgcaaataaattaaagtattaatatattgatcaaatataaacaaatgtatagttcatcatgatagtaagaaacaattatatatacttacaagaaggtgagctgatgagagagaacaagatgaaaatcaagattactgccacgcccattggatttttataaataattataataaataatatatctcacttgttacatatacccaactttctacgattttctttcaccttgtttggaagaaaagaaaagaaaaaatatgcactattggtttctgtttaagtaaatgtgacaaagagccagaagagagatcaagatttgggaaaatgagactgagaaaaattagattttcacttgaaatgtagttatatagtgttaatataagggaaaaatcagattagaataattatatacagttaactaaggtatgtggtatatacgatgctaaacattaattaaatatttttaaattgtaataattttattcatgaattagtgtacagtgagatccgtctcatttggctttcattatgggaattagttggctttgtttttgtattttttttagacagaatttgtttttatatcttaattttatttacttttatatattatttgaaatattcttcagctaattaatgtattattgtgtcatatctttattatagtttcatagtgtccaggtggtgtaagtcctttgatttttcaatgaagctcttattaaca

SEQ ID NO: 59788 - DNA, 699 bp, Cannabis sativa
ggggtttagttttgaatgtatctcttgctcgcgtaatcatatctcgggtttagtgtactctaaccctccctcttccctgtggcttctttcgtgtgtctatggccctccctacatgaatgctaagaaaaaattctggtctgagttcttgaaaataggagatagatttggtgggccctggctaattttaggagatactaattttgtcctaagtggatctgaaagagaaggctcctcaggtcgggatcccttcattccgattatttctaatcttattgagggcagaggtcttatcaatatgcccatccaaggagactttctgacgtgggataaccatcggtctgggcggcaccatgtgaaatctgctctggataaaggtcttgtgaatggggcctggattaagttatttcctaaggctatactctacactgtccaaactagcaattcggaccaccgccccctgtgtcttctatctgagggcatggagcccaaattcaagagatgcttcaaatttgaagaaggttggactcgcgacgctagaagtaatctggtagttgcccatgcttggaattcagtcaaacataattgggcccctgctcgcgtttataagaaggtgggtgccactcgggtggccctcctgaattggaatcgttcccagtttgggaagttggatgtgaccattaaagatcttgaacaaaagct

SEQ ID NO: 59789 - DNA, 1189 bp, Cannabis sativa
ttcacacatattaatttagaatagaagaagaaaatagagaagaaaaaaatgctgaaaactctattgagaaagcctccaatattgatttttctctttaaaattcgtactctccttcctgaaaagtattgaagtccacttcctgaaaacttatttttctcaagattcgaaggggtgggtcgcggcatgggatttccatgactaggcatgaccccctttatttgggtagtgagtttcttgttgcattgactgatagtattttagccataactctctcgatattgctcgaaattagacgattcaagatgttccaaaaagataaaagagagatctagaacttttatgttttgactttatccaaaatctgatcagaacatagtctaatttaagcttgaattttcagctttattttcttacacaatttttttctattttatagatcatctttttgtgaaatttgaccaatttatacattccaagtgtcgaaacctgaaattgacgaaaacaaatgtaattttattccaaaaaataataataaagaagaaaattaactctaaaaataacataaataataggctaaacatatcctaacaaccagcatcgtttttgtactttttttgtaacaaatcaggtcatatggcacgcaagtgtcaaaacaagtctagttctgctccgcaggctaacctaattgaagagttttcttatacaactatgatttcaaagatcaacctcattggtggaacaaaagggtagtggataaacactggcgcttctcgccaagtctgctatgatcatgctatgtttaagacatacactgctatgaccgaggataagaaagtattgttaggaaactagcacactacaattattgatggtaccggtgatgtggaattaaattttacctctaagaaaactgtgaaactcataaagaagtcatgcatactccaaagatgagaaagaatatagtcttgggttatctcctcaacaaggagagttttacatgttggacaccacaacacgtgaaaacgtaattattttattattgtaaaagcaattacaccaagacttgaacaatcacaatacacaccaagtactcactcttttatttactagacactcacacttaaatgtttacttgcacactatttgatgggacactcttttagaattttgttgggacttagttgaatac

SEQ ID NO: 59790 - DNA, 1635 bp, Cannabis sativa
  modified_base (829)..(831): a, c, t, g, unknown or other
  modified_base (991)..(993): a, c, t, g, unknown or other
aacaaaagcattacctttgttcgatttgtctagaagtctgggacatctttcttcctgatgtctcttctcattacaatttgaacattgaagagtactactacgttgtttcattatttgtacttgaagaagaagcattgttagaagcaccatacttaatttgtttcctcttacttaagtctgcaaaactggagggtggcctccttgcaggcaaactccgctcgtaagcacgcaattcttcttctagcttatctacgtcagatgagttaaaattgttgaacatgtaagatacaacaaatccattatactcaggaggaagactattaagaatgaattgaacccattattctcttgataaatcaattcccggtgaatttgctttctggaacttcagattcatcatcattaggtgtgaattaatgctctccaggaagcattttcacactatagagttcatttgcaaaggcatgttcaaggagaggttcggggtgtgggttatccattttgacactacaaatatcaataaacagacataaatcatttggttcactcaaattcatacacaagttcagaaaataacaattaagtaaacatgtttgtaaaaataccaaaataaaacatatttaattattttctaaggtttctaacaaactgatacagtgtcccgtttaggcgacagttaaagatatcatctactgaatagagtagtcaactcatctaaaatgaaaaacattctagcaaccttttattcgatcgaaaagagaatacgacgttgtcccatttaggcgagagtcaaggccattcctatttcatgagcttccaccattatttnnnacttttgtaagtcttactcttagcatccaccattagggtggatattactaagaataaaacacttacaaataatacttatcttttgagattcaacggtgttaaattgctaatgaacgtacatccattagggatgattactcactaaaacaagaactatgtnnnaccaacaatggagatcgaatgttctttgattaaagctcattatttaaaatatatttttatttaatttcttattttagtctatatattttaatactgaaaattacttaatttaagttgatcccaaattaatcaaaaattaattttcaactttaatttaattttctaattaattttcgaaaatccattatataaatatataaaattttgaaaatgattaaaatataataaaataaatacttgaaaaatatgttatttaagttgttctaaatcaacaaaattttcaacttattattttctaaaatttaattaaatatcaaattaagtatcttgaactaatcaccttaatttgaaaaatattccatttaagttgatccaaaattaacaaattttcaacttaaaaaatatttaaagaatatctgaataactaattttctagaaaattctacttaattattgatttcaaaaatattctaatttaagttgatccaaaattagttataataattgattttcaacttaaatatattctatgaaagattaaataattaagtatctaaaaaaatctaattagttataacttcttaatttaattaaatacagaaaaatacatatagtttttcttgaaaaaattcattaaactaa

SEQ ID NO: 59791 - DNA, 1899 bp, Cannabis sativa
atagtaattaggtattaacaattgggtaaacatatcaacaggattttcttccctatcttctcattttgattaacttctatttgtctacttaaacttcttgaatttttattctgtttttaatcttgaaaaatattggtttgccaaatagaatcataaatttagtctagtggtattcaatccaattccctgtggttcgacctcatgtgtgtgagtttactacttgattacatgcacttgcatattgttcatgattttcgtaacaccaaattgtcactgctgggctgacaacggctgggcgtaccaccaacgccaccaccactagaggcgaaactactaacggcactgccaaaagggcaatatcgaaaactttgccccaactaataaaagcacgaggcaaacccaaaccacttggggtcctggcatctttaggccccggagagaaccccatgtggatattgaagagattgacccagagatggatcaattacaagatgcgatgatcaaatgcagggtcaagtccaaactatgcaccaggagtaactcaaactagagcgtccttaattgaaagtctcgctaaccaaaggagggagctctaatcttggttagaagatcatgattgtgagatgagaaggtgccaagacgaccaagatcgtcgtactcaagaagctaccaacttaatatggagctatttcaaccaaaacactcaaaggttgcgtactgacgaccacaaccaacaagtaccttaggaccatcgaacctatccacaagaagtggacaccctaagaaactaacatgagagggtagtttacgggcttgaggaatgtccaaggaaccaagagagggctagaagttacccctctaacagggttcccaacaacaacaacaatcgaccgctccctgcaaacgagcaagtcctacccggtcatcatatgggacaaaatgactcacgtaatgttcgtctaaggtcgagcggtaggggaaactccaggaacaacaatagtgactgtggtggaaacagtggaaggacagcccagcaacgggtgtggcgatcctgtcaaagcgaccaaccacgagaaggcaacagtcagtcgagaaacgataagcctagggggagaagggaagaccccgcgatcaatagtgaatactgtcctaactaccctgatggtcatggcaataatgaagctgaaagtcgtgtcaacgaccaaccaaacccagggatgaaggggttgccaagtcgtagggtcgtatgccctaataggtagcaataacattaacccaaaaatctaccccagagaggtggaaatggcgagatacctctctcgatcgctaaaagggttgatcgccaaaatgcgggaggaaggccatgaagatttaggtcaatcttttgaaagtgtgagaccccaaggaggtggagaactttggaatgcccttaatagaaatagggataattgtggttcaaatatcgtacacttgaggcaattcaaggaaaccaagttaatgcgggcatgaatgctgtccaatcccaagcagccatggatccggtgatccaggctcagttggatgagttaacccgattagtcaaggatgttactgcactgaaactcattaacttaaaactggagaggaggagggggtctgctttctcacaaacgatcaataacctccccaaactagtagggtgttacatttatagcattgatattgtaactataacaaacatcactaataaaaagattgattcgatacatatattttctggcgcgaatgttgaaaaagaggttgaaatagaaagttgatggtagcgctcatcttccgcaacatacactactcaaaaaagatttttagtcatcaaattcctgatcataaaatttattgtacgcgttgcccgatattggcccc

SEQ ID NO: 59792 - DNA, 783 bp, Cannabis sativa
tccagagagaaggcaccagctgaaatggtcattgacctctccgaggaaaaaactgttgtggatcctcctgtcccaaaaatgactaagtccaaggactcttgaggggtagctcggacaggccagagcaggcgaggggcggatccgagttgatcagggcccctactccgcctccggtactacagccagagaccaaatgaggcaaagacatgctcactcactacatgacttggtcggtccttgaggtgaacgagcagctggccggggcgaacaacgacctttctctggagctggtgatgggaggagtcctgaaggaatttacaagggtatttttttttgacagtttctttttttcctttttcacttagtttatctcttaatattctttctctgtacagaccggtctgaagatggcttatgcttattcccaagctaagtcggttgcctctaagaatgtcgccctttccaacaccatgcgggcggaagtgaacttggctaggaaggacgccaatgaagctagggttcaacttggggtcgtttcggatggagctggcggaggtcaataagaagcttcttgctgctgagaagaaggtggccgaactgaccaaagatcttcaagcctccgaccagcttgaagcagccattgcctccttatccaaagaagtgaccagccttcaagaagaaagggaggttctctgggctgtcttccacgggttggaagaggagaagaagaccaaggaggaggagcttaacgctgaggtcgagaagtataagtcagaggctggg

SEQ ID NO: 59793 - DNA, 3250 bp, Cannabis sativa
  modified_base (2636)..(2654): a, c, t, g, unknown or other
gagtatcgtactggtcttcaaagaacttgtgatctccaaaaaaaactatttgtagtgataaaagagaatgcattcaccacatgattcacattattgtataataaggatttaaaatatgcatatatagaatggatactatcatgcatatatttaatcaagtcatgacacattaaaatcttctataataataaatattaaatgaaagaaagttgtgtgttatgtatattctttttagaaaaaaatactataaattgatcatagaaagtataaccgtatagagaataaatgtaaagatacatacatatatgggaaaaaaaatgttaaaaattaagtactcataaaaataactaaacaaaaattgcaaactattgatgcaccaaaaagaataaataaaacttttacctagagatgttgattgatatagtatgacataagaatgaaaaaatgaggaaaaaaaaaataaaacctacactatgaaattaaagtgatgtttatgtatatatttatagggtatatatttataggttaggtattagataaatattttaattttaaaaaattaaaaaaaaaaaagataaaaaaacaaatacgtatgagaaataataatatataatacaaatcaaaagctaaaagtgtgatattttaaaaaaccaaaaaaaaagaaaaagaaaaaaaaagtaaatacgtgtgaaatctgtttttttaaaaataataaaaaatatcaaaagctaaaaatgtgatgttaaataaagctaaaaaaattatatactcaataaagttaattaaataattattattaaatatagattttgaaattattatttatgaagttaataaaaaaataaaaaaaaataagagaagtaaggaaagaagagatagttagattaaagtgattatagggtgccacattaccgctttatacttctctttatagaacctaacttctaaaggtagggttagacgcacaaaaaggcagatgaagaaaataattactcataaccaaaatttcaaagtttaacgtacaataataagaattaggaaattttgaacccatgttgatcgtatacgtcaaacatgcttattttcttgtcttttattatgctgtaatttttaatcataatattgtattaattattgttctcagaagcttatatagtactatactacccttaatataatgagataatgtagctgcttgcgctcatcatggattggttgtaattaatatactaagttcatggctcgtatacactactttcctactttcttttcaatctgttttagaatgacaaatcacgacgtttcaataaaaaacaaaccctaatcatgaaggttcaccttttttttctttcttttgaaatggagaaaagatactttgttgtagctagctagggagagaacaaagaaagaaagactcataaaagctacacttaatttctttatatatgttattatatgcattgtaaagtcatctcttttattaccttaaccatgaaggagcaaagcaataagctagtaaagaatcttaaaagctgctttagatatttctttatacacaatgtaatgtatttgagacttgagagcatgggtaactgtgtggccaacacaattccaataagaaaaagataagctctctataatttcaatatagagtgaaccactcctatattgttgatgttaatgatgtaaatgaatatgcgtaattttttttttaagaaataaattaatttaatttgaattatcaatacaatatatataagttacatttttatagtgttagccactatgatgcttttttattttaaaacaataaatataaattgtcaattttaaacccttttattagtattattagacaactaatataaagattcatgatgcacaaatttgtcactaatattaatcaaatatattcggtgcctggcaaatgtatgttatatatatgggttatatatatatatatttatatattaatgatgcaaaatgcaaaaagtcaataagaataaaaattacacttaccatccttaccaaaaaaaaataaaagattacacttaccataaatatgatattacataatcaatatgcagatcattcaatgattcaaaagtttaaaaaattatttatattaagaatttttcataattagaataatctactcaatttaaaatgcagaaaataaattgggaaaaaatggtggccgaaatctgcaaacaagagcatttgatgacctatgtagtgcaacaatgttacaaagaaatgaaaagatttatataaccaactcctttatttattgttaaggttttagcaatattagatattggaaaattctttaatgtaccttttaaaaggaatgcactgatatatttttatgtattttggtatttgaaataattttttagttaatttttttctcttagttaatttttttctcgttataattatttaagattataattatttaagacattctaattatttaagacattctgcaaaattttaagaaatttagaaaaatttaatacatcgaaaataggttccaaatattgtgttacacgcataactattatattttatacacgtgtgaaatagactgtttgaacactgctttctctattgtaaattatttcgaatttctnnnnnnnnnnnnnnnnnnnttaaataactataatatacacaaatatgaaaaaaaaaattggactaaaaattttttaaataccaaaataggtagatggcgcatcagtgcatcccttttaaagaggtgcattgtaaaaacacacttagttataaatcataaaaaaaattgatagtacattcttttcaaaatgatgttttgatatactttttatcttttttgatgtataaaagaatgttttagagtattactttatgattatctacgttgtaattttttttaagattatttataaatttttagaatatttcgaatagtttatagtgcttaaataagagttcaaacaactttttactatacgtaaaaaaaaaaaataattacatataaaataaaatattgaaattttattttcaatacagtaaattatttgaaattttttcaaaattatacttctaaataattaaaaaaaattactaaaaacagtgtattggaataattttcttttagagtatagtatagaattagaattgatagattacagactaaattataggtacagatcaaatagttgatacaaattaatgaaacaccacgtatctagttcaaaaaaaaaaaaaa

SEQ ID NO: 59794 - DNA, 2213 bp, Cannabis sativa
  modified_base (868)..(874): a, c, t, g, unknown or other
aaaaaataaccagttacgtaccagatcgaacaattcttcgccacaagtctgtaaaatcacgaaccaagacttgtcatcgatcttagctatgctgaaatgaaagggaggatcaatgtcgccagctattttttcattgttcctgaaatcacaaagaaaaaaaatccaaaatgaaaaaaaaccagttaaaaaatatatatcagcaactattaaaaacaataataacttggacagaacaataaaacacatactgattcttcaacaaccgagcaccttcgatccacttaacttattccccgcaatcttcggtaccggtgttcatcccaatctctttaacaaaaggaaacaactccttagggtcaaagtctaattcactagatggctgcttctccttcttattttgattttttggttcagaagaaccaaacttgttgacaaaaggagatttataatgcaattcaggttttgcttgtctcttgacagcaacactggattgcaaaggtagtacatctagtacctcaacgtcatcatccacaacaggggatgcagactcaggaattgataccaaatcccattgatcattctttgcactaattggggaggcatatgcccgagtgaggctgtcaaccaaatccaaaatggattggtcgactttaatggtttcataagaaaacacacagccctcatccctcccctaacctaagccagattgaacttggaaaaaaaaatacgaatcaattaaacgtacaatctaaaaaaaaaaccagttacaataaacacatccataataacaaagaaacaaacaaataaccttatctgcccgaacaagtgacaattgaagcccaccttcatcatcatcatattcaggaannnnnnnttttgaaacaacctacaaagatagaacaaaaaacatagtcataaccgatttctaaacagataaagaataaaaaacaaagaacatgcaaaaaaaaaaaaaataaccggttaaaaaacacaataaaataggaaaacataaaagaccatagtaaaaaagaaataaccagttataaaaacaaaaaaacaacaaagtaaaagaaaaaatacctcgagtgacggcggatcggaaaactcatcgtcattcccaccaacatccagattctcagaacaagaatcttcaaccttctcctcaaaatctttgggcacagatgaccctttcttgctcttcaacaattcaataacttcatcaaatttcatactaaactcatccttcaaattttttatactcaacaaaattttcttttggtcctcttgaatacagaccaaagccttccccaatttcgaaaactgaaaacaaacaataaaacataacaacaatcaaaaaaacatataagaaaaaaaaacaaaataaataaaaaaaaatgtaaaaacacaaccaaaaaggaaaaaaaaaagcataaaaaagacataccttcccatctaaacctcgaagtttcttcggaagataaaccggttcgaactttaggttttgcaaggcagatttcttcagctcacgaccaactggataaaaatccttcgtagttgtaataccttagaattgagaagtggattagcagaactctaattagataattatgaataactgaggaattatattattatatagttcaatatatgagaatttatttgattaatgatatgttaagaccccgttggtaagtcaagggtattttagtaattattactcgagaagggtaaaataatgaaattaatttactaacgtgctcatgggactatattattatatagtatgcctatgttgtctttttcaggtgtgttctgacaggttggcgcggtatagtcacaaccaggtatttcgggctgaacggggttcaggctcgaaatgcaatttgaattgaaataattggcacttttatttaatggtgataatttgaaatttaattgggtttaattatgcatggattgaaaattatgcccttgtgagtgaatatgtatgttatttggccctaagggcattttggtcttttgaccttaattagtgggatttcaacaaaatgggattttttgcaagaaaggatagaatttctagtttccctctcccttacccgaatcctctttctctcaaaacccctttgaaggtttcaaagttctcttggtgaattacttgggtttagcttgaaaattgaagtaaagtattgggggattattgtgcatgcctt

SEQ ID NO: 59795 - DNA, 516 bp, Cannabis sativa
aatcctgctgtgctgttacatttaccttttcctataaatatatataaccaaagtaattgctaagggaaataatttaaacctcttttttcctaatttattcatcctttaattatctccccattttgtaacgctagttcctcctctatatatttactcacattgttttcacaactgagagaaaaaaaaaatcaaacataaactttggatccaaacaatgacaaagtcctacgaagaagagcatgccaaggaggcctttggttgggctgcaagagattcatctggagtcctttctcccttccatttctcaagaaggtttatttcttttgttttaattttatttacttgggttgggctcttttttctagatctctccagtaaaattcatatacaacaaaagaatattgttccattgatactaaggttttgctttaatataatatagtgaaacgtttcttgttataattttctaagatgtgttgtggtgtgtgtaattgtgtgtgtttggctgcagagaaa

SEQ ID NO: 59796 - DNA, 705 bp, Cannabis sativa
tagtagtgataaaagaagatgaatgcttatgaggctcctgatactgtaagaatatggcatattcaactgcagaaacaagaactggttttccaaaagccattacaaataatatgtttgtcccaccaaactaaccaacaaatccgataaatgaacaaacaaaatgagacaacaagttgagaacaaaaaagagatactgagccagcaatcaagtgatgggaaaccatttgaagatcttgagaactatcgcagattagttgaaaagttaattatctaattgtgactcatctagatattgattctcaattagtgttgttagtccgtttatatcatatctaacaatttatcattgggcaacattaaagcagcttttgtgttacttgaaaggagtacctggacgaggtattgtttacaaggatcatgaaaatacccaaattgagtgttgctctaataccatgtaaaaaatggtggatgaaattgtatattattcaatagaatagcaagcatttatatacaactctaaagagacttaataggaaactaaaaaagaaataggaaacttagtaattacaattattctacaactaatataaattatgttctaacaaaaggaaataaaaaatttagtatattgaaaatgtatgatatgttgatgccatgcaaagtatttcaaaggataccaagtcacaattttgtgtgttcttcatt

SEQ ID NO: 59797 - DNA, 1567 bp, Cannabis sativa
tatgttgtcagattttaaaaatacattttatttatgagtaatgttggatacatacttaacttaaattgtacataattattacataaagttataaaataaaaataaataacaaatgaataaaattaatgggagaataacaataggaatactatatggactaaaataaaagattacataatattttatttaaaaaaaatggagggaaagtgtccagtctgccaatgtttgtgcaattgtgctcgcattttctttttgcacattaaaaaaatatataaataagatatgttgtagatatttggtaaaaaaatttaatatatatatgaatatttgaaaaatataaaatatacaatattttctttatgaaatcattaaaattaaaataaaggtaaagaaaagattcaaaattaattaaagtgaacaaaattaaaattaattaataataggaatataatatttttataatacaaataaggtaactcttgttccaatttatctagttagaatttgataaggtgtaggtgtctatttcaaaattaattgacaatagatggtagatagtttttgcttactaatttttgacagctcgatcacaagtaataatattggttgacaacggatcttatggttcatctttttagatgggtgataatttgatttcatagtaagtcacaagatgttttttttttggctcgtctttttggactaattattagatgtgaatcgtataactttaataccatgttagaatttagtaaggtgtgattaacgtacatggagagtactatcttataactaaatgataataaaagaagtagtttattcataatttatatataatattatacatgaatgaaatattgatcctcaaaacaagagaaagagaaaaaaaaaccaaactatatatatgagtcgtttgttgttggtgacatgacaaaatgacacatccaagaagaagaagagactaaattaaatatcaaaaagatccaaccctcaaaatgttgagaatctttaacagaatcgtaactacttacatctcttacataaaactgtgttttttaactggtaattacatcagcactcccactgtatatatatacatatagatgagcctgtttcttgatgtgaagaaaatcactcatacaatacaagaacagtactaaggaacagtaattaagaagaagaaggtccaatccaacaatggctaccgctgagaaaccagtcatggttcttggtttcgaccatggagaacagagcgattacgctctggagtggactctcgaccacttcttcgttccttttgctcccgattttccctttcaactcgtcatcgtccatgccattcatatttcccacccatttatcaagcaattaggccctggtagtagcatcgcttaataatttcctcttttctgaaatttctatatatgttttgttttgcctgattttgatatcgatgtattgattggccaaacattagccgtggcaaaggaaagggcatttgagatgagcgcagagcgagttcttgacaagactcaacaaattttcgtcactaaatcggtatatattt

SEQ ID NO: 59798 - DNA, 1905 bp, Cannabis sativa
  modified_base (1861)..(1865): a, c, t, g, unknown or other
catccatccagcacgagactttccattcaggtcggccaacacacttgaatctggaaagaaggtaaaggaaaggcgaaagctgaacagtagtgagcctaggcttagatgaggttgtacatgtcgtggcggcacgacctggagtgttcagtctcaagacatctggggttattattatttagtctatgtgcgacctggttatgtattttttatattttggataaaagttgaaaaacgggattctagtgttggtaaatgggtatgtaaattataaagtttaatatttaatataaaagttttaattttacatgcttttcgagaaaaatctttgagcaaagagatagcactataattgaaaaagcattgtagcgtgccttaacattagggcattacacctatactgctataaaatcatgcctttcaccctgaaaaacataggggccacctattaaagacttgtgaataaaattttcaaagatctcattggctgtaacatggaagtttatgtggaaaacatgttggtcaagtcaaaaaaggctaggggcatgtggaggatctaaatggatgcttcatatcctagagtacaacatgaagctcaatccccatcaaatgtttgttcagggtaggcttaatcaaattccttggccttatagttaattccaagggaatagaagcaaactcggacaagattaaagcccttttggacatgaagtcgcccacaaaaataaaagaagtacaaagcctaacaagatgcattgtaacattaagtagattcgtgtcaaaatccatgaataaatgtgtccctttcttcaaaatactcagaggaaacaaaaaattttaatggacagaggagtgtgaaagagatttcgtagagctaaagaaataattggcttgacctcctgtgctatcaaaactgctagacaatgaataactaggcatatattttgttgtcacaaattatgttgtgagtgcagtcctaattagagaagaagatggtatccaacatgtagcgtattacgtcagcaaaaggtttattgaggctgaaagtcaatacccactcatggagaggctgacaagagtaagaaagctaaggacgtacttccaagctcacccaatcaggctatacattgaccagctgttgcgaaaggtgttgtagaaacctgaagcatccagccgattactcgagtgggccatcaagcttagctaatttgagatcacgtacaaaccaggaatggccataaaaggccaagctcttgctgacttcctcaaaaaatgtataggcatatctcttgaaatctcttaagattcgggagaaaagcaagagccagagaagaaacaagagcaagagcacaaagatttagcctggaagttacatgttgacaaaagttgtattgagcacttgtttggtgcagggtattgcccttgttacaccttgggggcaatagctgcacgaggcaatcaagctcggtttcaaggcctcaaacaatgaagttgaataagaagatcctattgctggcctcaagctagcatacaaagtacaggctaaccacttagacatatacaacgattctcaactagtcgtaaatcaagttctaggcaagtatacagccctgggtgaaagaatgataacctatttgagaaaaatccaagacttaataagttggctcaagagctatactataaaacaaatccctagagaagagaatgcaatagttgatgcccttgcccgtcgagcaagcaaaacattgacaaataaggcaaacttggtgcctatagagtttctaaaagaacaaagcattgctattctagaaggggttaacatgttagatgacagtcctattgggctttatgccctaaataaaannnnntttcaatgtaatctctatcttttaaatatcaataaagaaa

SEQ ID NO: 59799 - DNA, 786 bp, Cannabis sativa
atagtgataatgaaaattatataattgttaatgatgaagatgattattatgatgacttgtagacttcagagtattgtaatatttaaactcaatattaattaaatcaaatacatgttccttttgttagtaagttgattaattaattatttttatattaataaacatagcttgtatgtgcagcatggctaacgcaagtgcaagcaacaataagaaaagtgagttagggaaaagtacaaagggaaaaatattgaagaagaactggctaagcagcctgtgggatagaagttgaaatttaaatatcacaaggggattgggcccccgataaacgactatgcaacaagtttaacaattatgtcaaattggttttttgcaataccattcctatgaacaagttaaactttgaggatgttgacgaaggggacattaagactatctgggacagactggcagtaactttgaaatttctattgtaatagatcaaacaaaactattctacaaaaaaaaaaaaagagaaaaattacttatgattttaatgtttattttattagaccaattttgagctcctaactgacaatcctatgtttgagaactacggtcttaaataaatgtcaaaacggctacgtgactggagagcggacgcgaaaaaggcatggaaggagaatattaagaaatatggagaggaagaagcgactaggagatcatgtctaaatgtggtcacatcggaggtgtgggcaaaggttattacatattggaaagacccaaagcaacaagtataaaatgaaagtt

SEQ ID NO: 59800 - DNA, 633 bp, Cannabis sativa
acacttcttgagccaaaatagagccttccacgatccatcgaccaagaatgaaagcggactgaaaaggagataccagtctatctataatatattacgatgaagcaaccacctaccaaatcaacggtcagatctcttgcagtaaggttggctgtgaaggcatgttgatcaagaaatctcctataaatacccctaaacttcatgtacaaggggagaacaatttctttatctacagaacatctgctaaaattcctacgagcttcttcttcttcaagaggaacgagaggaagagagggtttgtgttcatactgtaaacacctgtaacgctcaatacttgcctacaaggctaatacaacggactcgtgaactaaaaattattaacgcccaaattacgtaaaaattatgtgtgtattacttattattttatatttttcttaagctctaattaatcggttttcgaaagtctcggtaaacacataccaatataaaattgagaccacattaataaacatagaaaatttctcatatttagttaatattatcaatataatataaatataatctatatgtatacagtaagagagaaaatctaagtattacataatgctacaacactctttagttaatattatcaat

SEQ ID NO: 59801 - DNA, 1383 bp, Cannabis sativa
  modified_base (1342)..(1345): a, c, t, g, unknown or other
gtaccttgcccgcgcatatcaaattagtactcagacttagtgtgaaattttttgaagaattccatcaccctaagaagattcaggttcagatcttgttaatactctgcgtaagaaaggaagaagggttagagatcagaatgaaaggagccataatattccgctaccaccaatgaaaggtttttttagaactttatatatgttaatttcgttgttttaggaaactcatatttaggatgtgagattatagaatataatcaaacatatatgttagtaaatctagatcctattaaaatatcttccaataagaatccccactaggagatttactccggcctttccttggtgggatgtcttcccttctctcttcatccctaggtaggggttgaaatttttcagtcctgccatatgccaaaaatttgatcatcactgtgttgatggtgggccagccttgtagggatgcagttggcccttctagctgcgaggtgttcccaatatccttagggcattgaattcttgacatagggactttgttcctaaagaggatcccttatgagtggtggttattccactctggacccagccctttcattgaattttcttatcagttcattcgctgtcctattttggcagttcagctccgcctgatgggcttagaggatcgcagcctcccgatcaatccattcttggaattcatgtctctattaggcaaaagcatcgctcataacagcgcgtgtttcttcttatcatggtggaggatatttgtgtggccctaaaccttccctatggcttctctcaacctggctagttcagaatcatcccccaagtcaacatggtgcccgttgatgccaggttggccaacccttgacccattttctccagcatatacctaggggatatgccttctctggggaactcctatagtactctgggcaggtcatccagcattggtcggtacatgctcgacacctgtgggatcttgcctgacattgattggacccttgggtctagtcactacaaatgggactgcctaaggtggtcgggtaaggttggtcgggttgttaaggttggtggaacctagacactaggatccacaaccattggatcttaaggatctatggaccgactcctccttgtcaaaaacatagagattactaggtgatgagatctttgcaagaatgtttaaactctcaacgaaagcacaaaaatgtcagctaggaaaaaagccaactgacttggactctaataaatgttgataaatcactggtaaggaggttagaatattaataaaaataagaagaacacgtgatttatagaggttcgacctgttgggttttgtgccctnnnnaaaacccatttcaatataatcagacttacttattaata

SEQ ID NO: 59802 - DNA, 7075 bp, Cannabis sativa
gtgcaaccaacaaagcaataactttacaagttatcaacaaattatggcaaaaaaattaatgatatatactgaataaggtttaattttctttttcttattttttttaaaaataataataataaaactttatcaatcaacagaatcagctattacaatagaaagaagttcaacaagagcatcatcctcactaaacacacgagctggatagaaactagagacacaagcaacacaatgaacgactttatttacagattgcttaacaaaataaatctaaactgactttaactcaactaaaaggggatgacatatgaatctaattttgtaatgcctagaccgttaccaaactatcaatttcatgttgaggatcaacccaacctttccttttaaagcctccttaatatcaaaaatttcaattaggacaacatccataggtttaccaaaagagaaaataggaaaacactatttcagtttcaccactttatttatagtaactagcattaaattaaaattgtttataaatactcaatttatctgtatcaatgtttccatttattaaacgaataaataaactagctttaaaataaggtaatttgaggctaagttattatacttttaaattttatacgatcaaccactttaattgaaattttaagggtaaaatctccaaaactttggttatgttatggtttttagtgttcttttagtcaactcttgttaaatgacaatgtagatatccatgtgtaattcaaatataaattttgtaccacaatactcaaataaactttgtatataaaaattaaatatgcaaaaaccctaatccactattaaaaacctatcatttaatcaaacaacttccattcaatgaactagaaattacacacttactcttaccacaaacaacttccattcaatgaactagttatataaataaagaattttttgcggttaaactatttcaattatcattacacttgcacttaactttctaagcttaaattttagtggtaaaactttctaaaaatactgaactgttaacaaatttaatgtgttttttatttttgacagttgattgccaacatgaactgtttatgtttacaattctatacatgtgacactttatattggtacatctaatataattatttaaaaattataaaaacttatttcaaaaatatgttttatttttaaatactttattatttttttttataattttatttagttttaaaatgaattttgaaataataatattaggtgtataaatataaacatgtcacgatacaagagtgcatacataagtagttcatgatgatagttaatcatgtgacactttaattttgctaacaatttagtaatctgaaaggttttagagataaatttgagcttgaagagttaaatacaagtaaaatgatagttaagagaatttaaccgctgaaaattcataaataaatgattgttaatagtgttagagctattttatttaaaataaaattataactcaataaagtgaattttacaaatactaaataaattaattaaatcaatgttacaattttataacaaaagtttttttttttatttttgaaagaatctaatctataacaaaaattacaaataactcatggaaatatagtaaaagaagaatatattactacacaaaataacaaaataagatgaaaaacaacaaaagagaataagaatctcacagtcacaatcttaaattttacccttatgtctaaaagtttattatttcatttctatacatcaaatctttgatactttaaataaaaatagttttaaaaattatcaagtcttttatattttttagtactctagttaataaaagagtcacttatttagagtatttagctatcactttcaaaattcaaatacaacacatataacagtagaagttaccaacttttaaaatggtatcaaaagattaaagggagggatttaggctcacatgttatgtttttagcaagttacaatttggaactcgaataaaagaaattctaaatatttgtaaacttttatacacacaaatgatgattttaatcttaatcttcaagatataggtatcatgatatttacacttaattagtaatattaaggttaatttagatttttatccttaaactttgacatgtaccaaatcatgtctcttgaatttttctagtcggtaagaattcccttggaactgttgagattattggatttaaagacttttgttcaattttacttaagaaaatcttacgtgaatgaaaatttaggaagcacaattcgatacatgttaaaatttagggggcgtgattttataaatatcaaagttcgaggtgtacgattagtacacagaccatcaccatattaggaaaattaaataaaattagataaaagtctttaaatccaacaatctcaatagtttagaaaaaaattttaacgatctaaaaagtttagggatataatttagtacaaagtttaaggataaaaattttaattagcttaaatattaatataacaaatggtattattgtatataattatggttcaaaaatcaatggttcaaaaaccaaataaccaaaaccattaacttttaccatttacaactctaaaaagagtgaatcaatattcttattaaattcaatataattaatgattaacattattaatttacaacattaaaaccaagacaaagagaatctaacactacctattacctaactacacgacaaacataccggtcaaaccagtcaccacgtgacaaaagtaacgactcattcacctactatagccggtcaaattgtaatctcttaacggtcatattttttcacaaaaggtaccaaagtttcctcttttcatatataaatctcttaaaaactcaatctttaagtaaaaaacactataattccaaactcaaattcttaagaaaaaacacattagcaatcatgcattgggtggttgtactttccttattactactctcctccgccatggtacaatcctacaatgcacccgctccttctccaacaacaaagccgccaccgccaccgccttcttcgccgttatcaccgcaatcttctcccgctcattccccaacaccattttcatcatcaccaccaccatcaaaatctccggctcattctccgacgaaatctcctactccggtgacttctccggcgaagtctccgatcaatgctccttccgtggcgccaaaagcttcgcctttacttagcccgactatctctccggcaagtccatctccggtggctgcggcggctcctccgccaatggcttcttcgccgtctttggctccggttagttcgccggagttgagcccggtcggtgctgctccggcggcggaagggccggtgattgcggctgcgccggaaacatcggcttcgattccttcgagttcggcagattctccttcgatgtttccgtctagtggtagccctccgattccgacgccggagagtctttcgccggaaactgctcaaggtccggctggtgatgggtcgggttcgaactctgtgtatggagttcatgtcgttttgagcgggcttggtatttgggccgctttggcactgtaagcccaatacgattagtgggccttgttttagattattatcaatttttagtgttttatttagaaaaatatttaggttattatttttcatatgagtttgcacttgttgtacggtttgtaacaattttgttggaagggaaaagactcatttatttctattatctaatattctttttatttatttatttttggccttgttagagtagaaaaactaaaaataaaataattttggaattttttatttatattttctcctaacttgttattaaattttgataccagaactaagaagtagaggttacaatgctttctttctaccatgtgtggagagtttgagaccaatggaatacattactagaatacttctataagtaaaatttgtttttgtgaaaatatttatgttatattaaatatacttcttcctttttaaaatattataatttaaatttaaactctaagtatttcttttatctcttattttttttttaaaaaataaagcgctttataaataaatataaaaattagatcttatagtcattacaaaagatagaatctattatagaagatagttctatcataccgataatattattggcaaaagctcagttattcatattatgagttgtgaaattacaagttctaaaaataaaagtagagagatgtttacaaggacacacatagttatcaatcccctaacatttgttaccctttagagtcttgataactatttcagaatcattctccaccaacacaaaaggatgatgctgcgaaacgacaatctctatggctagcagacaagctgcaacttctccaatgagagaatcagagaagttaagcatacttgtagccacccacaaaagcatattcttatgatctctctctatggccacattgcacatggtattgcatccaactttgatatcaaagctgattttgacctaatcaactggtggcgacaaccaagtaggagacttaataatcttcgaggcagtaagtaaataggatccataatttgtataacaaatatagatagagtcaatagaatatttaatattacccagaacgtttttgtgtactttgtcattgtgcgctctccaaattgtatccaccacaattgaagcatagaggaacaattttttaatatccaccattttatatttcagattctataaaatattaatccagtcccaaatacgagctcctgaattcaacactggcataatcccctaaggggaagatcgccaaagatgataggcaaaattgcaatagagaaagaaatattccatcgtctcctctttctccctacaaagggggcaagagacctcctcaatatgcattctcttcgcgagagaggcacgggtaggcaaatcattagagagaatgttctaccagaggactttgtgacgttccaaaattttagaattctataacttgttctaaagtatcggggcaacattacattttaaatttacacttattgcgcatatttaaaaaaatatttttctatgaattatcaattttttacccaattgtcatatctaaaatatatatttatattattattattattttttaaaaaataaaataaagaaatatctttttatgctcatgtttcttttatgtggagaaatattatacaattttcttttagtgtttatgtttaagaaaaaaaataatattgtcaatgtacaaattgtttgttccgaaggaaaaaaaaaagattgaaactaatcttagaaaaataaataaaaatgaaaatcaatgtatttactacatagcaataccactcacctcacgaccggtctacaaaagtacttgtcatcaaaaacaaaaaaaacaaacaaaaataataataaaaaaaattgataaagatatttgttttgggccatcaccagaaaaatctcacccttacacatttacatctctctattcttcttcttcttcagctgatagtagcttaaagctttgatcttttcccagcacattggaaaatcaaagctaaagctaaaacctttcatttcattacaatccatggctacttccaaccttatctcacctttatcaaaaataaaccctttaaacctttcaaccaaacctcataactcttcaaccttcttcttcacccaaaagactccacctttactcactctaaccaaaattaaccacaaatcaacaaaccccagaagagttttcaccattcaatgtaaggaaagcaactcagttgatgcaccagatagactcatctcagcaatttgttacttttaccctttctttgatggtgtacaatatgggaaatatgttataacccaattcagtcctattcagacactccttcagccattgataccagctataaaggtttttaagagctttccttttaatgggtttttagtgtttttaacactctattttgttgtggttaggaataggaatttcagtaggtatgtgaggtttaacactatgcaagctattgttcttgatgtgctgttgatatttcctgatcttttggagagaagctttaatccaaaagatggtgttgggttggatttgttgatgagcttggatagtactgtttttctcttccttttggtgtgtttggtttatggatcttcttcttgcattttgggacagttgcctaggttgccaattgttgctgaagctgcagaaaggcaagttctttaaacttcttcttttatagctttttgttgttagagacaattgtaatatgttttggatggaaaatttgaacttgtgcttagtttgttaaagggagaaacttttgtaacagatgatgattgattttgtattatttggttctaaactgattaaatgatatagaaaagaaagtggaaatttacttaggattcgtttagtacggcgtataaattatgttttatattatatgtttatataatattatattaaatttcaatttatatcaaaatattatatacttatacactcataattgtacatgaaaatataacatcaaatacaatttaatatagtgctatacaataagatgtaataccaaacaaattcttatggtattgtatttctaagaacaccaactaaactcaaacacgaactaagaagagaatttaacaaaaaacaattcaagagaaccaaaaaacaaacaaagacaccatagatggaactacaccacaatatctctttagctagctaactcacagtgttttctgtcaaaatttctaaaagaatgaattacaatgtagagtgtttctatattggttatagacaatcattaacattaatcacttctaacatgctcgcttcaagaaaatttgagattagaatataactcaaagtgtcagttatgtaatctctaacaagagattatagatttgagcatctttagacttttgtgattacaattgtaatgtgtttagtttgacagagagaaacttttgaagcagatgattggtttgtttgtgttattgattctaaactgaataagtgaaaaaaaaa

SEQ ID NO: 59803 - DNA, 632 bp, Cannabis sativa
  modified_base (529)..(537): a, c, t, g, unknown or other
acatataaatatataaaactgtaaacataaattatttaattgatttcacttaacaaatatagttttttgacctggcataattaaggaaaataaatatagttcagttataatatatatagtaataattataaaaagaaattcaccaaatttgactatactatatatcaaaagaagaatggcagtatggtacatatgagtactttatgagttttttcaatgttagctttctttgattttttttaacaaaagcgatcacttttgaggtgaatttgatttttaacacaaattttcatataataatataatataagaaaattctatttattttaatatgaaataactttttaatcaattttttctcataatcatgtatatattataattattaaagatattctgtaaaattttaagaaattcaaaaaaatttaacacgccgaaaatagagttcaaatcgtgattgcatgcgtgattattttattttatacacgtgtaaaataggctgtgtgaatattgttttctatattgtaannnnnnnnnaattttttaaaattttatataatattttaaataactttaacgtacacgaatataaaaaaaatagattaaatatttttttggataccgaaataaat

SEQ ID NO: 59804 - DNA, 1225 bp, Cannabis sativa
ccaacgcctttgtctcatgttcagatctttttgagtgaaaaagtacttgagacttttgtagtcagtataaatctcacaatgttcaccatacaagcagtgtgggcaaaatctttagggcaaacaccactgctgcaagttccaggtcatgagttggatagcgctgctcataatctttcagttgtcgtgatgcataagctatgactttatccacttgcattagcacacaacccaaactctacctagatgcatcgcaataccccacaaatctctcttgatcagatggcaaggctaaaactggagctgtaatcagccgttgtttcaactcttggaaacttttcccacatttatctgaccatatacattgttggttctttctagttaactcggataatggcattgcaatcttggaaaatccttctacaaaacgccgataatagcctactagaccgaggaaacttcaaactttggtacctgttttgggtctaggccagttcttcactgcttcaaccttaccgggatctaccataatctcgtcttttctgacaatgtgccccagaaaagatacctgtggcagtcaaaactcacactttctgaactttgcataaactttatgatcttttagccgttggagaaccatacgaagatgttgttcatgttctgctttcgaccgagagtacacaagaatgtcattgataaatacaactacaaagctattgaggaaatccttgaataccctattcatgagatccataaaggctgccagagtatttgtcaacccgaatgacataaccaggaactcataatggccatacctagtttcgaaaggtgtctttgggatatcttcttctcggattctcaattgatgataaccagatctcaaatcaatcttagagaatactctcttgccttgaagttgatcgaaaaaatcgtcaattctaggcaaaggatatttgttttcaatagtttaattgtttagctctcagtagtcaatacacattcgaggagtcccatccttcttctttacaaacaaaaccggagctccccaaggcgacacactaggtcgggtgaacccttgatccagcatcccttggaattgtatagtctataatatagtctatctcccgctgattaaatcaataatatagtctatctcccgctgaggtggtaaccctggtaattcctcaagaaatacatccaggaattccttaaccactttgacttcctc

SEQ ID NO: 59805 - DNA, 1058 bp, Cannabis sativa
ataaaaatataaaaattgtcacaaaagtgacatgtccaatcaaatcaataattaaagtgtatgtgtttactcatagattcaagagaaatatcttttatatattaaaagtgcatatataatagaattcttgtttaaccaattttgttattttttaacgcttttaaaatatttcaaatcaaacctttatattctcacaatttttttataaaattaaaaaaacaaaaaaaagtaatatattttatgatgaacagatcaaaaatatttcaagtcataccttcctattctcacgaaaacgattcggtttgttaatcgaagcaaaattgacggattctacaaatgaaattctcacaataacgatttggtatttgtagggattattgcgaataaatctcatttgaaaatgattatagcttttctttcaacaattgtgagaacggaaaattctgcaaatgtgattgacaatctcccaactttttttttttttgcactataagtatatatatatatatatgtatttgtattcctatgttcgcatatgcctttgagtttttcatgttttttttctgtaatcgatgtgagttaagtgataatcctttagatgaattgaagttcaccgagaagagataaacattcaccagggagagattactttgactttttttttatgatgcttatgagaaagatgcaaagaaggtattcatctgttttttaagcttgtgccactttatctctgtataaatatatataaatttatataaagaatttttcataaattattagtgtaattggcataattaatatcgtgtgtgcatttttatgaacccaacctctaaattttatattttctttgcctgggaataagatatgagatttcattctgaactttatttgaaattttgcttcaaagttccaccactactaatacctccttaacttccagaaggaggtccgagaatgcttccaactcctcattgtataaatatgataatttggagccttcacaattgttttgttattgcgcctataatggctaagttgttgattgtattattattatt

SEQ ID NO: 59806 - DNA, 883 bp, Cannabis sativa
  modified_base (645)..(647): a, c, t, g, unknown or other
ctaaattttatatttattttcttatctcttttttatattttcttaaacttaataagattatattagtaatttatttatttttttgatttgccatatttgaggttaatatgttttatttttggttttaccaattattaatatttattcttagcctgtctctttttttaatctctcaacttttttttctttttttagatattttttactctatttactttttaaaatattatttttaagggctcgtttggcacagcttttgaaaaagctaaaagttgcttttaaaaaaaattgtgacaaaaaggtgtttggtaatctgttaaaaaataacttattgaagaatttatggaaatgctacagctaaaaattaaagctggtacaatctaacgttttttttttaaaaaaaactgttttgattaaaagaatctataataaattatttttttactaaaaagttatttaattatttattatatattacaaaaaaaataaaaatatttttttgaaggaaaaaatatttaaaataaataatatttaaattcctaattgtttatttttttaaaaaaaatattttatttttttattattagcaaacaatatcaacctaagtttcttataaagttcaattttttcttttacaagtgatannnatataatttaaaaatattaaaaattatttttatcaaatgcagataaatttgtactataaaaaaaataattaaaaatacatagaaaagaaaaattttatataacatatatttatatatttatttattattacaatgaactagattaaaatattatcattattataatagaatcttaacaactcgcaacactttaaaatttataatttaccaaacacttagctcaacttttttctaca

SEQ ID NO: 59807 - DNA, 714 bp, Cannabis sativa
ctaaatttactaaatattttttttacaattttcaactatatgagtatagcggtaaataaatagtagtcgagtccacgaaaactctgttcagtttattattcaataattaacactaaaacttaagaaggggcttttgatttcaaactcacttaaataacataaattaaaaaataaataaagataaatattatgatattaagaaacagttaagagttaatctctatcatcaacaatcattcaagatcaataatcaataaatattattctaattttttcattaaactattaatcctatagaaaatgttgaagcatttaattatttcaatatctctattacaattaatcaaggcaaaatactcaataattaaatctttataccatggaatagatttgcgaaacatgtaatttatttaacctaaaaaaatattaaattctatggagataacttaatttaagtattaaatcaatgaaacatatgattcatttagtctaagtttaatctttcattataattaaaaatacttttgacattactattcattgtaaattatcacttttgacattactattcattgtaaattatcacttgtttacccgcaaagtaacctcggtgaccgttaacttttagcgaaaagaagaccgttaaactgataatttacgttagatagccacatttaatataagaaatacaaaaataaagaaaatagtcatttt

SEQ ID NO: 59808 - DNA, 1159 bp, Cannabis sativa
  modified_base (748)..(753): a, c, t, g, unknown or other
  modified_base (779)..(785): a, c, t, g, unknown or other
ccagccacaatatacatcaattagtatctaaacattcccaaattaaacttgagaataagctcaagattcaagctatcccaaccagccatgaaactctagaatagctagatcaaaaactcaatcttaactaaaataattcaaaggaaaacaaacaagattatagcttgatatcaaagcattttctaccccttgcaactacaatccaattgctgagaatttaagcaaaagaaggagaaaagaaaatccttggttgaagcttcttagggtttcgggtaggagaaaaagggtggaggtgatgatatatcttaaacatattttttttcattttaaccttaaccaacctaatatatataatatacctttaattaatttcagccactaacaaaaactaaaaaagaattaaaataaaaccctcttcaaccaaaagaccaaactacccccttttctttaaacccttaaataaagataaacaaaccctaggggcattatagtaactttactaatccaccaaaccgacattctaatattctaaactagtctggagtatcctcaaaataaatctcccattaatgtcgtgatatttctgaccacatcgttaaattttcacagtcgccgggctcgaaaaaatatttttattttaaaaatggtatcctcgatacccacgtattccaatataatctccgtaattaataaattacgttttataattattcaataaatccttactaattaccctaagtaagatcannnnnntacttcattaccaaaataattacatnnnnnnnaaaatatgtctatttaaatattattttattttccgagatattacaattagtatacccatcggttataaactgttgagaaaatatgcattttatacctaattattgatagctcaaaaatttgataaatttggttccaaaatttcacatgcctctaccagggaccccaagactcgaaaaatttcagatcaatgaccctaaggctcgaaaattttgtttctcttgtggctgaatccacaaggctcgaaaatttccttgcgacaaggatactctgtccgacgaggatacatgcttttggtaagagaaaataagtttttcgacaaaagtgtaagaccttgttcaagttttgataatttttctacttatcatttatggtt

SEQ ID NO: 59809 - DNA, 936 bp, Cannabis sativa
gagctttatacaataacattccattattcgagattgaaaagtctttaggtcgacctgccatcacctcatctcgaatcttgattagctcagaatcctctaactgtgcctttcttgttctttctagcaagtcagactggagtgtcaagttgtgcatctttccaattaccaactcaattcccacactgaccatctctgaagctagttgaggagctatcaatacattggtgaaaacttgcccgggacctcttctactcagtgcattagccataacattggctttcctggggtgataccgaatctcacagtcgtagtctttaaccagttctagccaccttctctgcctcatgtttaaatcttcttgggtgaaaaagtaattgagacttttacgatcagtataaatctcacatttctaaccataaagataatgctgccatatctttagagcaaacaccacagcaacaagctctagatcatgtgttgggtagcgctgttcataatccttcagttgacgagaggcataggctatgactttgtcagcttgcatcagaacacatcccaaaccctgtctggatgcatcacagtaaacaatgaacttttctcgatctgatggtaaagctaacaccggagctgttattgcttcacatttgtttgaccatacaaatagctgatttttcttagttaactcgattagtggcatagatattttagggaatccctcgacgatacgtcgataataccctgctaaactgaggaaactttgaatttttgtcactgattttggcctcggctagttcttcactgactcgatcttgcctggatcaaccgtaatttcattctttccaataatatgccccagaaaagatacctctaacaaccaaaattcacactttttgagctttgcatacaacttgtgatccctaagagatcggaagagcg

SEQ ID NO: 59810 - DNA, 859 bp, Cannabis sativa
  modified_base (51)..(58): a, c, t, g, unknown or other
  modified_base (828)..(832): a, c, t, g, unknown or other
tttgctctgcacacctccgtccaaaaatcacagttaagtgccacggtggannnnnnnngtgtacacacttgtacacgtggcaggtttttagtggtccacgcaatattaattttaaaaaataattataaatattaaaaaattaaaaatcagaaaaaaaatatttttttttcttttttattttcttttaatttaaaaaattaaaaaattaatttttttttccttttttttttctttttcttcttctttctaacataaatgcttaccaaaaccctaatttccaaagctagcaacctccaatgattcccatatatctccaccatgcattctgctctgcatgaaccctcggtgccggagctcagtctccgcgagtccacacagccggagcagaagtcagtacgccggcgattggttcaagtgacgttgttcccactcaaacttaagacgcaagatcgtcaagttaacgatgatctcaagtgtgagacggattgcgatgagatcctcgatggtgaggacgatgagtattgtgatagccagaacaagagaaagagaacgcctaaaaggaaatcagcaaccccagtaaaagcatgcatctggcaaggtgaaataaaagttactagaattttcttttcttatatttcagattgagaattttaacttctaattatgttgttatggtatttttggtaggcgaaaggataacgatcagcgcataattctctgtagaagaattcaacaaatgtacatagcgaatgagagaaagagggctgggaggaggagaaggagagaaagagggctggggggtttctgcagaagaagaagaagaagaannnnnagaagaagaagaagaagaaaaataaaa

SEQ ID NO: 59811 - DNA, 603 bp, Cannabis sativa
atatataatagaaaataaagaatcgaaaaattctagtaaaccatattcattctcaattttagaaaaagacatccactatagatagaaaagaaaataataaagaatgaaaaattctcattgctgtcacacataccctcaagtgtatatatgatttatcatatagggagccgttgttgtcaggcaagatagctaacacaagctctaactcttttccttttgatttgtttattgatgcatggtaaacatgcttcaatgccttctctacatgctcaggtcgagcattgtaaaatggaataacaggttctgtgttaaattcctgcaagcccacaccaaaattgagaagaaaagaatttcaaataccgaactattatatggaaatatgcagacaaaatacacaaaactttaccacaccatagttgaatacgactatggtggatacatacacaattaccatacctaatcatagatatttattgtcacagtcagatatttagagcttttagttttacaacatgatcaaagccaaagagccattatccttcgaaaaaacctgtcttcgcaatcactaattttatgatgattattttttattagcaaagatgc

SEQ ID NO: 59812 - DNA, 1523 bp, Cannabis sativa
gaggctactggtggttgggaaaatgatttggttcgtggtagttttctttccaatgaagcataagctattttatctatcccttgttctctttttgatgtgcctgataaattaatttggaactttgagaagtctggttggtactctgttaaaagtggttactggttagctcttcgcaatacgggattgagtcatgcttctccgtcagggggtttttctggctgttgaaaaaagatttggacattaaactttcctcctaaggtaagactttttgcttggcaaatcgctgctagttgaattcctacaaaaagcaatttagctcgtcatggtttattgtcaaatgacctttgtcttatttgtgagttgaaagatgaaactacctatcatgctctttggaggtgctctcttttgaaggcttacagaaaactctgtgattttgatctgggagatccttcagtccattgggaggattttcttcactttattcatatatgtattaaccatttaccaaaaggaaaatttgagttagtgatggtgattttatggagaatttagtttaaacataacaaaaaggttcatattaacatcgagatggcacctaagttggttgtgaattgggtacgagactacttggcaactttcagagcaagtctaggctattagcgattccttcttcttcaaggtctttgctaaatactcatattgagccattaggccgtagtagatggattcctcctttagtgggtaatctcaaagttaacacgaatgtagctattaactcacttaataattatagtgagcttggattaatggtagttcgagatgagttgggagtggtcaaagcgtctgcaagatggaagattgagggttgtttggttctggagatggcggaggcgttgtctattcgcaatgctttgattcaatgccttttattcgggtatgataacatttgttttgaatcggattgtctaattattattgtcaaaatcatgagcaatgtgtcatttatttcatccttgggacttgttttaaataacattttactctttgtaatagttactaagatgttaattttattcattgctctaaatcttgtaatatggttgctgtcttagcaaaactcactctatatgcggctgatagcaaggtttggtggcatgacaatgtaagttgtatttaaaattatgtgatagctgatgctattttctaatgaattctcgccctcacttttttagagcacttattgcttttggtattggtgtggttgagatcttctttctacaaaatttatattatttaatttataaataatataagaaaaatttacccctgtaataaactatttattcgatatatgaaagaaaaagttttccaagtgtgtttccatcactacaactttttgggatttcagtcccatctatcaaataagtatttggtttattagctaggtagacaaatgacagaggagaacaaaactccaaatgcaatagctagtcctcacctgctaccttattaccttttttttt

SEQ ID NO: 59813 - DNA, 663 bp, Cannabis sativa
tcccagatttaggtcatggttcggttctcggtctcggtctgagtactcgaccatgtctgggcctgagtttcgatctcagtttttgtttggggctaggtccgagttcagttctaggtctaggtccgggtcctggtcacggtcctagtcatgttacaaggtcttgatcctacgattcttgtttaggttccaatttcgggtcctagtctgattccctgatccaaacaccaactacggatctgttccatgccctatttcccaaatttccagtcaagaatttgatgcctgtgacgattcctagtgtggtgtaggtcctaggtcccaggtctgagtttgggtccgagatcgagactggggtgcgactctatgtctcggtcctagttttttttcccgagtctggttccatgtttaagattgagtttttgttcgggttagggtcctgagtccaggtcttggttgggatccgggtcaggtttccgattcgagtcttgttctgagttggagtcggggtgttggtccggttacggttctgggtctaggtccaggtccggttacgattctaggtctaagtcccggttccggtcccgttcataagtcctggtctacttctggttttagttccaattttggatcacagggtaagggttcgagtcctggtcttggttc

SEQ ID NO: 59814 - DNA, 1291 bp, Cannabis sativa
atataatcatcaattaataaattttaaatgcttaacttataatttttttaatatctttaacaacacatacacaaatattagttcaaatactatcgtatttgacgcaaagggaccgcggatatatacttttgtttgtccaaaacaactatacaataacgaatgtggttattatgtactaacttactttcgtaatatgcttcaacattcaaatcctattgaaatcataaaagaaaagtatatacttatttttactataagtacaagcatataaaagtactatccttttaattagttttaattttttaatttgtcagtttagcggcctatctaaatattctgagaaagaacatctcttaccgcttcgacaacagtggttaagtaaattgctttccttgatatataaaaattaattagtagtattttattgtattttttagactctatgtgtagtattttagagatttatacataatatgtattatttataattgaacttactaatattattattattttaaaaattatattaattgttcatttttaattaagtttttttatacatactctatataattataaaaataaaaattatatttattagttattgaaaaaaatgagtgaaatgaaatgtaataaaattaaaagaaaaaaataaaaaaaaaaaacctatacatttgcaaaatgggatcaaaattaaggtaattttttattccactttttatatatatatataaaataaataaaaaaaaaaagatgggataaaagggtgggtaccttttatcccagctttttcataaaaagtgctttttatctcacttttctcaaaaaatcgggataaaaggggtagtttttatcccatttttaatgaaaatattggaataatagggtactttttaccttgaaaaaactagataaaaagtacatttttttatcccggttgtttaaatactttttatcccactgccatacatctcgattttcattttagcaaaaattgggataagaagccttaaaaaccaggataaaaggtctttttttgtagtagtgaagtttccagaccttccacagaagtaacacttccttgtttccttctctctggacttcgatcttgattgagagtgatggtatttattctttgaacttcctttcttgggtgatcttcctcttgccaagtacacttcttctttcttggattctttctcgaattgtagttcaaaacctttcaacttaagtgcggcaagaacatcctccaatgcaattatgtctctaccatacttcatggctgccttga

SEQ ID NO: 59815 - DNA, 966 bp, Cannabis sativa
  modified_base (372)..(380): a, c, t, g, unknown or other
gaaattatactttatatttttgtaggataaattacggtaaaaaatttttaaacttttattttgctagtaattagtttttaaaatttattttttggcgataaaatttccataatttataagttttttcgactaaatttttttgattattattttacttgcacttaactatctaaacttaaattttagtcctaaagcccccaaactactcaaccattagcaaatttaagatattgtctatttaccacatcgacagttgatatgtataattttatacatgtggtacatttatattgatccattaaaaatataataaatcatttaaaatttaaaaaattatttaaaaattcattaaaaaaataaaataaaaaaaannnnnnnnntaacataaaaaagttcaaaaaattaatagaataattaaaatttacaaagtttttctctctcaattctttctctctcaattctttctctctcaattctttctctcttaccttttcttttttttttgttcaccttcttcatcttcttgaatcccacaatcactactattgaaactactactactcatcaccaccacaacttaatattcaaattcaccaaaaataaaaatttcttcactcaccaccacaactccttcgttctacttcttcctactttctagaaatttatacctaaatatacaatctatatacatataaatttcaaaactaaaggccaaaattcaacctccatcctctcgggtgaagctccatctcgtcgccaaccataaatcgttgaacctccatccatcctgccagccacaaactgttgaagctccatccttgtcgtcaggcacaaaccaggtgttgtccttcgcaaatgtcaacttcgagttcgtgtatagtggaaaactgctacggcaaaaaaaagacaactgtggcggaggaggacgccaaagaagctttggggttctacgggggtctttttccc

SEQ ID NO: 59816 - DNA, 972 bp, Cannabis sativa
aggatgttaataaaacatacttgttagtaaatctagatcgtggtaaaatatatccaacagtttactgtataattttctaatggattgtatatatatttgttattttaggttttttagtgtgttttttatttttaatgtgtatgttattaacagtttatgatttagtagtatttttagttataattttggttggtttactaattagttttttattaagtagattttttctaggtttgtgcttgatcaatgtaatactgttgtattactttttatttttaagttaattatttcaaaataaaacttacttgttagtttctttttaatgatgttatgagtaaatatttgcttgtggagatatctatgattatgtgtttttgatttgattaagcatttatatatgttacttttcgagttttgtttttaatttttttttatataaacgttcatgttgtaaaagcggatttttctaacttaattctacaatggtagtcgcttgcaacataattagcggtacactttaattattttttaataatgaataatgtctattttgatatgtttaattgtgtgtatgataaattaaaaataaaatagacagcagaatacttgttggaaaccaagatttttcttgcctaaacgctaaaaatttatgaatatatcatttaagcaacgtgttagttttctattagtaatcaatcatataaaatactaaaaactaaatttagactttaaaaatgaatacaactattcataaaagcagtcttcacaaatgagatattttttttattcttatagtatttgaaatagtagggaaatattggaaagtcttttagtaaagctacttaatagtttatcaaattcaaagtaatgtttttatttttatagtatttggataaatggaagaataatggatggtatattcaatgtctctttttctcttttttttaactcgactgcatcatttttgcaagt

SEQ ID NO: 59817 - DNA, 663 bp, Cannabis sativa
cgatctccctctgggatttctgtatcccaaagaccattcaccctacaacttttaactgacacaggttatttaggagctgctcctgcttctaccctaatggaacccaatattcggctctcatccgatattggggaaccattagaaaacccaaaaacatatcgcagcatcataggtaaactcatttacctaaccattactcgccctgatatctcttttgctgtaaataaactaagtcaatttttatctaatccaagagctccccatcttgatgcagctcatagaattttacgatatctcaaaggcacttctggccaagggcttttctttcaatatgcctcttctgtaaaattgtctgcttatgcggaaactaacatgcccaattcaaactttcatcttaagattttttcagatgctgattgggcctcatgcagtgacgttcgaaggtccacttctggctactgtgtcttccttggcaactccctaatctcttggaaataaaaaaagcagtctaccgtctctcgttcttccgctgaagcagaataccaggcaatggccaatgccacttgcgagatcacttggctgttagctcttcttcggaacttcggcattcaccacaaagatcccgccattctttattgagataatacaaccgccattcacatc

SEQ ID NO: 59818 - DNA, 611 bp, Cannabis sativa
gagaaattgtttgatcccaaggcactacagttcacattggaaaagcatataagaatctcaaaataaccaattatgctgataaaaaaattagcttgtcaaatcgaataagtcagacataaaatatcttaaagttttggcctcacacaagttcatcttggtttttaaactaactacatcgttctctccctaaactttaccaaatcagtatcactgaaccatgaactttttcaagtataatgttttccagttgaacatagaactccacatagtaaatagaaattagttcaaataattatggtatcactgaaatttaaatgcaagcttcagcacattagcctcttttaaatcataaacaaagattacaccatagactaagttatcccctctaatgacactgttttgtttcatctattatataacaaaaaatttcttcacaaaccacagcattatcaaactcaaaacagtattgaactgataatttccaacagagacttggacttaaatatagaacagaatagttcaattcttacatcataaataaatccttgaggttcccaagctcctttggaattggcccactgaatgcattgtgggagacagacctgaaattt

SEQ ID NO: 59819 - DNA, 982 bp, Cannabis sativa
ggataatcgtcggatgcaagcccggaaccggcgggcctggaatgaggacttagagaggacgcgtttagctaacgaaaggcgaatggaagaatgcttaagggagggagctcccttttaccctcctggcttccccacaagctgtcgtcggtgcttgaggagggttgttcaagggtctattgtaatcctgggttccttatgcatactttgctggcaccatcccgaccgcgagcgcttctgactcctaagttttagattttgttagctgttcgctatttttctcgtgtgtagtctttgtctgtattcgatcgttgtttattatgtctttctttctctctttcattttttttacgtttctagttatatttatgtaacctgtgcttgtaatctctgaatgggtttgcatttattacccttggtgtcccttcctatgttttgtgtttgctttacaaaaggttgggggagctgcggctctattaagtgtatttgttgcctatcatttatacatatatttatacgtactcattctccgagtttttttttaatggggtgctttagaaagtggaaagacatatatactcttaaggatgcttcttgaaatttgggtgcacgtgttttgcctggcacgtattttaatgccaaaaaggtgactcttcgtttccgtttttatggcatcttcattaatctgcatgcaatttttgtataaataggcttctcgttgagctccttcttttttcatctaagaattttcttcaactctcttttctttttccgggttagttcagttgagtttttcgtttatccttcctgcattatgtcttccttactcaaaacccagatacatcactcaaaagagccttcctcctcccacattttctcaggcttgcagccattggatcctgcttttctttctttgaaccctttttctagctttcgtgatttcaagcccactacacttcctccattgcatttttcagaggtctgc

SEQ ID NO: 59820 - DNA, 1077 bp, Cannabis sativa
ccatgaaggagttatgggtgaccataccctgcccaatgtaggtctagcttgccttggacaatacccatacttgagaatggtcggccagggtctgtaattcaacacaggtctggctgaccttcaccatacactctctcagagtatggccggccaacccctatctcaccagaacttgcaacccctccaaggatggcagtcaatcaaatccccacagtaacagatctttctgtgcaggcacaatttgaccaactcaaggacatgattcaagacatagcctatccaaagcctttagatcttaaattagattggtcaaggggatcaccattctcggcataaataaatgccttgcccttgcccaagttcaagatgctggtatggaaggtgtatactggaagagaagacctgttggctcacatcaaatactctgagatgaaactcgatctccagaaggttactggtgatgtgcgatgtttcatattcccagccactttgtccgaaacagctcaacaatggtacttcaaactcaccccaggaagattcaactcttgggccgagttctctcgagaattttacacataattcgcatcttcaaggcttgtaccatcacaaccagaagaccttgtcgaactcaaacaacgacaaggagaacctttgaaggattacatccagaggttcatggctgaggctacaaaagtcaagggccttacataagagggccgatatatgaccataatgggggcatactcttattgagtgacttttggaaagacatctgaagatctcaaccaacaacatgaaagagttccttgatagagctgatggatttctcaaactagaagaagccatatgatagggcatgtcaacaataggtagtcacgagacaccctacaatctcatgacctactaggcgcacaggcagacaccaacaactcttcccaaacctctagttgcaagaacaccagaaacaagcgcaagactaacaattctggatggaacaatggcaaaaaggggaagtttaacacttctcccacgccacaaaagaacaaggaagaaaagtacacctacttcaccctcctg

SEQ ID NO: 59821 - DNA, 1732 bp, Cannabis sativa
gccccaaattgacaatatgtcaattgggcgttgggtgccctaggcacttggtgccttaggtgctcaaaaatgaaaatgttctgattctaattctggcacaacaaatatgtttgtgataagtcttattcatgccaaggcacaaattttgagccattttcactaagacatgcccaaaaagtgaaaccctagttcagatgtcaacttgggcgctgggtgaaaatcctaggcgcctgggctgagatctggggtgttgtttctcctcttttcagtttccaagccttgggacttgattcttcttgtcttcttgattcaaaatattgaaagatggtgagttggaaacaacttttcaggatttaaacacctattctagagttcctagagtcaacttcggggtaaggctagggacccttctcaagtcgactactatgactcagaactactcagctccagtatattttttttcttaccatgtgtcaaacattgatgtccacgtcaccagagtcagcttctgggtaaacagtcaaatagcaaccccaattccacatgctggtctttaagaattaattgatgcatcagtgttgattaaagccactccagtcagtaaaggctgccaatattggaacttgttttactaggatcttaatttactaaatgtttgattatcacataaataatctaacatcctaaaatatgaaatcataaaaataataaataacatatataagattaagaaaccttacattggttgcagcggaaattaatgactatttctgttcaatcactttaatccttgattagggtattgtcaagtgacgaacctagatttctttcttaaacctaacaagtgacaattctacacaatctttcacaaaaagcccaagtaccatcttgaatagtgtaggctagaactcaactcacctttgaaacacaaaatagagaaagagaaaataactatacagtatacccaaaatttagctatctattaaaagctgacacgtgtactacaaaagaaatatgaatcagctcaatgattataatattaaattgtatttttaaatacggcttaaataacttgttttaattaattatagttaatagaaatattcaaccttcggccaaccacccagcaaccacccagaaacttatgtctgattgaaaccttcgtctgatgcaacctttggccaaccacctagcaaccaccctacaaccatcgtctggttgaaaccttcgtctaatgcaaccaccgcgcaaccacgcaacaaccaccctgcaaccaccgtctgattgtgtaagtgatagtgtaagtgatattttggtaattaaaatcacataaaaagtataaatgttgcctttaccttatggaagtatttttgtaaataaagtatcaacttatattttctatgtaataattcctatattttaaatattataaaaaaaaaatatgaaattttattagaaaaataagaaataattatatatgatttccaacaaaattatgaaaacaaaattaaaataagtattaaaattaacacaaaataatgtaaaaaaaaccttaaaaaaatattgagagtgatttttaaaaattattttaaactcaattttttaaatattggagtatacttatcattttatatggtgcaaatagaatttcctattatttttatattaaattgtttagattagtttgtgtaatatcctcactttttaatttattatttttaaatgatagtta

SEQ ID NO: 59822 - DNA, 811 bp, Cannabis sativa
gaagttggccattttgcatgaagtccaatttgaagagggcaaatttcctctaaagtatctaggagtccccctaagaccaaccaaatggaaacttgaagactgtgatgttatcttgaaaaaagataaaactcaagcttcatacctgggcaacgaggcacctttccttcgctggtcgggttcaacttattcattcagttcttttagggttaagaaactattggatgagtatatttgtgcttcctcaaagtgttgttaaagaggttgagaaactttgtagaggatttctttggggtactaaaggaaatagaagtaaagtgcacttggtctcttgggaaaaagcttgtctccccaaagtgtttggagggattggttttagagatggagctcaatggaataggtcagttttggcaaagtacatttgggcaataatggagaagcatgacttgttatgggtgaaatgggtcaattctatttacttaaaggatgctgatttttggaattacacactaaaacaagacacaagctggtattggaggaagctttgtagacttcgccaaaccttttgtagaggggatatagctgctgctggtatgtttgggaaatttagagctgcaaaactctataataacttagtgcagcaacaaaaagttgagtatcaaagaaatgtgtggtgtcggttaagtgtccctaagcataggtttattctttggcaagctttgaataatcacttgcttacccgagatcatcttcccaaacttaatatctttgttgaaaacttgaaatgcccagtttgtgagcttgatcatgaaaa

SEQ ID NO: 59823 - DNA, 1001 bp, Cannabis sativa
atattatgtcatgcatgttttagagttcaataatttctatttgatttaatgaaattttttatgttttttttatttattaatttattaatatacttatactacttatatattatagtgtgtctttttttagaataaacattgttatcataaaattaaagataagagtcatttacaataatagagtaaataggtggaaagatactctccaactaaaagcaagcttcatccacccctaatccaaattttgtcaactcatgggcagccatgttagctgtacgtttgacatataaaatttttacatcaggataaaaggaaaaaagatatgaaacatctataattagatcatgaaatggaaaaattacaaagaagagcacaaagcattaacaaccatcaaggcatcgaattcaatgtatttgagcgggagctactattgagaagcccaattcaaatcatgaaagagggcctttacttctatctcatgagatgcataattaacaatagttggcatagagagggcaactacaacatgtctgaaagtgttgcgaacaatagcacccacacctatgatattttttgatatgtctactgcagcatcaacattaagtttgagcgcatcaaagttaggtggctgccaaggcgtaggtgctgctgttgaagatgatcgactgagagttgcagcatcttctagatggtatggttcatgtgctattcgaaagttgtggatgtagttggtggagaagatagcaacattgttggcaggtttagctgagtgtccatgaataacccggttctgttttgtccgaattgaccatagtgtacatataatgtgttccatttcagacttagagtaaatcgatgatagatgaaccaagtaattccctcttttcatggaagaagatttcttccaatcaaaagacagatgtgaatgtttccatacagcctgtgcatacttacatccgaataatgggtgtccaattgtttcccatgctcctctagatatc

SEQ ID NO: 59824 - DNA, 1104 bp, Cannabis sativa
gaatgactaaagccattgtgaaaccgtggagaaacaaaaaaaggataaccaaaccctaaaagatttggtacacccaccactagatagagtggcccttttaggagtgaggacagctacaacaggagccatatgacggtgaaacaaggctcataaacctcactgagaggctcaaatggagcaagcggttgtaaaatcgcagatgtatggagagagttatttaaatgataattttacatcgaactttttattttttgaaagaaccacaaaaacaaaaatcagcaaaactactattatttaagagtgggcagttcatgttgccaaaaaagtatagagtttaggaaccaatttgccaaaaaaatcaaattcaaaaactaacttgtcaaaacttatttatttggggactactttgtaaaaaaaaagtttagagaccaacttattaaaagttatataatttcaaaacttgtagtacaaatgagttatgggatttattagaggtttcgaacaagacttataaaaagtaatagtgagtataattaaataaacttattaattttgggtgcataagactataatataaaaaataattaatgtatttttttttttatgaatatggggaatacattgaaaaaaaaattaatgtaacagttaaggatatgatttttaacacttttttaagtagttttttttattgtttttaattataaaagtgaaaatattttcgaaaatatattctataaaattgatttcaatttctaattttaaaaatgagaatcaaaattttaaattttgaaaaaaaaggtcactttcaaaaaaattttaaacaaacttttttttttaattataatctatttgtattttttttcatcaatatttttgtaacatcctactctgaggaacaccacgtgtcatgattacaataaaataattccgttaattggggtccataagctaagtgatttaacatcaataataaacttaatttaattaaataacttgcaatgatacatactttattttaaaccaaaatatttaaagttgcatattcgggatctcataaaatttagttaataatattaaaagctattttatacagactgacctaag

SEQ ID NO: 59825 - DNA, 993 bp, Cannabis sativa
  modified_base (332)..(332): a, c, t, g, unknown or other
  modified_base (387)..(398): a, c, t, g, unknown or other
taataacaatcctatttgcttagggaaatttgatactctaaaatgcataggaatttaatactctaaaattaattaaatctcaaaataccctcctcataccttctctctttctcttggccttctctccctctctctctagctctcaccaaacccaaccaatactcatgaccacagaaccataccaaaccagaaccaggccaaacccacgaccattgcaccacatccggcgaaactcactccgaagacgaaacgtaagacaaaaccgaggaggatatcgcgaaactacaaagagaaatcgtgaaatctgaagccccaaaatctatgagttctcnattcgcttgttttctgcattttttttttgtttttgacgatgtcgcgaaacatagnnnnnnnnnnnnaaacatcgcgaaatcatgaaacatgctaaatgtctccaatctagaatatttcgaaacacattgcgaaacacatcgctaatatcatcgttaaatatcgcaaattatcgctaaatatcgtaaatcattgctaaaattcatcctaatctcagatttgttctatcattacaaatacattgctaaatttcgtaaaatatcccaaaaactagtagaaagaaacgtaaaaaacgagagaggccgtgagagaagatgacgttgaggccttgcgactggggttctgggtcggggttaacgccagagagaaagagagaagtttttttttgaaatgtaagggtattttttagagaaaaaaatattaaaagtatatatactatttctaatttagtgggatattaaaacaatatattttacaattacgcatactaaaaccaaatttctctttgcttatagttttcataagaagacaaggttttgggtctgctattattgttatatatattattgacttaaatattattggaacacttaaaaaactttgaaaagttaaaaaatatttaaaggaagagtttgaatgaaaaatcttggaacaataaaattt

SEQ ID NO: 59826 - DNA, 1005 bp, Cannabis sativa
caaaattgataaatcttgaaatcatatttgaatttaaagatgccaagttactgcatgctcagtgggagtattgctttgattttagtgaggtatatatgtattgatcgattcttattgataaattttatgagggtggaatcacttaaaaaaaaaatcttgggcatttgaaatgatattcctatgtttgtttcgcaataatgagttcaggagactagtacgttagttttgggcctagaaatagtttcattggaacttgtgaatcttctattactacatttttatgctttggatcaagataaggcatagatcataagtggacaagttttagattaatattaaaatagatgtatgatcacaactatctattctaatgtgatagtcgcgttaattgtgaatgctcgtaaacacaatgtattcaagatagtggattaatgcatgtgtactctatgtcacatcattgttgctactaaatttaaatgttgctaaggtataattagacaaaaaatttaaatcaattaaaatctaaataaactttccacgtagtaacattgatggcttaggataaactttggataacaaataaaaaataaaggaattcaagccttgttttatttaaggatagttcacatgttatgttcatatgattttcataatctacagtaccatatataaaatttaagaagtattgagtattcgttattcgtttgttaagatctctatcatatgattgtcataaacaaagtctctcaaagttttgactcatcaaagcttaagagcctttatgttttagaaagctttaaagtgaaaaacacctaaagtaattaatctaaacatgcataatgatatgcaattacttcttatgtgcattgtttctcgaagtgacaaggacacaataagactaataaatagtcttaattattgtactgtatgcatcttgatttaatggttattttttatatttgaatggctccccgtccaaattatgtgtagtatacatatcctatc

SEQ ID NO: 59827 - DNA, 982 bp, Cannabis sativa
ttagccataatcttctcaatttcttgacaagtttccaagggaataagaaagacgctcatagcataagttggtagagattgaatgacagatttaaggagaacttcctttcgtacacgggataaaaatttgccattccaactgttgagacgattaatgatcttgtttttgagaaatccgagaataacagtcttctttctaccaataatgttaggtaatcccaagtaaagagagccatcagtagcttctgtcatgccaagaacgttgcaaatctcatttcagtggtgtgcttcattgttggggctgaagaagatagaggacttagacacattcactttttgcccggatgcaatttcaaaagagtgaagcatttgcttaattttgacagctgtgttggaatttgcttgacaaaaaaggtagctatcatcagcaaatagcatgtgtgttatgggaggggctcttttagcaacacgacaaccttggataacatgatcatcttcaaattttcttatcagggaagaaaacccttcagcacaaatgatgaacagataagttgataaaggatcttcttggcggattccacgagagggaataatcggccccagcatatgaccatcatgaaaaatagaatattgaacagaagtaacgcatttcataataagattgatccatttaccagcaaaccccttacgatgcatgactgcagacagatagtcccattcaactcggtcataagccttactcatatctaacttcatagccatgaacccttttttgccttttgttttccacttgagatagtgcataaatttcgaaggctatcattatattatctgagataagcctgcctggaataaacacactctgagtaggagagataacatgatcaattagcactctcatcctattggcaaggaccttagagagaatcttgtaggagacattacagagagcaataggccgcaagtcacccatagaggagaag

SEQ ID NO: 59828 - DNA, 1461 bp, Cannabis sativa
caatttcagattcgaatctaagaccccaaaaacacacaaactcttccatacactttatgatcacttgaactaacctcaagtgatttacatatattcatagtaattagaggtgtttattggaccacatcgaatatttttaggcctatacagatctaatctaattatatattgaatgttaaattttaccatccgatccgatccaattagtttcagtcatccaatcgatccaacatcgattagatgttggattggatcggttctttccattgaatgtattatatatatatttattggtttaatttgggtttatctaatattttaggcttagtattttttgaattgaatcgaatccatctaatattttaggtccaatatgtattagattggataatatccataaaaagagagtaaaatattcatgttaattttcatatatacatatatattttacgtataacattataaaatctaattactcttccaaactaaatgaaaatattaattagttcgatattggatgttggatgtaataaatttttaggcactccatccgacattcgatacgatccagttgaatatctaaaataacatccaatctaatccgatcacaaatggatatctaatatttggtggtcggttgtaattggatcgatcgattgacattagatattggatcaatttatgctagtaacattaattgatggtattatatatatactatatatatggtaagtgccaagttatgtttagttttattttaagttttggtttttttttagaaaaatattatatgcaatttcaaaataaataatgttcaatatagagtgataattgtggaaagtataatagtaaaatatattagtactaggaaacaaattacggtttgcgtgcagttgtaataattaaatcataaaattatatcaacttttaaaatttgatattttttatttactttttttttaatactgaaagatatttattctaataagcttttattttaatttttcgaaaacataaattaatattgtaagaaaaatcatcataaaataaagatatcctcaaacgtgaaaaagatattataaattgaaaatatttcacacaaaacatctaaaaaaaagaaaattaataaatttataaaaaatttatcatagtttcaaaattattgtcattactattttgtaatcgttactacattcaaacttgttatcattctaaaataaagatatcccaaacatttagtgaaaaggagattataaattgaaaaaatttcatacaaaaagaagacattttagctttttgttttcttttcatcaaaaaatagaatataaagagagaaaatagataaaaaaattttagagggatatgtatatactagtaaaaagttacgtgcgagacacatatattaaattttatgctaggtattttttactttatttaaaagtaatacaattaataattgaa

SEQ ID NO: 59829 - DNA, 801 bp, Cannabis sativa
aaaaattctgattcatggtatcaaaaatgaagtccaaaatagtatgctgcacgtgtgtgtgtgcaactaattgtttgattcatattttcgacaccctaaattattcagaatttccgaaaataagcaggattctagcatcactatgatgcttgcttactatcatacacaaaaaattgatttataattttatctatacatcgaaaacagaaaatgctactatgacaaaaatgatgctcctgcctagaaaatttcccatgtatacaacaatttccagttaaacctacaaagcaatatcctttatcacctatttcttcaacaagaataagctcaaaacatattgaaattaaaccattttcatgttcattttctttgaccattctaccaaacactaactagaacagttctacaatccaataattatatatataataatacccagttaaatttgtaatataatcaaaacctgaatcattccaggatgatcacgagtgatattcccaggccatggagaaccatcctgcataacccaaccttcctctggtttcttcaaagctttagccaccaatgcattaatcctaaccttaaactcctcatattctctctgcaacaccaccaaaaataatcaatcaaccaaccatttttgataaataataacacagaaacaaacaaaccaaaaaacaaccattttcaatcctaaccttcattgctcttctttccttaacaaaactaggatgaaccttatccttcaagtaatcaatcttctcagaaaagtaaaactcaggagctcttggctcaacatta

SEQ ID NO: 59830 - DNA, 652 bp, Cannabis sativa
accatagacctttgtgcttggacacggggggaattggtcctaaattcaccagatgcttcaaatttaaggaaagttggacgcgggattgcagaagcaacctcgttgttgccagtgcatgggattcggtggcccatccgtggcccctgctcgcgtttttaagaagatcggtgctactcgggttgcgcttcttcaatggaagagaaccgaatttggtaaaattgacagtatcattcaggagctggaactaaaactggaccaaatgcaacaactgcctgctggctccagagattggaattcggagattgaaatcagacgaagcttgaatgaagcccgagccaaaaaaacgatttattggaagtaaagtgccagaatttcgtggctcaaggacggagataaatgctccaaatttttcttcctttctgctgctataagaggaagaaggaatgccattgagtgcattctgaataaaaataatgaatggattaatgagtgagtgctgataggccaggaattcctggactttttcaaaagcattttctctggttctgatagtaaccggcagatggattgtggtcatttatttactgagaagatttctcttgaaaatcaagctgaagttgtttgttgcccgtcccgtgaagagatcagaaga

SEQ ID NO: 59831 - DNA, 663 bp, Cannabis sativa
gatggcaagcccaagtatcgttcatggcattcacatataggcattcgcagttgtcggtggaagaaaatctgagatgcaagtgttgtgttgggagaaaaggacatcaccgatttgtctgtattgagaacttgacccaaagctctgcgataaatatccaaagatctttgaatagcaaggcaggaagactcgtttgcttgacagaagaggaggctgtcatcagcaaagaacaaatgtgaaaccgatggggcatgtcttgtgagtttaaaaccatttaagcggccaatagcttcctcatgttgtaacagtcttgacacggcttcggagcatatgagaaacaagtatggcgatagtggacaaccttgacgaagccctcttgaaggtagaagagaacccgtgacttctccatttaaaatgaatgagaaactgttagtgcgaaggcagctcataaccaaagtaatccattcaccagcaaatcccattttacccataaccctgtcaatgaatccccactccacccggtcaaaagctttactcatatccagtttcaaagaagcaatggctttgcgccccgaggttttgtccttgatagcattgacaagttcaaaagctacaagaacattgtcagtgattaaacggttgggcaagaaggcactttgtgagtcg

SEQ ID NO: 59832 - DNA, 1575 bp, Cannabis sativa
tcgtgacgtgcgacttaaggtataaaccaagtggtatttttgtaattttttcaatgtgggctgtataaatgttgaatgggccgacccatagtaatattgtaatattttatcctttttgaaattttcctggttttttcctttttactaagtatctgtttcaatttaatttcttattattagcctacataatttacttaattttgaatggggtttttttttttgtgaatgagagggtttatatgaagaggaaatttaacactatttcattattattagcctacatttaaatataaattttcaacgttaaatgactaatcctttctcatttccactatttcattcattaagaatgaaatgtttatgttttatcaattattatgacaaatcttatctaagaaagaaattatgattaataatgagtaattacacattttgatttagatatataaatatgtataaaaatataaacaatgtattcttatatatgaatatgagtatgatatggtaatgacatcataaattcttctacaactatttatttatttttaatttttaatttttatagtgatgtcttctgttttttattatcttcaatttagaattttaaattattaatctttatttattatctttagttttttataataataaattaaaaacaataacagttaactaatttattaaaaaaattgatgacataataataacaattaactaatttataataatgaattatctttataccaagttaacaacttaacaacgataatagttaattaataaataaataaaaaattaatgacaaataatattgattcatactttgttatatatttaagcattatcaatttatcactatagaattcattgtctttttaatttccttaattttgatttacatcatttctcactctcactctccctctctctccttaattcttatattatatttgtaagtcttaacattttattgccaattaattttctagcttttctctttatttcatttgttgtagtgaaatcattttgatgtttatttgtgtcatttctcttttttttttgttcccactctttttagtttctggatagtcaataattctaattttgttatgtgattattataaagtattactttgagctacttataatttaatattttcttggatggatgaaaaaaacaaatttagttgatgtgatgaaaataataattaatatttttccaattttaaagtggaataattaagatttcaaaaaacatattatatatatatttttataaatacttcactaaatgttagtatttttatttttaatactaatacgacatacacaaatgattatgaattatttatattgagaattttatgcattaattatttatcactcaaaaaaactttagatgtacttattatacattaagaaacatcatcttcaaccaattttataattttataactcatttgaattatttttcccttttatatcaataacattaagatttataaccttttatataatgagttatattttaccaattttaatgtgggagtagattttaaaagacagattatatat

SEQ ID NO: 59833 - DNA, 899 bp, Cannabis sativa
  modified_base (763)..(771): a, c, t, g, unknown or other
ccccaataaaccatttccaagcaagaaaactaatacccaagctcagaatcgagtttcaacattaaagctccaagtttgagttctaaaattcaaaccatcattaaacctaataacagccatcaattcaagcttagatcaacataatctaacataattgaacctctgaaaactatatcaaacattaacagcaaccacagaaccctaactaacaattcatgcaaaattcttactccaaaacaaaagaaagctaaatagaaggttactaaagctataccttcaaaggatcctccaacaatcaacttaaaaccagtaaaaaccatctgaaaaacaccccaagctattgcctttccccaagggtttcgaaggagagagagagagaagagaccaaaaatgtgatcttttcttctttttgatattttgtaaaaatgagatattaaaatgataaaaagtgtttttatctacttaaatcatttcataaaatcagatttaaacaattaaattaaaatcacaaaaggacaaaacacaaatggttaaaagaccattttgcccttcccacactaaaagtcataaaatggcacttagggtattttggtcacttcaaaggtttctactattcccaacattcccaatgtctaactttattgttccactatactaaaaatactaagatgtgattcttatagccaaacaccgcattccaatattgtcgggcacaaaaaaagcaaaattatgaaatttctatatatgacataaaaatgcattnnnnnnnnnaataaatcatcataaataaataatgcaatactaataaataattttaataattaagccctaattatctgctaatttccaaattaaagctaaacggtctttacaattatcccccccccccttaaaaggat

SEQ ID NO: 59834 - DNA, 2838 bp, Cannabis sativa
tcatcacactgtgcaaacattcaaacaaaagtactaaaatctagacgcttttcactaactcagaaataaaatcagaataaatcaacaacataacttatatcgacatctaataagaaagcaaatttcaattcaaaatcaaaaaattcaccacgccccacatctgaatatcatcgccatcttcatcagcggcttgtttagggacaaaaagtagaagatgacttaaattcctcctcgaactaaaaggttagtcgaatgatcaatcaccatcacctctgataagaagagacagtaaccataggattcatcgactccaagactacggctaaaaaaagaatgattctttatcaaagatttatattatgcttcacatataaaaaaactgattctttatcaccccaacatagaataccaatttctttgctaaaaaagcaaaagcatcaaaaattaagtaattttttttccagaaatttcacactctgtaatagtatttaacataacaatacatcacaagaaaattttcatttaattttaaggaaagactacccacgtatagaaactgaacaaaatttacacttctaaataattacataatacaaattctaaaacatgcaaaccaacaaaatatacagactactgaatgattctcaagtcactatgggtcacctgagtgtgagagagcttgcagttagctccgatggatgaaagagagtccactgagaggaggacgaaagatggagaaggggtgttaaccattaatatttagttcaaaataagtttcttttttaaattaaaagaaattgaagacaaatttcttaattattaagttttgttttcaccttaattattaaattagaaaatgtgtgttttaaaactttccagttagacttttgtaatttaaatatagtaaccgtacagttacgtttttcactcgtttaatttaaatttaaataattataatatatatttttttaaaaaaagattataaaaatcagccgcctttctatgaaccatcccaaaaaaactataaatattcatagaatgcttcttaaagcccaaagaaaaaacgtttgtggtgttgttataaactagggttttgtattcaacttagggtttaataataatcagtttatttttattttcataatgaaaaaatcgaatctgattaagtcaaggactttcgataatatgcggccgaagatttttaattcttgggttccagaaacccatctttgtcaggtataacattggatttttaatcaaaatttcatttaatttcttggatctttacacacttttctattatgatgagatcatgagatttaatgaattcaagttaaaataattgaactgtgctgagttttctatcaagaattccaatttctgcaaaatttgtttttggattaaaatatttgcacaagtttcttattcaaattttgttcgattaatacagttagataatctttgaatcttcaaatgaatatgaactattcaataatgttttaaaaataaaaaataaaacaatttatatatatatcaaaatttaattttaaaaaattgttatattttgttaatatgattttacagtgaaagttagatcttttccataattttgttttgctaattatttagatttagctattttaatgaatgattttacattcatttatgtcaccattgttttgaatttaattttcgttcatattttatttaggttaagtcttttaactcaaaagatagtcctacaaaaatatctatgacatctcaagaaaaaattgaagaaaaattactaaaaccttcctatgtatcttatattccatggaaatttcctcccaaggtaactatagattttgtttaataaagctaaattaataatagtgtgttgaaaagcatgcattcacatcacaagattttaattaaagttgatttagtattattagctttaataataatttgtgtacaaataggttgttttgattccctcttggagggttctcaatggtgaggagagtgaggaaatacatcatcaaaattggagggagtcaagagtgcttgaagcattttatccacgacattcttcgattccgactaggtaaaagttttctctggcttcatttctttgtccctttaaaaccttacgattcatctcgaggttgagcaatagagcccacccaagggcgggtggggtgcgcccatcccagacttaatttttttttttaagaaaaaatctcaagttattttttaaacactatttttaaaatttttatcaatatttatttaaataatacaattattattttttgtttgaaaaaagtccaatttatttttttaaaacattacattttatattttatttagacaaaataaaattaattttacaataccatatcttaaatttttataactatataaatatatacaaaaaagtttttttaacatgtaatttttgttttaataaaaaaaaagaaaaaattagagggtcataacactctcttgtcctttaattttatcattggtcgtaattagtcgtaatactgactcaagcaagttgaacacaaattttcttttatttgacattatgttgtacaatactaacactttttttttctttctttccattagttcttgtgtctctgcagaagtagaaaatgaacactatgatgatagccaaactccacttatcccttcaattcccattgaagaagaagaagaaaaagaagtatcaccatcactagccaccaccacaagttcccaagttcaatgtgaccaaacctcttcaaccaaaccatctttcaatttgctcaacaaaatcttaagtgatccacaaaccattgaaaagtt

SEQ ID NO: 59835 - DNA, 5171 bp, Cannabis sativa
  modified_base (4517)..(4517): a, c, t, g, unknown or other
ttcgctcttctgtgattatggctacttggtcatttggaaagtccagtataaaatctgcaagggcctatcccttgattgccgatcttggtttgtatttgatgtcaaattggctcagttctgctgaccacttaagttatcttcctgaggcttccggtttggccaaaactttttgaaaggggaagtttgttaaaacctcaatattgtgggcttgaaagtaaggtcgcaactttcttgaagcgatcaccaatgcaagtgctagtcgttccatttgtggataacgggtctcggcatctaggagacgcttgctcacacagtacactggatattgtctaccttggtctttgtggattattactgaactaattgcgtattagaacactgcgaggtagatagataaaatttctccaggcatcggcttggaaagtattgggggtttccccaagtatgttttgagggcctgaaaagcttcttcacacttttcagtccattgaaactttttatttcctataaaatctgaataaactcattacatttgtcagaggaatgtgatatgaagcaatttaatgcaccaactttacgtgtaaggctttggacttcttttggtttggttggagattgcatctccaccaaaacttttatctttgcagggttagcctcgattcctcattgatttaccatatagccgagaaactttccagagcccactccaaagacacatttgagggggttgagtcgcatttttttttgttgcaagattttgaacacggcctctaagtgggtgacatggtcctcacatcttgagattttacgagcatatcgtcaacatacacctccatcgtttcgccaattaaatctgcgaacatcatgtttactagcctttgataaatcgctcctgcgtttatgaccaaaaggcattaccttataacaatacaaacctcgatttgtaatgaaggaggtatgctcctggtctggttcatacatcgaaatctggttatatcttgagtatgcatccatgaagctgagaagctcatgacctgcggtagcatcaacaagttggtcaatgctaggtaagggaaaactatccttaggacatgctttatttaaatcagtgaaatcaacgcatgtgcgccatgagctatttggcttgggcaccactataggatttgctaaccagtttgggtagaataactcccttatgaagccacaagccaaaaggcgatctacttcttctttaagcgcttggtacctcgtggggtccattttacagcgcttttgtcgaacacctcgcacttcggggtcaatgttcaattgatgacacatgacttgcggtgatatcccaaccatgtttgaatgtttccacgcaaaaacatctagattttgtttgagaatagtgacaagcctttctcgctgttgaaatgttagtttagaaccaattttcaaaactttattatgatcagaaagattgattggtacctcaattgtatcctctgcaacttgttcgatgttggtataatcgaggatccttgcatctagatcaggtttctctacttgcgatatcttctcgattctgaaaactttttgccgaggaggtggtgctttcagtaaatatttacatttactaacttcttcttttctgcgagtttaactgctgttttatagcactctctagaatccgattggactcctcgcacatatcctacaccagcgggggtaggaaatttcattgtgagatgatagatggaggtcaaaatcttcatctccttgaagatggggcggcctatcaccgcgttgtatgctgaatattgatcgatgactgcgaaatcggccatcgatttggcagtgataggggcggttcctagggtgattggcagtttaatcattccttttaatgcgattgtgtcgccagtgaacccatagatgctcgagattataggtcgcaattccttttcctgtaaccccatttatttaaaggcttggaagttgagaagattaactgaactcccgttgtccactaagatgcaggggacattgtcccctccaatattagcaacgaagccaagtgcatctgcatgccagtgatgaacccacctggcatcactttccatgaaggctatatcatcacattccttcttgaataacttttctggtcactcacttaaattgttcacattagtgagtggtttcttcctttgcttccttagcataccattcctgtgatttcttggaatctcccataatgtggggtcctccaatgattgttagaatatttcgtcattatcatccgcttgggatgatcttcaccatgtttcttatacttgccgaattttcctcgtctgattatttccttgatctcatcctgcaaaaaccagcattccagggtggtatggccgatgtccttgtgatacttacagaatttttcgggatcccttttgtccatttcctttgatcgggggaggttatctaaaaactccattctgttcctcaatcgcgtagatatgatcacgtgggactgccacttctgtatagttgacgaaacgtggtcctcctttcctattcggggatgtctctttctttgaagggaacttggccaactttggacattgctgcctctgggggctacgtcttctcgggcttcttcctctggaattctttcctctaggattgtgagatcgtgaccatggtacaggtgactcgagtttatccttccctctctctaactcagccagagaattttcaatccacttatgcgactcagccatagtgaagaattctaccagcaatttggctctttaaacctgtaactccttccaaaagtcgattctcgacaagacacctgtaatcaacataaaaacttataaagactctcggccttctcgactttagttactttggtattgaaacattttaaaataattctacaatgactcattaacctcctgtttgatattggccagagttgtgtaaggtggtttctacgtcattgtagctttgaaatgtgttaggaacagatccacaaaggtttcccaagtcaatatggatgtgtcaggcaactagctaaaccaatcatgaccattatcctccaaggttgccgcaaggatgcgacattttgctagttgaggtacctggcctacttccataattgtattaaattcttctaaataatctatgggattagtagtacctttatattttagcgactcagatagtctaaatccctttagcaatcgagcttgtcgcaattttgtggtgaagggagaattcccatgaagcttgtaaataggctttctctgctgctcgattattttgaatccttgtagtaaaatactctgattaacacccccagacaggatggcattgttctaagttgtcacaggtacagtggcaaccgcagctatattcgctgggatcactacctcagtagtcgcagctagtgcgttaagcgggtcgataacatttgccgagctatttccgttgtttatgccctgatcgcccaattggggatcacgaggctctttgcaattttgaggagtctgagatcgcccctaaaaactgtgttaaggtgatcacgaagatcacccttatgaacctgatacctttctcctcgtggtgttttcacaaaacctgacctggtataaacactaggagtacgactttgtgaggatgaagaacaagattctgcatcgtttacctcactacgtggttgagccctactgccagggttgcgtcgctctgggtcctcctcttgctgtacttcacggttggagtttcgtgtgacctgatcactcggtgtttgttgattcaagtcaagtccctcctgctcggtcctgcattccctgcgagtgcagttagttcgtcgcctagtattcgttacctgagggttatctgagcgtgtggttggtactcgtggaggacgtcaagtcctggtccttctgttgatctcaacctgcagagcttgcatttggtcctataaaagcagtatattgggttgtggttaactagatcataccttcagatactacggcaggtgggataggcgggaattgccccatagtggccaccggtgtagacgtttcttcagattgagcggcggtttcaaagaatagattgagaggagtaatggttgttcgtcccactcctccattaatggtatcaacgggagttgttcaatttctttggagtggaacattcattatcgcaatgttattgatccagtgttgttatctcctgtcgtttggtttccagccataatgattttcctttgaaatcaacaaagtatttctttcccactgacagtgccaaatgttgttggagaaatttagacaacaccaaaataaataatataataaagatattaacagagaatgtgtgagtactcgacctagaatgacgagtattcaagctatgaacacataaacgtactgaaaataaaaggaacacagaggaatatagtggtttagtcaaatcacggtctgcttagtcaactattgcaagggttttctatcttgtccatttcatgntgcatcactcctttatatacaaagcaagtgtcctttaattatccaaagattgaattcattatcaatccgtttgtacattgaattacaacaattaaatcaataaaaatgtaaatacaataaatgaagaactgtttcggcccaattcactaaatacaacaacgtatgcgacttctatagtgcgagttgtctgctcatattccaacataagctcgcaggcttaagatgcatacaagactagtcaaatctggaatgtttgtgtcctgttcgaattgcttatatggacatcctgtagtaagtcgataacctaagggatgtgagtccttatcgggttatcgaggttgttgggtcatcagcaccagctcgcagagtaaagaatcaatctttacaatttgcaggaagatctttgtagtctttgcacacatctcggtatatgcgagtcttaaactgatcctcggtcctactttgtgcacactatacgaatgcgactagactctcaaggtcacatgatctcgttgagtctggttcagttgaggtttacactgaagaggtctcccactgacatctcaactctcctcgaggagagtgagtccacgtgtcattttgataggagtctggtctcgagtttctaggtgagaaattctcactataacaata

SEQ ID NO: 59836 - DNA, 1493 bp, Cannabis sativa
tccgtaattgtgacaccgctgttctgttttgccttttgcttcttttcaataataacaaaatgattatccaaatttaccttgaggtcaaatgtttgatcgtgccattgagtgccagaggttgttttccttcccgttgagcctttagcctttcttccacctttgaacgactttggtgtggcagctagaggggattgagttttggggggtcttcctcttcgcttgcgcggtcccatggcggcagggactgtgtgagatgcttctttccccttcctttgccacatattagctttctgactgtcattcgatccgggggagaatgtcgcggtattgagttcttcagggatcgaattcttggatatattcgagaagtgaggagcatcttgaacttcttcaggaggaggggcaccattgttgtcgacatgaagcatacgggtagtcattgtttgggttggattgggatttggatttgggctgaacataatgccatccaaagcttttctcttccttggcccattaaggtgttcatggaccctaaagtcttctatgtcacaaatgggattaaaaagtgtgggctccctatgatatttgtcaatagttagggcccccattagtagttcacgggctttaggatcggcccaacactctttggaaggccatttaactaattgggcttgtgaacccaacagttcattaacttgattacttgactcccctaaagagacttctgagttgatagggaccacaggaacgattttctccccaaccggcttcttaattggggtagtgaggttattgtattcaaagtggtgtgtattggtctctcccaaagaagaattatgctcagttgtctccatcgcctccccctgagcaagtgtagttggtgagacctcatcccctctgttacaggctttagcagctgcaaacctctcagccgcctcttgcaggtctaggatggatacactttttgtattgtttccaaatggggcaatctccccaatacctggaagatagaccaacggcatctgggtaataaccaggtcagaatttggctcgccggacccctcatcgtcgtcggaaactatccttttcttccctggaagttgacgcctgcactccctgatttcagccgactcgccgttctgtatcgccttatggattttgacctggtttctaagggtggagtcatgaaatagcttcttttgtagaacccaatcctgaaaccactttgctaggggagatgagaaggtggatctttcatgtgagtcatttttcaaccatactccgaacattgggtaaacattaccattagcatctctgattatggtgggggatttgaagcatatactttggtcatgtgtgagaaccccgcatttgaagcatagtttaggcagtcgttcatatttatattgtatccataaatctttgaggcgttggcgccttaagaagaaacccgagaaaattggtttgttgatgtctatcgttgcccggaatct

SEQ ID NO: 59837 - DNA, 1299 bp, Cannabis sativa
ggatgcatcaatatttgggagtagccaagactatggttatggaattgtggctagagatgaacatggctttatgttgcaaggtgtctctcggctttgtcatggaagtgtacgttcggagatagctgaggcaattggagttcgtgaggccctgagctggataaaagacaaacaatggtcgcatgtgattttagagacagattgtttagtggtggtacaagcaattcgtaatccaattcatatgatctttttatttggtgatgttattaaagagtgtcaaaacttgcttgtaagtttaagtggtgttactatttcttttgtgaaacggtcagcaaatttagtagctcatgcgattgctaaagctgctacttcgtatcctgatcgtattttcagtatgggagatgtcccaactgaattgcttctgtgtttggttgctgaatttgaaagttaataaagtttggattactttcttttcttcaaaaaaaaaataaaaaataataaacaaccttaatttaacactaagaacaagctctgaaccaaccatgagctacagacccaaattcacccaaagttcccaaaaactcaacttaaaaacctagaaatcacaaaaaatataaaaaatgaacttacctcaagcttggacagctcctaggatagaaatattggcaagaaaacaaatgaattaagacttgaatttgatggtttttgctgggtttgtttgagccaaagagagaggtagagaagaggatatgttttgtgtgatatttttttattttgatttatccttaattaacttatgaaaaaaactaaactaacttaaaatactaaatttctatttttcattcagcctaggacatattagaatcccaaataaaataaataaataaatcctagtgaagttaccattttgcccttaactcaacactttgcaaatttctaacttagggttattttggtcaaagctaactaccccaaaatatcccgtcaactcaagtgtccactaaaacattctggtacaacaaaaactcattctattaccgtcgtaacattcttggccaaataatcgagcttccacattcacaaaactagaaaatattttattttaaaaaatggtatatacaatatccatatattttattaaaatttctgtgaataaattacacttattaactcatttttttaataatctcaaattttacataattaagttgaaaaaatcataatttacccattatgccaaaaatattctatttaattactatatttaatgaaatatactttatttaacataattttattttc

SEQ ID NO: 59838 - DNA, 2300 bp, Cannabis sativa
ttgggtctaaattgagtccactttgatgagaaacacaaatttttgctctccttcagtgttgactgcgatctcctcttgttttaaaattctgttgactacgttgttgggttcttctttgaatctcttgggttgcgcccttgtcacccggccagttggaactttacttgtatctttagccttagtgttctcatcacgaacccagacccagaccaggatccgaacctggatcacaacccgaacccagactcggacaaggacttcgaccaaaacccagacccggaccataacccgaacccagacactgaatcgaaatcaaaattaggactaggacccaaacccaaacatggacccaaatcgggacctaggacccagacctggattggggacttagatatgggcctcagaacccagacccaaatcggaactcaaaactcgagactcggacccgaacctagacctagactcaaacccagatctggacctagaccaagatcggatcccgaacctgaactcggactaagacttgaatcccgactaggtcctggactcagatcgagacctaggactcggacttggacccgggacacagcatgagaactaggattgagacccatgaccggaccgcagacctggaccctgacctagtacccagaccgagacctgggacctaaagtggaactacatagggacccgagaccgtgacccaaatctagacccggggctttgacctaacccgtagtcagcgtttggatctgggacccatacccaaactcaaacccaaacccgaactcgaaccaagacctgggtccgagttcaagtctaggtttgagtcaaggaaccggaatctgactaggacccagacccagatctggaccgggatgcggaccaaaatcaaaagtcagataacgtctcgggacacaaacccgaactcagacacggacttggacccaatcccaaacccaagacccagaccaagattggtgactaagacctggacccaggagcccgacaaagattgggggcccaaactcaaaattagaaccagaatcgggacccaactgggactggaatccaagacctaaccccggtctcagtcctagacccagacccggacacgaacacagaccaggacctaggatccgaatcaaaatgacaccgggacccaagattgggatatagatcatgactcacgaccggggcctggaccaaacccgtagtcggtgtctagatcttagaatcgtaccaagacccaaacatgttgcaatttctagactaggacccaaacccagacttggactcgagacccgaaaattggaacaagaactggaatgaagaccttggaacaggaatcggacattgacccaaaaacggatctagacgcagcaccgaacacagacccaaaccctaactgggatcgatagctagacccatacttgcgttaggacctgcgatcaagaacccagaacccatgaccgatgacctgagaccttgaccagaacccaaacccagacctagatccagaccaagacccggaccctaaaacagactgaaaccgggactcagacccagacccagacccaaacccagactcgtacacgaactcggattggaacccgagacttggactagtttcgagatcaggactaggacccagaccaagacacgaccaagacctgatcattgactggggctaggacccacactgggactcagattgggacccaggaccgagactgggatacgggacccaatactcggaattgagacctaagaactgaattgtgacccagacctagacaacgctaagacccgagacaaggacaagtaccgaacaaggactaggacctccacttgaactaagatgataaccaagaatgggacctaggaccctgaccttaatcggggaccttgacccatgactcaggacccaagacccaaacctggacttgagacccgaactaggaccctgactaaggacctagaccttgacttagacccgggacccaggacccaagacacgaggcttggacccgacctatagtcggtgtctaaatctaggaatcggaccttgacttggacctagaccgagactagaacccgaacccgaacaaaaactcgaactagattaaggcagccaagtaaaggcatttctgaccaggtaaaggcatttctgtatttaatagaatagggacaactaactagaaaacctgaacaagcttcccgggagaatcttgccaagtatactgcatttaccgtcctgacggaagacatggaaagtgtttatatggctactcagtcat

SEQ ID NO: 59839 - DNA, 985 bp, Cannabis sativa
  modified_base (768)..(769): a, c, t, g, unknown or other
aattatatttacaattgagtatttaacaaaaaaaatataaaaaatggtattgtaaaataaattattacataaaaaatataaattgatactttatttataaaaatagttttataaaatagtaataatatttatatattttatgtgtttttaattgctaaaatacttcttatactatcacttacacaatcagacgaaggttgcatcagatgaaggttgttaggtggttgaccgaaggttgcattagacgaatgttgctggatggttgaccgaaagttacatcagacgaaggtttcaatctcatgaagtatggatcgtgggttgttgttgaaattgttttgtaatagttatatctgttgcgggccaactaatgtgcaactaaatatgtaaaatgtgaatgtgtatatgtaagaaactatttatgcaaaatattacttgtaccttaatagtaatatgtggagaaataactgttagcaaaatatttatgcaactgttatgaaacattaaaaattataacagtgttttcacgtacgtagctctatctacatgtctcatcgtgatttaatatgaacaaattcaccattagaaagttagagaacaacaaaaatacaccaggataaatatttaaacatagtattgatgtaatttttttggattatacttgagtttgattgtttgggaactccagttcaactttttgagatcttgatttcatgaatctgaaaattgaagtcaggacattagttttatgcgaattaaactggatttctnnttgagttttagtttcgtagtagtttttctacactttttttttcatgaattcgaaacgcccatgttttaattgattctagtcgtcttctcaggtgaagtcgtcgggattaatggtggttctctttctcgttggatttttgttttggttgtgttaggttattgcgtagttgcccgaaggttgcccaagaagcatgaatcctgagttgaaggtatgtgt

SEQ ID NO: 59840 - DNA, 801 bp, Cannabis sativa
ctctaaattaaataaagtctcatatttatgcatccacataattatcaataatttaagataattatgtaataatcatttttttcaacgacttaattttataatatgtaccaatatttattgatttttatttatgattccaaataattaaacatgacgtatactcatcatttaccaaatggaaaatcattgccctatagctgatgttagcgcattacatccaataagcacaagtgttttcgcttacaacccaatggagaaccgagcaccacgacacttgcaaagataatatagctttgcacacaagtaagcggtgggaaacattattccaatccaatcatcaaggacgttaaaatttatagatcatggagggattgaagcaattatgacgttagatcacggagtgtgtgcaaaatacaaaatcggacagaaataggtattttacaaagcttttggttgttacaaactactagtacctgctataaacatgtgtctagcaggttgttggttaaaattagttgaaggtggttattcctgttgtaccttctttataatgagagtcatatattactcttattctacctggaaaaccgattacaatgtaaggaaggtatacacataacttattacctacaactaattataactaacactcactatattcatgcttaagaacagttactatttagtaacaactaagaacactaacaacatgaactcctctaaattaaacccatttcaatataatttaatttgttatcaatagaagattagaaatcatatggttacatgtagttttcatgt

SEQ ID NO: 59841 - DNA, 611 bp, Cannabis sativa
aaaaaaaaaaaactactgaattttcttttttgaaaggaaaaatctactgaaatttgagcaacaatgtttcttattttttattcttgttccgtacgtgtattgtaaaattttcaaacagcgtattggctttattcaaacatttacatatggcccacctgtttttttatcaagtgggctgcaatcacagattcaactctcataatttgatgcaaatatgaaagtataaattaggagaaaattataaaagtttactttttttatggcacagatcaataatacaatgagattatggttttttttttttatatatatttgtatgggattttttatgcatatttttgtaaaaaaaatggaaatcctttatttttaaaataataataagttttgtcagaaaagttactggcgccgaaaaaatcgccaaaaaagttaccggtgctgaaaaagtcactagtgccggaaaagtcgttgaaacagttagtgtcgctagaaaagtcatcagaaatagatatctcagatataaataaaaatagaaccggttctataacataacgaataaaaataaataatacaaaataattcaaaccaactataattgaaatataatcggtcta

SEQ ID NO: 59842 - DNA, 3427 bp, Cannabis sativa
gcataaatatgttttcaatgtttaaaatgactaataagtaaaaaatgataaaatatctaaaataaaatatttctattatcattgttcttaaattataatttgaacaataaaaataatagctaagaatgtcaattttgaatttaaacaattatggttaggatatttggaaaaaatctagactaatattgaattttattaaaatttaattagcatataagataattatcatataatattttaactaaaaatatgtcaaaaatgataatatctaattttataaattaaatgataaataaaattaataaattaatcattattaaattcaaatcataatttaaaaaaatatgaaaaatatcaaaattcaaatttatattttttaatatccaaaatcaataataatctattacaaaattaaatatattaattttaaaatgataattaagttcaaatatgaacaatacaatatttatactgattttcaggatttttagaattttaaataattaaaaatgaattttaaaaaaatccaaagaaaattgaattttggtgacaaaagtcatcttgtctaaaattttcaatgatactagaggttgcgcgcacgcggatgggttatcagggatgagtgacatgcacagagggggccgatcgagaaactcagtgtgcgtctgagatttgtgcatgtagaccatgctagcatggtccgtgcacgtacggaaggccttctagctctgaaaattgcaagcattccaccatgcatgcatggtgcccgaccatcaatcttcaaaattgaatttcaagtttagttttgacccaaattcaatttcataaaattcatacttacttaaaatccaaccaactttaattctaaaataattttaatcacaaaatacgtaaaatataattatttttcatagaattacatgtagtttcacataaaattaaaaaaatcacataaactcaacatgaaacatccaaatcaatgcaaaaatagtacatatcgttttaaatccatagtttatgaaagtaaattattaccttggcttcgaggcaagttgttaatcttattttaccaagatcttaattttataatcatgtatgttgattataaatattataatctaacatcttaaatatgaataatcctaaaacgataaataaacatgtaaaagtataagaaatcttatattagttgcagcaaaatataatgtctccttccattctgtatattctaaatctcattcctttctgttgtaaagtaataacaattactaaaccttgattctccttcgttaacctgaaaagcgacaatttttcataatttctacgaaggtctgagtatcactttaagtagtttgggataatacttaagtcacatttagaacatattttcacaaagagaaatatctatagcaattcaaaactcaaggagaaagaaaggagagcttttcctatgtcatatctaggaattaggttagaatggaatcactaagctctctctcatcacttcctttatataggcatcacttagagtttagtttatgagatggacttaaaataaagataattggactttaaatctactgtagggctgaaaccactaataggctatagagttagacttttaccactttattttatgtaatgaaactaatgtgtctttttccaattgtatcatttatctcatctaattatttgaatgccaattttttattttaataatgatcaaataaaaatacactttaaatatatttattaattagacccacaaagtgtcttaattaacaaataaacccctacttctcttttattctcaaaattgcccaaactttgtgaatattctcaaataagacaatctatatttttgaattctaatcgacttattaaatcaattaatgaagtctacaagatgatattatcctagacaatgtggggaccatgggcttatgtaactaagctcccaataagtagatttaaaatttattaagtaaatttcctagcttattaatttctcctgactacactatagatttgaaataacactcttgattatatagaatactctatataccaaataaagatacgctataaattatctattattttaatctaaacaattaatgatcatatatagacggtttatatcgagtaaggacaaatttattattttacccttcattatattttatccttaaaatacttaggtacttgtaaatgatatatcagtaaactaatgtaattactgaaatgagtgctctttcatttatcatgtttagccaaactcgaagaaaactgtcgttttacttctaaataattatagaagttatagatttcatatctatgattaacgctcccactcatgcactatagagttccaaagatgtaagtcctacaggtaagctggtaatgaacaagttaaagaattcatatagtataattaagctagagcttaaccatctcaaaattgagttgacctaagatcaactaagtgacattgacttagaaaagacataacatctgatacatacgatacaactttgctaatgccatccaagtgtaagtaaactacatcgttgattgtcacgttagtgtatttagtgcactgataaatcgtgggactaaatagtttgaagcatataatcatgattactttctactaggtatacaacactatcatcgtcaataactatatgttcggaatttaataaaatttatatattaaacatataatcataaaaggtaatcatgtgaatcatgcaacgttaaataatttatatattttattaattaataatatagggcataaaatctcaacacttggaccattctcaaaagtcatctaacagttaaacatatttgtattaaaattaagaagagttacatccacgtcatttttgaataaaaatattaaaccaccacctaatcctactctaaggacttcaagtccattatttaatttaaaacttggcaaaaataaaaaattacattagatcctagttccataaaaaaaaaaatcaaacatgaggggagtgctctttaacaagcaacttcaaatgacggaaaacactcgggttccccaaattctgagtattacagcttacaattttcatggttggttgtagggctgaatctcagcctccgcatacttgtcattgaaaccagattgatccatatcaacatcagaaatagtatggttttgtccttcttcaagcagcaaatttgaagtgagcattcctgaagtcatatatacctttgcatctctttaacatttgtctcagcgacgcactatcttgttgtcttttaatcattcaatttggtgaaactttctccttattgttatgcgcactgtcacgggctcaccttttcaggcagcggaacacccgtgcggcaccttgacttctctaaaccaaggtcagccttccaaccatcc

SEQ ID NO: 59843 - DNA, 987 bp, Cannabis sativa
agaatgaggccattgtcttagactagccccaaacccgatatggataaaaaccctcacttgtggcggaggaagaccatgcttacataaaaaccgaggaccaattacatgtaaccaaacaaaaactaaatccctcgaaggagggatgcccatgaggcaatagcaaacaagtttacaccatagcttataagaaagctctccattctctaactaagtctaaaaatgaaacattttcaaaaagctttgtcttgtacgctcatgaggcggtccaaaatttggttttttcccatagagcctccactgagcattccgatccttcaaagattctactatttcgttctaaccaaacaacccagagaactgccaacaccgctgttctccataagcaattgctccgtttactgccccccaccttacttactatcatatggggaaccgaacacggcatggtcccttgggtctcaaattcgtgtagcagccttaaccacaaggacaacgcaaggtggcaccttaagaacagatgtgccattagttagtttatgtcttctctaacaactcatcattcgacaacattacaacaaatttaatattattgaaaggagcaccaggacgaggtatagtttacaagaatcatggatatacacaaattgagtatttctatgatgcaaattggatagactttaaggtagatagaatagacgatccactttaggatattgtgtatttgttgggggcactctgatcacttggaaaagtaaaaaacaaaatgttgtgtcgagatctgaatcataaatagagctatgacacagtcatagtgtgaggtaatatagatttatcagcttttgactgaattcggctttaatgcttctattccaacaaaattgtggtgtgataaccaagttgttctttatattgtctcaaatcccgtgttccaaaagcgaactaagcacattgagattgattatcattttgttcgtgagaaaattcaac

SEQ ID NO: 59844 - DNA, 1298 bp, Cannabis sativa
accacttgtcctgaacactatcaatgcagaaatcaaaagcaagactgaaaagattcttcccttgaataaacttcttcttcctaaaaaaagcaaccaaccaatatacttaatatcaaatatgcaaaaatttaaaaaacaactcaaataacataataaaaacaagaaaacatacttattctcatccttaaacccaacacagaaccactcatcaaatgcttttcgttgaagttcatgcggaggatcaaacaacccagaagtaaacggatatagacctttaacattctttttcttcttcttttcattactactagaagaccccaaatcatttctgtaaggactttgtaatgccacactaggcttacaagccctctttgatttaggagatcacaaaccttaatcttgtcctaaaaaagaaaccaaacagtaacatttaaatttaacaataataataatttaaagaacaataaatcataaaaaaaaaaacaacaaaacatcaagtcataccataatcttcttcacttcatatacatgacacacatcatccaccttctgatttataacagccatcacagattctgaaaaaccatcatcggtacccgcactaaccttctcagcaattccctcaactccatctacattaccaccatcagaacccaaagcttcatcctctaccattgcaacagtctcagtttgtcctaatagcgaacccattatgtcaaaatttggcatatcctaacaacaaaagcaaatcaaagtaacaaacaaattagttactaacttaagagaacaaaaatacaataattacacaaaatcgttatgtaaaaaaattaagaaacaaaattaaccttttccaaagaagataaaccatcaaaatcttgactatcaacttctttcatagacatctcagatatgtttttaatttcctgcacaatataatcagaaaaataaacaattaaatagcaaatattataacagaaaatatcaaataataataaaaagaaactcaaccttataaacatcaccatcaccatcaacacaatatttgccatccttcacatcaccagcatcttcaccatcccccttaacagtaggctacaataaaaaaataacaacaccacattataaataacaacatcataacccaaaaaagcacataataagaaatactaaaaatagcaccataccatcatagcgcaactaataacacaaaaacacaacatacaaacacatgaaaaactaaaaaatctaaaaactactaaataatacctcaacatcatcactaatgtcatctaggttac

SEQ ID NO: 59845 - DNA, 1853 bp, Cannabis sativa
taaccttttgatggcttctgtagcagccatgtattcagcttctgttgatgacaaggctaccactttctgtaggttagatttccagctgatgcagcctttaagagcagtaaaaagccatttacatcctaccagcttgtagaactctggtttcttcacaacaatccaagttctattcttcctaagagactgcatctcttcttggatggcctggagccatgctgcagcatctttacttctcatagcttcttcaaagctagtggattttgaactatcaacctcttctgcaatcataagtgcatacacaatgaattcagcataaccaaaacgatcaggggcttttctctatcttctttctctatctctagctaattgatagctgctgagttcctgttgatcttcattgtctttcctttctgttgcctcagttccatctggaacaacattagttggtgctataggagcaacctgctccacctcaatttggacattctcatctaaaccagcttcattgtctttggaagtgctcttggtttttatggccatttcatcttccttgaaaaccacatctctactaatcaaacacttcttgaatccaggttctaaacaccacactctatatcccttaaccccttcagggtagcctagaaacatgcatcccaatgctctaggttgcaactcattttgtctaacatgcacaaatgcaatacatccaaacacttttaagtgatctaagtttgggggtttacctgtccataactcttgtggggtcttgaagtttttcggcacagatggtgatctattgattaggtaacaagtagtttaagagcttctccccaaaaagttctgtccaaaccagctcctagtaacacacacctaaccctctcaatcaaagttctattcattctctcagcaacaccattttgctgaggggttttgatcacagttctatgtctcttgattcccattgtagcacacaatcccttgaactcatttgagcagtactcaagaccattgtcagttcttagtaccttgattttgttcccagtctagttttctagtagcctcttccatgtatcaaaggttcctagagcctcatcttttcttttcaacaaatatacccagacttttctgctgtaatcatcaataatactcataaagtagtgtgctccacctttggttggaatcctagatggcccccaaaggtcagaatggacataagctaacctttctgtggtggtgtgttctgccttgttgaacttcaatctacaagccttccctaaacacacattcatcacagaattcaaagtctttctgttagcttctccttgaacagtccttgccttttcatttcctcaagtcctctctgacttacatgccccaatctgaggtgacatagccttacatgactgcgtttggttgagtccataacaggtgctacactacctgatattgtattttcatccaggaaatacaatccattactcaaccttcctctcaacacagtttctatgccttgtgcaattttcattacaccttcttcaatcttgacaacatactccaatatatcaaacataccaataaagagaagatttcttttgagatctggaacatacctgacctgctgcaaggtcaacatgacttcatcatgattctttaacaagattgttcccacatctttgatctcacacgctttgttgttcccaagaagaaatgtgcccccatgactctgtgaaagagtcctaaatagtcctttggttggtgtcatatgaaatgaacaccctgaatctagaattcaatctccaccttaatctgatctagacatcacaagagcatcagatgacactgtaagtgca

SEQ ID NO: 59846 - DNA, 887 bp, Cannabis sativa
tagcttatgattttgatactaaaaaaaatttctaccctttaaaaataactcattttatgtttttcatctcaaagttatttatttattttatttatcatcataaacctacaagttaaaacttatttttcaagaattattttttttaattttttttttctaagtatcatcttaaaatctattctcatactaacccaaaaaaaatgatttattactcatcaaaattttgctaatctaattgagatgagaaaaaaaaatcaaggaagaagaaaaaaaaaagtaaagaagataaataagaagtgataatacatgggagagaggagaaagaaagataaaaaaaaggaaaaaagagcataaatgagaataattatataaacgagtctcattatattacatattaataaaaaatatttaaattataatagttttattacatgacacattgtattggagacacatgtcataataattcttttcttttatttttaatctactacatgcaactacaatttatttaatgtggtcatacatatcaatggtcaagaaaatatctttatagtatgaggacaaaataggtgtgcccaccatagaagttttcaatataaatatatataatattaatattattagttttaggttaattaaacttatattaattttagattaatttaaatacatataaatattaatatattatttgtaatatttttattttttattcttatttttaatcttagaataatattcaattttaatatttttaaattttatttttatttttatagtatttttaaaagtttaaatattgttttttaaaataaattaaaaaattaaataatttcgtttaatttataaaattttaaaaatacaaataacaaaataaaactagc

SEQ ID NO: 59847 - DNA, 812 bp, Cannabis sativa
tacatgtcaaatgtcaaaatgtcaaaattcagggatcagggaaaaaaaattactaattagccaaataaaatatgtacacatacaattaaatgtttgaattaattttatttttaatgcattatattatattatgaattttttaaagttttacatgatattttaaataattatcgtgtacattattatataaaaaattaaaattaaatctatctgaataaaatgtcatcgatccaccaattttagaggatacaccatatactttgtttggcatctcataattataaaacttcttttgctagaatctcataattataaatattgtactatattgtataattaattaaaacttttggggtgtgatattgacactgttttcttcttatccattttaattattattttttaaaaaaaatacagaaagaaacattattcaaatagctaaattacatattataatatcttctaataatagagcatttgttagagtaaaaaaacaacttaacaaagaacgagagttacaagcaaattaaaataatgagcagctctattcgtagattgagaaacaaaacaacaggaaacattaaaaagagagtttaataaatatttacaatcatccacaattaagccgaaagtagaaaacatttgaagggagttgaacaacacttgtattgcaataagactatggattttaatgaggatattactccaattcttaactcaatttagagccttcttaatgcccataatttcagagcttttttttcctgaagtgtgtaaatattgtttttgtatagtactaattataccccata

SEQ ID NO: 59848 - DNA, 1166 bp, Cannabis sativa
gcaggcagaccttgtctagcacttcatcaggagaggtcatacctaatacttccacccaagttaattgtgccggccagctgattggccaaaccaaccattcacagagacaaccaggtgtttctatatttaatcgattgggaacggttcatgatctcagagatgatctgaacaaaaggagatggttggacaattagcatgacgcgcctgtcgtttagcctagggctcgcgctcaaaatcccgctcaaagatatgctgatgtgactctggtcggccaagaggctgaacaagttaatcctgccgtgcaagcacaactggatgagctaaaaaatatgttccaaggcctggccggtcagaagaacaacgacctcgtgttggaccgagcacgtggatttcctttctcccaagagattaatgtcttagaattgcctcacaagtttaggatgccaacttggaagatgtatactgggaaggaagatcccttatcccatctcaagtattttgaaatgcaaatggacctgcaaggagcacaaggagatgtatgttgcagaatttttcctcctaccctctcagaggccgcctaataatggtatttcaagttggcacccggaaggttcaactcatggaaggctttctccttggaattccatgcacaattctcctcttctcgccagcttgcattgcatttagaagatctggtcaaagtgaagcaaagaccaggagaacctctcctagcttacattagcagattcatgacggaggcaactaaggttgcacgggtgaccgaagacggaaaattgtccgcaatatatgggggcattgaagttcttggagaacattggaaggacatcaggaagaacggaccaatagattctatgagtgacttccttgatcgtgccaatggttttatgaagcttgaagaagccattcagcgagcacaggttgagcaaaaacatagccagccaaaagttccgtctattggaacatccgtcccgctcgcccagtaccctagtagttcgaactcgagtggtaaacggtccaacaacaataggcaaggaaatgggaaaaagggaaagtttgctggcaaaatcgaacaagcacccaaggagaatactaccaagtttactgctttctctatccagacagtagatatagaaagtgtttacatg

SEQ ID NO: 59849 - DNA, 3610 bp, Cannabis sativa
aaatcgcaattaaaatttacataaaagttaattacttgaacaactcaaattgtaaatttaaaaacaaagataccaatattaattaaagatggaaaatcttttcatgacctatattaattaaaggagaaaatgatgaaaaaattattgaaagtgtatatgggtacaaatatgatcgttcacacataattcatgaaggccatacttctccaattaaataagaatatgacatttcacgtcaattacatgattacaatattaaaatagaagattataaattttttaattttgtcatttattttcaagtttataacgtaaaaaaatgatgtgggaaaatctttattttaaaattattaatttattaattaatttaattaattgtaaaataatagtattggtactagttattctctagataaagaatgcaattttgtaactacaaaatggaagagaaaacaaatagaaacaaacaagatttttataggtggtgtccttctaaattgttaccaggggccattagatagatctcaaaagtattaattgacttacgtataaatagattcatttttatctgtatttcgtaaacttgatgtattctactttctcaaagtgaatattgttgaaacttcaagtacttaaactcccttcaatcactttaaaaagtacttgctttctctcgaggcaagatttgaaaaactatctaccaaaagcttgaagaagcttcttctgaagatagcactgttgttcatcttctttgtaaatgagatcataactataataactcagctgaaatctatatataaatcatagaatatttttgtcgatctaatatgtcaaaaataaaattaataatgcaaatatatggttttataagatagtaaagggtttatttataaattaatctaattaactccaagctcaagtaaatcgtaattgaaacttaattttttttttaaaaaattatattgtatacccattttttattaccccatttcatttttacctcttattttttagtatttcatttataccctcttttattactcatatccccactatacccttaggttatgaaaataaccttattggatatcttctccaaataacaatggctccttgtcaccacgatcgacgatcgacaactttgatcccctaaccatattcgttcctcctcactatcactatcaaagttcggcaccgtgcgcaccacctgctaacaatataacttcttaaagttaatcttattttttagttccacatgcatgcaaataggtccctccacgaaaatacacaggtaaaggtctatagtacttggtgaattgcaagtgaaaaggagaccataagtctgcttgatcacttggggagcacccacaccatacatcatcaaacaagcacaactaaatttaagcaaaatttaaagttttaataagcaaaaaattgaaaactaagtacgtgcgaatgacatactttatattagacataaaaagtataatttgggattaaaagttgctcagtcagctacatgtctaacaaaacaagttaaagccaggattaaagactgcatggctggtcgtctgttcaatagtttgaaaaaaaaaaacaaaaaaatcataacctaagtatagtatcatagtctcatacctctcaagcctcccaacaaattaaaaagtaaacagagatgaaactaagaatcgctcattgatcccttctttaagttctgcagcttggttcgaaactcaagtatttttaaggagacttgcagggtgaagtatttttccattgagttccaaatatgaagcgaagagttgcatccaaccattcttattaaaagtctttcattcatggaagaaagcaaccaagacactagaagctgatcctgaacttcccattcaattaaagtacggtggattaactttgttgatttcacgatctgcatcattcaagaattcagctggtggaggttctttgatgtacttcagcaagcgattacctctaatgatagcaagaacttgttgcttccatataaagaagttggtgcaataaatttttacaaaataacaataaaaattcaactgtaatagtctgcagcagcaaaatacaattttgtcactgcaaaatacaattttgcagaaacaaaccagaaccaaaaataaaaaacagtagaaaataaaatcacttgacacaagagaattatatgtggtatcagtgttcgaacactcctagtccacgaggtcacgcccagagaataaaattaactggtaaagtctcaaataattacaaagaaaattgacttaaccaattttagactccctctaaatctttgccgcaaccctttgtaattcacttcatgaatctgatttctgaaacaccatcaaacaacgaactcccttcatctttgatgtgtgagtgtttaccttttcccgaagtaaggcttgaacaagtcttctctcgaagacctttctcttattcaatcaagttgttcaaaccgatcctaagaccagcataagaacaaatacatatgcaaaacttaactgaacaactaagttctcacaaaaagaacactctcctcacaaataaaaatatgcaaaacataaaactagaagaagtaaatagattgactgctctctaggttctatttatagaacatagcaaccctaaagacagccacaaaattgatttcacaggcgtacaatactttcctaaaaaattcctaatttgcaacatcaaaattggactctgcagcaatagatcaggaccagaaagaaaactttataaaatggagcacgatcatgaatatggacttcaaacctgccaaatacattgtgtttgatatgatattattaatatacaaccgaaattattaaaaagagaaagaggaaagtcacggatgccaaataaagacagctttccataagagaattctttctcttacaagaagtttcctaaataaatacagctaaaaaaagaatattttcttaaaagaaaatgagcaataaaggcacgaaattaatgtagtcaaatcagtttaattacacaagaaaatcacacattaaaaaaaatattttgacacccaaattactaaagaaaaaagactctacatggtatttagcagttcatcttcaatgtatgatgtaaattttacattaaatttattaacttaaaaaatggctcaatgttatattggtctaaattttactattatactcaaacacacaaggtgtaaattactcctaaattcaacataattattaaaattttattgaaattatataaaaaaaatgtttcaaataaataaaagaacaattacataatacaccaaaaaaattaaaaaaaatatgtcaaaacattttttttttttacttttaggctttgagcttttttacttacaaaaataatttttcagttaaaataataaacttatttttttattatttatttatagttgtattatagttcttatgaggttttattttctgattgttttataatttatttatagttatcgagagattgatttttctttgtttttagttattttcttacttttttttttgaataaaaatttaagtattcattaaactgagaaatcagccaaagcaatggcaactaactc

SEQ ID NO: 59850 - DNA, 1202 bp, Cannabis sativa
tgtttaactctttgagatttcacattaacaagatttgccttttcttttccagcaaagctacagatgccttgctacttcttggcaaggtagctgcttatgcattgacactaacaggtttcttctactgtcaagtatcgccatccttggaaactgacttctctactgagagctcttcctctgagtaagtttgtttagctcattattatggttgatttcttttctttttcttgatatttgattaatgggggtcttatcacatttaaaatttccgtttgttgtgttagaatatttgtattcattaaagtttgattcatttctcaataaactgcatttgtagggcaaactctgttttgtatgttgcagcaataatagtttgaaaaaataggatcatcgtttatttattttctaaacctttatcatcaagtgttgtagttacatttattgcatattatgtcaagtaataacttaacattttagatcaaaatgtattgcatgtgcagttgttagcatacagcttcagcatttttataactttaaaatcatactattaacagccatttagtgcatgttttagtttgctctcactcactcatttgcgtcaataaacaacttgtttgtagttgcgtcaataaacatattttccaacattgtctgggatagcctttagttctgtgattcttggtttctactgccagtgatcatgtgcttagttggctttctttatctttctccctctttctcctccccttgagtgaagcatataggttgttattgttgttgctttattcttaactttttcgaagtgttttggaataggaaatcctgttgttcttattgtctttagggtaaaaaatgggtcatttatgttacaggctttagaatgtcataagatgtcaatgagcaattttttattttcatgttttattcgattaacattagcttgaatatgattattcagggaagtagacaatggtgagttgtcccccaaaaatcattatgacgtaaataataatggggatgctaataagtttgaggtgaaacctattggagacggcaatactggaaacgaaaatcattcaggcaagcaacccatgtttcaaaggggggtgctgagaaccaattgcatagattgcttggatcgtacaaacgttgcacagtatgcatatggattggctgcactgggacaccagcttcatgctttg

SEQ ID NO: 59851 - DNA, 802 bp, Cannabis sativa
  modified_base (33)..(37): a, c, t, g, unknown or other
ccttgattttgtttgagtttcatatatatatannnnnatatatatacgtatatacggtgttcatatatatattatatttattttcgggtgggtatatatatttttattaattatatatattcatattatatatgtacattttcatacgtatatatttatacacatttagttcattcacgttcatatatatgtattatatacatatatacatttattcatgcgtttatatatacgtatacgatcgggttttcggttatatatagttatatatatattgtttatatatatacattttcatacatttgtttcgattcatattcatcattttatatcattgcttacatatataaatgttaaatacatatacatacatatatacattttatttatatatatattatatacggtataatatatatttttcaatatatatatgtatatatatttatatatacattgtatatgtatcaatacattcatatattaataaagattgttctaagcatgaaaatccactttgaaaaaacaaagaaatctcaaaatttttggaaatgtttttcagacccgaaaatttttgttaattttaaagtctttgtttatgtgttttcgatgcatgaaatgtatatgaatgtcttaattttgcatttagatccatttggaattgatttggagtcttttggttgtcgaaaatgaaatttccgatcgggtttaggtcgacatcgtcggacccgcgtgattgaaaaacgggtcaaaacgacccaattcggctgaggaagacgacccaaacgacgtgtcgtttttc

SEQ ID NO: 59852 - DNA, 986 bp, Cannabis sativa
gtttcttaccaattgaatgacatctgaactcacaattccccaacagcgttgatagaaacccggtgtcattccgtcagggcctggggatttatcggggtgcatttggaagagggctttacgaacttcgtcttcagttactagcgcaagtaaagactcattttggctggaagttattgttgtggggatattatttactataggagcagtatcggtttgggaagagcagaataaaccattgagttataccaatagtgatattatacttcacaagtgtgctaggcgccatgggtcttcaccaaatcaccgtgtagtaattaatgctcctacaattcaattggtgcatggtttcaaatgtgtttctacaatatacccctataaactataaaaagtttgtttcaacattcatgaaaatattttagtctaatttttattcatggtcgtatatgttataattttttaaaacattctgtaaatttttgagaaattcgttataatttacaatataaaaagtaatgttcaaatagtctattttacatgcgttcaaagtaaaagagtctcgcgtacaaccaataatttaaactctattatcgacatgttaatttttttatttttaggagtcttaaataactacaacttacacaaccataaaaaagaattggactaaataatcatctcagatgctgaaataaataggagtgcataaatgcatctacaatgtaaaattttcgtaaaatattttatttctaatacttttctcaaaaataatataaggtgcttctataatgtacctcttaaaaaaagatgcactcttattgttttggcctccaaaacaactaatagccgcaaagtattagcgacgggcaaaatctcctgctatagtgagggtattaacagcagataacataggtctgtcactaatgcctttagaatttaaaaaaaaaaaaattaaaaacactattagctgcggatcccgccgctaataatta

SEQ ID NO: 59853 - DNA, 1075 bp, Cannabis sativa
taaatatatataaaaaaaatgtttaattttatttcaaattataatatacatttaatctattaaattttgaaatatatttgtatcatatccattagatttttaaattcatatagtttacataaaaatcgaaacaaatattgttgcagtgaacctataaaaatattacataaaattaaaggttataaatataattcacataaaattaacactacctaacacaaaattagaatttgatgggagacataacctacatttagcaacatagaaagagaacaaggacagagaaattagtttattgcaaatttgggggattattattgttaattaagacaataaaaagttaaaaagaaaataaaagagaaagttattaaaatagccgcgacaacttcaataaggacattacttcacttgtaactagccaatagccataagtggttgtgtgtctgtgaggggatgagttcaaatctctattatatcaacatcaaataaatggattgctaaaagtaatatactccttattaagtttaatctactaatcaagttacaaaaattagtaaatttcaaagtcagaattttttttttcgatataaagataagacttaaggttcaaatcttcttaatagtactgtacattgcatgtgatagagcaaaaaaaaaaaaaaaaaatccattgtacctgttaattgctgaaagttcaagacttgaaaactgatgcagcataatcgaaatagtactcccacattttctctaataaatcaaaaaagagatttagctaatgaatagtgattaagggcactcttatgagatgcatcaaatctccattttctctataattcataagaaaagtaaaagtgggcaagatttaatctaatttaattgaatcaaattgatctaatctaatctaattataaaaagttggattttcaattacaactagattatattgaatgttaaaagttggatctaaattggattaaatcgattattagatgtcatcaatttcaaaatccaattaaaaatcgatcaaatttaattatatttagtgaaaattatatgaaatatgggattttgtaaa

SEQ ID NO: 59854 - DNA, 1324 bp, Cannabis sativa
  modified_base (426)..(430): a, c, t, g, unknown or other
aactttacttaattaattataaacgctaaagtaatatacttatattaaattgggatccaattttacaaaatatttacaaccgtttcaaaatgcaagttacaaaagtttgtcgcctagcgactacacaaaataagccctactgtcccaaagatcgtacactccatttgctcgttctcacgactgctcaaccttagccttacccttacctacacatacaaacaatatctatgagtcgactaaatcggtaagaaaagcataaataataacatagcaataactcgagtcataattaggagcccatacacccgaccataaccctaactgagtcaagaacgttcttgacaaagtatgactaactgcgaatccagcctatactcagtaccctagccgtactgatgtggtagcagataactcatactatctgannnnntagcatatatctgttggcatctcggtgcaactctatgtacacctcaccgatgccttgatatgctaatctgatggctatagatttgcctattctgacgacaactaacatgtacgctaaacatgtataaacatatgcaaccactatactaatcttacctcgtttccgaattcaggtgtgctggccaacttgtgtggaacagctgcgcaacaaattacaggcccttaaatcacaatatacgtaaaactggtgagtgacacgctaaatcactttctagggacttaaacttgaaactaaaagtttccatatcgataaataacatggaaatcccctaaatatcgtaaaatgggaaaaactagggtttccaaaactgccccaatcggtagaccgattctctaaccagaattccaattcctatagggcccctgaaccggtcgaccggttcagtgcaaaaaaacttcaaaattttactactctttcaattcaaccccaaacttaatcaaaccttccagacctgttatttagaccacaatgaacatatcaaaggcaataaaataccacaacatacatagaatcaaggatcaccattggagagcaaagttttagttcataaactcaaaccttgctcaaacaacacaaacaccctaaaaccagctcaaaacaacatgaatatccttaatttaactccagaaaacaaattcaaacaaccctaaaagctacaacaccaaaactcacaaaaatcaagcaaaaccttaacttaaagcttaagaaatctataaaacaaagtgctagagagattaccttgggttggggcactaagaaacctgctagaatttcttgaattatgcagaaaaatcccaaaccttagctgatgtagggagagagagagagagagag

SEQ ID NO: 59855 - DNA, 1380 bp, Cannabis sativa
atttaaaaaaaaaacagaaaaaatgagatgaaagaaaataaaaaattattgtttagagatttttttaagtttatgtttctaaggctgaatagaaaatgtatataaaaaaataaaaaataatatacatccgaattttgggtgggttcgagtgtaattcaatttttttgggttttgaattaatgaaactcaaacccagccaaatgggtgatcgaatgtaacccaaacccgacctataattttgtaaacctttttgttagggaatctgggtttcgagtcaagtgggtgggttttcaaatgtaaatgtgacgtcctaatcttatgggtcgtgttcgtctcgtgttgagacttaagaattacaaacaaatgccaaaacctaacttattttttttaattgtgtcaaaaattaaaactcaaatccaactcgtttgtaagcaagttgacttgatccgactcgtataacctatttatatccaaatatgtaaaggatcatatattaaattttgattaacttatcagctcattaaaatgtttataataaatttaatatttttacaatctttttataatacatttgtgagtcatttaatatgtttatgttttatttaactaacttaatacaatttatatttattaaattatattaaatataatggtctatattttaaatagggataattgcggtaaaagtccccaaaaacttaaggttgatgcaggttagtccccaacctcgaaaattagcggtaatagtccctaaggtcgcaatatttgtaagtccgttagtcctcttttctaacggatccgttttctaattcaaaatgccacatgtcgataaataattagtctaaattataattttaatttaaaataatttaaaattaaaaaaaaactaaataaattattttaaaatcataaattattatcttttttttttcttatttcctttttttttttctttgtcttcttccttagtctacccagaactacctagaaaaacgaagcacccaccaacccccaacccaaaacccaacaccaccccaccttcaacaacggtgagaccacaatctcggcgagaccaccaccccgagaacaaaaagaaaatagccaataacaaaaagctcttaatcaaaaatccctaaacaaaattagtaatcaaaatcccttattgaaccaatgacaatcacaacaacaaataactccaattttaaaacccaaaatccaaacccattacaaaataactgggatttcatacgtcggatctgtacttgaggttcctcgtgcaatgaaggagagagcccgatctggcctgggattggcatcgcagaatcttatagcgctgatagcatgcttgatttcaataacggagggctgctgtggatgtcg

SEQ ID NO: 59856 - DNA, 1110 bp, Cannabis sativa
aggcttatcgggatattacagtaatgtaacctagcagcataactaacatgtaaacacatatgcatatcattatactaatcttaccttggttccaaatgcaagtatgctagtaaccctgagtggaagttgctgcacgacgatttataagcccctatgtcacaacatacgcacaattgataagtgtttactctagaacacttttcttatgtctattaagaacctagggtttttctaccaaactatgtggtggagacaccctaaaataaagtacaaaattttgctctaatttaaataccatatcatagagctcgtcataagctttaaaacggtatatagaacatctaaaacggacacccaaatgaaaagttatggccaaaatactaaaattggcctgacccgatacagtccagcaggaattccagttggtacagccctaaaccaaccgaaattctggttgtctgggcagaaaaatacgaaacaattccaatcttccaacccccataacttggtccaattaattccatatgctaccaaacttctctgaatacctaaacacaccataataaacatattctaggcaataaactcaagaaattacctctaaaatgaaaatgaccatggaagagccaagtttgagctcttaagctcaaaccttgaccaaacctcacaacaagcctctaattcaacttaatttaacataagtatccttaaaaccatctcagaaaatagaaacaaccgcaacacaaacctacaacaacctatcatcaacaatttcatgaacaccaacttaattacaaaaattcaaaggaaaaaaagagaatttgcttaccaagagctgttgtttcctaaccctaagaattatctcaccaaaacccttctaattttgtttaagacaagtaagaaatttccccaagcttcaaaacttctaggtgaccgacccccaaagagagagagagagaaaagtggtttacttgtattttctttaaattatttttaatttctcaatcaaatcctatccctatttcagcataacatatgctcactagaggacaaactaggaatttgataatcttaattcaaataataaatcatttacaagctaacatgaaa

SEQ ID NO: 59857 - DNA, 1342 bp, Cannabis sativa
ccaggaatgggaatgttcgtcaaacaactcgataccaatagatttctttttcaattctaccatgaagtggacatcaaaagagtcattgaggggagtccatggacctatgatcggatgcaattaatcattgaaagattgccagttggaggggatcctaagacattggagttgaatactcttgatatttgggttcaaatccatgatgttcaaccagggtgtatgacggattcgacagttcgtggagtgggcaatactataggtaagttcctcgaaagtgatccgaagaattttattggagtttggagggattatcttaggatgagaatcaccctcgacatcaggaaaccactgagaagaagattaaaagtcacacgatctgatggagtctggttttgggttacgtttaagtatgagagggcgcccacattctgtttcatttgtggagtgattggacataccgaaaaattttgtagcaggctttttcatcagccccttcaacaagtggttaaaccgtatggtgagtttatgaaagctcaaccatttcgtagtcataagaacattggtgctcgatggttgcgcacacgaggatggacaccacctgtggtggccggcggtaacaattcaggtcaggaggaatatcataatcctaatatggaaacttttaatggagctgacatttctgctacaaaggtggggaatgatttgggcaatcaaacaacagaatcaatggtgattagagaatctcaggttgttaatggggtgtcaatcaatcctatgataaatggggatagttttcagcgcataaatagtgggaaagaaattattagagatttatctgattgtttgactgtttatgacagtaaaaaaaggaaagtgagtgaagaagggagcaaggggcacgtggagatgggccaagaagttagtggaattccaaaaaacttaagtttggcgggccttggaaatggggctcgcccacaattatgaaaatattgagctggaactgctgtgggcttgggcaaacacggaatgttcagttcctaaaagagctagttgctcaaaataggcccaacgttgttttcttatgtgaaaccctgagtaacaaaaaaaaggtggatgctttgtgtaggcagttgaagtttgagagttcgtttgcaattgaagcccagggacacagtggtggtattgctttactatggaggaaccaagatcaggtggctatagactctttttcgaaaaaccatattgacagtatgataacggtggaagggcatcgatcttttcgcttcactgggatttatggggagcctaaccgtagtcaacgaagacaaacttgggttctact

SEQ ID NO: 59858 - DNA, 679 bp, Cannabis sativa
ccatgtgttgcagtattactattttgcatcacatgttaaaaaatgcactcagaaagacaaataacaaggacttaataaatataataaatacaatcttattaggagacactctcagaaagagaattgattgaatttataataaacttttaaatttcaaaataattttttatttgagatttaagtattactctctactaaagaaaccaaaaagcgtaattgtaaatactattttaaaacatataaaattgccaacgcttcaactttttttagaagagaaaaaactagccaatgatttagcagaatatctcaatggaaagctatcaaaatcacgaagtaaaccctaaaactaataatactattttcacaacaaatagtagcatctacatttaactttagtaatccaacaagagatgctaattaatgaataactcgtaaaggaagaaaaatcttagccgtttgcgtatataatttttaacctgaagccaattatcataatattgaaatgaccaacttaaaatggttgaagttttcttaattgatacggtgaaacaaaaaataattaagaatgtgagatagtcttctaagagaaacaaggcttaacaaaattctaaaaatctgaattagatatacacacacttattacacattgtatatcagccatttaaaatactatcgatag

SEQ ID NO: 59859 - DNA, 1117 bp, Cannabis sativa
gatcctctattcgaggaagaagagatctcagagaggttttccactgcctatctcgatgcggggaaccaggtgccagcactttgggaagtggtaataggcacttctgcatcctctgtatccccattctgagttgcatgtcttggagggatcagggaggatttgacaaatatttcttaggcataaatagccgtagataccccatgaagattacatagacagagtataccaaattgttaggagccctagaaatccaggaactcctttgaatactattaaactggaccctttgatggctatgtctccacccaattttaaggagtatggcaacatcattggtcataggggcattttggcctttgttcgtaggcaaccttgtagcacttcactaaatggttgcactcgcgcacaagtttcttcactggatttttgttgttgccatttcgcttatatttgtatgacttgtaattgtctctttcgcttactcatattgttgattcacgtgtagatacaccagaatccgtgatgttgaagtcttggagcaactaaatctcaactgctatggataaagcaaggaactcccaagaaagaggtaaagggaaaattaagacagggcttccaggacccaaaaactgtgtcctccctcaacttcctcatcattagatgttcgggagattgctcttcctactaagacaggacccacagttccaggcccttctacttcagctggtggagagaaagattctgtcatctcccgggaggcctctaaagctcttatcactcaaagagagtagaccttacaagacatcccactttcggaaggaatgatccctgataccacaccaaatgcagggggttctgatgacagcctaaacgggattgtatttcccccaaaagggactcccataaagtctaagcgcaagggatcaaagacttctttgagtcttcgtatgaagagggtcaagccttcaacccgaaacttgggggcatccatcataccgttaacccttccaccattgcaacaatagcaacaacaacaacaacaactgcaacaacaacaataacaacaacaacaacaacaacaacaaccacatcaacaacagagagagagagagagaga

SEQ ID NO: 59860 - DNA, 763 bp, Cannabis sativa
ttttcccacatcttctccgaggttaataatattagccttgttgcttttgcgagcttggcgacaatgtgaacttcaacagccaacgtcatttgaatgttagcttctgcctgagagaactgactcgttgacactatgaatctcattgaaagatgtctaaagttgattagtgaaagtaccagaagcgtgccttcctatagcgagatggatgtctcgctatccgtcacttaggttcttctagctgttgtgcttagttagtataatgtgtattatacgctaagtgttttaacagtcattatatctcgccttcgtctcttcatgcgtaatgaggttgatgcctcgccttatacatctaatggcatatgacttctcgttaacgtatgagacaacagtttgtatatctttatctcgcgcaaaacgttatagtcagcaagttataaatatattctgttattttcgcattaatgagttatttcatttcaaatgtaattaccgttacactcattgattcatattcttcccaatttgacacgtattctcctttgaaatgatagtcaaattttgggtataacacaatagtataacatgattgacaaatgaaaaaatggaaaaaataataataataaaattatatgacacataagtatataattattgataaaaaatcatatagagactaactaattctacaaacttgattaaaatattcacgataaataattaaagtagtaaagataattatgaaattaatggaaagatttgaaga

SEQ ID NO: 59861 - DNA, 736 bp, Cannabis sativa
atgaatttctcataaactattttatttttaataataaaccatacccataaatttctcataaaccaattctgttatataggcacactttatattttaaaagtacctatataacagaatttcttggtttaacatattattttggggtttttaattaaaaattaaaaaaaaaaccaacatttggtgataacgactatgcataatgtacagaatcgataaagtttccgacgatttagaactaaccaccttcagaagagcggaaaaaatgtataagctctactacgattcaactcttaaacacaaaatcgtactttaatctacaatttcttttaggcaaaaaatataattgaagggaaagacagataaaagggtgcagtgtaagagtctcgatttttgattcttctatagtccgttccaatgatttggagaatataggtttggcacaagaagtatggcttcaaaagttgttttgtcaagttacaggttcaagtatattaagtattagtggaaaagagaggttttgtgatcatatgtggcttcatgttgtattctaaaaatgaatgatagttttatcacgattcacgaaagttagatgtttgaattatataataattttttttttttgaccatatgatagttttatttattaattttaatttctacaatgcaatcatatatttgtgtattttttcattctattgtatttttgttacagtaatatttttgtattgtagaatga

SEQ ID NO: 59862 - DNA, 905 bp, Cannabis sativa
  modified_base (855)..(857): a, c, t, g, unknown or other
aaagcttatagcgagcaatgggtaccaagttaaaattcagtacaacttttcatcctcaaaccggtggtcaatctgaaaggactaatcagatacttaaggatatgctgagagcatgtgtaatggattttgtaggttcttggaacaaatatctacctctgattgagttttcttataacaatagttattagagtacccattggcataactccatatgagatgcattatgggaggaagtgtcgttcacccattcactaggatgaagccggtgaatgtagatatcttggacctgaagttgtccaaagaacgagtgaggctattgaaaagatttgagcttgtatgcttacttcacaaagtagacagaaaagctacgcagatccaaagcatagggatattgaattccagattggggattttgttttccttcgagtatccccaatgaagggaattcagaggttcaggaagaggggaaagttgagtcctaggtttattagcccgctcgagattcttgagagagtaggtcaggtagcttatcggttggctctacctcctgctctatctgtggtacataacgtgtttcatgtctcaatgcttcggaaatatgtatccgatacaattcatgtcttaagttatgaagatatcgagcttcaaaccgaccgtcttatgaagaacaaccagtacagattctggacaggaaagaaaaggtgttgcggaataagactattctgctagttaaagtgctatggcagaacaacaaggttgaagaagacacttgggagttagagtcgcaaatgtgggagcaatatcctgagcttttcatgtaaatttcgaggatgaaatttctataaggaggggatnnntgtaatatcccgaaaaataatatggtatttaattggacatattttatt

SEQ ID NO: 59863 - DNA, 569 bp, Cannabis sativa
atctcgccgcctaaacaaagaatgtgtgagtaaaactaaaacttataagagagaaacaagtagatatacctataaaacaaaaaactaaaatacaacaagagtaaatgagactatacccacagaacagaaaggcacacaacagaattcaaagctcaagcaagaaacttcagctatgcatatcattgagtcaaattatccctgcagactaatatagctaaactcccaacataaaatgactcaacgagtacatttcatctcaagaccatacccataaatcaaaacctatacatgacatgcagtataaccccacattcaaatggcaattacaaattaaagtacgactgataagaagcttcctagagcagtaacatctatccttaagatctagatgctactatacatgtatgtgaatgtgtatcttgttatgatctttacttgttttgaaactagttctctgcctgaccctgcaatatttggggaccagagaaaactatagcaatgctatgtgggtgtctaagaagggtgatctttaattgaacagaaaaaccaattgggtgatcacagattat

SEQ ID NO: 59864 - DNA, 971 bp, Cannabis sativa
aaagaaaagtttctaacaaagtgaccattttgcccttaacaataggacaaaaactaataacataaagggtattttggtcatttaaaaatcccaacacttcctgacattcccaacgtctaaaaaaatggtctcgctattacaaaaattttaaaccaaataaaagcatgactctctaatggtccaacgtcgctttccacagctaccgatcacaagcgcaggtaaacgagaaattacttaaatagcataataaacatatatcaacttaaataaatatccacaatatacatattatacataatatttaaatctcataaataaactctaattatttaacccaaattgtttaatcataagcggtctttacaattatccccaagttaaaagaatttcgtcctcgaaatctaacctgaaaaactctggatgttgagtcctcatatcagactccaattcccaggtggcttcttccactttactatttctccagagtactttaaccattgctatggttttgcttcgaagggccttctcttttttatccagaatttgtactggctgttcatcatatgacaggtccgattgcaattccaatgtctcaaaactcaggatatgcattggatccaacacgtacttcctcaacatcgaaacatggaatacattatgcacagttgacaacgatggaggtaaagctaaccggtaagcaacttgtccaaccttctcaagtatctcgaaaggtcctataaatctaggacttagcttgcctttctttccgaagcgcgtgattcctttcattggtgaaacacgcaggaagcatgatctcctggctgaaatgtaatatcccaacgcttgggatttgcataactcttttgcctactctgcgaagcaagcatttgcgctttaatcttatctattgcctcatttgtcttctggaccaactctgggcctaggtatttcgttcttctgtttcatcccaa

SEQ ID NO: 59865 - DNA, 639 bp, Cannabis sativa
gcgccggaattatatatatatatatatatatatatatatatatatttgcattaattaatcattggatattattaacatgaacaaaaacaatttaaagtttgtggagaataatttatcaaatttcataattattatatactatataatatatttatttaaataaaggtagataaattacggctttggtatctgttgctacggcagaagtgacaaacatcataataaaagtgacaacaatttccatagctaaagattggccatctgagccagatggtgatgttgtcccaagaagttttatgggatgtagcacttctcgtagtgtaaatgaagctgcaatagctcctgtaaattgagctatagcatacaatggaacctgcatacatacaattaataattaattaattacataatattatttatcatttcatcattattctaaatcatgatatgtacactagaaaaagagttatgtttaatgatatagggaatcaataatgccctttttttataatataattccttacttttttatataatttaatcatagtaaatacagcatatttatacacaataatctatctcataaagttaaagattgaactacatgggtagtactattagtaccttaccttaatttat

SEQ ID NO: 59866 - DNA, 812 bp, Cannabis sativa
tttaaacaatttttttaatcaatattttaaactctgaccccaacttagaccttgaaaactaaacccgaactcggccctagacttggtctcgccctcaatcccgacctcactggacctgacttaaataaaatcaacaaatgaaaataaaaatgatatttatagaacacatttttgttttttgtttttaaaattgaaaattaaaagtagttacagaacacatttttgtttttcaaaaataaaaattttacttttatttttgtaattaaaaaatttaaaaacaaaaatgttaccaaacgcaacctaagtaaatcagctaagaaaattaatgaaagatcaacaagaacaaactccccactaaatcgatgatctaaaaacgaataagcaaacgtgtcaaataattggttgtcttattcacagatggtttaacaaagacaatagcattattgtttaaagaaacaagtagatgtttacaattagaaataatcaaaccaaagggataagacatttggtgtgtgatcaattacatgaacaactatatgagaaatgttctgctctttgatccatctaagaacttctttgacacccacaacttcatccatactcggttgaacacaatcaaacaacaatttcgactcggcctcaatgaaattaccaacattatcacgcgctatccaaccaaccccaaagctattgtttccactaattacagaagcattcacattgatcttaatcatgttatcaagaggagacctccaatgctcgctactaacaacaaaggaagaactagttgttaagattttataccctaaata

SEQ ID NO: 59867 - DNA, 1560 bp, Cannabis sativa
ttttagcacaactgctagagggtaacctggacgatagtacccaacttattgctcttcaggcagggatcactactgacctcttcactggtggaggcgagctatgggatgacctacagggtcgcccagtaaaaaacatcactgagttcaatgaaagagctcaagtgtttgttcgaaaagaggaaacaagaaaagagatgaagttgttaaagactggctcaggaggtaaacctagcactgtctcaacaagcaccgtcttgaccaaattcgacaatccaggagcctctaggtcaaagaggaaagataactctaaggagtcagccaaggacaagaaaaagaaaaagaaaaagaagcacaacaagtacgtgccaatctgtattgtttataccaagcttaatgaaactcaagaaaacatctatctcgcacatggcacagggtcacatttcataaatctgagcccatgaagcatgcgagacatacgagagaggcaaccaaattttgtaagtatcacaaggaaattaggcatacaacagaggagtgtcgtcagctgaaagatgagatagagagtctcatcgcgcgaggtcatttttggcaatatgtgaaaagagaaggtaatggaaaaaaccagccaaatcttcctaataacctaggcaaccaaggattacaatctcctcctcttgaaggagaggatatcctggttatctcgggagggccacatattgcggggggaaagcaacaatgcctaaaagagatatgtaaaggaagggaagaacgagcaatctaattttgctccgaaaccttccaagaaagctaagcttcaagaacctctaattgtattctcggaggaagataaaaaacacgtgagatatcctcacattgacgcacaagtaattaccatctagctcacaaataagaggataaaaagggtgttcgtggataataaaagttcagtgaacatcctttataaggataaactgaggaaaatggggcttgaaaaagagaaactgaaaccttaatgtaaatctgtgtggatttataggcgaagtgttgccagtcaaggaataatcgagattccatcaacattaggcgaagagcctttatccaccactataatgcaagactttttggttgtcgacctgccgtcagcctacaacataccgctgggtcgactgtcattaattggactaggggaagttagttcaattaagcacttatctttgaagtttcagacaacaacgggtgtgggtacgaggtgaaaatgctggctcgcgaatgctactggatagagttgcagaacaaaaaggccgatcaccagctaatggcagtcttaactgaagaaggcaaaaagaatgatgaagatcttaatccttggattcaagatgaaagaaatttattgaaaccaattgaggagttggaagaggttgttctatacccaggaaatcccacaaagtgtgtatacattgggaaaaacctggttgaacaattcaaatagaaactaataagctttttgagggaaaattaggattagttcacctagagccatggagatatgatagggatcga

SEQ ID NO: 59868 - DNA, 821 bp, Cannabis sativa
tcgctggactagccatgtcatgtttaagggaaccatccatcttaagaagcttgtctacacatctagttttcctattcctttgtgaggatttggaacgagaaaggcctccattaatctcatccactggaactgctgcactatgtgaaatgacaccatcaatagtatgcaaccttgcagcatcttcatccaaaagaacatcatgcagtccggttaacctcctgaatctttcaacatcctctctgtcaatgtaatatatgtctgggttgttaacaaatactatgttttctataatcttgtttcggtattggttcagtgaatggcgatgaagtaaaggaggaaagagatcgggaaactgagggtagttggcagttgggtcgtttccatttttagggacaataccatcaaagaattggagcaacaaaggtaattttacaacagcagattggtcagccttcctaagaacataacggtaaatacgctctacctctactatttccatatgtgatgacccagctagctgatcagaagtataaggtggaagcccctcagcaattctctgcaagatggactttttagggaaaccccctttaagatcaggtccaaagtaagtaccaatcacaaagaacaaaagaaaccgctgatcatcatcatctgcaatcttagtttgaacattggttgagcctaactttgtcacagtgttaggatttacagcttgagatgaattggccattgctgccaaacaaaatatataaatttggaagttaataaacaacagtaattccactattttgacatggacatatgaaataaatttcacaaat

SEQ ID NO: 59869 - DNA, 613 bp, Cannabis sativa
tctgtttctttattgataattgaataaaaaagattacattgaaatagagttttatttaaggcacaaagtccaacagtgatcaacttcttcaacgattttgatcctagataggaaactgagaactatttcttattttgtaaaagaatcatttcattctttatttgatgtttattttgtattactgttagaacttataattttatggctcataatgtggccaagtcaatttttgcctataaccggtttgggcgacttactatctctctattcatatgaacatcttttgtaaccacggtgagtactaagttttattttaatggaatgtttctttccaaaaaaaaaattacatatacatgtttttccctttttgtttcaagaggcaactctccagcgttgcttttctatgtgaatccgcccttgctagaggctttgaaagttggtggcttctctttaattcgttattattcattcattttctcatccattgcaacctatttccagtttcagttagataacttgaaaaggagcccttttgaaatcaatgctaaaatgctcgacatgttactcaagtcttctacgcaaatcgtttcgaaagagtccagagaagctaaca

SEQ ID NO: 59870 - DNA, 1323 bp, Cannabis sativa
gtagttcttttgctttagatgcatgactccatcactcttgaatttatgaacttctaaactcagtatcttctttacttctcctaattctattgtgtcaaattctgccttgagtttatccttaatttctttgattactgccttgtctttgccaattattaacataacatctataaagaataggaagatacacaactgttgactcttttaggtgcttgaaatacaaacaattaacaaacttggaccttgtgaaactaatctcctgaacataggtgtcaaatcttttgttccattttcagggagattgcttaaggccatataagaacttttttaatttacaaaccatttcttttccatcaattttcacctaaaatccaagtggttgctccatgtatatctcttcttctagatagccatttagaaacgcagttttgacatcaagctactctatttctaaaccttgttgagttgccattgacaacataagtctaatggtcttacttcactacaggtgagaacacctcgtaataatctatcccttctacttgagtaaaacctttgacaattaatcttgccttaaatcttactggctcatcctctgtcacactctctttaatctttagaatccatttgcatgagatcaccttctcgtcctcaggtcttggaaccaagactcatgttttgttctttctaagtgagcttaattcatcatccacatctcgagactattccttcttgtactttccatttaaagtctcttctatgctcaataattgtgtatgttgaaaaaatctattatatttgtacacattaaaaatgagtgtatcaatacatcctttcatacttttaatatttaaatagttttaattttaatttattttatttttatatgatagtactcattgtagttacataaacgaatttttaaatttttttaatctcaaatttaaacaatatgtaggatacatacttcttttaaattatatgcatgtgaacttttatattctactttcgctattgtaaattatttcaacttttataaaacttataaaatgtcttaaatatctatcccatttatattattatttattaaaaattaaaaactaaaataattggaatattaaaatacaaaagaagtagatagatttatctctctatttggaatgcactgcaccgtaatgtatatattctattttttttgaaggaattgaagtatatattattgtattgtatatatttctttttttttttttaaatgaagtatatgttattgtattaattgtatatatatataagtgaaaattacatgaaatatgagatttcata

SEQ ID NO: 59871 - DNA, 743 bp, Cannabis sativa
  modified_base (593)..(609): a, c, t, g, unknown or other
agagaaaaataacaaaatctttcagtgtagcgctcttaatgaaatcaccaaactattgacgcagttttttgtcaaatattctaataagattgtaaaaaattagaggactacgctaattagacttttgcaaaataaaaactgcgaaaaactaaggaagacaccaggatttatagtagttcacctccatgtcgcgatagtaatggggctacatctactttatattttactgattgtttccaacacaccagaattatattcttaagagtgtgtggtcattaatataaaaaattatttctaggtgaaatctatgtcaacgattatgaacagcggcttatgggagacaaaatatatatccataaactcaacaataaatataattttcatcgatgttcttgagaacaattataataaagaagcgaagaaaagaaaatggtctcttgttcatggtggagttgtgtataggtgtgatgaagcttttttaatggttacttgtgtttggattgtatgctttaaataaaatccatttcaatacaatcttatttgttatcaatagaagattagaagtcatttatgtttacatgtaagtttcatgnnnnnnnnnnnnnnnnnaatttctgttaaatccagaacatatagttactcacaattacagtcaacacagtggaaggttatgcttcaaaagatcttacttacaccttggataaagcttacttacatcttagataagtattatgttctttcca

SEQ ID NO: 59872 - DNA, 713 bp, Cannabis sativa
taaaatctctagctaaaaactcattaagatcaattaaaaaattcaagatcacaagttaatattattcaaacaagaaactcaagattaaaatttatgaaacacccaaatcacaggaggaaaaagaaaaaagaaatgcttattcaaagtgttctgacccatttattcatacaaattcagagacaaaaaatctaaaatttagacaaaatttttttgacataataaaacagtatctcttcaaattgagaaaagcaaatttagagtccaaaaaaatatttcaaacacccaatattcacaaatgatcctcaccttcagccaccgtcacaacgagctcaattacagcggctctaacaacatctccgcctgaccaaaaaccaaacaaagattagaatcctcaaccatttattcttattcaaacaaatgattggttttttagcttctaagtctatggaaagaaaatatgatatttacttttcgtgttgaatttatattctttccaacaaattaggtaccacaatactgttgagcagtgaatgcaaacccccacgataagttttgaattcgtagccatccttatctatagtacttgaattgagtgtcactgcatttcagaagatcatgatattgtcccgttgttggattgcatgagcaaagaagacttctaccattgcctatgagtaagttcttgtccaaatcatatccaatcacttgaggtt

SEQ ID NO: 59873 - DNA, 1017 bp, Cannabis sativa
tgcttgtaatggtgaaagggttatcataccacgaaaatgtggcaagtggggtgccacggggcacaacagaagcacttgcacctactgaggtttaaaataaatgttgaatttaatattattatgtgttgtactattcccattatgtattccatgaactgcttgtactgttatgtgttaaacatggacttttagtttttttgagtctattattgtagttattcgttcaatttgcatggaaggaagtgcttgactatctaaaaaaaacaattttttacaaatttcaaaacaaacagaagtggatcgggttataagtagattgttcaaatagaaaagcgtaaaagtaaagattgttcaacaaatataataaataaaatatccaaagttcatgacaagttttggtaggataaatctattctccatctctggcggaagagcggcatatggtcatcatctactccattgaatggtcgatccaataacttatgctcaatatgctctatgatgtacattccgcaatcaccactgcaatagtagttaaacgcaaaatttaataaaccatagagaataataataatttttttaaattcaattagttttttgtatttaaattacctcgatttttttttaagtacaactttattgtccatgatatcccagtcgaattttctgacctgggtttcggaggctgtcatttgagtgaccatcaccatgtaatgagtgtcacatacaccacactggtccaccaatttggataataaaaggtaccaagcatccatcagcgtctttagttcaccttccgttagagttccaatactcgaatcgaagacgaatagcttccacaactcaagattcgcctccatagcgatccaatgtttctgtcggtccaagaagatggccatgtatatgcattctatatccttccaagacggcatgaattggtttggatccccacgaacgagttccaagagggactcatcccagacaaagccaacctggtcagtattggtcttccaagcg

SEQ ID NO: 59874 - DNA, 933 bp, Cannabis sativa
  modified_base (447)..(449): a, c, t, g, unknown or other
gtaagagtactttatgaagtaccgaaattgtgtggttatgatgttgtgaaatgaatcaagagtgttattatgtgataagttgtaattgagtaaatttttttatagtatgattaaatgaatgttatattgcttgtgaagttgaccacttttcttgtaatctcagtggtttagggatgtaagaatacatgattataatgatccatgattagagtgctttatgaagctctgaaattgaatgtatacgctaatgtgtgaactagagtgctttatgaagcattgaaagtaagtgtttacaatactatatgattagggtgttttatgaaacactgaggttgttgattatgtataactataaacattcttaattttgtatcaagtttgctcgtatagacgttgaattgtatatgtatgttgaaagaaagtgatctcttggtatgtataatctgnnntactataatttgctatcattttccatgatttgttttatctagtagcttttcttgctgagtcactgtgactcacgggtgcttcttggtacaggtaagaagattaacaattttgttcggccatgggtcagaggtctcccagcaatgtacatattaaccccttttctatgattgaacgtataacctattcttgtactaatggatttgtaattagttataaaagaattttattaagcagggtatccccatattacgacagtattttaaaatgaaagttttatgttgaatttaattaaaggttttaattaaaccacacttttccataatttatagattagtaataataagtttataaaagcacacatgtggcgtcactgatagtcagggcgttacaatttaattcttgtatttaatacatttaattaaatttaaaaataaatatttaagttgatttcattcttgattcttaaatattattattttcatg

SEQ ID NO: 59875 - DNA, 1046 bp, Cannabis sativa
  modified_base (934)..(974): a, c, t, g, unknown or other
ttgtgataaatgacaagcttgggtccccccccccttcccttttattttatacacgaagaagttcagtgacaagaaagccaaagattgagaaatctaatggctgggaattgtgcagaatatgaatagactattcttaatgatcttcgaaaccatagaacttccagaatcaaaggagacgtcctttccaagaaaggattttggcaaaaataccctccgtaattaataaaaagctctttttaccaaaaaagaactttttaaggggcaattgttataccgaaaattcggctggaggacacatgtcaagataaagggaatgtgaatcgatgcaatatctttttatggaataactcattaatggcataaatatcaaaatatatttgtaacccgctgactcaaaaatcaatgtacgaactggcacttaatgtattaacggaaaccatatgtcgttgaaggagaatcgcgaggcaccaaagaaaagtaacacataccttagcttacaataagcaaactaagtgtaaaagtcagatcggttcgaagaacaaaaatgcaagatgaccatctcggtacgagaaaacttcctatagtttcatccaactaacaggagcgaggctcataaccctggaaagttagaagatttctgtatacctgcgatcaacgtaagacatatcttgtcgacctcgaaaagaagaatggttccagcttgccattgggatcactacaatcaagtttttgtggagacatctctagattcaacaattaaagacgtgtttaatacacgatattcttgacctagtaaaagcgagaaaatcacagctttgtaattaactgccactatgcaattataaatagtggcaaacaatctcaaaagagggagttaaaaactcttatgaaagaggcttcagaaaaaagtactcagaaatctgaataagattgnnnnnnnnnnnnnnnnnnnnnnnnnnnnnnnnnnnnnnnnnaaaaccctgtgttcatatattatttttctagagcttttattttttctgtgttgaattattatcgtgaggctc

SEQ ID NO: 59876 - DNA, 1027 bp, Cannabis sativa
agtgtggattaaaggagttctaaatgagttaaacttgctgagtagtgtacttgtaatatactctgataatcagagttgtgtacatctctacaagaatcctatcttccatgagagaaccaacaatgttgagattaaatctcactttatttgagacaaagtggcacaagaagaggtcatagtggaaaggttcccactgaacataaccatgacatgtgagctaaagtggtaacctagctaagttcaaacattcatgaacttggtagggattgacaaagaaaactgaccctagtggtcattcaagctaagaccctctaaaaatcatcaactatctgggtagaatttattaagtcggatccccttttgatctaagtatcaggtacagatcagtgggtatttaaaatgaaaataatacccttaatgaattaatactctcaagattgaagactcaaacacaaaggcaattacaactgaaataaaaaaaatgcagttacacacaaggattaacaaaacaagacggttacaacaaattgtcactcgaggctcaaactcttacagctaatccagatcagtatttatagaacctattttatgaaaggagatacaagccttatttcaaaagctattatttagatcagtaggcttgttgtgagagatatcctcctttagtgttctgtagagagagagagacttagttgctgggcttatttgagagagtttaggtttgatcgaactattgtgtaattttttgaaaataccatcttttctatggacgcatagaattggtgctaaaaattgaaaattaccacttttcttgccttgtattaattgtgtctttgaggtgttggaaagttgcagattttcaacatatgagatttagtgtgtttgtttaaccacgtaattacacagtaaccctgtaacctgagataattgaaatatctcaattacactctctaattctcatgggcttcctatgagaattgagtgtaattacactgtgtgattataaaatattactatttttaaataa

SEQ ID NO: 59877 - DNA, 889 bp, Cannabis sativa
tttgaaatgacattctcgaggaagctcataccactccttattcaatacatacaggcactaccaagatgtaccaagatctaagaccctactactggtggtgcgggataaggaaaggtgtggtggaatttgcatcctggtgcttaacttgttagcaattcaaggctgaacatcaaagatagggaggattattgcagccactgacacttcttgagtggaagtgggaggatatcactatggactttgtggttggattacctagaaccacgagaatgtacgattcaatttgggttgtggtggatcgatttacgaagtctacacatattctaccgatcaaaacaacctttacagtggatcagtatgcagagttatacgtgaaagaaatagtgaggttacatgacacttcgaagtctattatatcgaatagggatccgaagtttacctcaaaattcagtacagttttccatcctcagactgatggacagtctgaaaggataattcagatactggaaggcatgttacgagcctgtgtgatggatttggagggctcctagagcaagtacctgtaagagaagagttttcctacaacaatagttaccaaagtattatagggatggctccttacaatatgttgtatgacaggaagtgcagatctcctattcattgggatgaaatgggagaaaagaaatacctaggtccagaatcagtgcagcggactaatgaagccataagaaagatcaaggccagaatgcttgcttctcaaagtaggcaaaagatctacgcaaatccgaaacgcagaaatgtacagatttaggtaggagatcatgtattcctacgggtgtctccaatgaaggggatcagacattttgaaaaagggcaatttatgccctag

SEQ ID NO: 59878 - DNA, 1201 bp, Cannabis sativa
ttttcctactgttttgtccattacaaattcaaaaattagtagtgatactatatggcattatagacttggccatgcttcttgtgtaaagaatctttctttgaataaagagctgaatttccattactctagcttttctgatttccattgtgctatttgtcattttgccaaacaaaagaagttgccttttgtatctaatcataatattgccaagaaatgttttgatttgattcatatacatatttggggcccctatcatgtctctactattgaaggctttagatattttatcactatagtggatgattgctctaggtatacatgggtgcaccttattaaaaataaatttgattcacaacatgtcataccagcttttattaagcttgtcaacacccaatataatgctaaaatcaaagggatcagatccgataatgccaaagaacttcagttccatgaactattcagttatcttggtattattcatcaccattcttgtgtccaaactccccaacaaaactctgttgttgagagaaaacatcaacacttgttgaatgttgctagggcacttctttttcaatctcacatccctttaccttattggggacaatgtgttaacactgccacctatatcataaatagaacacccactcctaatctcaaacacaaatccccttttgaaattctaaattctaaagcccccaattacaatcatcttagagcttttgggtgtttagcctatgcctcaaccttatgggctgctagaactaagtttgctccctgagccattgcttgtgttttcttaggctatcctatgggaatgaaagcctataagttgttggatttaaacacaaatagaattttctgctctagagatgttattttccatgagcagatttttccattcgtgactgctggaaccatgtctcatgaatcccttgatttttttcctagttctgtcactcacaccagcaactctcacctgccacaaccacctataccacctgatatagcactagaccaaactgatattgcaccacattcccatgacaacacagaatatcaaaagtctgctgaaattactaccaacagacccagcagaaactcaaagaggccatcatacttgagtgattaccatgtttttttgtctactaacagtgtttcatctctgggcaacccttctattactgaacatcctttgtctaaa

SEQ ID NO: 59879 - DNA, 2598 bp, Cannabis sativa
cttacttcatagctctcaatcactatgagaaactagatgaacagtcaagacaaaaccaaaatcaaataagcagaacccaacacactaggccatatgttaatttgggcactaagtgctcttttcggagctttagggttattgttttgacacttccaaggttcttaaaatttaggacgaggtctcctaccccatttttaaccattttgaagagaatttccgagtagaatttgcatgtgatcaaatctaatgtaccacgttgattgtaaacctaggcgctgggctcagtttttatgcccttagaattgtcgttttctccccaagtttacttttatctttgttatttttgatgacaaaaaaatgctggaacacttttttgaaaaaatgattggaaatagtattgtcaacctaggcgctgggcttattgccaggtgtcaacctgggtgctgggttcagtttcgagcctttagaaagttctgtttgctccctgaaaatacttgaatcttaatctttgacgaaaacgaagaatatgcacgaaagactttttagaaaaactcctcagaattggcctaggttgacaaaatgtcaacctgcgtgcaaggcctggaccaagtgtaaacctgggcgctggttcctcattttggcctctaggttggtctgtttgttccccaaaagcacttgtttcctcatttttgataaagacaaagaatattcctgagacagattttcagtttgatactaggtgactagggcacctggtgctccgagtgctcaaaaataaaagttcgctgaatctgtttttgatgcctcaaatatgtttatgacatgtctagttcatgtcccagcacaaagtttgacccatttttactaagacggtcccaaaaattgaaaccctagttgggttgtcaacctgggcgctaccaagattgattttcgtggtgttgttttgtctattttcatctctcgggtcttggaattggatattcatgtcttaatgatataaaatactgaaagatagtgagttggaaataactcggtggaatctaaacacccatttcggagttcccgaagtcaacttggacgtagggctaggccctagggacccctcctaggttgactgctatgactcaggactattcaactctaagatattttctttcttgccacatgtcaaacattgatgtccatgtcaccgggatcaatttttgggttaatagagacttagaagaatgtgaaaaatgagatagaggagccctccttttatagaaaaggatatcctattaaaataataattaaaaatacaaaaaatatgaaaaaaaaaatcattttggactgatcttggacattgatgatgattcatgatgatccaatggtgaaaattgccaatttttggactttgaatcttgtccctcggatcattttcgggttatcaacttttttgaggacaaattttagacccgaaatcttcaaaattgcgatgtggatgtgagaaataacttgatatatcttttaaatagcttcaaaattcaagtttaaccacgtcaataggatcaatattgagtgagttatggtcttttactgaaggttgttcagcaccctgtggccaagttaacacccagcgcccaagttgacattctgacgttaacttggatgccgggtgagtgccaaaacatcccaagcttgtattttttgatgcctaagtgttgtaatgacaccacttagtcagattcaatcttctggtgaacttgttcaccaattcttagagatgtcgttgttttggaaattagaaagattcgaaactctctaattttgccaatattccaccttgttgaaagggtgaaaaagaatttgacctgtcacaagttatagctcttgtttactacgaaaaagatagttgaatgcttgaaaccgaatcgaattctgataagtagaacccattgcaccaggttaggtgtcaacctgggtgcttccccgaactcgttttgatacttctatggcattcgagattgcgaaagaggtctcttgccccatttttgaccattttaagaagaattcctagagcacaatttgcatttgaggagcgaaaacatgtgaaccaggttatatgtcaacctgtgcgcaaggcctagtgccatatcaacttggcactggggcccattctggctccctaaaaatctcgttttctccccaagatcacttgtatcttcattatttctaatgacaaaaaaatgcccgaaacacttttttggaagaatgactggaaacagcccaggttgacaatatgtcaacctgggcactaagcctagtgctaggtgtcaacctaggcactgggtccagtttctggaaactagatgactctatttgattcctggaaccaattttatcttaatctttgatgaaaatagagaatatgtctaaaagacttcttcgaaaaacttcttggaaatggcccaggttgacacagtgtcaacctgggcgctgggtcccaattctgacccccagacggctccgtttgtttctcaaaagcactcaaatcttcattgctgaaaaaaacggagaatatgctcgaaagacttcatctgaattgttaatggaagtggc

SEQ ID NO: 59880 - DNA, 1661 bp, Cannabis sativa
cacatcctttctttgtcaactgaataaagaaatattatttgattgaccaatgtggaaaacttccggatacatggcttgtatccccccactcctagggttgcgagaatgctagctgctggtgttgtaacggcctgtcccacagggacgccacgtgtgtgcttttataaattaatttatagttaatctattagtttacaaaaagtgcggcttaattaaaacttttaattaaaataaaaacataacttttataaaagaaaaccactgtggggatcccctgtataaaaacttttaaaatctattccaaaagtggtattacaacatcaaattatactttcaaaatacagtaaaaaggggtggatcctgtccactggaaaccgaggcactgcggttgatatgtacattgccgggagacctctcacttatggctcatccactttccccattcctttatctgcaccacgaagcacctgtgtgtcacaaagactcggcacgaaagcaagtaaaacacaaacattatataaacgagatatcaaatagtgcataacatacaattttattattcacaataatcgcttatacaacacattcaagcattacataacaactatttgtctaataagacaaactattcttgatgcctcataaatcatccttaccactcgtcacccacgagctttatatgtcactatcgttgcccgatacagcaaccgataagtaagaaacctatctactgtttcaagcgagtaattacgcattcacaatgaatggtaatgaccgtatctttatctcgatcattattgagccatacacgatagtaatcgttacctcgatcataatcgagtcacaaacaataataatctttcctcatttaacatgcttagcagtgcaattagctttcttacctcagtctactaatcaggtgtgcgcgccaaactgagtagaataaacttcgacgatcccgagtcctatgtcacgacaacaaaatctgataaaataacttaatcaaactccaaaacaaaccctaattccatatccgaacaaattctaactccccactggttcccaataacttaaacatcactaaaataccctaatctaagctctgaaaaacaccccgatccaaactaatttcaaagccaaaaactagggtttcccttgctggtgaaactggttgatcggtttcactatacctgtgaaaccggttaactggtttccctgatacgaaaaagggaaactctgatttttgcaccaaagcccaaccaaattgcctccaaacctattcaaactctcctgaacagttttgtaccataaaaacaatggattcaaacaaacaattctcaacaattcatcaaaatattcaaaacaccatgcttatccaaaaattaggttcttaaactaaaatttctaattctaaaccaaccagccactaaatacactcaatctaaactcaagcaaaccctaaatcaaacctaaaaacataatctaaactcagtttagcaccccagacctgaaatcctaaaacctagccaaaactcaattcaaacttcaaaaatcaagtagagaaagataaagaacttaactcacaacttaggaaacttctaaccttgatcaatcctgctaaaaactggttgaaattgaaagaaaatttctaatttcttgct

SEQ ID NO: 59881 - DNA, 561 bp, Cannabis sativa
gacattaactattactaaattaaaaaatagggctatttacttgcatttctctttttaaaattacgatttgggttgcttcgatagtttctatatgagttgttatataaattttagttgtaatttaggttgctccgttaattattatgtgaattttcgtaaaaatacaaaaaaaaaaaaacccccctcctttgagaagtaaaaatgagttttatatatggtcgtgtatcgatgcattttggcatcaacaacaaattttggttttactttttctatgatcatgtaagttatagttatttaagacactctctaaaaattttaacaaaattgaaataatttacaatatacaaagcaatgttcaaatatgttatttcacacgcgtataaaataaattagtcacgagtatagtaagttatttaaatcttacttttggatgtcttaaataactgtaaacgtacatgaacataaaaaaaaaaaaaattaaactaaaaaataattctgaataccgaaacacaaagtgtaccataaaattttctaatatatattattttatataaaaaataa

SEQ ID NO: 59882 - DNA, 1488 bp, Cannabis sativa
ggtggctgggcgtctctggtgagatgtctatcgtccttggttgggggttgcagatggagttgaccttttgggtcgggagacaacgatggtggtgggcttttggccgcccactttctctcgttttcagggttggcatttttcaaagattttttttcatgcatgtgcttcggccgtagtggggtgttgctcttctttattttttcagttctcgaattacttccttgggttactattcagatgtccttgctttggtgcacaatggctgagctttcaaagttttatagatgtagaaaggggattggggtttactcgaaagggatgtgctctccttgtcctatcaccttcaccatttagaaccattataggaggccgagcgtggatgtttctcgtcgaaagatgacagtactttggtgcttgtggtctacttgtctcgggcttgcgttttgcctcttgtgcgttagggggatagttgttgaagttgttttatctttattgttttttttttgtttattttgagttattttagtttgttagaattgtttcggtgttgtgcattttatgtccttataagtgggcctttttggggtgtttgtcccttttatgctcttgtgtgagctttgagcttaatgctcctttcgaatcgctatggttgtccaacagttgttacgagattgcggtttatgacttgtagggttcttgtccttttatcaaccttcaataaagcttccatttcatgaaaaaaaaaataccctgaagttttatggtataatttttcatttcaaatcaagcttagaacaataatttgtaaatgtgatcgtattaggagcaacttctatctatgcaatgtttgtaattcacactttagcaaattacaaatctagagagataggtcgtaaaaaaattagataataaaatttaaaataatattttaaactaaaatcttgagccaaataattggtttcgttctacctgtaccataacaaaccaacgaaaataaagtaaatacaatttatatattaaatattttttttaccataataattggaaaaaaaaaagagagagagaaattcaattgtgaagaaaagtcttaaaaataaagagcccctaaatttgaaaagtttaatcagccacctaaacttaagtagttaaaattaggacttggtactggatagatgttgtctttatatatatatatatatatcatctcacccaatataaacaagtctacaagaaagtcaatagtaacatgttctaatacagacatgtcatcgaggctttttaagtttaatataagtaaatcaaacttgtaagaaaaaaaaagttacgaaatcagcacttcaagcaaacaagtatcaaaatatatagagaaaattcttctagttgatatctattgaactataagcaacattttcatcaatgtaaatattcatttcaattttaaatctcctaggaatgacaaagaatattgcaatagcctcatcactgcat

SEQ ID NO: 59883 - DNA, 1586 bp, Cannabis sativa
atgaaccttgcttgttccaatggtaaatcaataagggagtcatgactaatcactacttagatgtgggaaagatagtcttatccatatcaatccacacaaactcttaaccatccttggttctttctgttaccaatgcagagatattaatataacctcactaataaccattagtaaagcccaactaatttgaggaggtttcttaattaaatatttattctaattgcgccaatctttcccagatctactataatcatgtctctactactaatatgacatagggaagtctacttataataataactaaaatcctcactttcttgaattgatgtaaaacatatggtccttaacttcctataaaactactcacaaacacttctcaagtccaatattttatgtttgctgatataaattattaccgcttgatatcctatgtacccatcttgtaatcaggttcctaaccttaacccggttataatttggattcaggaaccccaaattaatcccacaaataatccagggttcctcgcttgtcggctaaaagattattatctttcttatacaatcaaattagccataaacatgggaaaagtccgtcccaagtataatgttaaagtctgttaaggatctttactaagatcaacatttaactttctatcctccactctaaatcagcatcataccattataacatcaattcattccatatcctcaatactataattgcattgagtctcaacactatgattgtactgccaaaatatcgatttgctctttctagaattgtcagacacgtatcatcgatttttttttttaggtgtaaaattctgtacacaaactatcgtgctaactaatatatcataacatggcacaacatgaacatatacatatccattctaaccaatgtatctctaatttacctcttggagatatttaacttccctgtaggtaattagatttcaagcattgatttgtgtttaacataaggcctgcttagttgatctgtcatctttatgctacatataagtgtgtagctctagagttcataaacacatagtgatgagggttattaccaaaagctaatatgttgcaattgatggatcatccattgtgtcagtctcagtgatgataaacatcccaaaattgaaagtattaccaccttcattcttcaagtgaggataattcttattatagtactccatcaactgatcccaaaggaaactacaccctaagacttacccagttgatgtcttctacgattaacattctaaataggtgtattagtattcttggctacccttatgatcaatctaattcttaaacctcatttttttgaatttaacctccaaatatcaacgaactcatcagaccatgtccaatcttggcatcaaatcctgccaaatatattcctaacttaataaaagtgacttacacctctcctaatactgttctggtgaacctatcctactctgtcaccatatacggaggggcaccaccttcccatcaaaccaggctatcctcctagaattgaaatgtttaatggttattcaatcttgtctctttcctaattataaatttctttggtgtct

SEQ ID NO: 59884 - DNA, 1001 bp, Cannabis sativa
tccacaccaacattcatcctcgtgattagcgtgttcaactgggccacctgctgctcatcaaaaacactcatttgggccatgtagttctacatgtgcatgttctgctgaattagataattcagctgatcatgtgtatattgcatggctgggtcgagaggcccaacaatacgtggcgggacaatgtcctcgtgctcctcttgttcttccataggagtatctctctgagctggcggttgaccatgcgggtgtggtggtttgaatcaaagcaccgtggacatggtgatactacgttgtggtgctgctttcgtgtcagaggagtactgtggtactccatgtgcctcacacaaggtggtgataatatctgcaagcccaagtccacctccacaagcaccctctaccatcatatcaaaagtcactctaactatgtcccccacattcaggttgtaacccttcataatagcatacacaaatctaagcctgtcgatctgagcatcagaataatgcttgtttgggaccaaccttgcactaacaaagtatagccatgccttggctaccgggttgagttcacaccgaagcagctgatactgttctccatcatactcatgaaacctaaggcttagataacctagggtttcagctatgtcctcataattcaagctctttgctcgaatttgctgtttgagtggttgttcttctggggtgaaggtcggtaagtcatagactgcgtggatggtggctgtggaaactggcactctaacccccctaactttgaccttatcatcctctctttctggccaattggccaagaattctaaagctaaggtttggttgttgcgctcagtgacatccacaaacttagtccaacgcctattcatgatcggctctctgataggcgcaaatatagcaggtatgtttctagcttggcttgggttaccaatatctatccccctatcctcaatgaaaggtctatctttgagttgcaaaaatcgctcttgggcctc

SEQ ID NO: 59885 - DNA, 1611 bp, Cannabis sativa
accattgatgtgaaattatggcctcgcggatgataatatcgttgatgcacacttagtcaacgttgatggaaaagtactagatcgaaaatctatgggacaagatctcttttgggctatacgtggtggtggaagagaaagcttcagaatcattgtagcatggaaaattagactggttgctgtcccaacaaagtctactatgtttagtgttaaaaagatcaaggagatacatgagcttgtgaagttagttaacaagtggcaaaatatttcttacaagtatgacatagatttattactcatgactcacttcataactaggaatattacagataatcaagggaagaataagacaacaatacacacttacttctctttagttttccttggtggagtggatagtctagtcgacttaatgaacaagagttttcctgagtttggtattaaaaaaatagattgcaaacagttgagctggattgatactatcatcttctatagcggtgttgtaaattacggcactgataattttaataaccaaatttcgcttgttagatcagctgggcagaacggtgctttcaagattaagttagactatgttaagaaaccaattccagaatctgcatttgtcaaaattttggaaaaattatatgaagaagataaaggagttgggatgtatgcgttgtacccttacggttgtctaatggatgagatttcagaatcagcaattccattccctcatcgagttggaatcatgtatgaattatggtacatatgtagctgggagaagcacgaagataaagaaaagtatctaaactggattcgaaatgttgataacttcatgactccttatgtgtcccaaaatccaagattgacatatctcaattatagacatcttgatataggaataaatgatcccaagagtcaaaataattacacagaagcatgtatttggggtgagaaatctttggtaaaaattttgacaggctagtaaaagtgaaaaccctggttgatttcaataatctttttagaaatgaacaaagcatcccacctcttccaccgcatcgtcattaatgatcttaaatagatctttttctcttattaattagtccttataatatacatacattgattatatatataaaaatagtttgtttgtatgtactgtgtatgctccaatgtaagagcatctacagtactgctatgtagacaatcataagatatatgtaataaaataaattgtgtttcttatttcaatggagaatgaaataatattattttagcttactgaataattttattttacatgtttatagattagaacaatataatatattcattattaaaatgtttggtacgtgttattaaaaagataaccgaagttttatagtgaaagagtgttctacagtgtcttgttttaattataatctagagatacttttagaatttcaggtacatatttagataagttataatcttattttaattttgtaaagaacctttggttcaattaaattaataatctatagtttctataagtatttagaaatgaaacgataattttctttgagattgggtcgatagatataaatgattgagatctcatttcagtaattatat

SEQ ID NO: 59886 - DNA, 1270 bp, Cannabis sativa
  modified_base (1069)..(1080): a, c, t, g, unknown or other
ttgtctccaacttgacccaactcccggccaagagatatgcaacttgcacttccataaactccatctatcagatttaggatattagtgatgctatgaccgctgtaagtctctgttagcattttttgggtcttactttatggcacctgatctcccgtacttactcttttttcttgtattgccagattgctgcagagaccgatcgcctctcaaagattttaattgatcatgggtacgtcatgtccgagttcgggggcatggatgaagctatgaagagtctacgggacttggcggctgagaggaaggcattcatggaggaggcccaacagagggaggctcaagcggagcagaggcatcaggaggcgctgaaggccaatgatgaggagttgaaggcccgggatgaggccgtggctacggcgaggcgcgagcttagggaggccaaggagatagtggaagacctgactgccaagttaaagtccttggaggagctgcaccaggctgacttgcagacgactgccaacctaactgctgaggtgaaggagcttcgtgacttcaaagctcaggctgaaaaagaaagcaaaaagagatgagctccttgcccccgttacttgccagcactgcaccaaatgcttcgatgatggcgtctttatggcctgcagactaacggtgaaaaccttaagctcgacttctgtccaaagcctgaggaggttctcgtccacttctgagagaagtagaagcgactcgatgccttgctagaggagcgcagggggcctcgtcttccaccacgcattgattaagccaatcgttaatcatcattgctattatcacttatctcttttttttatatatatttagtccttcttcccccctctaagacaatttattatatattttcttaagtggagacacttaaggcccgtccccaggcccttatcttttttttagagctttttgttggtttgaacaatttacatttatgcttgaatacatattctgctttttaactttgttaaacttttggcctattttatatttgtccgtgtggtatgccttactacccccctgagtgacnnnnnnnnnnnntttaggtcactcagttttataaacattaatttagaggttgcatatacttgtccggtacaaatttactttacagggcataaacttttagtttttttgactattggtaatactttctgaggtgatcagcattccaggccctaggcaccatggttccatccattctttttagcttgtaggtcccgaagccgat

SEQ ID NO: 59887 - DNA, 1196 bp, Cannabis sativa
cgccgctaataaaggcagtattagcggtggattccaaattttaccactaattgtcaatttgtatttttttaataaacaaaattattaaccatttttagttttttgttaaaaaaaattattagcggcggaggtccccaactaattgtatgagcgacaaggcccgccgctattagtctgccgctaataagtgggctggaaaatttccgcccattcagttcaaacatttttaaaatacctattagcggcaggcctcaccgcaaataagtctataaatacctccaccgacccattttccctatttttactcagctcatcaactttctttagccctctctcccaacccttttccaccaccactaccactactgtgttctcctccacagccaccaccaagcaccaccacgcaccagcaaggacaccatgcaccaccgagtaccaccacgcaccaaaacccatttcatgtaagtaaacttttttttttttagaaatttcttactgcgatgactgatagtattttggctataactctctcgatattgctcagaattagacgattgaacatccttcgaaaagataaaagagatatctagaacttttatgttttgactttttccaaaatctgatcagatcatagtctaatgtaggcttgaattttcagctttatttttttgcacaattttctctatcttatatatcatctttttgtgagatttttttttatcttttttccatcttattattttttattcttcttctcttttaaatctacaaaataaaagataaaaagtataaaattgctccaaacaagagtagaactaaattaaaaacacactaaaaattaacctaaaaataatactaaaaccaatctaacaagaatatccaagtctgtttggtgcattgatttctcatctttccctatctctagctagttgataactctcaagatttccagtctcatctatggcttcaacagtttcaccttcatttgtttgtagcattggttcatgtattaaactagattgatcattcctcccctttgttccatcttcaacttgaatatgtgcaacatgataagtggtgataggttgagttataggggttgttctcattggtattttctcttctctaaagagagcatcccttctgagtatgcgtcttttgaaaccagattctaggcaacatagcttatagccttt

SEQ ID NO: 59888 - DNA, 1137 bp, Cannabis sativa
  modified_base (1084)..(1087): a, c, t, g, unknown or other
aatattacactgaaacacaaatacactacacagttggtctatatatatgtttttatttttgaagcattaagagtgattttgtggaattgttctatttcctaaagaattgatatcatgctcaattgtttgaaaatatatatatatatatttatataattgtgtataaatttagttcttatttatgagattttcgcattatatgtatttatatatatgcatctctgtgtgttttgggctatgggtatagaagaatgtttacttggctagtgtgttgattgtgttgtgagaagttgagtgaattcattttataaaaaacaaacttttcatttaatatttcttttcatatctctttttgggctaatgatcattgttttgaaagggtttaattgtaagtaaagatacccatgtatgtagaattaagtgattggcataacgcaaatttgaatgagaagattagtttgagttattggaatgaaacccatgtttagtttatagtgattatatatgtacatgtgaccaaattagaataaaaaaacttgtgatcttgatagtgcagagtaggtggaatgtttgacactagcatattgctcacagtttagtgattaaactttaaattacagttgactagttcttagtcaaataatgtgattactttattcaaacaacttgaaaggttgtgagctatggagttgacactggaataaatatggtacaattgggtttttttagaaaaaaaatatattttaaatttgtgtggctctaatcaaacttgcttctcttatctcacttgcagtacaaaaatttgataacattttcaagttatgtttatttcgttaggatttggttcctttatatatatatatcttattcccttttttaatctttctatttttaatctgatatgcctttttttaggtttgcagtggtagggtggtggtggtgtcattacacgtggtggttgtaacgccctaaataattatgtacgatacccaagttacttacgaacccctaatcccctaaacgggattactaaggtcgagaatgtaaacttttgtaattaacagaatgaaaataaaacttgtannnntttaaactttacaacagttgggatcccaaaaatatttacaaactttatta

SEQ ID NO: 59889 - DNA, 710 bp, Cannabis sativa
aaaaaaaaacttttgaatttccttttttgtttaatttcccttactaagctaaaaatgtaaaatttaagtctaaaatacctattatagaaaaaatccctttttcttttgtgccaactgtcatttttttaaagaattactatcatataattagtgatgtctgtaaagtctgataaaattaattatacatacataatatttttgaaatataaattaaaattttgattaaaataattatatgagaatatatatattttttttttttgaaatcggattcattcaaacaacaatcaatacaatggattaggcgagtcttttcgcacagcttgactcgcacaagggggaacaaccctaacccacatggcactagttttgttattcaaagcttcattggctaatacatgagctacttgatttgcttccctaaaaacaaatgaaagccctctcaccctcacattctgcagcaagcttttaatgtgagcaagaaccccatcaacatctctgcatccaccctcttcctgctgcactaacttcacagcctgtaggcaatcagattccacagagaaggccggcaactgacactgtattccagcttgcagccccctagcaatcgcctgcaactcggcttgaagtggagtcatttcctgcatcaccactgttgcagcagccgaatgaatagccccaacataatcacgcaccaccaagcttgtact

SEQ ID NO: 59890 - DNA, 798 bp, Cannabis sativa
ttatccattcgtaattattgatacatttattatcggagtgttaattaaattgataaccaattataatgcaactatataaaaaaataataatatttttagatttgtggcgcgagatgaatgatgaatgcgatcataattgaataaatccagtattaatattctagaaaaaatgttaatgcaacggtcataatattacctactgtagtgatatatatttggtcattatacctgatttttgaattgatcgggaacttgaaatttatttcttacaaatttacattttatgaatttgtaaattaaatttaggagtattagttttatggaatatgaattataaatcagggtgtttcatacaagtttttctgcaaaaattttctctatcgattatggttgcttttcgatttgagtttgttcttcttctcaagtgatgtcgtcagaattaatggtgcttccttgtctaccggagcttttccatcgttgtcggcctcattgcatcatacggaggtttcaatcccaggaagcgtgaatcgtgtgggttgaaggtgtgtgtaaaagatatttgtataattttttattggattaattgtgtaattatttatttggccgacccactattttttttatagtattattgtcttttttggttataactgaaaaaaatcttaaattttaaatatcataattattaaataataatttttttaaaaaaaactaaacaaacatgtacttgtttttatctagtatatatattgtcttgatttgttctattttttttttttaatccaagacatgtaagat

SEQ ID NO: 59891 - DNA, 962 bp, Cannabis sativa
  modified_base (917)..(926): a, c, t, g, unknown or other
taagtcttgtattaacaaagtatacctctatataaatataattatatcgtaataaaatatacatatattttgtaaatttatttatataaaattaataactttatctcaaactataatgcatgtataaattttactctaaaataattctattatgctatagtattattgattgtttacagttattattgttacattgatatttttttggtattttaattttttttctagtataactctatttagttataacctcttaaaatataatttatttagtctcaaatgtattcttaaatagagaccctattatactattattggtatatatgttcaatttaataacaatctcatatataaaacttgtaataaccattcttaaagtggtactttttttaataacttctaagcatttagaaggtattctctatttttttaattaaattttagctaaaataattttaaaaaattaaaattagaactgacttttttttttactccaaccatactttctactttaatttgtattaatactttaataatatttataatttaaaagttttgattaaaataatattaaaaagtttaggagctccctatattcattaatatttttcataggagttacaactttttgtataattacttttttgaaaattcactctctactttagctaaaaagtatatttgcataataatattagtgatgctctaacctaatacctaataacaattatactcaaaaaatcaatcgcctcacacatgaccatattgatcattttatattcttacatattttggcaattacacataatctacctataatttttcttagtaatataattgcgagtaaaagttcttaaaaaaaattagaaaactacaaatatatatactagatagatgttacgtgccaagtcacgtannnnnnnnnnattttagtttttagttttttttaaaattaataatat

SEQ ID NO: 59892 - DNA, 578 bp, Cannabis sativa
tgtattaataagagttagtttttgatatttttttttataataacttataactaattatcatttttgtatcttcgctgtcaagtcatttattgttgattgtgatcttatttaattttatgattaataaacttaaaaagtatattgttataaatagaaaaactttaaaatagtataatttaaatatattaaatgtaatattttaattgtttttaaaaaaatctaatattatgaaataattaaaaaactactttaagaaatcgtttaattttatttttttgtaactttttttttttttgtaaaatattatccttatatggttttaaaaacatattataaaattattaaaaagttaaaaaataaaaccttaaattaaaaattagtgtttgtcttgatactttctctctttcttcttatctccttcctcttctcgcacaattgactgcttgcttaccaagtcataggcacaagacgacggagtcggaagacggccgatcaatgatactccggtcatcttgaaatatgattgcgtgagagaaattgtgtgagacaggttctcggccattggtggcctccatttt

SEQ ID NO: 59893 - DNA, 553 bp, Cannabis sativa
gtatgtaggagctcaagttacatatcaaggttcacgttagttgagtcggtgggtttgtgtgatgggctatgtttattagtttgattttgacatatcatatgaaatttgaattaaaacaaaatgtttcttcagtttttaacttatttccttactgttaagtaccagcttgagggtagtagtggatccctcattacaacttttataattccaagggtgtacaaattatagctaaaatggaaaacccaaatgcattagcttcctgaagtgggttgccatgtcgattttttagttgctctctcaattagcagagttctatacgtggttagctaaaatgtaggcattttctttgttgaaaatattgttaaattgggtgataagactgagagcatgatctttgaattaattggggcagttacacattgttagtcattgggtttagaagaagattgtgggaatttagtgtgtttttttcttttttccgttgatgctgttgtacattgcttgtatgcttggggccacgtgtacagtgacatttgtcttgttggcctgtgtg

SEQ ID NO: 59894 - DNA, 746 bp, Cannabis sativa
gattaccttgtcccgaacaaagtatagatcaatttcaatatgttttgtgcgagcatgaagaacgggattggcagctagcataaccgaactaatattatcacaccatatcataggtggagaagtggcaggcacatgaagctcagaaagtaaggattgcaaccaagaaatttcagacaccacagctgcaaggcttctaaattctgcttcggtggaggaccttgagattgttggttgcttcttggattgccaagagatcagattttcaccaaagtagacacaaaacccagttgttgatcttctatcatcaggatcagcagcccagtcagcatcacaataagcttcaagatgaaaattagagactctttgcaagtgaaggccatagtcaagagtacctgccaaataccttagaattctcttaacagctacccaatgagactgaagaggattatgcatgaactgacataccttgttaacactaaaggcaatgtcaggtcttgtgatagtggcatattgtaaggctcctactatagatcggtattgagtgggatcgaacacaggatcactaccatagttagagagtttcaatccactattcattggagtgctatgtgtcttggctccttgcatctcggctctgcacaaaaggtcttgtatgtatttcttttgagaaaggatgagaccagtgtcggttgtcaaggctttgattccaagaaagtaatttaatacaccaagatccttgagagcaa

SEQ ID NO: 59895 - DNA, 825 bp, Cannabis sativa
aaatccgctaaaccaatttctattaagtcagcactcaactccctatcctcaattctgatcggcatagacctaatcagccttttagagatgactaattctctgcgaggcaatagggttccaatccctttatcataactatcatgcattctatccaatttgttaaaaactttgtatgccacataagagtgagtggccccagagtcaaacaatacagagaaataagagttgttgaccgagagctaacctgtaacaattgagaggctagcttctgcatcaacctgtgttaaagcaaacacccttgctagagcgggttttgaagctgtgctatgttcttctttcttaatctacgaggaatctcttttatagtgtcctggaaacccacactggaaacatccttgccctttacactcacccaaatgatgcttcttataactgggacacaccgcgtaagtgtatcgggttttggagccaccctggcgattacctcgacattggttccctcagaacctcttattgtgaccagagacaccgtgtgcaaatggtgcctttcgtttcttatcaatcgtcgagccacaaccaccccttccaaaaccaggggtaggaggagtaggggttccaccaacaacctgagttcctcgagactcctgagtgcactcaactacgccttcatctcgtagtgcctttcccaccatgtcagtataggttgtgttgtcgtaggagtaatcataagatcatgttttattttcggattcaagccatccaggtacttttctttcttgcttaaatctgttggcacaattccttaggccaacctagctaatcgat

SEQ ID NO: 59896 - DNA, 1067 bp, Cannabis sativa
agttttcatctccttccttaatccaactaatcttggatttttgacgaagaaagcagtgcaaacctttgagtaattgcccatatttttgacttgctgccaattcttgttcaattaactcatgacataacggatcttcttgcaatttcctttgagtctctgttaggccctttctggcttcttctgtcgcttcttgaatgtttgaaaagctcctcctattcaactctttgagagccacttttaatttctttaactttgaagtgacttggaacatcttagagcctaccaccttctgcttccatacatcacctatctctttgtatcttggatgggaggtccacattttaaaatacttaaaaggcttcttcccatttagaattccatgagacaaagttactatagctggggaatgatcaaataactcctccattgcaaaaatagcttcagcagtagggaagttatgtaaccattgtggattggctagaactctatcaatctttgagtaaattctttcatttccttgtcttttgttgttccatgtgaaaaaactgcctctaaatttaatatcttctagctgacattgctctacacaatcgataaaatcagtggctgagctatactttactcttttcccaactctttcttctttggacaaaatatcattaaaatcacccaaaaccatccaaggttctctgttactcaattgctttagatctgcccacaacacctttctcccttcaacatcattaaacccataaacaaatgtagctagaaagtcaaacttaccatctaaagtagcagcttgcaaatggataagctggctggtacatttgagaatgttcactgaaaaactacacgggttccatgctactataatccgccctccttcgtgccacgctatattcgatgtgaaacaccacccttggaaaacattaagatataaggccccaagctttgaggcctttgttctcgtctcgaggaggccaacaagcccagctttatggacatgtaacatgttcttaacaagattttgcttacttgggtcattgattcctcggacgttccaacat

SEQ ID NO: 59897 - DNA, 2575 bp, Cannabis sativa
  modified_base (157)..(159): a, c, t, g, unknown or other
cacgagcacgacacgacacgacacgacatgaaaagatatatgtttaggcacgacacagtacggtacataaccatgagtaaattagctcaaaagcataacacattaaaattttcaataatttaataagaataacaatgataaatatttatttatcaannnaaataatagtaatattcaaattataataattataattattttttatatgattgtgtctaattattactaaaaaatatgtaaaagtaattaaaattataaagtatatatatatattttagtatttagtgttagactttctatttgctcctacattaatttttattagttttattaaaactttaactgattggatagttctttgttgtgttagcacatattgttagtaatcaatagttaatgggcttaacatttgtatataaagtctagttgaagcagaagtgtggatttctctaattaacaaaagcctttgttgagcaggcccagaccaactaagattatgtagctaagtctcctctctaactctataaatacatattgtgtcatcacaattatatacttttgataatcagataaatgaatgtgcttctgataaaatatagaggaagacttagtggatagtattgcaatgttaaattacggtaattgctatggatcaatcaagtgcgcaaatttaattattatacatattttagtattctatattatatacaaaatttgtattttactagaagaatccaaggtagtgcatcaaggtgaaaggatataccttaatgtttaaggaaggcagaatgaagtgggtagggctttctactatgtcatctaccctaagtaagaagtccctacatggataccgtgagtgatccagattcataaagtatgggtcgaacccaccttgcgtgatgttggcaaaatcctttggatgggggcatgaatcagtttgtaaggaaaattacctctcccgaacatactgacacccagagtaccagcgtttagaaagatagcagcaaactgagtctccagctctgtgttctcgttcatagtttttggatttagcctcatcatctcctccattccgcacttttcttttttaataacttattttactttgttcgtaattatctctgctgtggttgctttcttgtcatcaggatcattactagtcttgtaaaacttaggagagttgatgctttggtgcaaggctatcaaactaaccctcctaaagtttcactcaccagatcccaaacctccaaggccttttgatccaaatcacgatagaaagtgtgtcactctttaagaaattgtgactcttccaaacgaggaatctcatctacaaagatgagcaaagaaagtttttgaattagattcgattgaatcctgaagtaaaatcaacaaagaaacaaacaaaagacacttaccaacaacattgaaatctaacataagtgttgggtgcctcttcaacgggaaaccagaggtaaagttttagtcatgtctggaggataagtccatgagctggttgagaagattactttggaccacttctttaactgtaaaagccgatattattcttattcttcctcattagattagacctcgggctatacaaataaaggatctggttgggagatgggccctcgatctattgatcctatcaaaaaatttaccaacctgccatcaacttatacccttgcaagattaattgaaagggtgccaccccaaccattgttaggaagcaatcgaaatagtcccttcatgggaagtgagcaccgacatagacatggtcccaaatccaagtgtcgaagccatccacacttgagcttactttctcgacgcccatagaaagcctactccagaataagcatgggatattttggagaccgcgcttctcttggagaccttctgacatccagtgattccaaaatttatttttgatattatccatctcctagtgagatgggctagctgcctgtgcagccaaatttttagcagttggagcttgttcctcctcttggttgtcccagctttattctactagctcattttcatcggtcatgattggaactaaaaggaaaggaagccaagaaatcaataccgatactaaagaaaataacaagggtacatgagagttgtctctaataactgcttggagaggtctctgccggaccctatgtccaagagcgaattcctcagggaacaatgctccaagacaatagatcgggatcatgttgtggtattttcaacatgcaattatatgtatcgttaacaagtaatagactcacaaagagtgaggtcgatcccaccaggattgtagttaagtactttaaaattaaacgtttacttctatttggtggaataagatgaagagagaaaattaaaataagaaaaatagtgaaagtaggaagcaaataactaaataaaggaaattaatagttaatagaaaatagggctttgatttcaattatttctattgattgtggcctaatatgattatctccctattatcaatttctatgcaataacaggtttactaaggtaatttatagtcttctcagatatataaacctcaatcacatgcaaa

SEQ ID NO: 59898 - DNA, 958 bp, Cannabis sativa
gttccacaagaatttcacccagtcacagattcgaattccagttcctgacacggagaaaatatcccagggagaagaacgccataaatgaaaagccaaattgcaatggaggaacaggtgctcaattggcatttaataaccgtttaaattcaggttattttttgttacttaagtctgcaagcatgatatcaaatctggttatatataagggatttttataaaaatattgaattttagataaaaatttacaattttattgccacatgattttttttacaaaaatattatctttttataaaacaatataaaacaaccgtaaaataacataacattaaaaaaacagtagaacaactaataaataaccgtaaaacaaccatgaaaacttaacacagtatacagtataaaacttatacagtacttttgaaaaaaatatagtatttttgaaaaaaattctgtctcatagtaaaaaaaatgtaaaatttccgtatataatgtaaaaatctctatatataacctgtgtaccgctacaaataaaaaaaaattgaatattcaaatgttacaaacgtatttatttaggtatttaggctaactaaaaaatacaaacatattttagatcaaaaagaaaaatataatacaaacatataattttgggcactcttcggcctctaacaaaatagtttcaagatagtttcatgacataacgcaaccataataattacttttttttgtagcaatttatatgtgtgtgtacatagatagatctgtaccccaaaatatatatgatggtgttggttaataagttaaacactttttttctcctaaatctatatttgtatagggaaatttcatttttgatgcttaaaaaaataccttctaataaaatttagactcataattaatttatacaatttaatgctattattttcaatttctacctaaaatacccccctttcattttcct

SEQ ID NO: 59899 - DNA, 928 bp, Cannabis sativa
ttgaattattatactttaattaaacttcaaatattaattcattttgcttttttactatgtttttatgtactttcagctaaataaacacaatataattattgtagtgtatgtaaattgaaaaattataatttaattagttatgtagcggttatattatacttatatttataataagcatcctattaatttcaagaataatgaatatttattcaaaaataatgaatttacatccttagtaaaaataataataaatatttatttacaacaacaaataatgaatagtagtttataatgttaaaaatagttttcaaaataattaattaaaaattaattatgtatatattcattatttaaattttattttttgtatgataaattaatcagaatttattaaaaaaaaataatttttataagataactataatataacaccatcatctatatataaaaaataaaaaataagaatacacataattaatttttaatttaataatgtgtctttgtctaagttaaatgttcaaacttatccatatttattatgtaaaggaaggagcccacattaattgaaaaccctaaaatgagtcaattgcatctatttcaaacgtaattaggggcggtgaggaaggttggaatggggcaattgtgggtcccatttattattattatttgataattacaacacaatttaaaattttgagtttgtaacgagtataaatttaatatttttttaactgcataaatatttaatattaataaaattataatttttatcgagttttattaaatacggatactgttttcaatagtgcactgtagatacaggctgaactttttgacataatacgagcttaaaagaaacaagcacgactaggtacaaaaaatatggatttggacataatatggcacgatactataaattagtacgaca

SEQ ID NO: 59900 - DNA, 1021 bp, Cannabis sativa
aagttacaaaaaaaaaaaatttaaaaatcatattagctcttatataaagtattttttaggtttatttcttagatatatatatgtgtgtgttataatatatatatatatatatataaattttatggagagagataggaatttatcattttaattagggttgtacatcggtcgatttagtcaggttatagtgtatgttttaccaacccaatataattgttgggttgcaaatatctatttgtaacccgtccaatgaaaaaaaaaataaaaaaagtgtaacccgctcaataattttcatcggtttggtcgggttaacccgtttaaaccaatcttcatttttatttttttttttcattattgttagttttttgtgttcaaataattgatttgaaaaaaagaataaatttatagtatagatctttcaagattaaaatatttataatttaaattaataataatataaattgaataaacattaaagtattaaacaacatttttcaaaaaaaatagaataaaaaaaatatactcatatgtatgttctaaatttcaacttcaatattcacatacaatcaaaattatcaactataaattctaattttaaactaaacactatgaaatacaaactttaaatgtaaaatagtttaactattaaacgtaatttatatattatattatagataatttttgtaaaaaatatgtaaatcggtttattcgatttgttcgggttattgggtgggttagaataatattcaatctttccaatatattcattgggcggtttgaatttttcgtaaagttatttgggttgtatattttgtcgatttattcggttgatttggacggtttattcaggttgggtggtttgtaaattttttttgaacaaccctaattttaatatactttgtaattaaaaactaaataaaaattaaatttatatagatttttaaagtaggaaaaattactaataactttgttgttaaaaaatttagactaatttgcggcacaaatacttaagtttaactct

SEQ ID NO: 59901 - DNA, 1562 bp, Cannabis sativa
  modified_base (535)..(535): a, c, t, g, unknown or other
tactaaagaagtaaaggcttactgaaccatgagtcaaacttatctctgacgatgattgtacatgtcttgaaaatctttggtgaacaacctagaggctctgataccataattgtaacgccctaatgcttaggcatgctacattgactttccaattatagtacacacctttgctaatcaaaaggttttatcgaatattgtgacaaatttaaacttttaatttaactttaaacttttataaatatatatatatatccataaaaaaagttagaattctgcttttaaaacttatattcattttcaaaataaattttacaaacatgtcacacaatgattaaaaaatgaagtccaaatcgtctcgagaccaaactctccaaatcacaccatcttgacatgtataatctctcggagctctggactcactgtgattcatccttagcctttcctttgcctaaacatgaaaacaatatttgtgagtcaacagactcagtaagaaaagcatataacatataatatattatcgacttgtatttaggcncccatacacctatccacaaggctaaatagatgatcaagaacgtttttaatagaaagtacgacctctgtaccacatgctttaagtactcgtctcgtactagtgttggtaggtttgaaccataccctgagtactactgagtattgtaccatatgcactgcgtacttaatcgtactagtgttggtaacaatggatcttaccctttgaacatgatttgttgtaggaatgcactcattatcactactgtactagtcttagtagcatacaaatcatataacacaacatgaaatttagatacatacacctacatatatacatattctatgctagtcttacctcatttctaaattcaagtgtgtcagtcgacttgaatggaaaatcatgtgttgaatggagactgtatgtcacaatcacataaacgggtaaacaacttactaaaaccttcttgcggcactaaattccaaactaaaagtttttctatcgataaaatagcatggtaataacctaaatatcaaggaaacattaaaactgaggctctaaaaattggccaaactggtaatgaatttccaaacaacgaattggttcctagggctttgcttggagaaatagttaaccggttctttgtagaaaaccctaaaaacttcaaatctcgttcaaatttcccccaaatttaaccaaactttccagaatacctaaaataacaccaataaacaatttcgaagcaataattgaagcaaacatacacagaaactcaaaccaccattattgagccaagcttgatttttcaaactcaaacttgctcaacttctcaccaaaccagcaaaacttgctaaaaataatctcaatcaagttaactataacctaaaaatctaactgaaacaaagtctaactcaaacagaacctaaatttcaattatgcatgttcaaatgtaaccaaatccaaaaaaaaaaaaaaattgatgaagcttacctctagtttctagcttccaattctccttaaaatcttattaaacaattgagattggatgaac

SEQ ID NO: 59902 - DNA, 873 bp, Cannabis sativa
tattggaaggaacaaaaatgtggtctttagttacttgaaggctaaatttcaaaagcggattcaaagttgggacaacaaatttctctctcgagcaggaaaggaagttcttatgaagtcagtagtccaagcgcttccagcctataccatgaatgtctttctcattccagctggtatttgttaggaaattgagcattccattagcaaattttggtggagctcaactaacaataaaagtatccactggatgagttgtgaaaagctttcttctcattaaaataatggagaaatggattttcgtgacttaagggattccaatttagctttactagccaagcaaggttgtagacttcttacttgtggggatagcttgatggggaaaacttttaaagccagctatttccttcaggatcatttctttctgctactctgggtagtaatcctagctacatttggaaaagtgtctttgaggcccaagagttggttcgggcaggtgtttgaagggtagtaggaaatggtactcacattaatattttatcaaatacatggttgcaagatgatgtgaatccatatattgaatcttctcatccggctcttgttgggaacactgtcgacattttgatgaagattgattctttggaatgggatgaagctattgtctccgatgtgttaaatgaaaaggatcaggatttagttttgaagatacctcttagtagtttagagagtggtgcttggtactagatgaaagaaaactcaggtttgttcattgtcaagagtgcttatgcactgctgtaatcgatcaaaggcagcagcaatcaaccagataattctagtttttggcaaaaattatggcatcttaagctccccccccccccc

SEQ ID NO: 59903 - DNA, 2385 bp, Cannabis sativa
tattgatattgaataaaatggattacattgaaatgaagttttatttatggcataaacccaacaattttgtgtgattttgagtgtgaaatgtgattgttttattttgtgtgattttgaatgtgcaatgttattattttattttgtgtgattttggatgtacaatgtgttctccattgtggtgtatgtgcctatattttgtgtatgtattcgcgcatataaagggagaggcttaagcttaccacccgacatcctcttcatctgtttgatagaaccaaaaaaactcttttagacataacatgattcttcttagtgaatcttcacagctataatgtttatgtatttttttacataaaaagttttcctcgtgctctgttcttcgatttttgattttgggttttgggagttttcgtattattctcttattgtttgtttgccattttattcctgctatttcagaattgggtcatggtgattcgtggtttctgaactctatttttctgtgcttgtgatattgtaataaaaaattgtcaagccaaatcttgcctgttttctctctcatttctagtattttgaagcttctctctgtttataatggctagagctttgatgtgtttcatttttttccttcttctttcttttcgcatcattaatgcccaattccaacattcatggatgccatcttttggtggtggcttgccttaattggtcttgtattgtggttggttcccttactacctcgcttcagttttctgtgtcttttctctctttctatctctatccctttccttctttgatgtgtgaaaatgatttgcttgttgatatttaatgcattcttttagttattttactaaacgttattaatatctttcgactcattggttatggtggttctgtataaatggctttattctcacaatatgtatttgtcaagttctctatatttgtgatctttcaaatggtttatgtttattgatcttgagaagagttaaagtagcaatacacatattatactttataaaagaaagaaattttcccacactggaaagaagatttatagagaatttaatatgtaattagtttttgtgagagctagggcggtttgtgtttgccattgtggttttgtacagtttgattgtattcagcttgtgattaatgatttttttttttattcttgatcgaaaaaaatagcaaaataaaaagaaatagattacaaggacacaatatatctctcccatacttgaagtttggtatggtacgtcagaaattcccttaagaatctaagagggacagggtaatttgcaagacatgttacctgtacccttcacttcaaatgcatatagtatatgtatatatatatatatatatttatatgatcactacatacttacatgtatgtatttatatctcaattcaaatttaagtttactctgcatatatccttgttgaaaatgaatcccaaaatcgaatactttagtttgacaattgcaagttctgcaatactttagtttaataataataataaagctctttttatttcatgtgaatttcactctctaacagaagagagatctaaagtctaaagagcaagcaagcaaaatgtgaaaaagaagagtttggtttatattgtaaacaaaatagattgatcacagaggagaaaatcttttattaaaggtctgtgaacaagagtattataatctttggatagtttgtttaaggcccttacttatagggccagctacttgtgcaaattcacgtattcaatggctgcattattgagtaggtacaatgacttgtttcaataactatatattgtatagctttaaatgaatcaagagacatttctttcatttgatgattacttcaaataatagttatatataataagcttgaataggaaattattatattttattttctttaaaagttaatatacttatcagttttgtcaactatgatgtatgtgggtatttcagtgctgcatgaatgctattgtaactgttgcaggtagagtttctcaatgtttaataaactacgctttggatgttgacagtgtaaattttgtatcttaattgtagcaatttgtgcaatctaatggtgttattgattgttggcataactgtattttattaagtagcctaaaagactaaaatgagtcgatgagaatctagctttcaaaaaacaaaaaaaaaaaaattttgtccgcgattagacctttcttttctttccttctgaaaaaaaatatatatccacatatatacatatattaggtaaaaattacgtgccaagccacgtaaatattagttttatttaaggtgttaggtaaaatatagttgtgtctataaatatgtacattgttattaataattaaaaatacgttaatcttaa

SEQ ID NO: 59904 - DNA, 1115 bp, Cannabis sativa
cccaacatagaagttcatagccattcaagcctcaaaagtctagctcatattcaaatcaaaaaataacatccaaattcgaggatgatggaatttcacaaaaagtttttcacgaccctactctcatttgcgagaatatattctcccgtgtttagttcagctcattatacacagtataaatcgggacatactttttagatttcttttgttttttcttgtcttttgatgagtctttggacttatctttcctttttccatgtggttcgtggctcttactcgtgttagccatgtttgccttggcattacttgagctaggtttatttcttaagccatcctttaacattttcaacttagactgagcttcttcttttctgacatagatgagagccctttcattgaactcatttattgatttaactgggcatccttgaaaatgatcccacagttcactgccagtagtagacaaatcattggttatcctggcctatagtgttgtcaattgaatgctatcatttaggtttttgacctttgctactatcgtactaaagcgacttagaaatgctttcaaagattctccaagctactatttgatgtttgtcaaggatgaaacttttagtctcccatccctcgctgcttgaattgcttattgaattcttgagacaattgttcccacgaggttatggaatgatttgtgaatttatcaaaccaagtactcgctgctcctgtcagggatgtgggaaataatatgcagcacaagttatttgagacattatttgctcgcattattatattaaagttatttaagtgaacaattggatctgaggtttcattgtattgagcaacatgtgggttcttaaatctttttgggaattgtgaataatattagggtgaaaaggttctaggtcttcatccgactcgtaacttggaagttttctatactctccatcctgatatttcctaaatcaattctccaattgaattatcctttgttggatggagttatcagtgggttggttagtttgtacaattgcttgttgagcatttctgttcaatctttcccttaaaattgttggaaattatttacccaggatttagatctactcacaagtgtgttgatt

SEQ ID NO: 59905 - DNA, 1425 bp, Cannabis sativa
aacaaaacacagggtccaattggtaacttttgtaaattgacactttgtttataaaaatatctttataaagtgtggacaatatatctaccttttatgtacttttaattaccaaaatacctcttacactatcactcacacaataagacgatggttgctaggtagttggccgaaggttgcataagacgaaagttgttgggtgcttggccgaatgttgcatcagacgaaggtgaaggttgttgggtggttgattgaagattgcatcagacgatggttgtcgggtggttaaccgaatgttgcattagacgaaggttttaatcccaagaagcatagattgtgggttgctgttaaaactgtaatgcaacagttatatctgttgcgagccaactaatgtgcaacttaattgcaactaagggtgttcataaaatggtcgatccaatccaatccgcacccgcattttgcagattggattggattggattgaaaaatttaaaacccgcacttttttttatttgtatattattttttaaaaatttttgcatcaaaacccacttaacatttattattgttacacatatgaccccaataaaaaaaaaagtggtagcaaaagtaccttatcttacggttttgttgcagtcgtacctttttttggtcatcaagtgtcaactcagaaacacgtggcgacatatattagaccacatattaaataagctaaagaaatatatcgccacgtgtttttgagctaacacttaatgtacgactgcaacataatcgtaagataagtgccgctatttttttttattagggttatatgtgtaacaaatcaaatgtcaaaagggttacactgtaaatatccctattttttatactattttgatgctatttttttgttactttcatgtaattttttttgtgtttttataaaatacagtgaaaaatatatataaaaaattgaacgtaaaaatgtaattttgttacaaaaattaatattttatgtaattatgctttctttttatatatatatatatatttttttttttagaataaacactattattataaattaaactgataatcatatacagtaaataggttgaggggtaatcccagaccaaaagcaagtttcttccaaccctaaagcaaacttagctaagttgtgagcagctgaattaactgtacgcttaacatgtgataaagtcacattaggaaaaaaagaaacaaaaataaaagacgtcgacaattaaattattaaaagaaaaaattgcagtaggagcgcgtaaagcattaacatatttcttaaggttaaacaaattatgttgtctaccctttttagaaaaaaatgtaatataatataatttttctaagggtaaattgcggcataaatatctaatgttttagattttatatacttaaatacctaatgtttat

SEQ ID NO: 59906 - DNA, 4896 bp, Cannabis sativa
  modified_base (4837)..(4837): a, c, t, g, unknown or other
ctcccatttttaattccttttactaaaaatttacaacaattttgttgatcccaggatacagctaacaatttatttttatgtgtgcatttttattgatgaaacttagttttggcttgataggaattttgtggatcagtggatgatcagcttcaagggttgacggtgagttccattattggtttgactgttatatgtctattaattatactgctctctatccatgtgcactcgataagaatcatttttgtatcaagtaagcttaaaaatgttttgctatagtttttctttagatgctctgtcactttcataacttttttcagttgctacttgcctcgcgcgtgggaggtgtttgtgcatgaagctgttctacttctaatgtgcttaaaattgtgtggggcactattgaaatgtttaatgctttttatctgcctttttccaataggctaataattgttttctttgatgttttattagaatttgcatgaatctgcaaaaatggatgttgataagatcatgctcactgatgctccacttctgttcccgcctggacaggtatattgtgtgctccaaaatttctccttaagattctctttcttttctcattgtaataacaacatagagctggaattatcgtttgtagaaatctgtaaacgttttcaggatctacataactttggtcattttcacccgtccataattcccccccttttttttttctaactttttttatgactttgagtttgaagtacccaaaaaatcctaaatggtgcaactgattaacatacaatgtaatttagtctacataactttggtcattttcacccgtccataattctccctatttctttaacttttttttatgaactttgagtttgaagtacccaaaaaatcataaatggtgcaactgattaacatacaatataatttagtctataaggttggagggttcaggagatggctaaaagcaagttagattacagacatcaaaaaccgtcttaaattgatttgaaattaggaagttgtttgcattaactagagagtgccaaggctcagaaatagttagagttatataagactcaatccttgacgaacttgacattgtaagaccatgaccaacgtcatgtgaatttctgagtttcctttgatgattaattgctttctttccatttgtcattgatttgtccacttttcacatggtgcagctggcattggctgctttgcgtagttcgaacggggtgcataaaattatagactttgagaggtttggaccctgccttacatttttctttgtaatctctttatggaaggttggtaccgaactaccttccatttatgaagttaaaaagcatatgaattgaaggatggagcagggaaataaattcaactgttgtttgggctattattgaaaaggttgtttttctttctaatttgcagatatctaacgagaattcttagccgtcagaacactgaacacactagttcagagctcattgaatctctaaatgcaatagactcttgggtattactactttggcagaaactttagatttctatgtttgctgcactgaagcatatctacactagagtatgctattgctagttacagaatagtttcaatctttcttgttggttgtgtgcatatataggtaaggaaatacaagtttccttcagaaaaggatctgaagcacatcaatcgtaaactgaagtcttgttggggtctcagctcgcacgatgagtactgtctacacataataatctttatgctacgtatttttcttttgccactaatcctactaatagaagcttctttcttcgcagtagcaagaaacgtgagaagaaattaaagcataagtcgaagaagagttcaaacgagcaaaccttaccttctcttaacgaatagtacgttgtgcttcttatgcattgggatagcattcataatttggtatgtcaaagaaaaacattttggttatcttttgacatttttaatctgattacaggtaaactagcgcgtttgatcatcacctgtaagtggtttctctgacccctgaaaatattttcaagaatgaaaatattatatgcatgaaggaagtgagattctgtgcattttctcatttgttctttctctcaccttattgttttttctctctcttcacatatatgttctcttattcacattttatgccatatctaacttaacatgagaaatttagtggagttttgacaatcattcattcagttatagatttactataatatcttgtttgtgctatttttaatcactaattccatagtttcggcagttgaaccagtatggtctaattcgttatggtactatcaaaacaatttgtcgtttggttcaaactatgttgttttggtggtggaattcatttcatttttaaccttttcaaactagtgctgctcaaagttaagttttgttaagaaaattaagatgttgcccatgtcttatatataatgatgacagtggtaccttctggataaaatgttttcagtataatccttgaaatttcaaaatacatacataaacatccttttaaaaaaaaattgactaaaactttcttatgatcattttgtgttgatttagactaaaatttgtaatcaaacaaatcaatattagtccataaaaaaaataataaaataataggttggacaatttttaaaaatgcctaagattaaaaaccaaatcttacaatatggaatttgaaaagcaacattttctttactcgaagtccttgttttcttagggcctgtttgactttataacttaaagttatttcagtttttaaaaacacaaataaccttgaaaaacttataggggacgtttggctaaatttgtaaaaacattttaaaaaaattagaaaataaattagatcaggaaagaaatagatcatcctagagggcaaacaggggacccaaagcccaggttgacattttgtcaacctaggccatttccaacaatagttaagtagaagtcttcaaggcatattctccattttcaccaacaataaaaatttggtgcttttgggaaacaaacgaagtcatatgagagccaaaacttggacccaacgcccaggttggcctaagcgctaggcctagcgtccatgttgacaaattctgctctgagcattcttcttattttggtcaaatgcctttgaagtatcaaaacgagccccagatagctacctgagaagcacccaacccctaagttgacgtatggcttgatgcgttgggttctgcttatcagattccaattccgtctcaagcatctgactattttttttattgtaaacgagagctacgacttgtgatcagtaaaattttcactttgatattttaccattttaacaaggtggaatattagcaaaatcaggaagtttcgagcctactcgatttcaccaaaaagtgacatctccgaaaactggtgaacaacttcaccaaaactaagaaattggcaaagtgatgtcaacatatcacataggcataaaaaaatacaagtgtaaaatgttttttcacttacttaacatccaggttgtcaacctgggcgctgggtgctgaacaacctttagtgaaacaaccataactccttaaatattgatctgattgaagcgattcgttttaaatctctttcaaagctctttcaagttatgtctcacatccacataacaattttgaagattttgagtctaaaatctatgtccaagaaaagtgcaattttttttttttttttttcagattacttgaaaacgatccaacgggtaagattcaagttctaaaaattggcgattttcatcaagagtcaattttagccattacattatcatcaatggcaaagatcagcccaaagtgattttttcatatttgtaatattttattattattttaataggacatcattccctataaaatgagagatccctagttcatttttcacattcttctaagtcctcataatgttagagcatctctacctactttctttctctagaaatttgagttcttgtcttagtcagttttcttgtaattctcgtgagaaataaaaactcaaagtagacatagctctattaacgtcgcgatatgaggagtgaactactatgaatttcttgtgactctctatttatttactaatacttatttcttctcccgccaatctagcgagtgagtgtcggctagatttttacgtcaacaatatgatcttaatttgcttttgcttgtactttcttacaagatcataccttctctctatggatatagaatttttaaatatgtattattttatttttataattaatttatttatttatcttataattgtatatcatattttctttaatatgttatccactaagtattttttttagagaatagatactaatagatttttccatggtgcattctgatccctttgtcacagcttctaattggcctgttgttggtgtggagatgagtcttcaagttgatgcttctattgttgataactttactggtcttggtttggttcagcgaagtgttgaggattcgaaggcggtcgttgggatgcactgctgctttgttggtagtgttttggaagtagaattcttggccattaaacacgctcttttgctagcttgtgaagaggggatacactctgtatttgtggaattgaattcgtccttagcagtttaggctcttgtttctagagagctttcctatgtttggggctcttacctaatttttaaagaatatcttactgtgattcataagtttgtttttgtgttctttaaatttattccttgcgtgtataactttgttactgatcgcatgttgggttttgtgccctaantaaaacccatttcaatataatcatatttactaattaataaagatcagaaatcattttat

SEQ ID NO: 59907 - DNA, 998 bp, Cannabis sativa
tttacatgactatgagaaaaaaatcaactaaaaaataatttcggatactaaaacagatagagatgtatcggtgtatcccttttaaaggaatgcattatagaattttccaaaaaattataactaaatttcattactaaatttactccgttagatcttctctttttgaggctgatcgtacttttagtggagattccctaccctccgtatttgcatccttagttttggatgatttggtttaataaatctacatatatacggattaataatataatctttaaacttcctaataaataaataatagaacacactaataaacttttatattctcttaataataataattattaatattgggaataaattttaaaaaaatattattttattttgaaatttttacaccaaaaatccaatttacacaatttattacaaaaaaattcctacacgcttacatcatcatttttacctttcctctttcttttattacaattataccacttacacatcaattccatgcacagacacgtgtggcttccctatcaaccatcaatcaacttccaatcactttcctcttttttttccttttgtttttcatttgatttttgatttattttcagtttttctttttttttaaagatcaataacctccattattgaagcataactatccacgattcatcacggttttttccctctcattttttgttcttccaaaatttttcaactcccactaaagtcacgattcctcacggtttttttcctctcagtttatttttgtttccaatttctttttaaaatggctatcacccgttcatcctcatctccttcccctgttcagaaaaaaaattctaaaatgggattgaaatctctagctaacaaagcaaagtgtaaacgtccaattattgaagagtatgattctgatttggctcctcctttaaccaagcatgggaggccacatcctaagaagaaatcaaagctcagtgtggaagagaaaatggttg

SEQ ID NO: 59908 - DNA, 1795 bp, Cannabis sativa
aagactataggttgtaagtggattcttaaaaagaaattaaaacctgatggaactgttgacaaatacaaggctcgtttagtagccaagggttttagatagagacagaatgtaaatttttttgaaaccttttcaccagtcactaggataacatccattggagttttaatttcactagctgcaatacacaacttagttgtgcaccaaatggatgtgaagactgcattcctcaatggtgacttagaagaagaaatttacatggatcaacccgaagggttcgtgattgctggccaggaatatagtgttcgcaagttggataaatgtttgtacggtctaaagcaagcacctaagcagtggcatgaaaaattcgacactttagtcatttctaatggctttatagtgaatgaaagtgacaagtgcatctatttcaaatctaaaaatgatatatgcacaatcatatgtttatatgttgatggcttgctcatttttggctctaacattcatgttgttaacactgtaaaatcaatgttatgttccaactttgatatgaaagaccacagagaagcgagtgtaatccttggaataaagattattaggtctgataagggaatttctctagatcaatctcattacattgagaagattctaaagaaatataattactttaactgtaaacctgcttgtaccccatatgacccaagtgtaaaattattcaagaacactggagatggagtaagacagtcagagtatgctagcataatcggtagccactgatatgctattgactgtactagacccgacattgcctatgttgtgggattataatgcatgtttaccaatagaccttgtatagagtggcatgctattgagagggtcataagataccttaacagaaccatgaatcttggattacattatcataagtttctagttgtcctagaaggatacagtgatgctgactggactactttatcgaataactccaaagcaactaatggctatatttttagtatagttggtgagctgtttcttggaaatcaaagaaacaaactattttggcacagtccaccatggagtttgtaatgatagcactagcaactactagtgaagaatcaggttagttgaggagcctgctagctgagatccctttatgggaaagaccgataccaactatgttgatccactgcgatagtaccgtggctattgcaaaagttaagaaccattattacaacggtaagagatgacaaatacgtcgtaaacataattctgttagagagttcttctttattggagcagtaagagtggatcacgtacgcactgataaaaacttagccaatcctttggcgaaaggattagctagagagaaagttcttaaaatctcaaaagttatgggactattgcccttagaataaataagtgactcataaaggtaacctgacctataagactggagatcccaagaaataggttcaatgggtaataacaagttatgatttgataaggaatgatatcattctatgtaaagcatgaaatcttgaagcgatataaggttgagttaatagaaactcttaatgagatctatactctttgtatagtggagtaccaagctacatgagtactcttgatagaatcacctacgtgaatgtggaagtggggccacttcctatgaaatttgggaaaatttttagagcgttcactacactaggatagacgtgcatggacattaaagcacgagcttttgcactacacacaagaaaggttttgtgtggtacaacgttagagatagagttgaagacta

SEQ ID NO: 59909 - DNA, 1106 bp, Cannabis sativa
ggggccccaagcacccaacgcccgggttgacaatctgtcaatctgggcattttccaagtgtacaattgaatatccaaattttgcattgaaaccgtcttcatcaaaaatggggaaataactccttccaaaggaaaaacaacaatttgtggccataaataataggacctagtgcccaaattgacacctggggctggccctgcgcccaggttgacaatttgccaaactaggccacgaaaaatggagttttccaggaattcttttgagcgtcatctttgtctttagaaaatactgagattcaactatttctggggatcgaacgaaatttctaaaggggcaaaattgggacccagcgcccaggttgacattttgtcaacttgggttgtttccgatttagtttagaaaaaagttccatgcattttcactgtcgtcagaaataacaaagatacaagtaaactcagtgggaaaactacaaacctgactcactggatacatggcccaatgcccaagttgacctggtgctaggcccagcacccaagttgacaatcaacctgggacgctgccttcaatttctcaaatgccaaatctaatgcgaccatggaatctggaatggtcaaaaatgggagaggagaccttgtccccaagttcaaaagctttggaagtataaaaaatagaatcttgaaagctcagtttaaagggcctagcacccaggtcaacaaatggtctggttcgttgggttctgcttatcttaatttgatgttgtttcgacgtctgtctatttttcacaagtacaatgatctatgaagttagaacaatcaaattcacagcttcaatttttcgacaaattgactcacttaaaaaattgaaagttttaagtcttccatttttgcagtaacatctttgagaactaatgaccagcttcgacataagatataaatagactaagtggtataaaactaacacttaggcatctcaaaggacaccctttggacatttatacacttatatagcgtccaggttgacgttagatgtcaacttgggcgctgggatgtcaacctagacgttggatgtcaacctgggagttgggacctgaattgcctttagtaaaa

SEQ ID NO: 59910 - DNA, 1181 bp, Cannabis sativa
atagttatataaaactttaaaaaaataatatacacaattactattttaatgtaaaaaagagtaatttaaaaattcaatacaagtatatttcaaaacataataaatgaaatgtatattcgatttttatatataatttattttgtgatatactatttaaataaaattaaattgatcttccttcatctaatttctcactcttttgcagattacagatcttccttcatccatcctcctccttcgagccactctcttgtttggtgtccgcctcctcaagactggctcaaactgaactatgacgtcaaagtaggttcggagcacatgtgcattgaatttatttctacaaaccaccttggtgaggtgatttaggtgacttcagcaaaattagatttctcagatgctctttatggtgagtcgattgttgtttgcttggcgttagaagtggcaatggaacaagaaagcaaatttattattgttgaaagtgattctaaggcaataaacaatacaatcactgggttggaccctaggtgggagattgaaaattactagagtcatcctctttcgctagttgtttattttgtaatatttttagaacttgtatttatatggcccataatgtggctaagtgagcgtttacccacaactgatttggtcgattatctacttcctctattcctaagaacatattgtgtaatgatcataaggtctaactttctatctaataaatgtttcttttcaaaaaaaaaaaataataaataaaattaagaattaaatatgtctttctccatacaattttttcctttaaaattttttttttattttatttgttttaattagttgttggagatacctaaccaaacaaaaaataaaaaattagttgttgacaacataaaacaataatatttttttgttgttgttaataatatgaaaagaaatatatgtttttaataaatattaaattatttaatattaaaaaataaatgcaaaagaatcgatacaatctgcacttttacaaattagatttaaactattatgcaaattgaattgaatttaaaatatgaaatcagtaattagtgcaaatcatatatactatgaaaaaaataatgtggattgaattggatgaatacccataatttaaacattgcagggagatagaccacttggtcctgagagaaattggactt

SEQ ID NO: 59911 - DNA, 671 bp, Cannabis sativa
tcaaccaatcttgatttatagaatcagaataggttgaaaattatcaatccagttgttgtttcaagcaattcttcctgttgtgctttagttgtgtcagctggccattccactggatcacttaggacctttagcaatttttatacagagccacaatatagagccctgatattttcttctttcgaatttgataatcactcgaaccatcaaatctatcaatatccaccttaatagaactcataattatataaaagttatttcaagaaattgtagagatattaagtttagaaaaatcctgatattgactttgtgatctgtgtgatgtgtagcttgattcttgatgttcagaattttttcgatcctttcttgatttctttctgttgtagctttcctgccttgtttggctctgataccgctgtaggaatttacccttttgtcctacacaaaacattaaacaaatcaagttttcccaaggtcaaaatagacctttcaccctgagtcaaagcccggttgactcccaagagttaaatgccaaatgacagtctttaatcccttgactacaagtcgttttgagcttaacctaaattacccccagaaccctctagaatcacttcattcattcacacacacaactcacagattgaaacccgagcaaagcttcgagtttcttctca

SEQ ID NO: 59912 - DNA, 1021 bp, Cannabis sativa
ggcgcactgatagagcaaactcttcaaaagttcgtcagaaaattggcatcgtcgccggaaaaatcaccaagaaattttctggtaatttttccgacaataatgccaatttcgatgacttttctaacgtcgaaaacaatttcgacgactttttcgacaccggaagctacttcgacgactttttcggtaccgacaacaaactctgaaaaagtcgtcagaattagcattgtcgccgaaaaaatcaccaaaaaaatctctaagaaactagtttcttcatcaagaaaccaatttctttcttgatgaaaaaaaagtttcttggtcatttttccggtaatttttctagcgacaatgccgattctgattacttttccagcaccgacagcaactccgacgactttcccagcgcttacagttactccgatgattttcccggcgccaacagcatactccgacgccttttctggcaccgccgacaactccgacaatcactgtagtttcatttgttttattttttaaaaaaagtatatatataaagagaattttaatattttttatggtaatttaattctatgttaagtttttattttaaataacatatttttttttattaaatttttttattatatttatttaaactagctttatttttcttatagttatataaattttttttattaaattatatgcgagatgttacttaattatattaataatggtataatattaaaaaaaaatataaattactaataataccctttttagcttttctcattttgattttaccccataaataaaaaagagttagaattagaaataaaaagagtcttaagactatggataacctaggtagggccatcttaatgacaaatcacataaagaaaaaaagttgaatattataaaagcaaaagataaattcttgtcaaaaaagacaaacaaagaaacatgtgtgttattgtaaaaggatagccaatatatcaagaaagtgacatgtgttactatactttaaacatcatatttattgata

SEQ ID NO: 59913 - DNA, 1384 bp, Cannabis sativa
acgagaaaatgcttactttttagagccgaaacataggctaaatataacctaacaatatcttctcggggtctgatccttgtcaggctatggactgctgacacctctttcaggatagaatttcccacgaagatcaagatggatccaccctttgtccttcttgagaggaaatcagaagaatgttatttgctatgaataaccataaggctcctaggctggatggaatgtcggttctcttttacaaacactactgggagtctgtgggtgattccttctgtgatgcggttgctgacttctttgaatctagcaagatggatcgaggtataaactcaactaatgtggttctcatccctaaagttcagaatccgaaaagacctaatcatttcaggcctatatctttgtgtaatgtgttgtacaaggttatttccaagatagttgcaaacagattgaagcctttccttccttctctaatttgccctacccaagcggcttttgtcgcaggtaggaatatccaggacaacaacgtgatcgtgcaggagatcatccactcttttaacaggaaaaaaggaaaggagggatattttgctataaagattgatcttgttaaagcttatgatagattaaactgggaatccattgatcaggctcttgattggtttggcttcccccagaagtttcagaattgggtcacccaatgcatctccaccacctctctcaatgtgtgccttaatggaggaatggtgggcaagattatgccctcatatggtctttgccaaggggaccctctttctccctacctctttatctgtgttgctgaagtcttgtctagactcttggaagatggtcttgcgaagggtatctacaagggcattaagttaagtaggggaggtccggtcctaacacacttattctttgctgatgacttaattctggtaggacgggccaatgtgaattagcggttattggaattgcctggagacgttttgctcctggtctggtcaaaaagtaaataagctcaaaacatcaatattctttagcaagaatacaaccaatgggatgagaagaggaattaaggaggcattgggtattgactctccggagggtgtcaccaagtatttgggtctgcctctcttcaaatcaaaacaaaaggatgcagatttcaatttcatccttgatgggcttactgtaaaattgcagggttggaaagcgaagacgctatccaaagtagggcgtgccactctaatcaaatctgttggtctttcgcttcctctttatgacatgcaaaccaccaaattttctgatcgtatggttaaaaggatagatggtcttgtcagggatttttggtggggttttgagaaaggaaatcatggcctgcatctaagagctt

SEQ ID NO: 59914 - DNA, 1662 bp, Cannabis sativa
taaataattttatattatttaattataaatatattaaaataaaattaattaattaagtatcttgaattaaatcaacttaattactaattttatatttaatatccaataaataaatattatattttaaattggctaaaattaattaagaattaattttcaacttaaatataattttttatttaattaaatataaaaaaaatacaaattagtttactataaattaattttctagaattttttaaactaagtgtgtttttttaaaatcaatttcaaaataatctaataaaaaattaaattcatttcttttaatattaattattttgccaatcaatttttaattaggttaaactaatataattagtctaatacaattatttgaataagacaaatgtgccttcatagttgggatagtttatgtgagggagtattgggttcagtatgtcgtacctactactatggccccttaactctcacacaatgcccaaaaaagaggaatttaacttttaaataaataattgttattaattgaataagtccaatactaattgggcctaaataaaactatcaaggtgatcattattttgtagcaacctagtccatttaaatatccaaaattaaatgtgcatctaagcccaatagcaaacatataagctcgcgtaaatattgatttggataggccctatcatgttactaggcttatgacacaaatgaaaaaaaaaaatacaaaattacatgttacaaattatttatttgatttattgacaattaactatgactaatttgggttactggatccaagttaatcatagccatttaaatgaaataaataataagtttattaaaaaaattaaataaataatgaacatgcaacaattaaggatagttggttaaatgattttatattattttatatttaattaaaaaaataaaataaataaactcattttcaaaaaattagaattgttacaaccttaaatatctatttcaaaaaatatttaaataactatcaaaatttatgttattttaaaaatatacattaataaaataaatatatataataagataaaatgataaatagccaatatttttttaattttataatttaaattaataaaatatattaaaataactaaattttgaaaggtgagacttatggttagatttttataaaaaaaaatatctagattattttgcaaattttattattattttaatgtcaaataagatcatttcatatctatatatatatatataaggcaaatattacgtgcaagatatgtatacatagttatatatttatattcttttttcaggtgatgtgttttaatttttgaaggttagaataaaaatactatgaataatttaattaaataaataatattattttaataggaaaatatttattttaagtttcataaaaggaaatataatagtatattttttgaaaaaaaaaataaatacaaatgcttaaagtttttagaacaatttacctcaagaaaaaaaaaacttttagaacaataaatcgaactcaaaatgtattaagaaaatattagtatcattttaaaaattaaaggaagaaatttgtagatttcttaaaattaaaaataatacacatatatatatattactatactatatgggatcgatatatatatatatata

SEQ ID NO: 59915 - DNA, 1242 bp, Cannabis sativa
agggtgttaatcaacatacttttgagtagatttaagatcttggtaaaataatttccaacacgttcgacctaccatgctgcccgagctgagctggcaggtgtggtgtcaccttattttttttggaaaaattcaattatttaattaaaacagttttttttaaaacgtgtttgattatcgataaacgaaagctttctgatttttagcatcgtttccacgatcctatgttctaacgttcccttcaagtaacgtctttcttctcgttaccttcagtgcattgtctatataatgcatctgaaccaacgggagaaacacatctcttttcactgaaaaaaacttatacgatatatacatacgattatattatatatatttcgagatgtagtcgattttcgggtgtagtatttcgacggttctttatcgtgcaatagagttccgatacagtgtgttcgactgggttattttatcctaaggacaacaaggctgatagtctgcttgcacatatatgggcagtgccgcgaacgtcttaaagaaagtgacctagtccgcgactcaacccaaattctgattcggtaactttgttccttttattttttgcaacaactatttttataacaaaacctattgtaaggaattcaaaatcgtaataaaatttgttgttgagctaatttttggcatcaacatttaggtataataggtatttgtataaacattttggtaaacttatagtttaccctgcaaaaggagtgttctggtatactccttattcggtatctaagaaagttttttagtttaattgttttttaaaatcgtgtacgttttagttatttaagattatttgtatgtatttataattcataaaattttgaattaattatagtacagaaaataaggttcaaataattacttactacgagtataagaaaagtagacatgtgtacaacaacaaaattgaaatttattttcgacaccgtaagtaatttttttttaaaaaaaaattataagtaattttaaataaatacaatatacatgattatgaagaaaaaatagactaaaaagctcttttttagatgccaaaataaataatactataaattttcttaaaattgattggagggtcataattgctattttattaaaaatatgggttccaaaagttactttagaaaatgtagggttcaaactgatagtaaaagttactttagtatggaatggaatttctattcttttgtttggtaaagacta

SEQ ID NO: 59916 - DNA, 1944 bp, Cannabis sativa
tgaatgaaaaatacttctgttattttattgatattgaataatctggattacattgaaatagagatttatttaggacataaaacccaacataggaaatgtcgagtctagtacaatcagtggcataccaaagactgccaatgatgttcgcatactcaaattgtcttacaccatcaccagtgttcttaaataattttacattgggatcataaggtgtacaagcaggtttatagttaaagtaaatatatttctttaaggtcttctcaatgtagtgatattgatccaaagaaattctcttttcaaatctagtgatctgtataccaaggatcacatctttcatgtaaaacatttcacataaaataatttcacattgttcactacataaatatttgatccaaaaatcagcaagccatccacatataaatatataatagtgcaaacgttattttcatgtttatagtaaatgcatttgtcactttcatttactttaaaaccatgtgagatgacaagattatcaaatttctatgtcattgcttaggtaattcaactcatacaaggatttatctaatttacacactttatgttcttgactaggaacaacaaaacttttaggttggtccatgtaaatctcttcttctaattcaccattcaaagaagcagttttaacatccatttggtgcacaacaagattatgaatagtggcaagaccaataagcactcgaatagatgtaattctagtaacaggtgaatatgtatcaaagagatctacattttctctttgtctaaatcatttggaaacaagagtgccttgtaattttcaataataccattgggtctcaatttctttttaagaatccacttacaacctattgtcttacaaccttgttgtaacacaactaaatgtttgactcaagagagtccatttcatcattaatagccttattccacaaatcatcatctagtgaagtcaaagtgtcttggagattagaatgatcctcctctagagtatatgcacaaaaattagaaccaaaatctttagatactctagctattttacttcctctaggttcattttttatactctcttcatgctcattatccttaataacagacatgttactagatgacgcacccccaccatttcttaatttaaatggaaatttatgttcataaaaatcagcatcattagatttcaaaataacatgcgcatttaaatcataaaatttatatgttttactattaacaagagatccaataaacagatattcatatgctttactagccaatttaactctctttggattaggaatattaacatatgccaaacaacccaaagttttaaagtatgagatattgggttgtttatttttcaaactttcatatggagagacttttcttttagatttaggaactctattaagcacataacacagagtaaataaattttctccccaccaatgagaagcaacaccaaaatttaataaaatagcaacaatagattcagtaagagttctattttttcttttagcttttccattcatttcaggtgattaaggtgcaatcttatcgtgtatgatttcatgtgagttataaaattcaacaaaagcagtggaatcatattcagtgcctctatcactacgtaacttcttgatctttctactaagttgattttcaatttcaccaacaaataacttaaacatatcaagagcttctcttttatttttcagtaaatacacaaaggtgaaatcagggaaatcatcaatagaagtgataaagtagcgtttactattcctaatcaaagttgcatcaagttcacaaatatcagaattgattaaatttagaggctcactttcttttcctatcaaagacttatgtggtgttttagtaatcttggcttggctacaaaattcatatttttcaaagtcatttaaagataatttaggaatt

SEQ ID NO: 59917 - DNA, 985 bp, Cannabis sativa
agtgtgctaaaatataacaaaacataatatgattagcactctattagaggtgctcttagagaattaattttcttaaaagtgctaaaatatagcattattttaaaactccattgatgatgctcggataatttataaaaatatatgagatctaaatattaaattgtaccaataataatttaatatttttatactgatacctttggtgttatttctctaataaaaattgtaattatctcaattaactaattaaagttaattttctttccaataagaccatctttgatgaaagatataacaaagttatgttttatttgatacggaaattgattttatgatatctttgtatcaattttttaaatttttctcaagaatattgttattaggcacttaaaaatgtattgttattaggcattttaagtacttatatcgatgtgtcaagttgcaagtaatcagcgatttcttttaaaattatttattaaattaaaatgtattgtactcgattttttatattaatggtaatattaatataattaaaaaatgtataataaagtttatcattaatgatcaatggcacaattataattaaaaaatatacattctaaatttagcatattgttatatcttgtgtaaatttgacataacttttaccgtgagttaaatttaactcaagatttcgagcattctcaacagcttctgccttttatactttattgttaaaaatacactactaatttttttttttttttacattacacttttacgttataccatatatcaatttttttatatttttctttacattattaaattaatattatttttattttctacaccatcaaaataataatttttgaacatatatacaacatacataaataaaatattatttatatattattaaaataagtttagaaaatctactattcattatctaacaagttgtattggtgtgagtgcacctctaatatacatatatgaattaaag

SEQ ID NO: 59918 - DNA, 551 bp, Cannabis sativa
atttaaaaagttaaaggtactaaaaagtaccaaaatagtaaataaaaaagtaacatttattgtagtataaaatttagctcacgctatattttatgttatatttgacacaatttaaattacactatacaccaccattgaagcttaattttatgaacatagattaaaaaatacatctacactatctttgaagtattcaattgaagatgttcttataaaacctaattgttttgtagtggtcctaagtaaaagatataagttattttaagtacattagtgatattctatagactataataattattaaattaaattattacataaaatctgataattcaactaataactataagactttaagtggtattaagtatcattacattttaagatactaggtgatcaattacactagctattattgtacatgtgacaacacatatatatatatatatatacatatattatcattggagaacatgtactggcaatggagatattttggtgacaggctttccatagttgcattaatatttgttgttttcatcttattaata

SEQ ID NO: 59919 - DNA, 1159 bp, Cannabis sativa
aattaatattttaatataaaaaaatagtaatttacaaatttaatacatattgttaacacgaatttttgtcaacttattctaataaattcaaaaaataaagagatgaaaataataaataaatacaaaatatttttacatggttttatagttaaatttacatagttcacgagttaatattatttttaagttttgaagcatgtattactcctttttgatattcttcaattaattagtaaattgatcgctcttagctgaagtctgagttgagaaataaacctcgagtgtattctatatctgagcagaagtgtcactaccaacaacacgagtgagcacaccttcaatcatggaggagagtaaccaggagtaaaacagctgatcctgttgctcccattaaagatatacatgattgattcgattcaaaaattgatcttgttcagaaaaaaacttcatccaaggaggtttgtcagagatgtaatcaaagagttgatgacctttaatggcagacaacacctgaggatgccataacaggaaattgttattgtcaagcttgacaaaaaacttgtgattgaagacaacaagatgaaattgaggaggattagtagtggacgacatatatgaaaatgaaacaagaagaagcagaacgagatgcagaagcaaaaaaaaaactcaagaacaatcgatttttttttttttttttattctgataccatgttgagattcaagaatggaaatgtggaaaaaattatcttcatagaaatgaatgagcaaagctcagtatacaaggagagagatcgaatacaattaacaataattagttacatctattaaataaagtgtacataactaactcaagtaacaacctaactaactatacattaactattaacaatgagtgattaatgtccatgtttcacgtacaattatacatttggataagtgtaaataactgtttatgttaaaattacaaagaagtggattttgacttgattagaccgtgttgtttgtgagcagatgcataactgagtgtgtaatacgaggagatacatggttgagtgtgtaatacgtggagatgcataactgagtgtgcattatgatgagatgtatagctgagtgtgtaatacaaggagatgtattgctaattgtgtaatacgaggagata

SEQ ID NO: 59920 - DNA, 1001 bp, Cannabis sativa
aaaaaaaaaaaaaaattaacacaccaaaaatagggttcaaagagtgtgttgcatgcgtaactattttattttatacgtgtgtgaaatagactgtttgaatattgctttctttattataaattattccgaatttcttaaaattttgtaggatatcttaaataactaacatgtatgttgattatatcctataatctaacaccctaaatatgaatttgctaaaacaataaattaaacagatataaagttatagaaaatcttacattggtggcagcggaataatatggctccttccacgtagatctctaacacttgttcctttttatcgcggagtaataacaagatctaagcttgaatctctttcaggtgttagaattctttacaatcttccacactatgattaagtacttgacttgatatgagtgatcatgtactctaaaactatagggacgaaattttgatgatgaagaagaagagaactcgaaaattaagagaggagcctctcttttctattttctgacaaaatagactaatgatgagttatcaggttatgagtctgtcatgttctatttataggtttttcatctagagttaggtttaaattatatggaattaaataagataaaaaaatggcttaaaatcacttaagtggctgaccctctattgtggaccccactagttacagttttgctattttatttcaacaacttatattttctttcataaatgtcatattttaactttaaatatttaaatgtcaaatctatttatttaataattattaaataaatttttcatttaatttatttattaattggaccttacaaagtctctcaattaataaataaaccataaaaacctctttattctcaattagtcccttccatagtgaaaattaataaataaaagatataatctaatttagaattctaattgattacttaaaaccaattaactgagtctacaagtagtattatctcaactagtgtgggaaccatgggcct

SEQ ID NO: 59921 - DNA, 1156 bp, Cannabis sativa
  modified_base (452)..(467): a, c, t, g, unknown or other
agacaaactcattttatttacctactcacattactaatgaaatttaaaaactatttaaaaacttacttttatacatacatatatagccatatgcacatatgcaatttatctcacaaaaacatataattactaactcattttgccaaatacaaaaattcatatccaattactacttaatatctaaacacacaatatattttaaaatagaatataattactttcatgtgtgtactaccatagtaactacactacctaataattataccgttgtttccaaacacatactcaaaaatttgttgacattctaaaaaaaatttaaacttatctattcattttttttaaataaactcttcataaagaacttatctattcattttaaatgctaacttttaacataaaatacacaaaaattatgcatacacatatctaagcataaatcaatctaatacaannnnnnnnnnnnnnnnaaaaaaaaaaaaaaaatctaacataaacatcacaaataaacaaacatttttctttcgaaggaaaaaaaaaaacaatccaatatctaataccctaatgaatttactaaaagaaaacttacccctgatgctgagagggagggaggagctgccgaaagaggaagaggattgctgagatttatttatacattatacaaacaaaaaaaaaaacaaattaatataatgtatacattatacatataaatacatttacatatgtattaaaatacagaaatatgtatacctttgagttgagagagagatcggagtgggagaaaacatttgcatcatcatctgcatcatctgcatcggtgtcatcgaccaagctaatggtgacatctgctgaggagatggcgaagatccaagcaaatcgatatgaggctgctgcgttgatggttgttgtgacggttgcccaaacatgaagggaagaggactctgctgcaatggaagtggcatcgactgctgataatgagaagccataggctgagaagatgaacaaagtccatttctagacatgtgaggtttagaaggcccagttgaatgcattggagctatgtcatccatctcatcatcggatggtagacggtcctcaggtgccagcttttgacttatgtgtcgaacttgtctttgcagtttataaatcattcgcaaca

SEQ ID NO: 59922 - DNA, 1403 bp, Cannabis sativa
ttctctgaaacctcattttctttcatcctttctaaccaattcaaactaaaattttagttttagtatacaattaacctctccaagctactacaaagttttagaagttaaggaatttagtgtgagattccattcttgcgacactgaacaaactacttcagcaacaatcaatgggtaagtattttttttttgttattggttcttatatttagtttagaatattgtttttatgattgatatgtgggttgttgctgtttttttgttgttttgtgttgaaatagtcgctgtttggtttgttatggtatttttttttttgggtttaatttctacattttttttttcatctagttcgatggggcccgatactagttcgatgagaatcttagatctaaggatagggatgatggcccgattggccaatgctagtccgatggtcaacttggacctaagggtagggcccgatgggtcctattggcctgatgctagttcgattgtcaacttggacctacgggtaggcccgatgggcccaatatcagcctgatgctagtccgatggtcttcgtggacctaaggtcagggatgatgggcccgatagtgggcctgatggggtttgatgcttgatagatttatggctttttgaggactttttttttcacttttttgttctaaacttttaattgtgtttttttaaatgtctgtaacaggttcaactattttttttcattcgttatgtataatggtgtttgggagcttaagggtagagattaggtttataattgagttgaaaatttgacattcgaaattgatatgaatgtaacatgctcatgtttagttgatcttttgtacgaagaactcgatgttgataaagtacaatacgacttaaaattagaagtgaattgcaagtacatgaaaggcttaaagtatcgccccgaagttattagaaataataagcgtgtaaggttattttttttctatgcttgtgaagaagccagatgaatttactccctcgtttgtgacttaggtgaagaagaatgtatgtatcgatcttagtcccacaccaagtattgttaaggatactcgtagcgaggctggaatttttgtttcagaaataaatctagaggtgttggcggctgatgtgttacctgaattaaatattatgatgtcgacaattgacattgtagcataaatgccctttcatgatgattttggcgatggtccagatcctaaatggtatttttaaggaaataatgatgtaagagacgaccaagatacagaagtccctgttgctgtagctttgaacctgacaccactatcattccaaatacctaggtaaccgtcatatagaggaaggccccatagagaagatcaccaaacacctggaactagtagtagtcgtccagacaaaac

SEQ ID NO: 59923 - DNA, 933 bp, Cannabis sativa
  modified_base (28)..(32): a, c, t, g, unknown or other
aaaaaaaaaatgaaaaaataaaaaaaannnnnaaaaaaaaagtaaaaaagtaaaagacacaagagaaaaaaatattaaaaaaaaatttaaatatatattttaaaagagagattttttgagaaaaattaggtaaaaagtgtgaggtttaaaaaaagaacaaaaatattaataatttgtacaaataaaataaagcacaaattactataagataatcttatttaatttaataaaatacaaaagagtaaggactataataaaactttacctcagcggtgtgcaacaagtaaaaaaaaaaacttataaagttatgcataattggaaaaaaaaaaaaaagtaaaaattttaattgaagtgaataatgatatgtacatattaacatctccaatgaagagctaaaagtgtggtgtatgtatattttagcccacatgttcataaaagtgaattctaatgtgtataaagtagtcaaaatttagcacgtgctaaaagttgtactaattttggcacaaaatatagcatgatgagctaaatttcatactataataaatatttttttatttactcttttgccgcttattaatataattaatcagttttttacattttatttatatatttaataggatttttatatatttcaataaaaaattaatatttttgttgactttcttttcacatttctatataaaaaaaaaaatagttaattttaccctaaatgtgttaaagaactactataaaatttgggtcaaatataatattgactcatttttttagctcatattatacattaacaattggagatgataagaaaaatggtaagggaagtactaaacaccataaatagtaacatactgttattagtgcatttctatatcaacttccaaaaattttaatttacagaatagaaacggctaaccaattattaattatgtgtca

SEQ ID NO: 59924 - DNA, 1456 bp, Cannabis sativa
ccttggattcatagtgaactctaggggcatcgaggctaacccaaaaaagataaaggccttgatccacatgaaatccccaactaaagttaaagacgtccaaagcttaacaagtcgaatcgctgccttaagtagatttgtcttaaagtcaaccgacaagtgtgtccctttcttcaacatcctaagggttaacaaaagattcgaatggactgaagaatgcgaaaataccttccaagatttaaagcaacaattattccagcctccggtcctttcaaaacccctagatggtgaagggttaagcttatacctagcagtaatagaacatgcggtctgtgcagtcttagtaagggaggaaaatagagtacaacacccagtctactatgtaagcaaaagattgattggggcaagagtgtagataccccctcatagaaaaattgacctactgcttactcttagcatcctggaagctttgaccctactttcaagctcaccccattgcggtactcactaaccaacccttacaccaggtgctacgaaaacccgatgcatcgggatgcctccttaaatgggcaatagagttagggcaatatgacataacatatcagccaaggtcggctattaaagggcaggccctggctgactttgtagccgagtgtaccggggttccaaatgtcaatgttgagataagggcgcaaaagggcgaccaaccaacaataaacaatgacgccaaaggcctgacccaagcgattcacctgaaccacacgtccctaactccaagaaaaatgaaaaccaagatcacgcaagtgaaacctggaagctacaagttgatggttcttctaacaaacagtcatcaggagcagggatcaccttaataacaccaaagggacaacgaattcacacagccatttgcttcggtttccctgcctcaaacaatgaagcagagtatgaagcattaattgtcggtctgaaactagcgaaagaggtgaaggccagacacttagacatttacagtgactcccagctggttgtaaaccaagttttgggagaatacatggctagaggagaaaagatgatggcctaccttagcaaaatacaagacttgcttgcccaactggaggtgtacaccattcaacaaataccacgagaagagaatgctaccgccgatgccttggcaaggttaacaacaagtgaaaagatagataaagccagccttgtgccaatagaatacttactcgagccaagcattcgcactaaagaagaagtactcctactcgatacgactcaatcgtggatgacccccatagtcgcttacttagaacaagggacactgctcaccaacaaaaacgaggcaaatcaaatgagaaggaaggccacccgatacctaatcattgatggtgtcatgtatcggcgagggtactcaatgcccctactacgatgtgtacatcaagaccaagcccaa

SEQ ID NO: 59925 - DNA, 856 bp, Cannabis sativa
gaattgccaagagtgtagtgggcccactggacaaccccaagaaccacaaccggccactcactgttctcaatggcatacggttgtgaggccatggtcccagttgaaacgttatttccatcacataggaggacgacttacgatccagcaacaaacaaggctttattacaagaagcgctggatcaaattgatgaactgcgggatgagtctcaaatacgaatggcagcttatcacaagaagatggccaaacacttcaactcaaaggtcaaaaatagaaaattcactattagtgacctagtcctaagaagggtctttccagccactcaggaacccagagtgggggtacttgggccaaattgggaaggaccgttacaagcttatgttctgtaaactaaatttgtaccgtacaagtatatgcaacctctaaattaaaaatttgtaaaactgagtgacctaaaaacaattttcatgtcactcagggttgtagtaaagcataccacaagggaaaatgtaaaacagaccaaaagcttaacaaagttaaaagcttaatatgtattcaaacgtgaatataaagtgttcaaatcccaaagaaaagctctaaaaaagataaaggcctggggacgggccttaaatgtctcccattaagaaaatatataataagtaaattgtcttagaggggggagaaggattaaatatatataaaaaagaaaaaagagagataatgataatggtaatggtgataaacaactggcttaatcaactcgtggtcgaaggcgaggcccctgcgctcctccagcaaggcgtcaagtcttttcttcttctcccaaaagcggacaaggacctcttcaggcttgggata

SEQ ID NO: 59926 - DNA, 1694 bp, Cannabis sativa
tatatatatatacataattaatatatagagtagtattttcattcttaatttgtatatgtgtatatgtatactaattataaatcagtattcttattatgactaaaaaatctatgactaaaggtatagtcacaaatatcacaatttgttgtataattaaatgtgtctttagtcacaatacctgttgtgatcctaaaactatatatatatatatatatatatattagtaacaatttgtatctaaatactatgttttggttataagtaattttatgttgcgactaaagtcatatatttaattacaaaaatattatgttgtgactaaaaggttgttatcaaatgtagcattttttttttttgtagtgatatgaattttagttgaataacaataaatatatgtaagaatcgaacataaattttataaaaatgaaaaacataaattttatgaggacaaaagtaaaaatatataaagatataaataataaatattaattttggggggacaaaatgtgaaatattaaaaaaaaaaatatatgtatataaaaaattaattaataaaaaattgaggggagagggaaatgaacccacatcctttcccttggtttcgcccttagttacaattatttaagacatactttaaaattttgagaaattaaaaaaaaaaaaaaatttaacacgccgaaaacaatttgttggatgtgtgcgtcatttattttatatgcatatgaaatcgaatgtttaaacactactttccgtattgtaaattattccgaattttttaaaatgttgcaggctacatgtaggccctgagaatatatgggctaaaaccatttaaatttgggataagttgaaaactatctctttttattacacattaactaaatataactctaaaataattttaattaataaatatccacttttataatcaaagtatcaaatataatctcacataacttatcaaaattagagttcttaatgcacatattggggatatgacctataaaactgggtataaattaaggagtagtaaaatgaaggtgaaattaaaatagaagataaaaagtgggtatagtgtgtaattttccctttaaattttgggactctcactttcagaaatatatataaaaaaaagtatgaaaaaaaagtgtcacgagacttgaacccacacaattgtgtaatgtgtcatacactccaactaatcacgctatgaatatttattgtttaaaatacacttaattttatttaaataaaaagctaatgatgcttttttatttttttttattttgggctctcaatgtgggccctaaacacgggcctagccccataaaataaggaaaacttacaaaaatactaaaatttaggttaatttttataaaaatactatcaaacagaaatcttttcaaaaatactacatttttataaaataacagtagaacacaaaacaaaacaactaaaaaataatcgtagaacaacagtaaaaacttaacgcagtacacagtataaaacttacacaatatttttcaaaaaaattccgcctcccagtataaaaataaaaaaattaaaaatttgaatatgtgtatctctaaaataaacaaaaaattaaactaaaaaattctcatgctaaaatagatggacctatatatatacatacatttgtagtagagtatacatagatatgcttaccagaagaaatt

SEQ ID NO: 59927 - DNA, 1185 bp, Cannabis sativa
atattctaaagtttaataagccttattttttattttaagttatatattaaattagtataatcattaattgtgcatgatattttgtagaaattaagtcatgacaaaactgagtcatgttcaaagtaagaaaataaaatttaatcttgatacagtgtctgtataatactctaaattaatttatatatatatatgtatggaatcattattttttgtaccaaaataatttaatcagtctataacttatagtagattatgatcatatatatttattaacctcatagaatactttatcatgattccaacaaactacaacattcctcatcttctctagtgttgattaattaggagagttatttatgaaactttagtatgattttgagtttatctaatgtacttaatttttgtatagatgcatgtttgatgctcttaaattagtgtggtaatatttggtttagtcaatatcagtaagagaaggccttttgaaattggtagctaaattcattcttatttgagaataataatgttggtgattgttgagttgtaactttgttttgtttttctaccaaaatgatcaatcagaatcagtctataataactgtacatattggtctgtattgcatatttctgcaactctttccaatttgatcactgtctcttttaccaataaggacattaattattactattagtatgaaagccatgaattaattatagaaagaattcaagattagtgaaaggttgtatgaaaattaagtactaaaacaaacaacactttacagttgaatgagaaacattaacaagaatacttgaaactcaaatacaaaacaaattcttaggatgttgagttaagatcaattttgttccatatgttttggtacccttcatctattgttttttgaagaattgtaaatttcttttgggtttcttcatttaagggagccaccaaacatgcttgcaccctcagctcagtaatcttcaaatccaaagccaagaatctgttagtaaagtaattatgaagatcaaatccaaatgatgagaattgatcatctgtaaaatcctcaatcatcctaggaaaacaaaaaacaacttcaatacacaaaacttctttgagtatcattcgaagcagctcgaattctatgtccccatcatcacttaataacttccccggttttggcaaacacaaac

SEQ ID NO: 59928 - DNA, 620 bp, Cannabis sativa
gtctctgttagtaaaatttgatgaagattcttcaatttaacaatcttaatacgtttgaaaaaaaaaataattaacaacctcagaaaattcaaaaaatacaatttaatgtataaagtgtgggatgcaaaaatcctaattagttaataattaattatatattcaaagtaaataaaattatacactgattttacattgtttatatgtaaccaaagcatcctatataatagttattatacttatttctattcattggatcacaatttaattatgttagcttacttttttttgcttaattgttgccttacttatttaaactatatagggctcatttggtatgccgtataagggtggtattgtattaaataataaataacattatttttggattcaacaatgtattgtattaattattacgactaaattttttaatacaatgtatgttgtattatttaatacataataaatgatcagtattagcttgtattatgatatttacaaagaatatggggacaacaccaacctccgacccagacccgaacccctgacctggacccggacctaggaccccggcccggaccccggacctgggaccccggcccggaccccggacccagaccccg

SEQ ID NO: 59929 - DNA, 1385 bp, Cannabis sativa
ttgatgctgaaaattagctcaacaacaaatttgtattatcacaatgactttgttaacccagaaacttttcctggtgatgtagacatcaatagttgacacgtgacatgaaggatgatgtcacaaagttgagtagacccgagtcataacagtcgacatggaggggaccctagccttgtgcccaagttgacttcgggatttctgggatggaagttcagactttaataacttgaatctaactcaccatctttcagtattctataccatgaagacatggaacaacctaatttaagcttcgagagctaaaattacacgaacctgcaacccagaagccaacctgagcacccagggtttcacccggtgcctaagttgacatatccaactagggttttggtttttgggaccttcttagtgaaaaagagtcaaaatatgcattgggacatcaaatagacatactgcggacatacttgaggcatcaaaattagaattgaaagaagttcatttttgagcacgcggggtcccgggccccgagcacccaacacccaggttgataatttgtcaatttgggcgccttccaagtatcaaatcggagatccaatcggagatccaactttttcatctactttttcatcttctttgtcttcatcaaaaacaaggtatcatgtcctttcaaagaagaaaaaaaatactttctgggtgcgaaaaatagggcccagcgcccaggtctggggctggccttgtgcccatgttgacatttagtcaacatgggccattttaaatggagtttttttagaacacttttgagcatcttatttgtcttaaaaaatattaagattcaactatttctggcgaccaaatagaatttttgaaggggcaaaattgggatccagtcctcaggttgacacctggggctgggcctagtgcccaagttgatatatcgtcaacctggactgttttcgatcaagttcataaaaaagtgttctagtcattttttctttcattagaaataatgaagattcaagaaaactcgaggagaaaaccacaaactcaagcccttggaaacagggccctagcccaggttaacctggtacaagcttagcgcctaggttgacaatcaacctgggatctgccttcaattgctcaaattctaaatttgatgcgaccattaaatctgaaatggtcaaaaacgggtaggagacctcatccttaagttgagaagcctcgtccttaagttgagaagccttagaagtatcaaaaatgaaatcccaagagcttgggagtaagtacctagcacccaagtttacaaaaggcctggtgcgctgggttctgcttatttgattttgataccgtgttgaccgtctgtcttgtttttcataataaaaaatatc

SEQ ID NO: 59930 - DNA, 1507 bp, Cannabis sativa
  modified_base (1291)..(1299): a, c, t, g, unknown or other
caaggggaagggctactgatttttggtgatttcagcaaagaaatcttgggaggatcaagctaaggtaagccctagtggaacccttctctagtttttaggctttttacttagtttgaaatagtgaatttgtgatatagtggctgttaggtttgggtaggtttagtgttcttttgagttgattttaactcctagcagctggttttagtgtgtgttgtttgttttatacaagtttaagctttgagttcaaagctttgatcattaatggcaagttgagtttcaatggtttgttttgtgaattttttgctggaatatattgtgtatacccttattaggtaccctagaaggtttcattgcaattggtggagaattgagcaaagaatgaaaggttttgggaactctggtgctagccggtttgcagagtctcaaaaaccggctagccggttttggcagggttccccgggcatctcattttcgcaattttcgtctttgcggtgccttgcttgggtgtttccccatttctagagttagaataacatatagaaagcataacagaacctagggttaaggttttgggtttcccgggattagggttttaatcatgtaacttaccacgttttaaaatgtgattagggcacccatctagcacaagatttccgttcaggtcggccatcacacttgaattcggaaagaaggtaagaactgaatataatgtgtcatatgaatatctgagtgtacgtatatgttatgtgtatatgcatgcttaagttgttaattgcactaccaacacttgtacggttatggtacagagtgcgttggtatagtaaatattatttgtgagtacagtatagtgataccaacacaagttcgggaaagtactaaggtgtgtggtatatcactcaggggtactcagggtacgaaacaaacctaccaacactcgtacagtgaggtacgttgtggatgtggtatagtggttgtaccctagtattgaacgttcttacacatctgttaagccttgtaagtaggtgtgtgggcgcctatttacaggtcggaaattatatgatatgttatatgtatttcttactgagtttgtcgactcacagttcttcttccatgtgtaggtaaaggaaaggcgaaagctgaataggagtgatctgaatgtactatgcatagtggttccttggcatgctgtccctttgcagagaaagaacattttgtcatttttccttctgggcaagattcacaaactagtaattcacataaggtgacatttttcaacggaccacctttggtnnnnnnnnnaagtctatcatagcctatatgacaaagacgtaagtgccatagatatgtttcgtcttcattactgatctttttctttttgtggtttctaggtttagctactttaaacaattcgttattaatcgcaaatgcttcatcttgtcttagaacataaagcccctgttccatagatgcaacataaatttaaatatcatttcgagaaatgatagaa

SEQ ID NO: 59931 - DNA, 1071 bp, Cannabis sativa
atgaattagtgggctcccccacttcaacttgggagaaacttctctcttagtggaatacccctcaaggtatagctcgccagctaactgcatactcgcatacggtccctcaattccaaatgtcactttgattgaagatgctaaactaatgcctcggtcattttgacacttcgcccctcgacatttcaatgttgccttagtaccttagtcctgctgactttcacctaaggccaacatcgccatgatgttatcttagtacttgagtcctgcagactttcaccctagataactggcactgcctgtgtccagagtcttcttgactttacatcctgaacaaaattcatctccatgatacacatctcaatgcttgtaatcaatacctagtctgctgagtgaaccgtgaggatctccccccaacttcatctgttggcgtcctcgacaacatgcccacacgcgaaagcctgactgcccaactcttcatgcacgcaatgccatctaaaagtgtatttcacaagatgtgactctcgagtcaactatctcatatagcacccttgtcgatttccatatgcatgcattgtccactcaaccatccaactgattttcactagcatcacgccctttcagctcccacaatgtagtaagttcaaatgattcaaccctctggccatcatgcaaactctagcacccctcttgaccttcgcaggctcatatgactactaagtctcactagcacaaccctctggtcaccactcaaactctagcgccatctctacgcttgtgctcggtcttcttagccctattggcttcttcaatgcaatcattccacaactacgcatctctttcgatgtctttgtgtgacttacgcccattggcgctttaacaagccaacgcatcccattcaattgtcttggtgctttcatatggataaaataaaagtcacatgcgaacacctccaagtacaatcattctttgacaattgcggcatctaccccccttggtctccatgtgcacccctctttgacacacacacgtaacaactaaagcattccatgtcaattccaatttgaaccatct

SEQ ID NO: 59932 - DNA, 976 bp, Cannabis sativa
  modified_base (900)..(903): a, c, t, g, unknown or other
cactaatcctgcgattatccctactcaaaatgtagtggtttcgattcccattcttcattgtggtgtgatgcttccttttcatctttttataaaggctatcttgacgcactacgatgtttcccctttccagcttacacccaatagtaatcgcttaatctttggattctacacaatgtatatggaatacacgcgaggagaacccacaattgaggattttagttatttttacgatataaaaagtgttggtcatgataatggcttctattgctttagtaaatggaccaattctgagattaatgggggtagaggacacgatttccaatatggggaattggaagttgaagtggttttacgcgtttaagatgttaggggtcaggatagacttcaatcgttgacctcgtatgtcacgtatttttagacttaactattttttttttcattttaaagatgtaaacattaatctatgtttgtagatagactggctcgatcagtgttagacaaaaattgtgttgaaattgctaaagtgttgagcaaccttccagttcaagactgcaactggtgtctattgtgtacttttgcaaagttgcgagaacacatgttgattccagccgacgctaaattccaaaaagagccaatatacaaggagccttgtgaaaataaaaggaaaaggtagacaagcgcctttccaaacagacctcaagataagtatcaggtaatgcaacttaacgattattgataatgctctcttaacttctcaaattcttactcttctctatacctcctcgcatatatgactttcctgaagcaagctccctcctctagccgtaaaccaaaggtcaacattgtgactctgtaacgccctaaataattaggcatgctacccaaaatacttatgaaacnnnnatcccctaatcgggattactaatcaaaatagcgcagaatttaaactttatatattaaacagaatgaaaataaa

SEQ ID NO: 59933 - DNA, 880 bp, Cannabis sativa
caccactattaggtggtaaccaatgatggtatatattggttacctgttttaataattcttattaaaataaaataagtggattctaatattgagttgcattaataataatattatattattcaagaacactaagcaccatgagtgtcttttagaatttttctaagaagctcaatactatactgatataacactttataattggttaatagtttctcatatcatttattaaattaaaatgtgtaggacttaatataacaaaatatataccaatagtgatatgttatgtcttgtggtgcttgacaccttaaggtgcctcttagaccatctccaatggatagtgcaaatttttgtactgagtttgtgctaaatttagctcaaaaagtgagtcaatgttatatttaactcaacaaatatattaaattttaagttttttgcggttaaacactctcaaccatcactctacttgtacttaaccgtctaagcttaaattttgacagtaaaactctctaaactgcttaactgtttacaaatttaaggtgttatctatttttcacagttaactgccaacatagacggtttatatgtacacgcttctacatgtaacatgtttatattagtacacttaatattattatttaaaaaatataaaaatatactttttttattctttttttatttatatatttgatatgatttttatatacttccaataaaaatttaaaagtttttggcagctaaaccctctcaacaatcgtttcacttgtatttaactttttaaatttaaatttcgacggtaaaatcttccaaactactgaatcagtagcaaatttaaggtgtcattcgattaactgacatcatagactgcttatgtgcatactct

SEQ ID NO: 59934 - DNA, 720 bp, Cannabis sativa
ggaaggccaatagtaccccgattgaagtacttttgcagctgttctttggccttcaaaatgccctccataaggcgatgagtgacaatgctcaagaatgttttgaatctcttcttgcggcacacaacaccttattacacgatcagcacactgttataaagaaaaggttcatcccaataataagacctcacatcatggaagaacttcttgagcgactgcccttttaaatcagatggaatcctcccactcactagtagtttgcaaaatcagcataccaaggagtggagtctttttttactaagcttgccatcaataatgcctcatttgggaatatctctttaattggctgctcaacttcctttatctcatcatcaccttctactctagaaagatgatcatccacttgattctcagctccttttctgtcacgaatctccaaattaaattcttgaagaagcaacacccaacgaatcagtctcggtttggcatccttcttggcaatgagatacttgattgcagaatgatctgtgtacaccacaactttggttcgaacaaggtaagctcgaaacttgtcaaaggcaaaaaccacagccaataactccttctctgtaatattttagttcaattgggtgtcggctaatgttctgcttgcataataaattgagtgaaacaccttctctcttctttgaccaagaacagcacctactgcaaaatcactagcat

SEQ ID NO: 59935 - DNA, 1011 bp, Cannabis sativa
cctctagcttcttttctgccaacagcttctcgtctccaagaactttggaaactttctaatgcacttggatacccttcagactttctctccattaaggaaagtcccctattccatggaacttctctaatttgaatgtcgccattgatgacgttcaagttccttcaagattgcaccgaaaagaatcttgattctgtgttctctctgatttatgggaaattacgattgaatgtgcaaaatcaaattaatgaaactctaaacaatcaaatgattgataatgacaagattattaaaccgagaataataatcaacagtagaacaggggcaaatagagtattaaaaccaaaaaaatactacttgcagaaaataaagaaatcaacatcaagatatagactgtttaagtccgatagatcgatgtgatctatggctctactccagttttggaacaccatcgtaatccttctttattgacagtcgacaagagattctttgttgagtcctcacaaagtgtatcaactctcacacttacacctaagaatcttcttcatctacagaagattcttcttacaaaaaccacaatctctctcttttctctgcacttctctctctacctctcaatctttttctctctcaaactctcaatctcatctgaacagaattctccaactcatgtattcagttttgtctcaaatgataagtgaaggtggtatatatagccttaggatcaagatcccaaagtctatggctgcaagaaacaagattgttaagttagttagaaataacaacttaaccaacttctcatttagcgaagtctccacgttagctttaagcactagagcctctaacaacatatatgagcttccggactcacggaccaagaacactcgctgaagatgcttttggataggataaagattgttggagtcgattatccggatctgacattctaggagggataactagctcgctggaactcttttccaggagaaagctagctaccctaaagatgggaac

SEQ ID NO: 59936 - DNA, 1316 bp, Cannabis sativa
  modified_base (1054)..(1055): a, c, t, g, unknown or other
acacggaaaaaaatttatttttactgtttgaacttttttatttacaaaaatatctcttcagcaaaaataatatactattttttatttgttttatagttgtcatgatgttctttttagttgatttatagttgtcgtgagattaatttttcgttatttttttttttttgttttttactgaacaaagtgtatttttgtaatttaaaactttataagcgcatttttgtaattaaaaattttaagccataaaataaaaaaaatagtatttttgaaaatttctcaaaaatatattcatcgaaatactaaattcaattatgttgttatagtttttttttttttatcgattttaatcagatgtaattagctaaaaaaatactaccatgcacagtgagaaagccactcgatgagtaggagcatatagccctccaaaaaaaaaaaaaaaaaaaatcttatctattaaatctgtaaaaatataataattatatatagctaataataatttacctcccaaattaattttgtaactcaaataaacttatacacaaatatatcatacaatttcttttttattttttattttcttaaaaaaaattaaaggaaattacctcatataccagtttttaactttttatttttcaaatttacggtttagatcgctctagtgattactttggtaatttctatatagattttatttgtgatttaggttactccgttgattgctatgtgaatttccgtaaaaatacaaaaaaaaaaaaaaattgcttagtaaaaacacctctaaaattaattaataacaagtttagaaattcaaccttcatgaaaatggcatcaccatttggaatcttttcaaacatatctcctcccacatgttcaacacctgcaccaatacatataattagcattgattaaaatcataattattatttttgctaattttttaaattatggatcttatgttttgtaaaagttattgattgaactttttattttgttaaatgacaaattaaaccttttattttttaaaatagtactctgaactgattttttgtcaaannaaaatttaataataatatgatctagaagtattatgacaaaactgattacattttctacatttattcgtgataggaattatctttaagttggttataattataaaaaattaagctcaatatcctatatatttgtactactgagatccaaaattaaaaaatggggtatattttataatttaacaaaatagaaggtctaatcagtaatttttataaaacacaagatccaaaatagtatgaaccataaataaataatatttcaat

SEQ ID NO: 59937 - DNA, 1119 bp, Cannabis sativa
ttcgggaactgaagtccctgatcttttcccgctctccggattttgtttttctttccgagctcaaagtggacgctaatcctctggttgggaggattaacccttcttgtggacttcggcaaggtgaccccttatccccttacctcttcatttgggcggctgaagttctatctagattattccatgatgctcttcaccagggggccattaaaggaattcagctaagtaggagagggccggttctctctcacattttctttgcggatgatctaattctggttggtcgagctaacttacttgaggcgattggcttctggggatgtttagagaaattctgtttgtggtcaggtcaacaggtgaataagctcaaatcatctattttcttcagcaataatacccccttaagcttgcgtgaagaaatcaaagaagccttgggaattgcttctcctgaaggttgcatcaaatatttgggattgcccctgtttagatctaggcagaaggatgctgacttcaactttatcctggacaacctcacggctaagcttcagggatggaaggcaaaaactttatctaaagcaggtcgagccactctgataaaggcggtgggcttgtccttgcctatgtatgcgatgcaaacttcgaaactctcttctcgaatggtgaacaaaatagatggcctggttagagatttttggtggggctttgagaaaggaaatagggggcttcatctaaaggcatgggacaaactttgtctcccgaaatccatgggcttgggttccggaaaaccaaggagatgaatcaggcctttctggctaaatggggatggaatattcttaatggcagtcatctctgtgctgcaaagttctatcagctaaatacctcaaaggaaaagatcttcttacctgcaggtacaaagattcagattcttggttctggaaaagtgtggtgaaggctaattccatcttgaaaaaaggagcttgtaagttgattgtaaatggtcagagtactaagatctggggagatccctggatcccacaccggaaagatttctatccgaaaccaattgagggaacctcccccaacttgaactatgtgtctgatcttctcttaaataatgggcag

SEQ ID NO: 59938 - DNA, 1026 bp, Cannabis sativa
agagatctgagtgaaaggagtcatataattccgctgtcattaatgtaaggttttctaaaatcttatgtgtttaattttattgttttagagaatttatatttagggttcttggtaaaattattccaacatcaaaacctaaaccagataggcatatttagtagagaataaaccatttggctttttagtccatattaacctatcgtaccctaaccgcagagtttaccacccttgatgatgttacttgttgtttctgggccaaaaagagcatggagttgtgatatgtgccaatctccatttactgaaaggaaatctacaactttctcaaaaccctcaggtcgattgctattaggttgaggatagaaatcctgaccatgtataacccacaaatcatcctagatattagtatctttcccatctgaaataagtttgcaagctctttgctctagaatttctttagaattcaccacattgttccagaaccacgaatcaaaattcttttaagaacaattcaagaaaagactaccttttagatacttagcactaaaaaccttgaagcataaggattgatcctcaataaggagagcccaaccttatttagccggtaaggcctgatttatttccaaagttttcctaaagccaagcccacccttaaatttttgaagacacaactgatcccaagccttcgaatagataccatggttgccttgctcaatacccccaccaaaagtccctaactatacaattaattttagagacgggatttttggataactttatggtttgtatagcataaactggtaaggaaaggccaaccgatttgatcaaggtagcacgactagctttagacagtgattttaacctctacccgtgatgcttcaagactagattatcccaaatgaagttgaaatttgcatccttattgagattacaaaacaatgaaagccccagataattaacattaccaatgacactgttgagaccaagtttctgcttgataactcttttcataacctctctagtattatt

SEQ ID NO: 59939 - DNA, 872 bp, Cannabis sativa
atttatttattcatttatttttataaatgtgtgtgtgtgagatgttcaagtaggtatgattctgaattggatggattaatgcctttttgatggagagagagattctttagaaaataaattttcctatatagtttaataaagaaaattccaaattttggattctttgccacttcccgttccttgttcacttctgacttttatattattattatttttactttctacttctttttcttacttaaacaaatgttaaatccttatatttcttcttttcaaaaataaaatccttatatttcacccttgaacgagatgctttgcttcttgttcttcttctatagatctaaatatataatatatattatatttagatgaagaaaaataaacagtgagtacaacaattgatttcataatattctcttcattaaagttattcaaggagacacttggaaaggtattataataatatacagaaatagatagagcatatatgaccttaaaaataataaataataaataataaattattgctatatgctttgcttgtcctgtgtactaattaagaaatcatttgtgtaattttttttttataaacatacaaacttcatagaaaagtcaaagcaagagaggttaatgatggaaacaaaaggttccacctagaaatattcccatagtaactaaaattcacaagacaattaaccaagctaaaaagctctctgaaacaaaaacttgtccctccaacttggacatctctattaggattagttataattttttttttatttctctcttgaattaattaacattcggttaggagaacgggcttggaatctagaggtggtttcggatatattcaatgatcgagataaagagat

SEQ ID NO: 59940 - DNA, 818 bp, Cannabis sativa
atttaggaggataaaacacatatccattcaccattaaacttattaatctgaaaaaacatcatacatttcagattttgaaaatgggtttatgggaaaaaaatttgagccctaaaatcaataactttggctcttgataccaattgtgaaaataacgattactcattataattaaagccaagatctagtatttatttagagcatcaaagacaataaaacacatacctcacatgccatctatgagagccatcaccaccaagatccttgagcaaaagttttggagagaacacttgtggagcaacccttttctctttcaccacacaaaaactatctcacccctttaccacacataacacacatatatatacatgctattgcccttataaccctaaggggttattaaccaattgggcttatggggtcttttatggtgtactataatttaatgggcaaactatagtattaagggtgctctcatgtgcctctaacacataattaagttgttaaccatcccattatggttattagcaacattaggcacataggtaatgattatgtattatgaaattaaacttatgatcgttttagtccattataataattctaacaaatcattcattaaaaatataacacaataaattaactccacaaataatatgcttgtttaaacatgaataatataatcttatgtgttcaaaacatgtagcctattattaaactaaaaatacttaatgcatgctatttagatcataaaatgtataatgtggagtgcaatatcaatatttacattaatttacaaataattatatagatatatatat

SEQ ID NO: 59941 - DNA, 715 bp, Cannabis sativa
tttttttccttatagaagtatgatatattcttttgttattttttgtttatcattatttttaagtttatttgatgtttatttatttgttattgtttatattcgtaatgatattttatagattgttgtattttagtttgtattaaagttgttatgtgtgattgtatatttatagttgttttgtagtttttatacagttttgaaactataactgtttaaacattaatgtttatattttcatgttttaaaatttcttctttgtttatatgcagggttgggtttgcaaatttagtcctagagattattacagatctaagtatgttactttttgcacgtattctgtcattaataacattaagaatacaatttctgataatttgctaaagatgttccgagatacacagtttggtcatttttttagaaattacatccccaaattgtccaaagccttttgttaagggaggttaatcaatccaactttaaagaattttaggaaaaggttaatgaccgttgtattcgatttagtgcagaggagttctatttgatctctagtttggaatgctttggtgattgtaataaaatgttatttagccaaggatcaaaacatttggtcgatatatactttcttggaactaaaaccattgaccataagtctattgaagatgtgtttttgggcactaggtggggcaataacgattctcttggtttgaagttgact

SEQ ID NO: 59942 - DNA, 766 bp, Cannabis sativa
cgggtttgggtcccgagtccacgtccgggtctaggtcccgagtccaggtccaggtccgggtctgggtttgggttcgggtccagagtcgggtccaggtccgggttcggctctaggtcccgggtctaggtttgggtcccgagtccaggttcgggtccaggtccgacttcaggttcgggttcggggtccgggtcctgggttcgggtctcgggtcccgagtctaggtctgggttcgggttcgggtctgagtctagggttgggtccggggttcgggtccgagtctgggtctgggtctgggtccgggtttgattctgggccccgggtccgggtttgattccgggtcccgagttcaggttcgtgttcgggtcccgggtccaggtccaggtcggagattgatgttgacccgaaatcttttataaatattataatacaagctaatacggaccatttattatgtattatataatacaaaatacattgtattaaaaaatttgatcgtaataattaatacaatacattattttatccaaacataatgttatttattatttaatatacaatatgactattatacagcatacaaaacgagcccaaaataaagtacaaaccccaccatattaacgttaaatagactaactggtaattaaattacatttattaacgttaggagggaaataataagattcacttggcaactaccatattgaatatcagagagttcaactattcctagtatcaatatatcaaaaacagagatcttaacaggcaa

SEQ ID NO: 59943 - DNA, 623 bp, Cannabis sativa
tgagtgactaaacaacagtcaagtaatttttcattgttccataagagaaatattcctatacaaaatttgaggactacaaagtgatgagacacatgcaaggcatgacctcccatttatttatttatttttttttcagttttgaactttcttcaagatatttttaaagtttagcccctctaaaaaagattttttttttttttttttatgtgccctgctatcacaattgagtaacaaaaagatgcagaaacagtaaaacaataaagagagaaaatatttaattaagtgttatacaattgatggaaagtgattacaacatagagccctataggacccctgctgtagagagaagttctcaatacatgcataaaccccataaacttctcaaacaaccatataacaatttgcgaactcactcaacaattacaataataccctcataaagtaaaagaccacactacccttgagcagtagcattcttacctctcctagcataagtaaaacgcacctcggtcctaacattacccctatatctcaaaccttgtcctcaaggttgaaagtaagaaattggttacagatggtctcaaatttttcttaagatgcttcaaacagtggcagttgtttct

SEQ ID NO: 59944 - DNA, 1286 bp, Cannabis sativa
taaaataatttccaacaataagtaacctccaagtgaataatatttatcgaaagccatactaatagagtaatatgaactgtggtaaaaaaaattagtgtttatttgattaattatttatacagtcaaatatatataaagcttagttttatatgttcaatgtgttcataatgttcaatcttcaagttttactataaatatcaaacaaaaatattgcagaagtgtttcttcaaaaaaaaaaaaaattctcgtgtaagacacttcatttgaagattttttttagtaaatgaggcttaaggatccacagtgttgaatattagtaactttttttattaggggtcaccaattattcaaaaaaaaaatataaaatgaattaattaattatttgtataaaacaatagagtgacacataatagaaaaaatgtctatatgtagagatattttgtgactctatctaagtatttttccaaaatatatatgatagtaaacatatataaatgaaacatatttgaaaaaaaaacaaacttacttataaaatatttaacaaacacattatataagcatcgttaccacaaatttattataataatatattagattaataattaataaatattataagtaataatataaacattgtgtttataaataatatcacattcaattctaattttatttatttattttaaacacatttttgaataactaataaacttattaaaaaaacataaatattttatttttaaaaaaatttataaacttttaataaagaaatctttaaaaacattatcacaacagacatatattaactaataatagcattattaatattaataattctatgttataaaaaatatattaataattctaaccaaaaatttaataatagagaaaattacttgaggatacactcttttttaaattatttatggaaatgtactttactttattaatatgaaagaataccgagtattttgtaattattttatgttatgtatactgaaataaaagttttatctttttatttttcgaatgaagtgacacaattggcaacacgtcagtttttaaattttttttttctgattgagaatttctttgtcaggttcttttttactagcttttagccctgtgcatgggttgggttggccgggttgaggctattttagtgggccaacccaatgagatcatcctattaaattttaactcattcatatcaaattttaattataacccaacccaaaccaacccattatttatcgggttgagttacaaccctaattttttgcaat

SEQ ID NO: 59945 - DNA, 1279 bp, Cannabis sativa
ttcgcgttcgaaagttatttggtcaattttcaatttccgggtgcttgtagttatagctttttaggtggcgaaacaaacaaccattcgtcctcttcaaagtcatctaactcgagcccctttcgttctcttcgaagaccggcctccaccatcacctcaatgccgatgagttgactaattttcgcgagcatgtccattccggtgaagtttggtacgtacaatatactttaccatagcttttacttctaaattctttattccagaaagtttagattggcttatttttttttactatgaattatcatcaatgtctcatgctttggcatctacgtcttcttcttcttttttttaatccaatgaatgacattcacttttgtagtttacttgatgaattgcgttcacttttatatattactaattagagtttgtaagaatcatcatttcaattgaaatgaggcttaactgcttgatttgttgagctggtattgtatataacaattgagtgtgaaatacaccagacctacagatgacttttggctccttgaatgactacttatgtaattctaaaaatcgattttgggatttcttcttattattattctttagtttatttttatgataaaaaataaaataaaataataataataataaaaagtttgactactttgtgaatagattaatttttttttaattttggcttttatatttcattaaagtcattgtaccttatttatatcgtattgttatttggtcttttttttcctttaaaaaaaatatttgaaaatattgtaaaaatattttgaatttagttgtaaattttgcattttagaaaataatattattttattcttcaaagtgtattttttttttatattcattctttcaatcagtttattttaaattttagaatttagaatttaattgggttacacaaataaaaattaatctatgcaataaattaattatgtatcactcacaatttttttaactctctttttctgttactatctcagtagttggaaatacttcgagtaagcctcactctttcacttttttaaacttttcacaattttaagtgatgtttgctttattattctaacactttttttttatcgtgatttcttcaagcatcagacaattatattaaatcattagaactaacatattgcaatcagtttttacttttaggctgcagcgccatcatttcaattatttatatacataaaaattactccatgtaaaacttaaaataagtttttcttgaattaatcactttattaaa

SEQ ID NO: 59946 - DNA, 1847 bp, Cannabis sativa
gtaaaaatataaaaagaaataaacgtaaaaatataaaaattttacaaaagataatgttttatgtaattatcctaaatagatattttagaaatatgaagacagccaaaattaaacatataaaatgttataagaataaaaataaaaataaaaatatttctataagatattacacttgatattctttaagtcatgttgttatttaatatatattgtaagattttgagaagtttataataatttataatagaaaaagtatgtttaaacaactttttttacatgtgcataaataaaaaagatagacgtgcaataaattatttgaatattattttttataagttaattagaggttattcttaaataaagtattcttagatagatgttctactgtatttagatattaaaaagatgagtgttaattacaactttttagtcaatttctacgcgcgatattacataccaaaatatttttttatagcagtattcgtcatagttacaatatcgttccttaaaatttttgaaaaaatctaaatagtttatagtactgaaaataaagtttttggtattccagtttaccacgtatgtttgaaaaatttcatacgataaactatttgaagtttttaaaaaatttataaagatgatattgtgagtatatataacaaacactgttgtaaaaaaaaaaaatattctgatatatattttctgacacaaaagttaactaagaagttgtaataaaatgttaacggtaaaattcatttattataagattaattcgtggtataaatatctaagtttaacttccggttgcaaataaatacctgttaacgcagattttcgttaaccaaaattaataagccttttagtaataaatacttttcagaattaagagataataaatgattaaataactccagatatttttacatgattttacagttaaatctgcatactccacgagtctatcttatttatgatattttctaaatacaggatacaatacttaattgatgatattttttcttccaaaattattcgtccatttttctatgaaatctgcccctatttataggaatataggttgacagttatttacttggatcagtttaaaatgtaactgttcatgaaacgtggacaattctcacgtttcatttaattgcatgtaggataatatttgataactacttaagtaccttttgttcttatcattttcgatcgttaatgctgatttggacaattatatctcgcttaacttgagttatcctcattgtccatcttgatgtggaaaaaacgctaagtgttagcagatggttcgcctcgttaagtctttttagttcaaatcgtgaggtgactgtctcgctatacgtaaccggaggttgtcctgtgtaattgtatttattctactttgaataaataaatatcttcttttactatgtattctgaggcaagtgcgtgtctcgtcaatttaagttttaatagtcttttatccttatctcgcttaagattatatagttagtgagttgtgaatattttttattaaacctttgttaacgagttattttatcttgcatttaatgatataactttattatattaggtggttcatattccactgcaagacacgtgtcagtttttgaagtgtaaccgaatttcgggtatagcaatacttaagttaatttttggcggttataatacctaagttatatttctagaactctatcggaatctaattattaaatattaagtaaattgctacgtgacaatctctaattggtccacatcatgaatttttaattttttcataaaaaaaataacttatatgtactaataagaaaataatacatggataataa

SEQ ID NO: 59947 - DNA, 1303 bp, Cannabis sativa
tgggcaattttacattttttttttgaaaaatgtatatttagttctttttggttttaatagtttttatttgatattccctgtagttgcattttggtcatttatttaaataatttgttaatacaatactaatataaaattaatctagtccaattcagaagtgcagacaaaaaataaatacgtaaataattatttaatgataaattatgcaagtatgtatatgcattcttagagaccacgatattgtttgtatgtttaaggtcaataactgaattttaagtaatttaaagttattaaataagcctttcgattgcaattatacttgtaacttatagctacataagtaaactgttttaaaaaatgagcaaattataccttgaaggggggatatttgcaacaattttcatagttcagaggaggggggtgcgtttgcaacgaagagaagttctaggggcaaaattatacaaatatcatagtttaggggcaaaagttctattattctaaaatttataattgaaatttaggaaatgccaaaacaatatttgtgggttagagtaagagacaacattaaccgaattatataatagtaatatgggatacttatgcatggcatattctttttttttttcttcttcttttcttttaatggtatattttatgccatattcaaccttgcaaaatacatgcatatacttattattttatgattggcttaacttttgtttattatttttaagattaaatttagtcatgatttatgttgcttttgaacactcatatttattttgattaaaaacaaaaaaacattatttagcacaattttgttttatatcatgtcataaatgatattagagaaagaaagtcagctctatggttattttatttgatatatatggtatggatcattgtgtgaatatatttacttaaaaaggaaaagtcaaattttattttgttcaacaaattaaaatatttcatcagcaaattacaattatcctaaaaaaaaaagaaaaaaaaaagattctttttagtattccaaagcaatacaacactacacactactcttaaagaaagagaagaaaaaaaaagcaatatacacactactactgaaaatgaaatttcttaaaccgacaaaaaaatagttaccgataaatttttaatcacaacataaattttgtataattaactatagtttttaactacaacaaaaaattatttgtaattaaaacatagtatttagatacaaattactattaatttatttatagtcactgttaggctatttttagcctaagtttcgggtcacatt

SEQ ID NO: 59948 - DNA, 563 bp, Cannabis sativa
tacgatagtactattgaccatactatcagcctatactctgtactctagtggtaccgacgtgattgcgtcaatcagtacttatgccaaacatacattcttctgtatccaatataactctacgtacagtgatactgttatttcaatgtaatctaacagccaatcataatcatgcatgctaaacatgtaatcacatatgcatacaattatactaatcttacttcaatccccaattcaagtgtgttggtcaacctgagtggaactattgctccaccttttacaggcccctaagtcacaatatacgtaaaattgatgagtgatacgctaaatcacttttcggggacataaaatcaaaactaaaacttttcctatcaatggataagatggtaataccctaaatattgctaaaacatgaaaatctaggttaccctaaactgctcaatcggtaaactggttcccaactagaaaaaccaattctatggggtctgcttggggggagccggtagaccgattctactggaccaaactgaaccggtcgactggtttagtgcaagaatcccaaaaat

SEQ ID NO: 59949 - DNA, 706 bp, Cannabis sativa
ttctaatccgagtttcgtctggcgcagtatctttgaagctagagacttggtggtggcaggggtgcgaaaaagtgttggtgatggcctctcagttagtattttgacggatccttcgcttgctaaggcagatcacccttatattttgtctacacatccgaggttaatcgataaaatagtttctagccttatcaagactgacgaacgtgcttgggatgttgagattcttgatgatctatttgaggcttgtgataggatggttattttttctattcctctcagctcccccattcacgaggattctcggtactggaggtttgaaaaatcattggcactcaacctaaggggagattcaatgatgaagccattggcactcagccttttgaattcgtcctccaaagcttgtgcgtactccttatccagcaacctccttttctgttgtagtacaagtcaaaaatttggatctatgtttagggtatgagtcattacagatctattcccaccatgtcttcccgcgaccatgcaaatagatcaaggtttgcctttagaaattttattaaggctgattttatttttggcgctaaactttttccaatcttcatttttttggtcggaagagtgggatcgatttccacctcttccaagtcctctactggtccaaatctttctgtaggatcctcaaagtgaggatctaggtttgcctccccgc

SEQ ID NO: 59950 - DNA, 1577 bp, Cannabis sativa
  modified_base (96)..(109): a, c, t, g, unknown or other
aactgtgtagtcccatacctatacacagtctccgaatcatcccacttgaccttccccaggcgatgtgggactgcacagcttacccggtatttcccnnnnnnnnnnnnnngactactgactgtcacataattcatggacttgtggtacaaataagtcttagataatagaggtagatttgttatattagattttagtgaagctcaaataatatgtaatagtagtatgatctatagtaggatattaggttttcattttttttttctgtaataatattgcatataagtacttagtagttgcggatattgtttaaatattttatatcttaaaaatattataaccattaaagtttatacgttaaataccaaaatcaatactatcaaaaatttatatatatatatattgtttaaaataaaatatggttatttcttcaaaaaaaaaaaaaaatatggttacaatatattgtttttaaatgtggcattacaatatttttaagatataaaatttttacaaatatcttgttatggtgaagctcaaataatctgtaataatatgatctatggtaggatattaggttttcatttttttttctgtaataatattgcatataaatacttaatagttgcggatgttgtttcaatattttatatatatcttaaaaatattataaccattaaagtttatacgttaactaccaaaatcaatactatcaatatatatatatatatatatatatatatataaaatatggttacaatatttttaagatataaaacttttacaaatatcttgtaatgtttatgacattgtgatgtcttttgttgccgaaataaacaagacaactaattcgctcaaaaaaaaacaaaaataattaatcggctacttaatttctttgaggggatcaggggtcacatttaaggaagaaattggtaccacactaaggactggtccacattattattggattatatatattgagaattatcaaataagattacgtaacgtgacacacaccacaagttgtattaaaggtgtttaatatttatatacatatattctcaaatatattttatttccatgtatttttttttagaatatgccaaataaaaaaatgataaaaaaaaacatataaataaaggattttttattttttattattttttgttacaatttacaagtaaactatatttgaaaatttgaatatactcattttttagaatacatacgaagtgtgcacgacagtctagcaatcacggtgtctccaagataaaacagcatctgtatacgatatgttttgtaccgaactatatcgctcgattacactttaaatttcgctctgagaaaaatcgtaaggaagaaagaaaattttttatgttgaaaaggatgtattcttccgttattctgatacggcttatatagagaagtccatcaaagattaaacgataagaaaacagtgatataattgtgaaattggatcatgacagtgaaaagcgaatcattgactgatcgctttttactacttcaatatttaacgttaaaatcaattaataaataaataaaaaataaatcattatttaatt

SEQ ID NO: 59951 - DNA, 790 bp, Cannabis sativa
ctttaagtcaattatatttttcattataaaagggagaacaataagacaagtatgaataatcttaaaccatcatccttatgaattggaaaagacatcaagtacaatgtagtgtcaaagtaacaaagtgtaaatgatacagaccctcaaatatcaataaactgaaatcttactagttatttcaagatcaacataaacttatttaatacaaaaaaacagaacaggtgacagtggattacctgcatatatgccacagcttctgaaacagagaacagtgtgttgagaaactcccatttactctccttccggagatccactaattccctcccgtaaatctcacttcgatacagagaagtgaagtttaatgacgggaagaaaagaaaaaaattctctttttacacaaaagatgtaccgaaaaacataaaatttaagcctataaacacatactaggatcacaagggtagtacagtgcagccaatctttttaaaaaacaaaatgcactagcagtatcagtatcagttagtaacctgaagattacttcctggaaaaagcataggatgtttatcatgcgattttcacttaatatctcgtgtcattactgtaatttcatttgatagattgaaagagagcaccataactcaaacagttttgttgcaactagcaagctatgtctgtcttccatattgcaggaaccaaataaacaaggttcaaaatgtacctgacagctcgagtagataacattttggtgccatgcatagcccttttcacgtaaccaaatcgatcagccttaacc

SEQ ID NO: 59952 - DNA, 930 bp, Cannabis sativa
  modified_base (32)..(44): a, c, t, g, unknown or other
ttttaaagtcgttaaaaatgccccctgaactnnnnnnnnnnnnngatttaaggactttttttttttctaattttagtaaaagagtctaacctgaataaaagttcagagggtataatagtacatgtcaaagtttgagagacatgatttggtagatatcaaagtttgagagcatcatttagtacataaccaatttttaaaatagtaaaatttaatgaaatttgacaaaagtccttaaattcaacaatcttaatagttcatgagacatttttaacgatcttaaaagttcagaatacataatttggtacacgtcaaagttcggaggcaaaaatcctaattagtgtaattaattataatggtaagagagaatccgacccagatacccgaacccgaataaatgctttatgcctcactctctcttctatctatggatctttccccgccatgcgtttaatactatttactttattttattttattttatataaataaaaaagaaaaaagaaattaaattattattaatttattacttgtgttacactcactcgagagaaaatcatttcagtactttgacggaaatattattattattcttttttttttcctgagagaaaaatcggaagatgagagaggaggtcatcagctccggagggaccgttgatcctacccctgctgccaggttactctctctcaatccccaaaacccttcttcttcatcatctatatctctatttctaattccaattcttacttcgtcttttcaattttcaatttctgcaaccaacaattccacctatctagggtttttgagcttcttcactgggtctgggaggagaggggggattattcgcctgttaatttgtgtaattcgtgttaggttttttcgctcttttcgtttgaattggaaaaaagcaaggtttttttttttttttt

SEQ ID NO: 59953 - DNA, 1056 bp, Cannabis sativa
agatcattatagatgggatctactatagcacccttaggaatacaatgcatgaataaagaatggcaaaactgaagtgtagagatgatgcttgtatggacatgtgagagaggaagtgaagaagagagaagttgctagactcagacttagatcttggaggcaagtgtttggcttaactgagctcaggctttctaggttagagttaatgcctttatataggaggcttaaaccctagattacaaattgaaaccgagatatttgaatgttttattagctaattacaaaagacaaaaatgccattgaatctagatattattcaactattttagtgggcttttatggcccaattcgcagctcagaggatgttgtccacgtgtagaagtgcataggacacctcttggctagccatggtacattccctatgctggctagccataaggctagctaggggttgctagccagctctgatgagggagctggtatgtcacttaatgcccttttgagggtcggggtctctgttttcttaggtgttgacttggccttcctattggtgtgttgtagtgtcatgctgcactggttttttctatgtaagcatgccacatcaagaggataaaaattgggataacattttccatccatgtccctgtgcaaacgtctgtacgaatagggactttaatagctatgttgaggtggtcgagactattgtagcctttgctgaataaaagttgatgcatttttagccttttgaaacactttgtcttgactgtctgatctcattgctgtagaaaaataatagctttatttatatttttgttgtgtagtggtggaagtaagtaaagaaaggcccccacatgcattacataagtgctttttagagggaaaacctatttttacttcttactttttgctttttactttatctcaaaagaaatttgcgttagaaaaagctcctccttctctctagtagaccaaacctacaagcatcatcttccaaggattgttatgtcactttgatgatccgagcttcccaccttcttcttcaacaacatcttgtagtgg

SEQ ID NO: 59954 - DNA, 550 bp, Cannabis sativa
cagttggataatggggattattttctaccacttgtacacgtgtcacgcaaaggtttaacctttaaaagtaatgaactcatgtcattcaaagtttgttcatttcgaagcaaaattttatgatgtctatctactaaaagaatggtggtggtgcacgtactgccttgattggatataggagacaagatcagatttgtctattatttactatttcatttctttcttaatctctatataattagtttttaaaaaattgtagtaaataatttaaattaaaaattataaaaaataattaattattattaatttaattttaaaaattaaaattttattaataacatcctattattatataataagttaaaacaaatgtaattattatgattataataaaaatataattattgaatagttaaattttttttgtgggtaatattttttatatagtacaattaaattctcttaaagcgaaaatccttgagtagagaatgaccactaataaggtaatattcatatgatcttaggcactataacactcttttttgaaaggttt

SEQ ID NO: 59955 - DNA, 1253 bp, Cannabis sativa
gtgtttaaaactgtcaggaaaaatagggtattcctgacagttttaaactgttgggaggtataaatgacaatttttaaacgttccttaaaaaatctcgtgttttacaaaaggaaattaccgaagtttaaaactgtcagctatgctatgggcgacaattttaaaacgtcgcctatagtatatccgacaattttaaaccgttggaaaatcccatgctttaattttacgcgtttcagatctaaaattttatttttgcatcttaaatttcaaattttattttccccatcttaaatttcatttcctcctcttaagatttaaaccccccaaaaaaatcatatcttatttttttaaagtcatttgtaaatttcattttatttctcggctctctctctttcgcgaccacgagccgtgccatccctctcctccactctctcgtggcagcacaaaggtaagcataacattctcttatttgttgtttaaatttctattagccatgatttattttattgatcttgatctatgtgtgttcaaataaatctgaagcttgcaaatcgaagaaaattttgaggatcgttaagtgaaaagtaatctcaaacttgtaaaagaaaattttgaggaggatgaagacgagcacaatgacgatggaggaggatgaagacgagcacaatgattgtggaggaggataaagcttgtaaagattttaaagcagctgtgacaaatgcaagaagtggtttcgaggaggatgaagacgattttttttgggtaatccactatagcgacggtttaaaaccgtcggctacactatagaccacgatttaaaatcgtcagctatagtatagccgacagttttaaaatgtgccctatagtattgactatagctgacgattttaaactatcgagaatttttttatattgatatttttttactgtcgcctattctaccaagtatttgcgacgctcgtataggtgacaattttattaaccaccgagaattctttactcaatagtgtaaaaatgtcaggaattttgaattttttagtagtgatgtcacaattacgaaaatgggtaaacaacttgctaaaaattttaaggacataaaatcagaactagaaattttcctattgataaatagcatgaaatatcctaaaaatcaaggaaacatgaaaaaggagaatttagaaaagggttttttttgtataataaacaaataaggacatcattttacatttataccctagaaagtaaaaataaacata

SEQ ID NO: 59956 - DNA, 1129 bp, Cannabis sativa
  modified_base (27)..(41): a, c, t, g, unknown or other
  modified_base (451)..(477): a, c, t, g, unknown or other
gggattgcacagcttacccggtatttnnnnnnnnnnnnnnngggactactgactgtcacatcatgtatactcaggatttagattgatctaccaatgattatcgttgcgatatgaataactatttcatggaaaacgacacgttaatgaaagatattatttcatatcggtcaagtaatgtataatcaaagtacacacagtacctttactacatgtctatctacatatgtgatccgaattaaaatcacacacacacacacacacacactagagtatagtgtatagtaaattgtagttagtacttctatattaaagttcctttacttaaatacactactgactagttttattcatattctataatcttaatctttttatacatccttacaagattatacattctccatatacataagaaatttttagataattattaattatacttctataattnnnnnnnnnnnnnnnnnnnnnnnnnnntttcatatattctctaatatattttccattaattacttatttttaaggcataaatcccaacaccaagattatctccagaaacttaaaccctagacacggtgcgcccaaattgactaaatgtcaacctaggcgcccattagggcttcatggtgcacggttgttgtttcacgtagacttatcgccaaagtctaaaacttggttagggcatgtctctcatctatcttaggatagtggctgcgcagattgcccataagaagttgataggaactaaattgatgcgagacgacaacaggatatcaactcgggcgcccaacattgacgttaggacctattcgcttgaactttgttgaaagattgtaccaaaaaatgactttgttggatcttggtgcctactgggctacccactattgtcaactagggcaccgacgtagtttccaatgcccaagtcgaccacctcagtcttagtgatttggctccaggttgtttccttcttgccacgtgtcaaagtgttgtcttgtcattgagtcaaatttttgtgtaaacaattattattagaataaaataagaaaatatgaaaataaaattaaaacaactacattaacacaaaataatttgtaaaagaaacttaggaaaacattaagtgattttttaa

SEQ ID NO: 59957 - DNA, 1010 bp, Cannabis sativa
  modified_base (488)..(493): a, c, t, g, unknown or other
aacccctccgaccctctcgacccaccgtcatcaatgccgcacagaggagaccgacgaccacccaccacctccgatgaaggacccaacccccctctctcttcctctctctcaacccgtgagcctcaaccgaaaactaaaaaaaaaaaatcacggtccgatgggcggtccgacgggtccgatggggggttccgatgcatgtgcgggttgggaaaaatggggttgagttatgtgggagttatttttgagtttttgataaaagtgtcatatattttttagtttgaaatgtattggtttaagaataaaatattagagtttttaaagtataatttttcaaatttccctaatgatatttatctataatgcacacaacacttaaatggccacaaaaattacacttaagattcacacatgtttttaatatagccggttccatcttaaatagtttttcttggttggaattaagaacaatttctttctttctttctttnnnnnntttttttttttgtttttttgtttgagatcatgattatgtacatatattaatgatcatatatgtccagcagaaaatgacagactgaacaattgtacatacaaaccagcactaaatttgtatctaacaacataatctgtatctacatcatatatatatatatatatatttaatttgtttttttaattacaacccaattatcatttaaattaactatatagtagatattgttaccaaaatgtgggataccttatcactatgaactgggcgtggttgttaattttgtcttcatattttagagtaattaataactagtaatatatatttaaaacctaactattagttttctttacaataattttgtgcatatgtagttaatttattgtcattacaatcatacatgtagttgtaattataatctaattattagttagtccttatctaattcctcaatgaaaaagcgcattttatgcataatgtcattctaattataacattaatgtgtttggatttcgttgtt

SEQ ID NO: 59958 - DNA, 1166 bp, Cannabis sativa
  modified_base (970)..(1005): a, c, t, g, unknown or other
atttttatagatttccatacaaatatttctataataacttacaaagtaacttaaatcgcaatcaaaatttacatggaaccccacataaaaactatgaaaagagcaactcgaactgtaaatttgaaaaagaaaattataaaatagtatatgatgtaattctcattattaaggatttttttaattattattattattattattattattgggatttttttattttacactttaaaataatttctttgcatttttatagatttctatacagaactttctatagcaactaacggagcaacttaaatcacaatcaaaatctacatagcaacccacataaaaactatcggagaagagtaatctgaactgtaaatttgaaaaaaatagttaaaaaatagtatatgaagtaattcctattattggggttttttattattattattattattattattcaaacaatttaatttaggcgtattattgacacgctttaatccaatagtgccaacttgcaacttaattattattgatgaaaggatgttaaaaaaaaaaggaaaaagaaaaataaaacttgaagcttaattattggttactttattaatgatattatctcatccatatacgtttacatatagattaatcatggttaatagattgacaaccacacaatttatatgtattttattattaggattaaagctaataatatatattttagaaatcaaaaatcagacatgacaaagaatacataataagttttatatataaaaagttgtctactttcaatataaaaatattataaattgcatattataaaaatatttatcaagctttgtttaatataaaaggactaacctccccaatttataaggaaaggtctattaatttataatacaaggaaaaatacaaaatgttaaaatctacatgtagatgatcaactagttggttatgaaagctattattattattattattnnnnnnnnnnnnnnnnnnnnnnnnnnnnnnnnnnnnattattattattattattcaaagagttgtattgcacaaacaagatttttacattttatgtgcattgttgaggtttgaccacttaaatttggtgttactgtcagttttgacagtttggtaactgtccaactaacttaactgtcttgacagttaagttagtta

SEQ ID NO: 59959 - DNA, 1024 bp, Cannabis sativa
  modified_base (252)..(258): a, c, t, g, unknown or other
aaaaaaaaaaaagcaaggcctatggtgacatgccacgcgtgtgaccaaagagggatccccacgcattttgcgcatcactaaagccacgtggctttagtgacgcgcaaaaagtgtggggatccctctttagtcacacgcgtggcacgtcactataccattttattttaaaaaaataaagtaaaatatatatcaaccctaaagtcttcccccacaaatcgtctccacaccccagtactctctctctctctctcnnnnnnnctctctctctctctctcgcacgataccctcaaccagacccaaaaattttccccaactgaggtcggcgcagcagacggagaccggagaccggtgcgaggtcctccttctcaggcggacaccggtgctcctccttagccgcagcagacgaacgcatctcaggtaagaaatttttattcattttcgtttattttttttttcatttctgatttatatatgactgttgggtttttttttccatttcggattatatttccatttttgttgttttttctatttgaaaatgtgattattttgtatatgattatatataattttgtgtatgattttcagattatacatgattttgtatatgattttcagattatatatgattttcctcactcctattaatatttaatttgtctgagattaactaaacgaaagactcgagagacagagaaaaatcagaatagcaaatagtagaaaaaaaaataaagaattaagtttagaatacaatacacaagaagtaattcagattttatagttattttatggcaaagagagattttgtcatgactcgtgctagtctcatttgaaatatatgggctttgttattttccttaggattttaatttagcttactttgtcccttttttacgtttggcaggagaagaaacagaataatctcaaggactttctaaatgttgctgggccaatgtgtgttacacatttccttatattgtcaaaaactccatctgcaccatacttgagggttgcaagaacccca

SEQ ID NO: 59960 - DNA, 722 bp, Cannabis sativa
taacctccattgctgaacattccctctccacgatcccacctccattttccctcctctttgtgttcttcaaatttttttcaaatcccagtaatcgaatccataactgttttccctctttctatttctttctcaatccgtatatatatggctattacctgttcttcatcatctctttcccccgttcaaaagaaaaactctaaaatgggtttgaaatctttagctaataagaacaagggtaaacgacctcttatggaggaggatgactctaattttgctcctccattatctaagcgtgggtgagctcctcctacaaagaaatcaaaggtgggtgcccaaaaaaaatggctcaagatgttgctgaaaaaaacgataatattggtggtggtcttcgaactgagatttgtttaccgtttctttttagttttcccctttttctagattttgttgtattttcatttttctcggttttgtgtatttggtttgtgttattctaggttttccattttagcatttcgtttggttttgtttggatttttagggcttcaatttgtgttaatcaattttattttgttattttgttgggttttgcattttagtttgtttagtcttaattttgttgcattttgttgtcttttttgttctgtttgtgttttctagttttttaaatattttgtaagttcaatttcgttttaatattgcttctcattttgttttagtttttt

SEQ ID NO: 59961 - DNA, 4536 bp, Cannabis sativa
aatatgtgtacatgtgaatgctttatataataggtgaaatagtcagtgatgacatatattttgatttttaagagaattaatatatacacactacgtgatacatacacatcagccaataataataatatatgttaggatctctttgatatatacacactacgtgatagattatgcttgtgatacataatttatcatgtagataatttcttgtcaagatagctttttgatctctttgattggtattgtttataagtaatattcaatttataatctatccatgagaagggacctccacgccttttagcacgagattttgagtctggtccgcaattttgattataattttcctacccctaaagggaaggatccttcctttttggccatttgtcagttgtgggcgaggagagactcaactattccacttagctgaactagaataaaaaatgttagcacgacacggcacaacccaatttttttatggcacgacacaacccattttttaaaaagcacaaataaatactgatcaagttagtacgacccgcacaaacttacagcatctctactctctctttttctggactgaatacatcatatatgatatactgagtgccaaatgaattacaaatttaaaaaagaaaatattataaaaacaatggctgaaaacagttcatcaatttgaaacgatagagacacagctaagttttgacctcaagataaaattacataactacaaagttttaacctcaagataaaattacataactaccaagttttaacctcaagataaaattacataactacaaagttttaacctcgttatgttgtcattcaactctcctaattaccgcattatccgtatttaatttattttattcctagtgaaatccaattacgtgacactaaatacctccccaaaagaaattgtaacaaaacatgtctagatatggagaattatagtgaaagaaataactaaatttaaatgatactcaaagtagtacataaattaattatatcaaattaaaaagaaaaaaaagcgtatcctataaatgcttatctatgtacataaagctccataaactgaagggaggaatgattcctccctaaacgaatcagagaagggatgccgtgtagaagtgtagaaaaaagacaaaattctggctagggagtaaagccttcatgttcataataatattcatgttcgctttccaactccaattaagcttagctgcaaagagaggaaacaaaacgttaagatcctatttcggattaaatgaactgtggtacgagttttaaatcaatgcttacgatgttgttgtgaggctgcttccaataaaatccttggagaataagggggaagacattgcaggctacaagaatgtaaatcatgagagcatgcttgcctatccattctaacacaaccgccattcgcttgtaaccaaacacatccacctgcactcatttctttccaatatcaatttcaattctacaataataacaactatagctccttatctgatttagtctattctatggctgatgttttatgtaattaccatcacgtaaatcgcaacaaagagaatgccagcagcaccagccgtcacacacatgtaactgaatgagtaaagagccttgttcacatgcatgcctgcaccattttaaacaaccagatacgaagctttagctttctagtgaccaaaaacacattagacagcacagcaacttcataacctaaactcttacttaccaaaccagtccagggcaaagcctaacactaaaagacaacacgatgagattgaccactgaaagattctgttcctatggtcctgcaagtaccatgatccaaaggattggtcagcacaaacaacagtgccaaatattttcaaagaaaccagtacagaatgtatatagttatcacgcaccttaaaatggacaataatgtgcccaaagtgcagcccaacgaagcaagtaactatagccatcaccgtgctacatcaatggaaaaacgtcggtcaagatcataagtaggtatcgtcaacagaacagatgaaacaacctaaaaacaaaacacacacacacaccttaaaattccttcaggatcaaaaggggcttgacaccatgatggagcgccagaaggaagtgggccataatcaggggagttagtactgcattgctgtaaaaaagacagttgaggagtgagtttcgttattgaaaagtaataaagtcaacatactctttgagaagaaagatacctcagttcgtgcatagactggtcttgtatataaatgcccaataccaagtatcttacggtcgatcattccaacagcattacaagctggtccagtgtgacctcttactccacatttaaccttcaaatgaatgcaaagatcagttcaagtcactttatcatttgaaattgatttgactataagagaagaggggcgtctatgaaactcaccaacaacgtttttggtgctgacagagaattgccagttggaatctggtactcccagtcaggaacgtataaggagtacaataataaaatatatacaaatgaaatcatcgaagcaatacccctgcaagagaaaagcatgagtaatagcaaatggtgatatacacttgaatattcaaaagcttataatataacttacagctgaagctgatatttcctcaacaaagatgatccagatttaacatcaccatcaccctttaaccaaatctcacacaatgctgccaccaaatatgctatggcaattcgctgaaagaaattgataattagaaacatatatgatgatgtagtaaatgaaggtcaaataatatatgaatacaaaaatagaattattcaaaaggtatacctgtagtacccccatccatctcatacgatcaagatccactccataagtaaggttattgatgccatgaaaaaatcctcctggattcatggagaagccaaagaaagtataaacattctacttttggacaatgtattgaaaaaagacagatagaatgtggttgaagcaaagtatgaaaataaatatatttaagcttaaagttaaaccttgaagaaaaaggcccaatacaaaaagctttaatgcccggagtagagtgcttttagttgcgacagatttgcatgataaattctgcaccaaaatgaataaacttttcttagatttcaaaagaaggcaaagctgatgccagtagtacgaatttaatatagctataaatagtacctacctataataataataatgattgattctttaatattacaaaaaaataaataaataaaaaagtacccaccttgtaggtaagtgaaagtgaaacaccagcaataaagaggaaaaagggcatgacataatcggcaagggataaaccattccatggggagtggtttatagcaggcagaattccacccgcatcgtctaccaatatcatcagctgcatacacacaaatatataaatatataatattacttatataaacttatcttagtaatagttttgtacattactaataataataataataatacaacatgtcctatttaatctgttttttttttggaaagtcaattttatgaactgctgaccccaccggccatgactaagtaacagacaatcaaccaaatcttatataaatatattattagtatatagtttatgatggccacccacacccaccagtgttcatagccttaaaatatatatatgcacaaaaactaggatgtgctgtagtgtaggttaggggtacaatacaagcaatgaagcaaagcaaccgattatcggttggattaaggtcaagtgttgtttgtgtgtttgctttgcgaatcgaatactacatctactgtcaccgccaccactacaacccaataatgtttatttatataaaataagtaaaagagttattattgtaaacgaatcttataccactaaatgacaatattaaattcacatgaatattggctaattaagaattttagtaaagacagacaactaacaaaaaagtctaaaaagtctaggggcttagatatttttattatgtctcaccacttgtgatgtgtctacgcggttatcacttataaccaaaaaaatcaaaatcaatatgccgagttgtaacgaatatgcctttccataaagaaccgtcatttaccacaaatccaataattcaatacatatgcatttaaccacaaaaacgaaaactacatattcttctttctatttaatgttgatcataaatttttaatagaattaaatgatttaatccgtatgaatttacgtacccctaatagctagctaaatactaaaataagacttggactgcttggtttgatttgatgatttactcctaattttcaaaaaaaaaataaaaaaagaaaagaaaacactacgacttcaagtcttaaaagatatttaatttcaaaggcaaaaagaaaaagtaaccattagactcaacacacgtcatgctgttaatattttcacttttttttttctctttctatttattcggcgggggagagataacgaaacgacgtcgtatgg

SEQ ID NO: 59962 - DNA, 813 bp, Cannabis sativa
ttatttttttatattgttatttaaagaaaaaaagtaacatgatagaataataggattttaaaaataaaatttagtattttacaaaatatgtaaaaaaaaatgtagttatttgtgacaaataaaaaagaagattgaaataacatagaatacatgtatttaaaattaaacacaagaaaaagaaaacaactcaacttatccaaacatgtgttatatatttcctttaattagtgtgaggaaatgcttctagaagcaaatatcataataatttaaattatccaaaccctggtactctttaactctcttaccgcctaccgacaaattatattacactaagactttaaccattaaaataaaagacatattaagaatgagagaaaaagtaactaagaaaaaaaaaagaactttttttttttgaacctcaagaagtgctaaagattattttgtgttcaaataaccataagatgtatcatgaaaagaaagttcaccaatttcaattttgagaataaaaagtactttgttatcataaaatttaaaaaaaaaataccccatactatcatattaaaaaaaaattgaaattaattgtaattcatgaaagctcttaaacttcactaactatgaacttttttttaattttattctgctctttatagaaatcacaattgataacttctactatagatcaagggagaaatcaaataaataaataattctaaacaattttctttctcaccaatatatatatatatatatactaggtgattgttacgtgctttaattttatttaatattttagttttttatttgaattaataa

SEQ ID NO: 59963 - DNA, 1062 bp, Cannabis sativa
ttgtatttgctttgctctttttttttttttttttcctttttctaaatatgccatacaatgttattttccctgcaaaatttactaaagattagaatgtatgcatacgaaaatttttattaactttacaaaaatattagctagaatttattttttattttgtatttttacattaaaataatgtattttctttatcatttaaaaaccaaatatgttttaaaaatacatacataattttgaaaatgaaaaaaaatattaatgtgtcataaaaaaatatatattatgttcttaagaatgtgatagcaggtacaatttatggtatttggctaaattgaaatttctatataaaagaaaaaaatgtatgaaaacgagttgtataggtagtagaattaaagagagcctcaaaagtagacttaatcttgtacaaaaaaaattgtctagcagagataaaattctcttttgaaggggaatccttttgtggatgtaattgactcggtttgattaataaaaattatctttcttaataaaaaaatataaaatatttcaaatcaaaatattattacatagttttataaaaaaaaataatattattaaaaaaaacaaaaaattaatttaaaataaatataaataattatagtagaattatgtatgtaagcaaattaatgacgaaagtacttaagtaatcaattttgttatagttaactattaacataaaaaaattgataacaaaatttgtaagtaaaattatttcttgaaaataaacacctacataaaaacaattcgaattaacttttaaaaaataattataattaaaattaaaaattaataaaatttttaattattactatcattttattttttaaataaatatattattataatatgtataaagttttaattgtatacaagaagtcttatagtaagagtatacaccttacatcataataaccactcgatctgaaatcaatggtcaagaaaagttccctatcggtaggaaacttttgctagatcctactatactcttctcttatatttattatgtagaatctattattatatctaata

SEQ ID NO: 59964 - DNA, 2022 bp, Cannabis sativa
gtgaaaaatctcttacaatacaatgtaagagatattaattataaggagtatagtactttttcctacaacaataaaaattttgaatacatcaagtatacatttatattttctaaacgtgttttttttttgtttggtaaggttctaaacgtgctcttatattcaaaatatatacatgaaaaaaacaaaggtgtaaatgttatagtaaattaccaaaattatggaacttcaaccaatctctcaaatggcatatattagtagtaaaacaaaccaatagcgtataaccatgttttttattcttctagtattaatatatacttttttttttgtatttgtccaaatttttgtcttgaagatacacggcagtgtataggtttgaagctaaaaggagtagggaaatgggatgtgatcattgtttattgtttattttgttaaatgtaattggtggaataaaaataattgagtttggtgagaattcttaaatgaattatttacaagaaaaaataataataaataataataataataataaagtaaagaatgggaatccaatgtatgaaagaaaggtagtaaacatgtacacatgggcagaaaaaggaatcctaagaatatcaaaccataataaaaagattctaattttaatttgaattaaggttttttttttttttttaaaccatgcaccaccaatccatttacatcgaatttcgttccccttttgtaaattttatttttccaaattaagccctcttctctctactcctatttgctgtttgacttttgttcttacgcggtttcagcttagccttttattttatttatttagtttttaatattattttattttatgtttgggtttgtgaacccaaccagggtttatcctgcccgaactgcccgatgattttggcgggaacacgaaaaccctaattgtttggcgccaaaattgaaattttgtataatgtagcccgcaaaatgcggggctctgacggctgtctcgtacacgcaattaacaatccgaatcagcaaatgggtatccgatgatgatgatgatgcagcgtacgctaaaactaaaacgaggaataacaaaatataatgacaagtcactggattaatcctatgctcctctacctttaattttttacctcgtaattaataattagttgtaagtaaataccttttaattttgtattccacttttaactatcacattcacattcactaccactacctaagttaacaaattggtagaatatcttaccaaaatttattatcttaatagttgatttacatattattattattatgggaaactttgggtaaatcttgtaaaatgggctaaattttacaaaaatataaaaacacggaaaatttaatatttatacaattttgatttgatttataatatttatgtgtataagtcaaatagtactaaactttctcaaattcaacaaccacaatcgacaaacactaatcaatcacagaacagtcaaaaaattcactataattctttttggcggtcagccaaaatagttaagatatccttaatgaccctataataccttatactcacaagtgataactttagaattagtaatgctcaaaacgtatgtatttaagacccaaatcctgaaacaataacataaagattaactaaaacaagagtataactacaaaaacaaaacaaccaaaaaaattacaaaaaaaatactatacctcaataattccttttccaatggggacttccatatcatcatgaaagagaaccttctacttggaaaatattcccttaccctaaataaatttaaagttaaattacggcataaatacttaatgttttagattttatatacttaaatactttatctttattattggaggcaaaaatactcaatattacagttctcttacacccgttactactattggtgttaactcataaatatagacacgtgaaaagcccaaatacattaaatttatttattttttattttaaaacttaatatttttaatatcataaattaaatttta

SEQ ID NO: 59965 - DNA, 843 bp, Cannabis sativa
aattaattatttttacaataattttttaatcacaacataaattttttataactaaatctgatttttagtcataattaaatattatttgtgactgtaatataatattttaatttttagtcataattaaatattatttgtgactgtaatataatatttgaatacaaattgtcactaatttagttttaatcataataaatattatgactaaaaacacatttagtcacaataaattataatttttttaactaatacatttaactaaaaaatttttagtcacaacataaaaatactgatttataattagttagaacttttttacttttaattacaaattttattgtgactaaatgtaaatttttttataataataataataacatgtctacaaattgttagtaattttctataatatagttattagtttaaattatgtaccattctataacaattataaagatatttatacatagggacatgattttgtcctgggatgtatttcattgtacattagatgggtctcagagtacgttaccattttttaaccctaattacccctagatcaaccacaaccctcagatcaaataactttcctatctaacggctgccgtatatcacgggacaaaatcgtgttcctatatatatatatgaaaatgcattattaggtattgggtgtggtatagtagtactctctgacctgccatagattagatatcataccataactatactaactgacagtatatggttgaaaaaattggaataataataatgaatattattattgtcctaaactacatttcaaatacatgtatgtcatataattaaatttttaattttattttt

SEQ ID NO: 59966 - DNA, 1091 bp, Cannabis sativa
agtacataaacaatcacttaaatagtaaaattatatgaaatttgacaaaagtccttaaatttaacaatctcaaaagttcagaaaaaaatttcaacgaccagaaaagttttgagaacatgatttagtacatgttaaaattttggaagcatgatttacttttatttttgtaataaaaatatttaaaaacaaaaatattactaaacgctaccaaaaagcaagctttgttcaaagattttattttatctttttttttccatagtaaaagacctctttagaaaaggagaatgaaaaagtttttactaagaatgattatctgatattcaatacttatgttttgtgttatctttttaatagtaatctcttatgtttatagataaaaattgtttatcttattaaatgtaaactatgactaaacttttcaagatggtttctcttgtcactttttcttttttaacgaaaaatgggtagtttcttctaaaaataattgtaaagtgttttaaaaaaactacctttgacgaattatgtggtggtggttaagggtgcacattgggtaggttttacagtttcgggtttttgggtttgagtttgtgtgaccaggttttcgggtttccaggtgcggtgggtcgagtttgggttaaatcggatccacgtgagttttgatcggattagggttaggttagccttttttttttttgaaaaatattatttttttttatacatttttcatttaaaaaacaaaaaaaaaataaaaagaaaataaaagaagaagaaaataaaaataatatatcattgtttacaattagtttttttttttttttttaagtctatgttttcaaagaacgtataaaaaatttaaaaaaattacatatattcaagtttagagtgggttcgggtataacctgattttctcgggttttagattaataaaaaccgaacctgacctctaattttttaaactcgtattttttttctcaattttttagattccggatataatgagtgggtttttggttataaatgtgacaccatagtggttgtgggttgaattattatatatttaaaagtgaaaaaaatgtttatatgggataaaa

SEQ ID NO: 59967 - DNA, 775 bp, Cannabis sativa
catatttgacatcgagactcctctgaaggtctaccgtggaccaactatcttcagaaagaatttcctccaccccatcgtcctggttaatggaataactagggtggttttctctttctttaggctttggtactttcatattaggccttttgtgtggcgcaaccttgcattgtggagcaaaagggcgtcaaagccaagaggtattggtttctttctccgtccgtaagggctggtcggttgtgttcacattttttagaagagaaaacatggtcgttttagtctgaggctcgcccacctttgccttccccttatcttttgtaagagctgaggttccaacgttggcggggtttgctctgttttctccatcaacaggtcctttcaaggcatcttcctcaaagtctttgtctaggtcaatgagtttagaccggaggcgagccatcattttccttatcgtttgagagaaattttcttgttgtcctaacttttgctaagttgcaagtaactcactggacactcagagcagacctagatccttctcataatactatacatccttatagtttctgtctttgatttaaacctataattttcttcatcatcgtcttctccatcttcctcttcttcaaggtttttctcaacaaacttctcttctcgtgtgttcgtttcaggcatccgaccattagtttcagacacttctccatcactcaccaggcttggctaatcatgttttggagggggtggattaatgtcatccatggcaaagtcctagccagtaggg

SEQ ID NO: 59968 - DNA, 1689 bp, Cannabis sativa
gatggggctgtctttcatgctgataatgcatatggttcgggtgtggtaatcagggacaacactgggtctctgattgaagctttttctgtgtataatcatggctgtaataagcctgaaattgcagaaatggtaggcataaaagaagcgttaagttggataaagaagaaagaagatcaagtggttcaaggtgtcattgtggaaacggattgtcttgttgcactacaagcattgcacacttcaattaggatgccttctttatttggtttattggtttctgaatgtcatgagatactatctaatttacaaaatgttgagatttgttatgttaagcgatctgctaacagagttgctcactgtgttgcgagaaactcttgttattggtcaggttgtcattttgttgaaggttctattcctagggaccttctttctttgttaattgccgatttggttgattaataaaattgaaactttttcaaaaaaaaaaaattttaaagttaatgaaaatatgtcatgtatatacaaatgtacagtggtaatccaattagcatttaatggtagaatttaattgacgtctcaaatttgcaaacaaaaataaagttaaggagatattgccacaaaaataaataaataagaaagttaagtgtacaaaattaaaatataaagactttcgccgccagttaccctaaaaattaaacgaaatgcaactaaaataggtgcactgatataacccctaactgtttcaacatctatatgaattttttagaaaattttttttcatagtcgtcgtatgttatagttatttaagacatcctgcagaaaaatttaaaataatttacaatatagaaatcaatgttcaaaccttctatttcacacgagtataaaataaaaaagtcatgtgtgcaacagactctttaaatcctgttttcaacgtataatttttttttcttccgaatttcttaaaattttatcagatgtcttaaataactacaatatacaccaccataaaataaattagactaaatatttttttaaatggcgaaacataaaagtgtattaatacacctattttaaagaagtatattatagaatttttcaacaatattaatctaacacatttttattatgtgacacggcaagatattactttatttcaaaagtgaaatgattcaaaattatagaggcaaagagaatttttgatacattatttcattcttatttttctcactcacaattcctcttggctttattgtttgtctatttatagtaaaaaaaataaactcttcatccctccatatacatatatttgacttgattttcatccaattaaacaaactcgtaccttatacttaattatcgttaatgaatatttaggaaggtactttatacataaaataaaaaataaataggattccccctttaattattactacattcaaattttaccattttatttttttttctaaaaaaataaattatccctaaactattcttattactaagttttttccctttcaattgcattacatgtgattaaaaggcttcctatgtggcatttttcgagccgagatgcgtcatgcgtataactaaataaaagggaaatttacatggtatactaacttttgacatttttttacaaaaatactgctaggcggtattttttacttttttactgtgttttttttataagtt

SEQ ID NO: 59969 - DNA, 1678 bp, Cannabis sativa
cgagtcaatcttattcagattttgagtatgtttcagggcttctttcatatgggtttttttgtccccctactttcctcttatctgccactatttataattacatagtgggcagtaaattacaaaggtagactataattgttacagcaattgttccctcaaaacatgggatttacaaatcatgctaagtaaatgaggtatttatttataattcacacagctgtgggtatcccacttttattgggccgagatgaacgcgcatttatggatgtacagtaagtcttatctcatggggatgcctcgctaggaatggtgccgagttaactttgatggctagctacgactcgtcatatgacttcccaaaattaatattgtgttaacttcgataactatatttcgggtgtcgagataatcttcctcgcatgcatgccatcttacagtgagatagacacctcgctatctgttatcttggttcaccatacttttcacacttagtttgtgtaccatgtaatgtacgctaagtgtttttaacgttatcatatctcttccacgcgacgaggttgaaacctcgtcatgcacatttgtactcacatggtttctcgtcgatacataagtcaacagttcgtgcgtttctgtctcgcagaaggctactcagccagtataaacatactttgcaaattatgtttctaacgagttcttccatgctaagtgtactttcgttttcgtgtttgagttcttcgttttcctagctcgatacgtgtcttcctctggtgtgcttaccgaatttcgggtgtaacatggttaattttaaattttttgattatttttgtttattttaattataagattagatattacttattttattattaaatttgaaatgatcatattttgatattaaaatattaataaaatttataaagaatctagttaaagtttcaaatttgctaaccatatcagttttttttcccaaattttgttatttttaaaatatattttattaaattaaattataagattagaaaaatattatttttaacattttatcttattagatatttattttaattaaaattttatttttggcaaaataacatgaaattttgtaaagcttattaattttgttttgaaaagaaattttagggtttggtagccataaaattttcaaacctaggatattttgttttattatttgataaaatttataatatcctaaccttcaaatatcttatttttctaattaattattttgttatatttaattcattaaattataggattagaaatatctaaattttaaattaagatattatattatattatattattagatatttaattaatttaaattatttaaatatactgaaaatttaaaaattagttagatacttaaattttaattagaattttggatatttaggagatttgttagattttaaatattttaatcatagcaaattttaaattctcgttaagatatattttaaatattttactttaaaatacaaatatcttaatctactttccagttacatgttacaggtttgttatatttgttaatttattatttatttatttttaaaaacctattatttatttagtcgaaattgctatgagtaacttgttgacagatccaatgatctaattttaatcatagtctaattgtcaatagatcttataa

SEQ ID NO: 59970 - DNA, 800 bp, Cannabis sativa
aacaactctctcgtcgttagaatggtatctctcgtcgcactctgacggcccaccaccatcgccaccttcactaaaatcgttgttagtcaattttgctgatgtggacgatgtcactggcggtgagcacttgtattttgggtaactttttgccccacaggtgagcgtacctgaagatttgcatgttcctgatccacctccgcctcctcctcctcctccgctgcatattttggttccgatgtcagggtcgtcattgcactttccgttgatacaaattagttgaccgtcacagtcgtttagggtacgacatgggccgttacaagaagagatggcatccaattgaagagggaggagtactaggatgttgatgcaaaaggataaggaaataattaacaatgtaagactagccattttgtgtaataaggatataaggctcttttgtgttatatatataggggataggattggtcaaagtttttttttttttttagtaaatagcggtttaaggattcaaaattttatattttgtaagcgacataaagtcaataatttttttaaggacataaaaattcaatatttataaaactgtaattttcttctcttttcgttagtacaaactcctttgtgaatttattaaaagaagatttgaagtaactgatattgcatatttctatccactgaaaaatttataaatttataccacttacaaatttaaattttttaatatttatgcaactatatatatatattatacactgtaaataagtataaattttctcacatattttatataaatttaaaca

SEQ ID NO: 59971 - DNA, 1585 bp, Cannabis sativa
atgactcgatgatgattgaggtaatgaaatgatgattgccgttaaaataggttaaggtcatgacgttaattgaaatcgtggttagatttcttacttgtcgattatcttattagacaatgacattgatataaggatgccaagttagggcatcgactttccttattaggcaatgtgatatatggatgccgagttagggcattaacttaccttattaggcattgtgatatatggataccaggttaattgagacatcgacttaccttattaggcaatgtgatatcgggatgccaagctagggcaccgacattgacttattaggcaatgaaatataaggatgctgggttagggcatcatagttgttttattagacaataataaagatagttactttatgaagcagcaaatacgacttgttttattatacaactatttgaacattgttgtttaattatattatgatcctgatctaaatattcattattatatgtgctttccttgttattttaattgccgagtctttttatcctaagttaattctagttggagtagtggatttttctagacaattatcctatattagttggttgatattgttagataaaaacagataattttgataattatctcaaaatcaaaacaaaggaatttttttttctctccttagtctctctctcttttcggtcctaaggaaataaaaggaactagacccatttcagctctaattcttaaggaattgcagcaagttagaatggaaaatgttagagaaatcatggtaaatccctagctcttccatcctcattgttttctatgttttaagcttgttttttttatttggttttgctattgcaattctattagggtttaagttagtttggttctatttgtaaggtaattttgagtatgattgagttgcttttatgggtttttggtggttgtagcttaatatgggttaggtttgagtttttaagctcaagcttgacttattaatggtgaattttaccacagggctttgattgtgcgtttatgagatggaacatgttctatatgttgttattaggtgttctggaaaattgcatgtgatttggggtgtaactgaacttggaattaggttttttgtgatttttgcataaacacaatcaactattttttaagaaatggtgaaatgttttcccagacataaccctagaaaatgatctaccatttgaggaatccggttctccagatagggtgtttttcaggaatcccaattttttgtattttctcgattttagggtattcccacgctatttttcgataggaaaacttctagttttgagtttaagtcccggaaagtgtttagagtaacacgtatcgattttacgtaaatgtgacataaggcctccgttcaacaagtgatatttccactctggttgatcgtcatacctgaatctagaaatgaggtaagattaatataagatatacctatgtgcatatagtatacatattagattatatgaattgtaaactaccaacactagtacgattacggtacaaagtgtatgtggtatagtatgttttcaagaggtatgacatagcgttaccaaca

SEQ ID NO: 59972 - DNA, 765 bp, Cannabis sativa
ggggtcctgggaccccaaaaccttttatttcaatttttaaaaacccctaataggagaccactaccaccagtcgaggctaaaagatgcagtggtcggccatggcctatgggaagccttgggtggtgtttcttgcttatttagtcatatggatgctaaaaaactactttggccacattggttcttggctaattagttaatagagcactgccaactttttggccagaaagatggcagtggtcgcctatgagggttatgcacccttgggtgacttttttcacttgtatttgatatattaatgttggaaatacagtgcgtccaaagaaacttctcattctttgatgtggctgaccactacaactctttatgccacaaagatggcagtgattggccaagtggtttctataccacttggtggcttttctcacttgattttaacatgttaatgataaaaagatacttttgaaaaaaaatctcatccccctttgatgtggcctaccactgcctttctttgtgccacaaagatggcacaggtcagctaggcttggtctttggtggaaaatagtttctttcacttgtattgtactcctggatgttgaaggaacacattttgacaagtcctgtttggttttctttgttagtagcgagaattttcatcttcttgatacaatgctctctaaaaagaaagagagcactgccatcttcatgtggcagtggtcgcataggccatgttgtatgggattcttgtgtaatcttgactttatgttc

SEQ ID NO: 59973 - DNA, 598 bp, Cannabis sativa
gcccaacttgtccaggttgataacgctgcctcccaggaccaagctgctgagagtcggaatccatttatacctctagtacagaatactaaaagatagtaagtttgattcaagttattgaagtgcgatcttctatcccggagctcccaaaatcaacctgggagcaggactagggtctcctatactctcaggttaactgatatgacttgggtctgctcaattctgtgacattatccttcttattacgtgtcaaacattaatgtccatgttaccaaggaaattttttgaattaacacataccaagacaaactaatttttttttcatgttccactttcattgtttggttttgttactttaggtcttgaagatattttatttttaaaaatttgtcttcggagatgttaaatttaattatgttgatttgtgatctcaaatttaaaaatttaaaccactttattatttcattcatgtagccactaaacaagtaatttgctccgttcaaaagcaaagtgtttggcaaaaaactttaatagcatgtatcctttatatttacatttcttgcttctatttataaagtcataaaatcaaatcacagttagc

SEQ ID NO: 59974 - DNA, 703 bp, Cannabis sativa
  modified_base (635)..(678): a, c, t, g, unknown or other
attagtgagaatttattaaatgattatataaagcgtaatttattaattacgaagattatatcagaatatgtgggtatcgtggataccatttttgaaataaaatatttttcataaaaacccctcaaaaaatcccagtctaccaacctaaactaaaccctcatatatcccttttttatatgctaagattgtaagaactaaaaatggctaattcttctgtttcctcttccttgctcctagttctccttgtatgcattgcagattagtactatttcttattcaaacaactttgtttcttcttttggtgaatggggatctttatttaaacaattttttctcatatttaattgaaaaaattatacatgtaatttattcaaaaactcattaatcttgatcgattgattgattgttattgtgtgaagtgaaaagtagcttattacctatcgtgggaggatgctacgtggcagtggtgggaggtggttgtcccaatgcgaaagcatgccgaatgacttgtgctccttactaccgtggaatatcagcgtcttctatcgtgctgtcagcggaggaatgccctacgaatcgtgcgtgtgcacgttttcacaaggcgcaccatgactgtgttggaattattttaccannnnnnnnnnnnnnnnnnnnnnnnnnnnnnnnnnnnnnnnnnnntgaatttctaaaataatgtaaataa

SEQ ID NO: 59975 - DNA, 754 bp, Cannabis sativa
gcttagtgaattcagctccaatttcaggccacaatgtcttgaaaaacccaactccatagccatctggaccaggtgacttggtgtccggtatactgaataaagcctccttaatttccttggtagagaaaggtttgattaaagccaattgttgctctctgtttagcttgttccccatctccatacactccttttttaagtcttgagtaggccttgtgcttgtccccatatagccttgaaagtgctttatgaagtgcttgacaacctcactgaaattatcaacaacctctccatagtcattggtataagtaactatgctattttccattcttctttttttttcaggaaagagtggaaaaaggcattgttctcatcccctttgcttaaccaagttacattgctcctctgtctcaagaagctgtggtacatcttctcttggatattaaagttcaaggcagcctctttttctatctgttggacagtggtatcatgcggttgatcttgagcttgagttctagcttgaatgtacaggtccctcgcttcttgataattttttccaatatccccaactctctctctattaaacctcttgatggagtgtttcaatctcataagtttcaaatacaagcctgtcacaccctctcttctcatcggtttctgccagctatcaagaactacatctttaaattctgagtgatcagcccaaaaattatagtatctaaaatgtttgtatccaatctccacattagtcgtagtt

SEQ ID NO: 59976 - DNA, 2034 bp, Cannabis sativa
gccatattgcagaccagacaaaattcaatgtactcttttcgattgcagctgtgtcattgttgggagacaaattttcgttgcacgccataacaaatttttcattttgggtgggtttttagcttccacagcttcctccaaaacctgtcttcagaaaaacatccaacccaaactccccattaagttgctgcagaagtttatatgcactcttcactgaatataacccagaaagatcaagcgaccaatttaaggtatccatcattggtcgagatagaatagggatagactgcaccaacactctatcacaatgcagtagaaaatcactaagaatgtcttcctcccagcccgaaccgtcgatcgtcatcaagttgcagacttttgcattggttaggctcgggtgagaaaagataatcaaagggttctcagcaatatacttcgaaccacatcatcacaatcttgttttgatttgataagactgaaaataaaggtgctgtgtatctttccaatgtcttatgtcatgtccctctttagactgagcaattgcatcaaacacaaaaataaaaatgaaagaagagagagcaaaaattattacttcgcaagacaaatcagacaaatgggcggctttttagctgaaatttcccgagactcaatagctttctggtaaatgtaccgttcttgagccgtgaaatacacacgacaaaccactttctaaattcaaaacaagagacagataaaaaaaaaagagaattatgattaaaaaaattgttcaagttaacgtttccaagttcaattggatgtggggtgaatcatacgatcagaattgggtattgaagtgcctgaaaaatctatcagcagagtcttgacaataaaacttaatcagaatgctataacaacgattctcattatgatcagaaattctacaaaacaaaccaaagcagagttaaaatcaagaataaaagaaaggttcaagaatgtaatcagtcgaataaaagtttaaagttaaacctgataatttgcatttgcgaaatttgatttataaaatcaggaccacagaactggcaaaaatctgcatatgttatctgatttggtacttgacaaacacaaaccaggggacttcttttagcctacatgaatataaattggtaacattatcagcccaaatccaaggttttaattttggaaaggcaagtaagtgaagaatgaaaagaaagaaagggaaatacttacaggaagaacgtcattattcatatagagtacaatgaagcctctacaagaagataacttaaaacgttgagtgaagtcattttgacatggctctttggttgacatggctctaagactaagagtgtctaagcttgatagatctgagattagaagataactaacaaagcactttaattttatcaatatacataaatggttctgttttcttaacaaggaatttctcttgaaaaggaaaaaaagccctcttcatacatcaaaaagaaagccataactgttaaaaaaaactcaagaaattaaatgcttttattcatacacgaacagtataataataataataataataataataataataatgtgtatacatactctaaaactccaatgttcatgtgtggattactgaaaaaacttcaagtttggattatttaggatcgttaaattcattcagacatttcatcaaatcattttcatacacaatctacatactgagtttatcattaaaactcattcttttcaatggcaatatacaatgaagtactaatactagactcctctaatatgcaatttaaaagattaaagtacagtcattgcaatttgattaatcaaaatccacccacagacaatctttatccgccaagatcagagaaaacacaagaaaacttacggtgataacaaacaagacttacgtgagcactcgctttcttcgacagtcgtgtggcccaagaaagcggtagctccggcgagttgacagaccggtgagccaagagcgaccagaagaagaagtagaaagagaaactttggtgttttgggttt

SEQ ID NO: 59977 - DNA, 893 bp, Cannabis sativa
cttctgctacatttgcttgactcaccaaagtatttccaagtaagacataaatgccattttcttttgaacccttcattactaacattgaccctttgacaatcttcattatgccattctcaatcttcacagaatgtccttcttgatccaacatagccacagatatcagatttctctttatttctggaacatgcctgacatgctttagctctgcaactcctccaccttttaattgtagtttgatagtgcctataccagttatgggacatgatctattatcaccaagcctaaccatgccaccattaatcttttcataattgctgaattgggactgatctgggcaaatgtgaaaagaacacccagaatcgagtacccagtcagttcttgaactttctttggacactaccaatactcctgcacttccatagccatcactatcacagtcagaaaccagatcaacatcaccagatgactgtttctggttgtaactcttaagaacaggacaatcctttctcaaatgagtggttttgttgcagacaaagcattttctcttgaattttgaatctgactttccttgactcttcccttttcctgtgtattctttgtttcccttcttgaagttcttgcctcgaacaaacaatccatcaccattgctgtcatccttctggtctgatttcttctttaattccttggacattaaagcattttgaacctcttctagagtcaatgattctttaccatacatcatggtatccacaaagtgttcataattttcagtaggaagagagttcaagatgatgatagcttggtcttcatcttctatcttgattccaatattttctaaatcaagaataatcttattgaaatcatcgaggtgatcttcaacacttttccct

SEQ ID NO: 59978 - DNA, 585 bp, Cannabis sativa
gtcatgagccttggccatgtcaagcttgaaagccatcttagaaccattcttgaaataattcctcttcatacagtgaaggccttcaaaactgatgatagcattgtcatgaatgattttacccccaacaaaggcactttaattttcaaaaataactttttcaagggagtttctcaatctgttggcaaggcactttaagatgattttgtaaataacgttgcaaaggctacttggtctgaatggatcaattctattcagcttgtccagtttcagaatgagagcaactaagatgttgttgaggtaaatgactggaaagttttcaataagaactttcaggcatatggaagtaacatcattcttgaccgtacaccaatacttttggtagaaaaggcttggtaatccatcatttcttggggctttggaagggttcaagttcttaactaccaaataaatgtctttcccagtcaaattagagccaagaaggtcatttgtatggctagaaattttatggccaatatagttcataacaagactcatgtgtaaaggagttggaatggaagatttgaacaagttataaaagtaactatg

SEQ ID NO: 59979 - DNA, 1125 bp, Cannabis sativa
atataaaatttaatttaattttaatactttcttttcttttcttttcttttttttttctttttgaatggattgaaaaaacagaagcatcattaataaagtttactcttggagatgatttgctaatctgtaaatcttaacattaaagtttgaactaacataaaaagatatatattttaaagaatctggacaatgaaacttttaaacaactttgtagactaaaacttttcaatgaacctgcaccatataaccaaataaaaccaaacatatacaattatttgttttttaataaaatagaaaagatatccaacattagactatctaacaaaatatttgatttagtactaaaaaaatgtctaagcatatttgtaatttttgaatttgagagctgataattgagttttaactcattttaagttatgagtttaatttgcttaggttcattgcgacttggagtgtggaggcttaacttttgatagctagaaatgaataaaagaaatgttttggagtgttttggatgaagattagatctatcatttggagttctttttttctctttttacttttagtttatgttaatttcatgtttatagatttctaagtgttgaacatgaactaatttctatttagagtttataattgaaacttaaaaaatggatctaattggatgctactaatctaaacaataagattcaatcacacaatataaactgagttgtttttacaacgaatttgtaaggattattaaaagctaaaatacagaaaataaatcaagataaacatcacaaatttacaagattcacctgccttagaaacatattcttggattccttgaaccaaggtaaataacctccaatgagaatcaatgccaagatacaaactccagtttgtaatacaaatgtatgtaaaataatacaataaagattcttacaataattaaccctaagatcttgattaatcaaccaatatttaaatttatgtcctcttagattcgaagacaagatccccttgcttcaattgagcttctcttcaaatgaaacaacccccattatcatcgtcatataagcttgaactcttcaacaatggagcaacctacaaaaaacaaagaagaaatagatttctttccta

SEQ ID NO: 59980 - DNA, 837 bp, Cannabis sativa
  modified_base (810)..(811): a, c, t, g, unknown or other
gatggcaattacacccgcgggttcgggtgggttgactttcgggggcgggggtgggtgtgggtttaaagattcatactcgagttggaaacggagcggggacgggagaatagatacccgccccgatatgatatatgtatatatttaagttttaaaatcataactactacaattaaaataacttcatgttttaggcttttttttattatacttttttttagtgtacacactattccacttaagtttattattttactaagtttttatgattattttttttaattctctttgaaacatcacttttttttttcaaaatatatatgtgtaatgggtacccaatgggaatctttcccccgtcgagtaattcccgccccgccccgctttaatttaaacgggtatggggataaatttaagaagcgggtatgggggtaggggagcagcacccaccccgccctatttacatccctaagtgttttcttttttttttttttatttgaaaaattaatgataaacatatatatttattgaaaattctacaatgtccttccttaacagatgcaccgaagtactattatttgtttcgatatttcaaataattttttagaaaaaattttctcaaaattatgtatattattattattatttaaaatattttttaaaattttaagaaatttagaaaattttaacacattttatcactctcttttttttttctattttattttattgcaattgtagtttgcaattggctttttctatctttgtacatttaagtaggagtgttcatctgatccaatccgcacttttttggtnnaacaacatccaatccgcactaagtgc

SEQ ID NO: 59981 - DNA, 1004 bp, Cannabis sativa
tgtgcttctaccaaagataagaatcatgcagcggttcttttcattcctgaggcaagtctgagagcaaacatcaatatagataaaacctcttctaagatacagggtaatcatccgacaaattgttaattttctctgcttgcataatgcccgcatcataactgtattggttgattaagcatgcatatctccatttccttttcggtgacatctccctttgtgaaataccagttgcttcaatgcctttcatagaacttggcatgagtattactccttattgtctttcatatttttgttgcattttgctacaacttgatacctattgatttttttcccctattttaaagataaaatcaatcttagaccaaagaagccaaggatgaaagaagattctcctgctctgctctctgaatcctcggataaaataggatacctgtctgtgtttgttcttccgtttattctgcatctgggatttctggcagcaacagcattttttgtcatgcatgtgcaggtttgctctctttgatttgtcaactagtcgttaagagttatgtttagctatgatccacattcttgaccccttatcacagttaggctcaatttgattagggaaaaaagaatgaagtggaatagaatgaaagaaaaaatttttttattattagtattaaacacacaagaataaatgtgaaaatattttttttgatattttggtggaacaatcattctattgcacaaatattttaaaataaattacttatatctattatattattaataactccccttattattttcaccactcccaaccaaacaaatccttaggtgctaaaattatttttgagtgtttgaatctcttttattttctatcgtacaatctaggtccccaaacctttttgtcatttttttgttctgttgttgaatcaaagtcatatttttgcacatgattgcggttgtttcaatctaaaaaattctttaagtgtcatatgaactcatttactctcatttga

SEQ ID NO: 59982 - DNA, 963 bp, Cannabis sativa
ttttttcaatttttttatagcagtatttgttatagttataataccatctttgtaaattgttgaaattttttcgaatataatttacagtactaaaaatagagtttatgatattttaatttgccaggattgttcaaaaaactttaattctattttcagaaactataagctatttaaaaatttacaaaaaaatgatattgtgagcataacaaatgtcgttatgaaaaaaatattctaacatgtattttcgagcacagaattaataattcattttccttttaagtttttggtttttatgttttcgaaataaatgaattgtaaaccattcatgtatgataagttgtggtggggctaactatgtgaatatgttgtaagttatattatttggagtacatattccaaggtgtagtgagccgcgtagtgcaaacgacgatatcgcatttagtacactacagctaattaaatatatatgggcatgattggttttggtacactaacacgacacgaattttatagggtggattattatgacattagtagtatccaatatcttttatagatagtactttacgattgattatcaatattctttaaaaattattttcttaagagcatctccaagacaacatcaacattatattaatagtttgttgagctacacttcacataaaattagttttgaaaattaaaccatattgcatatgtggcaagaccactctaatagacaactccgattagagatgttatgaattatataaaacttgataattaattacatcaataatgatatatcgaaatgtgtgttagacacaaatattaacttttagcaattctcttaatttaataagaacattgttattagacaccagtagtatttaatacattttaaacgtatcattttgtgattggataacgatcctctctaaatattataatatttaacatcattagttgaggaatagcaac

SEQ ID NO: 59983 - DNA, 794 bp, Cannabis sativa
  modified_base (50)..(53): a, c, t, g, unknown or other
tatttttattttttaaaattaaaacaataacacccaccaataatatttcnnnncgtggtaattttaaataagtaaacgaatcatttaaaattagagctaacaatactacgaaaaacgtgacattggagactattaactgtcactatttctcgagattagggactaatctacataaagtaaattttttaaatactttcgctacaatttttttattatttaattaacagagattttgagtttatataattaaaagaagttttattttcactccatattttataaaagcacctcatttaatcatctttattttatataaaaaattatatctttaatttacactaatttttcctaatttttttctaccttcttatattcttaaaagtcatacatataaaataaaaataagatataacttaattaagacaagaaattgaaataaaaaattatatgaaaatttatcaaaaaaataaatataattacaaataacttttttttaaaaatattcaaatagaataaaaataattattaattttttttttttgaatataataaccaattttaaaataattattaactttaagacaaaataatgtgaaaaaaaatgaaaaaaatattaaaaaagtggtgtttaaaaattaattttgattattttttttaaatattagagtgtagttataattttataaggtacaaatataattctcattgtataaaactataggaaaataattaggtagaatcataaaaaaaaaaaaatatatgtacatatagggcccgtttggtacgcatgattg

SEQ ID NO: 59984 - DNA, 988 bp, Cannabis sativa
tcgaggacacaatcgatcaggtagaaaaatgggagagggaagtagaccttgacgttatgcttactaagaaagcatgagcaatatgcaaagctaccaatctgagagttacttatagacaaggtatgtgagtaattatgaacaaagatagcccaatcttcgcgagcacttgaatcaattacagccagatctttgcgagcgactaaatcagaatgcacctgacttacgccatcagcttaatgcaaatcaacaataggtggatcccattcaatagagaattatcgaattggagcataatggcagaaagtatgaggatggggaacaagggaaattacccgggtatgactcggatgaggaaaccgagccgtttcatcctgatattttgaattttgaattccctcaaggattcaaaaatacacatgtctcgtagtatgatgaaactatggatttattcgctcacttgaacaattttaataccgtaatgcgagctagcaatgtctcgaataatttgtgttgcatcttattcccgacttctttaactggagcagcaagtagctggtttgacaaatttacacatcattgaataatttcttgggaacaactgtccaaagactttaagaaagaatttaaatctgctagagataggagatctgaagcatcatccttgactaacataaagcagcacccaggcgagtgacttaaggcttacttgagtcactttatcatggtcgatgcaaaggctagaaatctgaatgacagtattcagcttactgctcctcaggcaggaatcacaactgacctttctattgttggtggcaagttattggatgacttatagggtgtcccagtaagaaacattaatgagttcaatgaaagagcgcaggtggttcgtgtgcaaggaagaagtcaagaacgagatgaagttgttgaagactagctcgggatgtaaacccacacaagtactgcaacgacaagtaccttctcaactaaa

SEQ ID NO: 59985 - DNA, 1268 bp, Cannabis sativa
aattactgaaatgagatctcaatcatttatctctatcgagatagcctttcgccaaaatctcgagtactcgtcccaaaattccaagaaaaattggaacggtggtttggctatctaacatccggataaagacttctctggattagtcacagtcgataactcctacgcggatgtggatggccacgttagctttatatggaaattgacctacagacagttatacctttttctaacacaagatcagatcttgtcccctgtgtcaggccatggtagtgtgcgtacgtacctcaggacatgcctttttcccaacgtcttgtctagagggtaattcataaaggagaaacctttgagcaacacgtgtcactaatttagacgatactagtcactacccctatacactgcacgatcaagaaggttcttcaaggtcagatggtcagatcaaaagttgtattctcctgcccttgcaacgattacggtacgaaaccctaggtgggtaaagaggatgctcttactcacatgtaaatctataaatacctccactttttatgtacaaagggtgaaaaaatttatactattcgaacctctacaaaaactcctacaagctttcttcttcttcaagagaaataaaaggagtgcagggctagggtttatactgtaaacacacattgtactattcaaatacttgcccaaagggccaatacaacagactcgtggactaggaatcattaacgcccgaaccacataaaaattacttgtctattaattatcgttttatttctttctaaagccctgtttatttagtttttgaaaactttggtaaacagtttggatttcttattttccttagcatcacttagtaactttccttttgaagaaatgggggatggagggctaggaggatcatctttaaaatttgttttcttagcaatgcctttttacctattgccgacttgttcaaagtttttttaggagcttttgggacttttttcacaattagggaagaagagcaagaacgagcaatcttgacttttttacctattccctttaagcttgatgggaagaacaagtatttatagggaaatgttgatcaaagaaagagagaaaatgatttttcaaaagaaaataattgaattagggtggaatggagttcaaaaataagaaaccgttcctagctttctttagattgtgctttaattttcaaacgaagaaggaaaaaacaaaattgaaaaaaaaaatgaaaataagatgaagagcttaaggatgaaggtgat

SEQ ID NO: 59986 - DNA, 2248 bp, Cannabis sativa
tttcaattttcaaaagtaaaaaatattgtgtgacctattttatatcctacattcacatttgttgaaaagacatttaatttttgtttacacgctccgtttattaaacttaacaagttatttttttaatttaatttagtgcattgctataaggcactggtgtctagcaaatttttatattcattgctttgcgattggttagcaatactccctacaaattattatattaagttattgggaactcgatacttaattgcacaatagtgagattgatacgaaggtgagtactaggcaccacttgtatcttttagtatttctctctaatttattataatgacatgcgattttatttaatttgttaatttcactacctttctaatatttgaaaatagtaaattatatttctaattttataactgtttctttatttataatatacacacattaaaatattacatttcaaactatatcacttaatcatttaaaaaaaaaaaaaatactaaaatagggttgaactcgcgcgaagcgcggcttagttccctagtcacatatatatttgttgtgactattcattttactaaataattgtaaacatgtgttataattttatttcaaagaagtttttttctaatatctgttcaggtttaaagttatttctaatgacactttaaaaatttatattaagtgtaatttttcccataaaatattttaattttctttttttaaaattaaatatttcatttatgaagtaaatacttttattatattaataaaataacattataagaaaatataaattttaatgtaacttttagtattgtgattattgaaaaaaaaaatagtactaaaatagtattcttttagttttgatttaatactaaatttaagtttttgtattggagttgccctaaataaaaaattagtgggttaattttattataatgacatagatgtaataatgcaataatattatgtctaattattaagtatatatacactaatctcaaaggatgacatttgtcactaatttatagaaagttaaaagagagtacaaaagagagtttccttagccccctctaaaatatatatctacaacatttaatattataataatttgtttattatatatttttttttacataattatagaaaagtaatatttttattataattatatggataaacgatgtgtgatgattaaattacatgaataacatttatgttgatacttaaatatttaatataaaatagattaaattagatatttatttatattttatttcacatttaatgtaattagttttaggtctttagactttacgttaaaacttaatcaaattttcatttcatttcttttatttcacatttaatgtaattagttttagatctttagactttacgttaaaactcttggcatccttcatttatcatttgtgaacatattatctaattaggaaataacgcacgcgaagcgtgcagttataaaaatatattaaagttaatattttttttaatagtatgagtaattattttgagtgtacttttatttagaatatttaatttcactaaataaatgtaaatgaatttatgagattttttttaaagctgaatttatgaaatattattagtgttttttttttttttcaataaaaggtcttattttaattttttggccaagcttcaaatcgcttgggccggccctgaatgtaccaagtgtacttggtggttcaagtcgccaacccctataggctataggttttgatctcgttttgtaactacaccccattattttggctttagattttgtaataaatgtattttttattttatggaaaaataccttaaataagtttggtgatgaaaatatctcttgaagtgtggttgtgtagactgcaataggatttaaaagatgtcacttgctagttctacacttagtttttcaaatgacttgaattttgtagatttattaagtttgtgctgtaaatttggataaaaaaatgtgagcaagactattatctggtataaaccagtaaacaaagaaaacagagaagaagaagaagaaagaaagaaatcctttattactgagattgagaatgaatacaacagtagtcaaaatacaagggatacaagatatatatatagctgcaataaccaaaaggttacaatcataacaaccataaccaattctaactaacttgacagctaagaccaactaactatgtaacgccttaatgctaaggcacgctacagt

SEQ ID NO: 59987 - DNA, 714 bp, Cannabis sativa
  modified_base (213)..(219): a, c, t, g, unknown or other
tacataaatagcataataaacatatatgatactaaatatatttctaaaatatgcatttcataaatattaagtaaatctcatggataaatcctaattaactcaataatccataacattaatcttaggcggtctttacagtacaacttgtgactaaaaatacatttagccacggaccttgtagtcacaacataagaatcatgatttataattagnnnnnnntttttcacttttagtcacagttttgttgtgactaaaagtaagattttttgtagtgcctaagcatgcttattaataaaataataaaaaaaatgttcatttaacaatttttttaaaaaaatggatagagttttccttctttctatgacattttccaatttcacacgtacgtaacaatacaataaaaacaacacaacaaattggaaagctagacaaaaattcataatagcatttaacaatacaataatttgccacacattcgaccataatacatttatttaaaaaatctacttcactacggatgaatatttaaggtattcaaatttttctaatatgcatatataaattcttcgttcaccacagtatagtatatctcaaaacctacatcactacagataaatatctaatatattcaaactcctctaatattttgataattagtaattaatgatcaccgaaattttattttgttttacaagaagtttgtctcaactagta

SEQ ID NO: 59988 - DNA, 687 bp, Cannabis sativa
tgccacgtattcatgttttaatagcttacctttcttgctacacgtgttagcacctttagtggattttttagaattattattctttccaacttaggtgtcgtgtccgtcggcattacaaccatgaatttattggtttcatgttttgcgctttagtttttctccgtcggcgctctcaggtatttcttccgtcggaaaggtatccaggtgcctcttctggtcctgctatactatttttccttagtcaatccttggtccgttggtgtctctttccttcctgttacttcttctgcttccgtcggcattccctttacttgttccctggtttttggcttttttctcttttttgtccgttgtgtccccttatggattgacaattggtggatttggttatatcgggtcgggcttatatttttatattcttgggcttgggtatatttattttaatgggcccttttaacgtgggccttttagcagtcctttattttgttgggccattttatttccaagtccagttttcccccccaaacactactcccccagttccaattatagttttataatctggaactgtccctgacaactgcctttacagttttaatgtcagtttttgtttattattattgatttttcatcatatatcttgtttagtgtatagttccctaattttgaatttttcaacttcttaag

SEQ ID NO: 59989 - DNA, 910 bp, Cannabis sativa
aaataaaagtgaaaaatggagataacaaagaattagaaagaaacttcatataagatgccacctagaatgctttgtgcattcctttatatttatatatagatgttacaccgttaaatgtcaatatgtgaaagataactaattttgtaataaaatgtaagatgtaatttaatattgattgattttttattttataaaatgtatatacatttttttggatcatgaattaattttctttaaatcatcaaaatgaataattaatttctaaaacttgcttaatcttaatctgatttttatagacgactactaaaaatttctccagcatcatagtacagtataataccatttgaatatttatgcctaatgagaaaataaaaataaaattattgttaaatttatgttttctaagactattcttaattattgctaaattctttaggcctaatagacattcgacacaacatttaatttgaatttaatattttatttttgttattttttaatatattattatactataatttgacagtatagtttatctttgtactaattaattttgcattatacatttttttaacaatagattaaaattattaggagtgtttattgtcttattttaatactaataaatcacataattaaagtctattctaaattattttttgttgaaataatgaatttgtcatttgttaagttttttttttttttttttgaaaaggattaagtttaacatctacattttttttttgaataaataaatttgtcattaatttttttttaattaattattaacgcataagtgtaattaagagaaaaagtgtaataggtcagctcttcacttaactgccatgatgagaaatacaaaaagataccaatagtatataccaatttttttggtgtcatatcattattg

SEQ ID NO: 59990 - DNA, 1172 bp, Cannabis sativa
  modified_base (701)..(704): a, c, t, g, unknown or other
aaataagttcttgcttagtgaaattcacaaacaagacatagtcttatttagaattctaattgattaattaaaatcaattcattgagactacaaaacaatattatcattcttagtgcagggaccactgacctatgtaaccaagctcttaataagtagatctgaaatttactaagtaaatttcgtaactgattaattcctcttgactccactatagattcagaattgcgctcttaattacatagaacgctctatataccaaaaatagatgcgttttgaattatccattgtttcaatccaaataatcaaagattctttatagatgatctacatcgagtaggaacaaatttactgttctaccagtcaatatattttatccttaaaatacttagctcactataaatgatattttagtaaactaatataattactaaaataagagttcttccatttatctctattaaaccaagctcaacggaaatcatcatttcacttttatataattacagaagctataggttccatatctatgattagcgctcccattcaattgtactgtactatgttcccaagatgtaagtattgggaagatctatttggttaactttaacgaacaagttaaagaacacgaataatagagttaagctagaacctaaccatctcagaatttaaatatattaatctaagatcaactaagtgatatnnnnttagaaagatataacagtaagtttatgatatctttttcattatcaatattggtctaatctgatgtatactccatacatctgatcctagtatactttgctaatgcccttgaaaggacataccatgtaatattccagaaaatataatagtatttaattaggcatattttattaaatatgtgattgtattgatattagagtaggattataatcttactaaagctaattacaagttgattagcaaaaatttgagtaaatgaataaataaagcgtaatttataaattacagaaattttatcggattatggaggtgttatacccgaagttcggtaagcacatcagaggaggacacgtgtcgagctgggaagaactacaacacgcaaacgacaagtatgcttagcatggaacaactcgttggaaatataattcgcagggtatgtttataactcggctggctgaatagccctctgc

SEQ ID NO: 59991 - DNA, 1067 bp, Cannabis sativa
tggtttctccacattcactatttttgtgttgagaaatattaaaggccatctctaatggcactttaaaaatttaaatatgttgcaatttttaagtaaaaatctttaattgaactgtaaaaatattcttattttagcgaaaatctacattgtaagttatttttttttttgaaaaattttaacaagtgaattaaagaattcaatgaacacaaataggaattcatgtattcttaagattcaggttaatttactaatgattattgttgtgatatgaataattcttttatggtaaacgacaaattaatgaaagatatttattacatatcggtgcagtcttgcataatcgaattatacacaacaacttcactatatgtctatctacatatgcgatctgaatcaaaatcacacactagaattataatatatagtaactcacacttaacagtttcatattaaagattcctattactttaattatactactgacttattttattcatattatataattttatttctcttgtacgtttttacaaaattatacattctctatatgaaaaaataatttttagatatttaataattatattattataattttatcttataattgtatttcatatattctctaatatattattcatataaatcccaacaactcaacccaccaccggcactatcctttgcgacccatgaccgacaacaagaagctcgaccaacgacccttgcgacccaatactggcactgaggagctgcaatagaagaaatgtcggaggggattttttttttgtacatttgcactgttttgcattgcaaaaacttaatgtgaaaatgataatgagcgtgttaatttttttttttttttaagctggtcgatggtgtaagatataggtatgatatatgtctaatatgttgattgattggaactgtaatctaatcttaagttgaagaggacaatatgttgcccgatagtgtgcatatataatattatattttttcaattgttgagcatgttgcccgatatgtacgatattaggtacgatggggtaagatttttgcatgttttcatc

SEQ ID NO: 59992 - DNA, 667 bp, Cannabis sativa
aaaaaaactaactaaacaactaaacaatcaaacaaataaaaaaaatttaaaattaagcccctcccccaaattaaaagttcacattgtccctaatgtgacataaaacccaaggagagaaagacttacctgataatcatgccacatcaacaagcggtcaatacccataataagtatcatgcaagacaacttgaaagttgttgttgtaattgccttcaagcttggcatgtgatgagtttgaaccaaaagcatcaccaacaacacaagactttagattatgaactcggggagaagcctttggtagcttgtagagaatgtaatatggtgaaagtgcattaatggaaaataaggatccattggcggttcataatataatagcgttgacaaactcaaattaacaactataagtgattcaccctccaaggaaacctctttcccactttgttcatgaatattcacaaccttaactgtgatttgatctttaataacttattcactgaggatgggtgttccttcaatctccaaatcaaaatcatcacttgttgagcaagcatccaacatacccaaacttttagccacttcaaaggattctttctcttcaattctaggctcattctcttccatgtattcaactaatggcactttttcattattctaacaactctcataa

SEQ ID NO: 59993 - DNA, 4725 bp, Cannabis sativa
  modified_base (757)..(757): a, c, t, g, unknown or other
  modified_base (3440)..(3440): a, c, t, g, unknown or other
  modified_base (4370)..(4371): a, c, t, g, unknown or other
ttaacaatctcaatatagttcgggggaatttttaacggccaaaaaagttcaggggacacgatttagtacacgtcaaagttcggggaaaaaattactaattgtttgaatcatattttttatattgtaaattattcttaattttttaaaattttacacacatgatatgtcttaaataacactataatacaccatcatataaaaaagttgagattacaacactattcatcaactatcaactatcaactatcaactaaaaagttgtgtgcatgggtcggtcttgagttgaaatggattatagataaataaaaaaaatcagactcttactataaagataaaggtatttttaaaaattattaacaaaatatgtttattttttaaaaggtatcttttgttatttaggctcccaaaatgagtgggttctaggcgcgggcctagctcgcttatgcctaaggccgaccctggttcaccagagaagcatgcgtacgctttctatatatgcataaaaaattctacaatacaccctaaaaagaggtccatgtgtattcttatttgttttggtatgagaaatttttttaattatattatttttcttggtcatgtacattgtagttatttaagatatcctacaaaatttcgagaaacttagaaaaatttaacaccaaaaataagattccaaatattctatatcactcgtgactcttttatatatacgtgtgaaatagactgattgaatactgctttctatattgtaaattanttcaaatttctcaaaattttacagaatatcttaaataactacaacatatacaattatgaaaaaaaaaattaaaataaaataatatcaaaataaataagaatatatcggtgcatttcttttaaagagtagtacgtgcattatagaattactctttatataaatatatatatatatatttagagaattgctaattaatattattagtgtctaacattcttctcagtgtcatacttggtgcaattaaatatcgagtcttatataacttaagaaaataaattaaaaaaaaaattattaatcaatcgtaaaacactacgtataaaaagtattagacactacatatactcaataacaattttcaaatatttaatgcttgaagaaaaagcaaaatatatatagatataaggtgtgaatattaagtaataataataaatatagatttgaataattaaagaagagtgtgtggccttgtaaattggagtggtgcatggggctgtggtgacgaccgcgctgcggtcgccgaacggcatggtagtttgactgtgagatggtcggaaaggaaataccacttcatcattttctccatttaattaaataaattatacaactacattaataattactatactccatctttcacatgcaatatatatatatatatataattaatttgataaggacaattttgtccctaccatataatgacttatgataggggatgaacacgtactacttcattggatcatatatatatatatatatatatatatatactactttaaatttgatcatatattataaagatcatgatcaatacttaatgttagttcacataataattaaaaaaaaaattaccatactttaacacgaaaaaaaaaaaaaattatttttctcctttcatttttttatttacaaaaatatttctatcataaaaacaataaattatttttttattctataatttatttatagtggtcctaatgttgttgttttttttttttttttttgcatgcttttgattattttatagtttatttatagttatcgtgagattaatttttcgttattttttaattgtttttttactttttgttgaaaaaaatgtattttttgtaattttaaaattataaaagaagatttttattaaaaaaagctttaagttgtaaaattgtaaataaaatattaaaaatggtatttttagaaactttcctaataaataatgatttttttttttttcctttatgtttgaattttatctagatgtataaagaaaaaataactattttatgtttggtatgataaactaagttataataatgtgtgaattatgtaaatatatttattggggttgtgttagaaaatcaaaggtggaaagtattgctattgggcaccagtggtgtctaacacctttaagaaatgtcgttttgcgattggctagcgatacttcttaaaagttattatattaaactatatagaactcgatactaaatcgatattgacacgtaggaaggtgtttggcaccactggtgccttttagcatttctcaattataatgcaagaataatgaatgcaaaagaggcattgtaaagtctttcacaatgtatattggggctttttctccttattattaatgtcttgttgatttaagatgtcttgttcattggataacataatgtgttgactaaaatttttgataaccaataaataaaaaaaaaaatagagagtttaaagaagtttgagactataatttttatagtgtagataagttgaggaatatttgtttttgtatccattaattaaaaatactcttatattatatttcattaaaatatacctatttttttgagtgaattgcctaatataaccttactctccacttaagtttaccatatattttacattaacttaagggttataataggaacatcatttataaaagtgggtatatcttaaagaatatgaaaatagaggtaaaaattaaaataaataaaataaaatatgtatacaatgtaatttcatcttttacgtgattggtagggccggttttgaaatttagtgagtcataaaaaataaactatttaaaggtctttatttaaaaaataatatggtatttttcaaaattagtaaaaaaaatatgtatttttaaaagagaaaaaaatttgaacccctaaaatgtggtacttctttataaacaatatgcccttctttcctttgccctaaaaatgttatcgggaggatagatcttcttgatcgctatgtcccttgcacctttggaaacttagcggctcgagaggaagggagctagagagtcccttgcacctttggaaacttggtgagttttgaggaactgagtgccttagagcatctccaatggtaaaaaaaaaaggaagatgcttgcttaggtggataaatgatgtggcaaaatgtttagatgttataccattggagtggaaagaatgccattctaggaatttgtggggatgctataaagtagcatcaatgctatcataattttttaataaaaaattaaaactaaaaatttgttgttgctaaaaatgaggaaacatataaatacaattttttaatatgtgagatcataattatagcatttttgaagagtgctatataattggagtgtttttaaaagtaagagtgtcaaaaatgatgtggaagagagataaaatanaatattatatttttagatgatgtggaaatttttagcatcctttggagatgatcgtagatacacttggtgtctacatctttttggtgactcttcaatatcttgaacaaaaatgtatgaacatttaaatcaatttttttgagggatagcaaataataaaattgagataaaaaaaaattcatggactaaaatgttgggatttgtctttttttctatacaaaaattggctacatctttgttttctcttagaaatttaccattatgagaacttaagaagtagcccaataggcatttaaatttttttaatactatataattataaaaattaatattgatatattgatgtactaaattctttcaccctctgatgaacaaaaaaattaggcacttagctcctcctaatattaatgtctagttctgttatatcggatatagacacaatttgatagtgtaaaatatattttaagaagtaaaaatactaattatttaataattaagtacttatattccaaatgttaatcaaattatataattagttaactaactaaatgatacattagtgtaaaaaaggtaaataaatttcatttaataaaaaattgagaaatacaaaacaaccaaaccaaaaaaaattaagaaatcaaaaggtaacaactttcaatgcgttgcattaattaatatatgtgacatttttttcaggcatgagagaatacttttggttgcttaagatacaagtaaagtggtagaatttgataacaacacaattttatgatgttttgggacactagaatttaattttgggttatagaaactatactattgttaaaaaaatgctaataaattataatatatatctgtaatttgtttttttaaatcattattaatgaggtgacacacttacattcatgtcggatctcattattattattattattnntattattattattattattaatgccttcaaaataaatgtaaattagcccaatttcatcaatacataccacacaatggtccttagatatatatacatcattatatatatataaataattaatacttttgaaaaattgcttttaaaaaaattacatttgaaaaattatttttatattttttgaacaaatatttatatgcatcttgtttaatcaaatttcgaagatcgtactcattgaattatatatgaatgtactcgttaatctatatattttactaatataaatataattattatgctaatttttttcaataaagttgttcattggaatagtaattaaaaaaaattattattcat

SEQ ID NO: 59994 - DNA, 2853 bp, Cannabis sativa
tgaagtgatgaagaagatggaccagtgaaaaagaaacacattgaatttgatccacagttcaagcctgaagatatcaagtttgaattggaaatggaattccctacggttgagttcttgagagaagcattaaaggaacattttatcagcattgataggaaataccgatatattaacaatgataggttgagaattagagttgtatgcaaataagaaggctataaatggttaatgtatgctcataggatgagagatgcatgcactataatgtgaatcaataaatttgaggaagaacacagttgtggaattttatgggaaaacaggctggtagatactgattggattgcaaaagagttcttagagaagttcagagaaaatccagccatgtcatttggtgatttcaagaaagaaaatcctgagggtaagtactctaaactctcctcctagactttttattgagttaagaaaaaagctatagccaagatacatgggactgctaaagatcaatatgatattccacatgcttattttgcacaattagtaaaacttaatcctggcagcacaatttttatcagaacaagtttagtgaatgatataaggttttttgaaagggtttatatatgccttcagtatgtaaatctagtttcaagttctgcaggcccatcataaagctagatgggtgctttttgaaaagatattgcagaggtatgttgcttgtagccattagtattaatggaaataacaacatgtttcctcttgcatatgctatagttgaaaaggaaagcactaatagttggacttggtttgtgcaactactgaaagaggacctagatgtagaagacacaggattcttcactttcattttagacagacaaaagggactagaaaaggctttaggaacagtttatgaaggttttgaaatacaattttgtgttaggcatttttatgctaacttcaagacggagtttcctgaattgttgttgaagcaacaattatgggcttgtgctagagctattacagtgaattcaaaaggagaatgaatgaattgaaggagactaatgcagcagcttttgattggttgtccaaaaagtcaccatctgaatggaccaagtcccactttaggacttctactaagtgtgatatgttactgagtaatctttgtaagagtttcaactcaaccatactagatggaagagacaaggcaatcataactctattagagtatgtttgttattggttgatggatagaatgagaaagtaaaaagaaagtgtcagtaagtggacaaatctagtagggaaaaggatctttgatatcctttagaagaataggaagtttgcaatgaaatgtcagtgtacaaagtctgttggaggatcattccaagtgacagtgtctactgggcaggtggaatcaataaatttagagaccaaaacatgctcttgcaaatcttatgaccttataggtattccctgtggtcatgcattagtttgcatgtggtattccaatcttagtgagtatgatttttttgctgatgttacaagaaagaagccttctccgctacttatgaaggggcaattgcacctatgtctagtcgtgaacattggcctgataaaggcctaaatccaatccttccaccaacaaaaactgttctacctggaaagcccaagaaatcaaggagaagagaagtgaatgaacctccacctggtgcaactaaaatgagaaaatttaggcagtctaacaatcgttctaattgcaaataactaggtcatacaaagaacacttgcaaacaactagtacaagaaaaggtatattcttttcttaatgtcaattaactttgtattgaaatttgtacagtatacacactttgttagcctaaaaattattatggtattaggaatctccccagaagaaaaagatgggtcgtcctcccaaaaagaatccaaatcctcaaactgttaagagaaacatgaggagaagcaagcaacaagcaagtgaatcaataattattcaaccaccatcatctgcacattagttgttgcacttttcatcttttgtattgtattttggattaaggaattgtaattaatcttaatgccatattttgtgaaaaatagaaatataagattttataagtggaaatattatggcaatatattgtaatgaatgttaggtactgttttataatcttataaacaccttagatgacatattatatattttgtcaaacaatccgtacttgtgatacaaaattaaaacattgccttgtgctttgttaatggtattagtagttgaatgttatcttgtatgatctttttgatcgcaggtttatatatttgtgaaacaccatatgttatctttttgctttctttatgatcttgtattagacaatttatgtttgaagcatattttgtttgagacatgttttgtttgaaaaaaagaaaataaaattatggcaactgtgtgattgtaagcgaaaatagaattacaggttttgtctcaattgacacaattttaattgtatctaaaacacaatttcaagtgtatcaaaaactgcaagtaaatatacctaagttgataatacaattgtatcaaaaactgtaagcaagtatacctaagttggcagtaccataatgcattaacaatttcagttttgatcacaaaaattgcattaacaatatcagttatacaaacacctaaaccagtaccatatacattacaaactcaataacaatggcaatacaagtgccatgtctattacatgatattgaaagtaggggtgtgcatgaatcgatccaatccaatgagaaccgaccgatccaatgacaaccgaccgccaaatattggatatccaattgtga

SEQ ID NO: 59995 - DNA, 695 bp, Cannabis sativa
tgcaaacgaagcttgtaaatatataagtgttcttgatttacttttcgcatttaattagttttgattactttaattaacaatttctagtggcaatctattaaatttcaatctttcatatatacttaattataaacaaaataaatgagccatatattaattattgtacacaaggaaaatatgtcttcaaatgagatgaagaacgtagctatataaatttacatatacaaaaatatatcataatgtacctagctagatacatacatacatatatatatatatacaacatataatttttattaattaagtaattaaatggaggagtagtggagatgtttggtgagtttggaagagtgcaaaatattgccaaaaacatcatagaagagaaagtgagcatggttagggttgagatgtaaagacatgaaaccttgtccatcgtaaaaaaatctcaccatacttctatttttatttctactcttatctttaacatgatcataatctcctctccatgctttcgaacccgctccacttgttaaaaattgaattgaactgtccatgtgttcacatatatattagcgttataaatattatatttatttatgtactttaaaagcttatgtatattctctaaaaaaaactataatatagtaagtctacaatgcacttttatttatttattatttttcataataacatac

SEQ ID NO: 59996 - DNA, 871 bp, Cannabis sativa
acacagtaaaaatataataataattgcgccgtgtaacagtaaaaaagaaataaaatgggaaatatcagtacaaggtgtaaatttccctattagaaatcttaaaatgttcaacactatacaaaaaatttagtacacattttcaatattcttatttatccctaataaaagatatgtgcatctttttcctttctcaaattttaggttcaattctgttcgatttagtttttataaacttttttttttagtttttaaaattaaaaaaaaatcttctaggagtgtttggataaaaataattttttttttaatttaaattttttttggaagaagttacttttcaaattaaaataatttacataatttttaatttactcacgaaatacttttttaataattactaaacactttgaaaattattttttattaaaaaagatttttatataatagttatctaaacagtaaaaataaatagggtaaatactattttagatctagtgttttacaaaagttaccaattggactccttattttgttaaatgacaaaatagaccttgtatttttcaaaatggtaaaaataggacttgagcttaatttttgacaatttttttttaatataacgaacttgaagacaattcctaatttaaacagttttatcataatactttagatcagattattattaaattttattatgagaaaaaatcatttcaaatcctatttatactattttagaaattacagagtttattttatcatataacaaaacagatagtccaattgataactttggtaaaatattgatgattttatataaaaaaaaaagatgtctaatattctaaaaaaaaatggtgattttatagaaaaggggttttgg

SEQ ID NO: 59997 - DNA, 6085 bp, Cannabis sativa
gttttctgtaatttatgattattatttctttaaatttgcttaattgaaattcgtttgttcaaactccttgtctacgttaacgatgatgcacttgaagcatattatttgcggaattgaagatccgaacctgaggatttcatgttgttttcttcgtataatttgagttctgagtgaaattttatctttttaatgcccaaacgatgatgcatttaaaacagtttcttttgcggattgaaggtctgaacgtgacttatttatgttgttttatagcatatcatgttaatgcataaattttactatttattaaagttttttctgaagttgaaacaaggttaagctgttgtgatcactcacttatcccacacccacccaactatctatctcatttgaacagtttcttatttcatctactacttggtgaatctgattatgctttttcattacagccttccagggtaactattctggatggtgttcgatggctacaggagtcgtatatactttggtggaaatagctgaaggtgaaaagttattattattattattattttgttttttggctctttcttcttcttgtttttgcgatttgtgaaattcttctgattactttttctcaagctaaagggaaaagtatatccctctagtgttattgtaatgctgaatttcttctcttcagggtgattatattttattttttccaaacatatcaattttgtgtttgaaaaccatattacgaaatgttagcataacaaatatggtatcacgccacttgcaattgcaatatagaagggggaatgaatgaaattagagaagaaggaatttagcatttttttaatcctagtgtctacagcatactcggttatcactagtcaggtactcataggatgggttacgatgatgaaggaaaataagagatgaatctatctagttcattatattattgtgaatgaagggtaggttaggatggctgggtgttaaagatctcaagtagtgagatgtagggtgggacaatgaacctgattcgtaaggggaagacgaagaactgtgatttttctttgtgttgtttaatcagcttacttactgtgtgctttgtatttttacctgtacaattgtgagacatggattaaatagctcacatatcttgtattgtataaatgcagaagctcaatactcaaccaactgaatttctggcctactaataaagatgaatacctgcagatgataccattatgtatggctcatggtgagtaactttaacatcattttctttttagaatatttttccattttatggttctgtacagtgttcttgctttgtatttcaatgcaaattttcagtgttgtacatgtaaattattttctatgcctgatcagtgatcagatcaacactcaattacaactctagagaaggaaacctgttttggtgctttttaatgtgttcaatctcctataattggtcttattggttaactttatgtccagctcattgagagtgctcactgaagtcctcggaatttgaaattgtttgtaacaaataaaaatcattaggtattacatttcagtaatgttgcagactatgttactaggttatatgttttgctaaatacctgaaggaactttctttctctttgtttcattttaatcaggttgtttgttggaagatctttatatatatgtgtgtgtacatatttaaatgtatgtaagttttgatctgtgtatacccaagatgaaatctcgttgaattttctatgatggatttaattttcatcagtttgtaatttgcattacctgataagctcattgttgaaatacatttctctttattgcttgaacacaatttgggaagtgaggattcatcctcttaggttttattttacttccaatgtttggattatagaggtctaggcacttaaatattcgcattcttgtataagtattatggaaatgatggtacatatattgcacttaaatattcacattcttatataagtattatggaaatgatggtacagatattgcaacttgaggtcatagatatgaaatgagctgtttacctggagtgttactggacgattgccatactcaactgtccactggtgtaaagttctggcccactaaggacgaatactttcagtctattctttatgtatggacatggtgagttatttgaacatcattttacatctaatgttttttcttcttctttaatttataatgttcgtaatacatttttgtaattaagcaacactaaaatccaattaatggtctgcacaaagaaagtattgtcttagcccaatcaagacatgatttaattattatctaatacttctttcaaaaaaaaaatatcatcataatccaaagtttagtatgattgattacaaattgatgtatctttgcatgaattggcgttattgttgtatgcactatttcaatgtaaatgaaacttcactatgatacttgttgattgattctgtacctttgtggcatgtgcttcctagccgacttagcatgttgaatggtaaactgaattactgtatatgcagtttttcttaacatgttatttgaaatgtgcaaatgatatggacattatttgtctatgcaaatgaagcttttctctgagatcatataagatgatggggtgcatacattctaatgtaatttgctattgttgttaaaattaaaccaaaataatcaagtcaatagagtcgttgctataacaacaaaggagaggaaaaaagttcataaaaacatgcttcagtttctgatcatcttgaattgtgacatttcaacctgttaaatccattaatttttataatctacagttgcatttagtttttactgtattttggtttatattcacaactgcagcaaatctactcaagttaacttctatcttgttttgggcagatggtgtttactcaatgttaatgacgactcttcagatgagttttacagagtattacagttttgtaatgcctgccgaaaggtttgggagcttcaagatgttagaatctagcaagcctccgccctcgaagaaatctcgaaaagagcggactcggagaaagtcgtcgggattgacaactcccactgtggttatggaggaagaaatttggaaagatttccctgaagacctttttgaagctgttattgcaagacttcccatcgtcgcttttttccgctttcgatctgtttgccagaaatggaattccttgctgagttcagaaagtttctctgaacagtgtgcccaggtccaacaagacaatccctggttttacacaataacccatgaaaatgtgagtgctggagccatttataatccttccctgaaaaagtggcaccatcctaccattcctgctcttccaacagagaccattctttttccagttgcttcagccgggggcttagtctgttttcacgatattggtcataggaacttttatgtgtgcaatcccctgactcagtcacttaaagagttgccagcaaggtctgtcaaagtatggtctcgtattgctgtggggatgactatgaatgagagttcaactggcggtggttacaagattctatgggtgggttgtgacggggagtatgaagtctatgactcacatagcaactcttggaaccatccaggaaatatgccctcgaatattagattgccactgtgtctgaactttcggtcgcaggcagttaacgttaatggcaccatttacttcatgcggtcggaccctgaaggagttgtgtcgtatgatctgttcacaggggtttggaagcagtacctaattccagccccgttacatctgagtgaccacacacttgctgagtgtggaggccggatcatgctcgtcgggctgctgacaaagaatgccgccacttgcgtgtgcatatgggagcttcaaaagatgacgctcttgtggaaggaggttgacagaatgccaaacatctggtgcttagagttttatggaaagcacattagaatgacttgcttgggtaacaaaggtttgctcatgctgtcattgagatcgagacaaatgaaccgattggttacatataatgtggtgagtagggaatggctgaaggttcctggctgcatggtgccacgtggaaagaagaggcaagggattgcatgtggcactgcctttcacccatgtctgactgctacggcttgattcagttctgtgattcttacagctgaatgttgagttgaggattggagtcttctcttgccgcatcataaagggtggctgaaagcttgaacattagtgtgtttcagcccaatttttcattattgttttaattaagtagacatataaccaacatttgtggcaaaaattatttccccccttttgtggaaacttgatgaaaaacagtttgcattatttacttcttttaatttatgtattctcgtattaatcttttcctaggaagataagtacttgaagtctaaatatcgtcaccacgaactacgaatgaaattagttttgaagtcgtagtgatactagtttgatattaggatatgtagaaaccacatctacactagcgggcatatcacaaaccattcacaaatatcatcaaaataataaaccatagatgaaaggtaacaaaatgcagacaacagacgaacaaatggggtctgtttattaatatatatttaagctcttcataacatgtgtaaccctctggtctcgtaaaagtatattaacttcctaaaacaaattaaattaaaccaaaaaagaaaaaaaaatgtagaagacgataagtaacacttcagagtacggtccgcgttgcaattatgccatgcctccggttgtggctgtcctgattatctgaaagagagctgttacagagaaacaattaagttggatgagcaataactttcactaagaaaacaaaacaatggtaactggaaaagattgttttaatcaattaagtaagcaatatatgagattgagtcttacatgatccaataacaacgaaaatgaagaacccaagaagaatagggccaacagggtagtcctttcccttcttggcggtggtctcaggcacagatcctcttctagttatgttcttatcgaacttctccaccttcctatctgatagacgccttgatgtagtctgtacacaacaaccaacaaaataatcacattaggtcacaggagcgaacctaaaattacaatgtgggaaaggtcatttttcgaccccaaatttacaccgacaattatacaagttattagtttggggaattctccatattgaacaacgatccatgtaaatcaaagctcaaagcaacccaatttgcaccgctaatacgaaatcatgtgacctaaattacaagatctatgaatctaatgtctaaaaacactaccgacattatggaattcaaactgatctgccctaattaactaaataataatcctaaacggaacatataaactgaaattctctatcaaatagatcagatcaatatcaatttaaattaatcagatcaagtggttaaaaacacctatataatacaactcaaccgaatatttgaacattatcagagatcaaagtttgaaactttaccatggttacagccgcaataaaatagatcctggttggagaagaagagagccgcaggcgattcgagtttctcggtcttatttctctctattttggatggatcaatctttgagaaacgtgttctgtttgttgatttatagcagtgtgaggcaccaagtcaatttcgtcagaccacgtaagtttgtatacgtgttcttacattattcgtccttctcataccatattacttagctggcattacgcgattcaagctgagctggcacagactatgttgtttaatttttagaaaacttcctgttttataataggacttcttcaagggtgcacccaattttataatttttcttttagcttttttttttttaaacaatttttcttttagtttaaacgcttttgatatcaattttttaattaattttttattttaacaattaaaaaaataaaaatattttttaagatatatatcttataaaattattttcactttttaattttttaattaagaatttaaattttaaaaacaaaaaaa

SEQ ID NO: 59998 - DNA, 1370 bp, Cannabis sativa
cccctcgctacaatgtgggtccgcccctgcttgtacatacatctcaaactaaataataagttaaaatagtatttaactaatgcttcacttgggcagcagagtgatacataatttgcttcaaatgggattggaaagtcaggatatatatagaaagcaaggtaaggtgtatacatccatatgtctaggtcccaacatatgggaataatcaagttgcatttgttaaaagaatagacgagtcgtatcatttgataaaagtgttttcattttgtgtagtcttggttaccaagtgatgccaatttcagtccaaagcaacataactttaaaactatatatgaattattgaaaatggtttgactttcacaaagtgccacgtgaaacccaattttcaatcatcatcttaagtacacccatggtgactataaatggaggagactcaacaatgaaaaaatcactcactcataaaccccaaagcaaagcacataaagaaagttgtctcaaatggctcaatatagcccacatctcattttcattgccctcctcttagggctactccaaataatggttgctgcagctccaactccttatccaactacccccgaaatcccttatcctccaacaataccaactgctccaacaccaacaacaccttctccaacactcccaacaccatcacctcctactatttcaccaccaataacaccatccccaaaagctccaaaaccatcaccttctactccaaaaccccctaaaccaacaccttctccaaaaccccacaaaccatcaccttctactccaaaacacccagagccatcgccttctactccaaaaaacccaaagccatcacctagtactccatcacccacaaaaccttctccaaaagtcccaacaccgtcaccttatcctccaacaacaccttcaccttctccttctccaaaacccccaacaccaacacaacaccatcacccacaacaccttctccaaaaccaccaacaccatcacccacgacaccttctccaaaacccccaacaccatcacccacgacaccttctccaaaacccccaacaccatcacccacgacaccttctcctaaacccccaacaccatcacccacaacaccttctccaaaacccacaacaccatcaccatatcctccaccatctcctactactccatcaccaacaactccttctccaaaacccccaactccatctcccaccactccgacaccatcacccccaaaaccatcccccactaccccatcaccaacaccacctacccctactccatctccaccatcaccaacaccacctacccctactccatctccaccatcaccaacaactcaaacaccttatcctcctccaacccaa

SEQ ID NO: 59999 - DNA, 2972 bp, Cannabis sativa
caaaccatgctcactaaaattaaagaaagaaaaactaatatattctaaaaaatgataaaaataaataaataaattactaaacaactaaggaaaaaaaaaaactagatagaaacgatagttaatctctccccccacacttaatataagcattatcctcaaggctcaatcaaataaaattaatgcaaaataaatagaaaagggtaaaaaaaaaaactcccataagttttctttgtttaacgtcgttagcgcgactgtatgttgcgctcatgtgattttcacgtcgggtcttctgacaaagactcattccttatgtatttatcaatggaatctaacacattatacttaattactacaccatcgaattccattgtaagtatccatgctttcatatccaactttttattagtgagtaagaagggtctcccaaataaagttgatgtaggattgggatcaccctcatcttccatctcaattatgtagaaatcacctagaatgacaagtcaataagtctacacaaaaacatcttcaactatccatgagggataaagattagtctgattagtcaattgaattaaaacatgagtttctcttaatggaccaagatttaaagaagcaatttggaataagacatcatattaataattgctcctaaatctatcatgcaatgatcaaacctggttttacaattgtgcattaaattgtacttgttttaggcaataactttcattggagaataacaacaaccttctccctcacacttactttctcaccaccattcaactttttctcatttggacacaactccttaagaatgttagcacaatgaggctcttctttgattacctcaaattgatgggcccctatttcttagattttttaaatctacatggacaaggtggaggagtgacataagttggtacaattattttgtatggctttttcagtgatggtggaccaactaaagtaggagattcaacctttggtggagatgatccttcaaggaataaattgttgactcctttagttgaaatcaaatcattaacttcttggtgtggtggtaattcaagttgtgtaccactttggatagtgatgccattgacattctccattgggttactctcctcttgtgcaagaaaagtatttgaagtttgaatttcatatcactcatagatgttgctattgactccacaagattctctaacttctgcaaagattgttgaaggctttatatcgtttcatgaaagctttgctgaaactgtaaggtattagctgctaacatttcaatcagctcagcagtagttggcttttcactatatgctgcaacatgagtaggtggttgaaactgtgcattattctgctccatctgagtagtagaagccaccaaagtgttgagcagatcagtaagagaatgatcttgatcttgtggtgctacaggaggatagtaagaagttggttgaacatattaattgatcccactgtaggaagtgctagaataatctccctattgttgattgcatgtgtaagtgtcgtagtaggaatcatattgatacacttgtggcgagatataatatggatcacagtattgttgattgtacatcaccatatttctaaagaaagatctgaaaattaaaaccacaaatcaaagaacaaattagtaataagaaaaaaaaatgaataacaaatataataaattagtccctgacaacagtgccaaaaatttgatgcatgtcgtttaccacaataaatttactaatttttttctatattacaaatgattttagtataatggtaaatacaagtcaatcccacgaggactattatcaatttattattcaaaaattaatgacaagaattagaaaagtaggttttgatgattagaataaaataacataaataaaaataaaattaaattaaaagtgagactacgatatgaggtacatagataaaggttattcttcactctcaacaatcattcttaattcttattaatgaatgtaatttcaatattctaatcaaactattaatcccgtaaataaagctgaagcagtcaaattatcacaatctccctattacatgtaatcaaggtgaaatactcaataattaactcttttacctaagcagtaaatccacaaagcatgcaatttatttaacttatataaagctttaagattcatagagatagactaatctaggaaataaatcaatgaagaataaaatttatttaacttagattctattcttcatcacaattaaaaatacttttgataatattagaaatcgcaatttatcacaaacacttagaatcctagactattaggtgaataacaatcctaagatgacagtagataaaagtaaaacctaatttagtggccatctaaaaaagattaaaacaacaatcatgacattgaacatagaagaataaaaacaatttgatataatgaaaactagaaattaacattcaataatgaaattaaaaattcatgtctcggatttttaaataacccttaactaaaaggaaactacttagaactagacattataataaaaatcataataaatagtaagagtttaagaagaaaaaaagaactatgatgaagaacacttcgaagtcgtgatctccgtctcttccttgctctctctaagtttctatctcaatttggtagctctagggttctcaaatccctagccaaaaaggtcttatttatagtgcttgaaaatatctcactaaaacaaagaaatctccctttaaaaaaaataaaaaattacgagattgcccagtatttgcttcctcaccgcggccacaaggttgcttgccacggccatgacttcctgttaaaaaaattatgtcatatgattagtatttttgtcacaactttttcaataaaactcagaattggacgattcaatatgtttcggaaagttaacaacgagatttaaaacttccatgttgagctccaagtctagttctactt

SEQ ID NO: 60000 - DNA, 2725 bp, Cannabis sativa
  modified_base (2685)..(2688): a, c, t, g, unknown or other
gatcaaccctttggctatgtttggaaatgtaatcttacttttgtaataacagttttgagacttgttgtaaaaaaatttataaacaggagatccccgtattatggtggtattttgtatgaaatttttattttaacttaatcaaaagcctttaattaagccacacttttcctaatataatagattagttagaaataagtttgtaaaagcacacacatggcgtccctgtgagtcagggcgtgacatcatggtattagagcgaccaaggtttaatgatcttgaagactagtttgatatgaacattggttgcgatgactcattagactcatagtttagtaagtgctaattgttacttaattaatagactatttgttgattgtttgaattgcctgcttatttgaaatgtgtaagctgttagagaggcatgataagttttgatataaaattgttaattatgtatatgcatgtgcggtaatacttattagcattattctacttagaaagattttaacgatggaaaggatcggtcacgagtgtactggaaggtgtacccgaggcgatctagtaaggataatcgcgagtttaccaggctcgaagttggtggtgtgagtatgaatcctccactaccacaagattgggaacaaatgtatgttatgatgtaagagatcatttgagttgcaaaggtagcagaacttacacggttgatctcgggcaacacggtgatggagtatgacactaaattggaccgattggaaaagtttgcctttgatgaagtggctgctaaggctaggattgctaaatttactcggagatggaaagagcatatcactctggatgtggatatagtttccaaacaattgggaattgtctagctctatgctcaggtggctgagctagtcattactgttaagggtgcgaggactaaatctaaaagagaaacggtatgaggaggagtcatgagggaaagcatctaatgttgaatttgatgagagtgttgaccctaatgacccactagttacaggtcttagtaagagaatttatggtaatcaagaattttgaaactatccagagggctgagatgcaagagacactatcagggtaaactttaaaccaaagcctacttcgagggtaaagtagtaggccatctgaaaaggaattgcctatagttatagcgatcagaatataagaatgataacatatttgttcttgctcgggtgtttactttgacttagggagagggtgatgttggtccttctaccgtgataagttggattcctattgatgatattttgttgattgcttttattggttctggtgcaacgtattcttatattctgagaaggataattgaaagtttgtataaatttaatgatgtgttaccaagtggttctggtaccttactgcttactagagaacaagttattttccaacaggtggtttaggtcccttccagaattgtggaggaaagagaatggttggttgttttagttgagctaaaattagaggattttgaggttatattaggattggactgacttgtaaagtaaaatgcaaccatcgattgtgaaagaaagatggtaactcttgaaccagaaggtgaggaccgattcatgttcttgggcaaggttcaagggtttcgaattccattaatgtcgatgtttaaggcagaagatttgtaatggaatggatgtattgacttttaagctagtgtggcaaatattacaaaaggaacatcagtgggatggggacataatcttgtggtccaagagtttctagatgcctttccagagtagctaccaaggttaccaccgaagcgagaatttgattttgaatggaattgatattgggagcataacctacatctaaacttctatattggatggtaactgcagagttgaaagggttgaatgttctgttacaggagatgttgggcttgaaattgctagaccaagtacctaatcttgaggtacaccggtattgtttatgaagaagaaggacgaaaccttatgagtgtgtattgaccactaggagttaaatgaattaatggtactgaataagtatcctttgccaaggatagatgatatgttgatcaattatagggaaagaaagtcttctctaagatcaatcttcgatctggttattaccagttgaagactcgagaggaggatattcccaaaatagcttttcatacctgatgacttcatagttgtcttcattagtggcattctgatttcttccaactcaaaggaggcatatgggaggcatctttggatggtgttgcaatgtctctgggagcataagctttatgctaaatgcaagaaacacgagttttttttggccccaagtaagtttcttagggcatgaggtgaacatagatagtatcttgatagatctggtaatgatcaaagcagtttagatttggcttcgagccaggtttacaactcaggttagaggttttttgggattgactggatgctacggaatatttgttgaaggctttctacgcccttagcggaaattactcaaaagacttgaaacagaggttaattattacatcagtgttaacattgccagtcagtgaggagaaatttatgatgtattttgatgcttctaaacaagggttaggttgtgttttgatacaatccatgaaagttattgctgttggatatattttactaggatctagannnnctaacaagtatgtttaattaacatcctaatatgaatt

SEQ ID NO: 60001 - DNA, 1153 bp, Cannabis sativa
tattatttttgttttatttatttaagcttctatgaagctttttttttctctctgtttttttttcttctcctctttcaacgctgaccctttttttattcaatcagctaatgatctctattttttaacagtcagctaatgttaacattttttttcaaccagcttctttttttatcttttttttttcctctgctctctctctctttttcatcttttttctgttttctcacattaattattttatctttatatataaatataaatatatggcatgttctgaaactattttattttttattttttaaaattttacttaacaaaatcttgtagtttcttcatggtttttgattaattaatcaaaaaattgatttttaaatagttacggaacaataccataataagtataactctatacattacttttttttttttaattttttttcactctcacaaaattttattttattattttttcaaaaaaaaacattgcaacttgctcgcacttagttgatatctttttctctcttttattattttttactactcacactcaaactgatgcatgcttttttattttttaattaatcacattttgtaaaagaatcttaattaattttttttacttgcacacctttagtgatattttttaacactatttatctctcttacaaaaagaactaggagcactattcttatatctttctctcgctcacatgattaataaaagtagtacttattttggatgttttgtagtttattcaaaattaatttatgaatgatatgcatattgcaacaacgacgatatcttgtcattatttggttattttgtagctgtctttttgttgttttatagttatttttatgttttttttttttttttgaaaataaaaactgtaatacattgaaaatgcaagtttaaaatacaacagtttagagaggagctaattcctccaaccaaacacaatctgtgtcgacctaaagagcatacttagctagcgtatgagcataagtattagcagatctaggaacatgggaaatctgcactcttgggaaattggtcacaagattaggaatatcagataaaatacaattaaattcagaaactaaggcattagaagattgcaatcctttcgccaccaaaagtgaatccatttca

SEQ ID NO: 60002 - DNA, 773 bp, Cannabis sativa
ggcataaaacccaacagtgtcaacatgggcaataggtcaagtttcaggctgccaaatggttccatttgattcctggaaaaacttgtatcttaatatttgataagaatagagaatatgcctagaattcatctcgaaaaaactccttagaattcgctctggttgacaaaatgtcaatttgggtgctggccgagcactaggtgtcaacttggacactgggccctatttttagctcccagatgggtctgtttcttccccaaaagtactagtttccttgtttttggtgaagaaaaatatataatgtgaacaagatagatctttagtttgatgtttggaagtggcccaagttgacaatatgtcaacctaggcgctaggtgcctggggcacctggtgctacaggtgctcacaaatgaaagtgctctaaatctgatgttgctctctcaaatatattcatgacatgtctaattcatgtcccaatataaagtttgacccatttgtactaagacatttccagaaaattaaacccaagttgggttgtcagtcttggtgctaggtgaaaccctaagcgcctgtgttgatttctgtggtgctgtttcgtgtactttcaactatcgacctttgtacttggatgcttcacgtcttttgttagtttttatggtccatattagggttacaaaaaattgaagcaggtttgataaaaaatagttttatttaatatgaaccataagcccaaggatctcaacataatatatatagattaaatctagactaatgaa

SEQ ID NO: 60003 - DNA, 965 bp, Cannabis sativa
agagagagagagagtttatcagacacttagagcttggaggcaggtttcaaacttagatgcaacttaagtttctaggctaaggttaaggcctttatataagaggcctaaaaccctaggttacagtttaaattccttaatacttaaatagtttattagatatttataaaagaccaaagtgcccttgattcaagatattattcagccaatctgatgggcttttagggcccaatttgcagcccatgtgttggtgtccacgtgtagaagtgtctaggaaagtttacagtgcacctcttggtcggctaggcctctgtggaggccaggctggccgaccatggtgtagtcccaaggctggctagccagctcttgagggggagctggtctgtcatctaatgctcgtttgagtgtcgaggtctccgtttattcaggtgctgacttgaccttcctattggtgagttttactgccacgtgatactgattttgtccatgtaagcatgccacgtcatgaggacaaaaattgagataatatttgccccccaagtccttatgcaggcgtctgtatggatagggactttaccaactatgttggtgcggtcgagaattttgtagcctttgctgaataaaagttgatacgcttttagccttttactttttcttgattgtctaatctcattgtagtagagaaataactgctttagttgcctttatgatgtgtaggtgaggtaagtgaagaaaaggggtccacatgtattacataagtgacttttggggggaaaaccttttttcacttctcacttttaacttttcactttctctcactagaaattgctctaggaaaagctcctccttctctctaggtggtcgaacccaaaagcatcatttttcctaggatttttgcgtcatttcaacaatctaagcttcccaccttcttctccaacgaaatcttgttgtgggtaagctttctattc

SEQ ID NO: 60004 - DNA, 903 bp, Cannabis sativa
ttctcatatatttcattgatgaaacagctatagttaattgtgtccatatattctttgagctcatcgcattaaagttttcagcttttgatgaaaaaaccacttaagttgaaagggttgaaacatcataaacaatgtcgttgtcaccactcaccaacaagtagatttggaacaaaattcaggccatataacttagttgtgaatccaagcttgttgttacttaaattttgtagtttttcttccatatttctttggtaggtattaagctcaagttcaacatataaaccactataacacaagccttgaaaatggaaaatggaattaaaaagaagttcataaccaaaagggttctcataacattattagattttaacagtgtaaacatgaactttcttttaaaagtacaaaaaagtaccccaaaacgctacatgccatatataatgtatatcactacattatacactactgcactatatatttctttctattaacttaggcagtagccctcctctcgtaccggtcctcgcggcgagaggaagtggatgaggtcaagaggacggtttcctctcggttgtacttgaggttcctggcttggtctctcgagatttggaaagcattggctaggactgcctcgggaagagctctgatgaccgaggtgcgtccggccaaggggctaacccatgcgttgtcgttggtcttgaatgacacccactcgaacccgtcgctgcttgcctgtttcaccacggcgtggttctgtggcactgtcacgatctggccttgtctcacttctccgtcgaagcacttttgtcccatgtggttgaccacctggactctagcgcgtcccctcaggacgtacatcacgctgtgagcgttcacgttccagtgtggggtgtagatagcattctg

SEQ ID NO: 60005 - DNA, 1274 bp, Cannabis sativa
gatcaaaagtttttatcccactttttattttttaagtgtaaaaagtgggataaaaagtctcatttgttgtagtgtgggctttagagttagatttttaccacttcatttcaactaatgaaactatagtatcttttctaattttaccacttatctcatttacttatttaaacaacaattttattttaatacttataaataattattaaaaaaaataattttaataaatttattaattagacccacaaaatgtactaattaataaataaacccctatttctcttttcttctcaaaattgtccaaacttggtgaaaattctcaaataagacagtctattttcgaattccaattgacttgataaatcaatcaattgagtctacaagatgatattatctcagaaaaagtggggaccatgagcctatataactaagctcctaataagtagatcttgaagtttacccactaaattttttaacttattaattcctcctgactcctctatagattcgaaattttactcttgattacataaaatgctctatataccaaataaatatgatatgaatctatcattgtttcaatcacacaaattattgatcttctatagacgttctacattgagtagggacaaaattactcttttacccttcaatatattttacccttaaaacacttagctacttgtaaataaaattttgataaactaatataattaccaaaatgagcactctatcatttatcatgttaagtcaagctctaagaaaactatcgtttcacttctaatagacatagaagctataaatgtccatctctatgattgatactcccactcaattgtactatcgagttcccaagatgtaagtatgcgctcgtcctagggtaagctagtaatgcacaagtcaaagaactcgtgcaatatattaaagctagagctcaaccatctcagacttaagatcaaatgatctatgatcaactaagtgatattaacttagaaaagatagggtaaataccattttggaccttgtgtttagcaaaatttaccaattggaccttctattttgataaatgacaaaatggaccatgtattttccaaaattgtataaataggaccctaaactaattttttgttaaaataaaacttaataataatctaatgtagagatgttatgacaaaactggttaaatttggtatttttgttcgtattaaaaattgtcttaaagttggttatattagaaaataaaatttttgaaaattgagctcagggtcctattttta

SEQ ID NO: 60006 - DNA, 1091 bp, Cannabis sativa
gacactagaaatggaaccagactggcacccgagattgggttccggatctggaccgagggcttggacaaaacgcgtagtcggtgtcgggatttcaatcccagccctagactcgaaccctgtgaaggaccgaaacccacacccggacctgaacctagtcccgaacccaaaagtgaacccgaatccataccctgtgacccaaaattggaacaaaaaccagaagttgaccgggagtggaactaggacttggacttggaataataactgaaattcgacctagatccagatctgtaaccggatttggacctggactccaaatcatacctacacctgaattaggagtcagacctgaatcccaacccaaacctagactcgggacgcgaacccgaacctaaactcagacccaaacatggaagcacactaggacacagaacctgggtcgggacctagaaccgaacccagtctcgatcctgaacccaaattcaaaaatgggacctgaaccagaacaagaccgagacccgtgacagtgatccaggttttgactcgggattcgagtaacggggcccggaacagaccactaatcattgtctagacgtaggacttagactaggactagaacccagacgaagaaccagacccgaacttagacctagacttggtacgcaaaattagaacctaaacaagaatcgccgaacccggaccctagaacaagactaggaccttgaccaggacctggacccagacctagaactgaacacagacctagcctcagactctaactgagattcgaactcgtgcatggacacggtcgtgtacccacatcggaactgagaccccaaccaggacccaaatttaggacccgatcccaaacacagacttccacctagatagggatccagatacgaacctggactcggaccaacaactagactgggatggaaatgctggacctacatctggaccgagatcctgacccagaccaaaacttgaacccgcactcaggacactaacttggacctagacccaaacctagacccagatccgggtccagacctggacacaaacccagacacaaacttggacccgaactcaaa

SEQ ID NO: 60007 - DNA, 1016 bp, Cannabis sativa
gatcggtgactcctcctcggctcctccacgagtccgtccgttcgagtcgcccaccgccgcaccactccgtcgtcgcctggcacagcggctgtactgtaactctggtaatctttctctcacagatcatctcaggaggttatatataaatatatattcactattcattatcatttcagtttttttttttttttttttaaattcaaattcatttcagtttagttaatttttaattatgtaaatctttagtttatctctaaatctttaattaattttattatgtacctaaatttcacactcatttggtgaaatgaagtggctttactggttcgatattggaagaccttcaagacttgctttgttttcaattatatgtctattaatacggactcttattttttgtaaacaactggtacatgtttgcgaagtacattttacttacattatattttaccataaaaaataatcttttcttattatgaaattgtatagacttttggcctatagttgttaagtttgcacaatttagttttttagccactccctcaattgagatttatcttgtacatgcattaattctagtactatattatgatactgtgttatatgtgtagaacttacttgattttgaaggggttgaactttctacatcaataagcttaaatgaaggtatactgtttatacgtctttctacttttcattgctcatgtagacaagccaatttgtttcagcatcagttttaacttctttaatttttgacttgaacagttgatagtgtaatgaaagcatgattttacaatagctccgcaaacctttattttcgagataatgccatcattatcagtttaggtagatcttttacttggtgaggcactgagccttctaatggttatttattaatattgaagttgtcacttctaatataataaataggaataatgtaattaaaaggtgtatgggtggtagtgaatgtgctagaatttttggtgcaaataaaaaagatgtgaaatggtatttcg

SEQ ID NO: 60008 - DNA, 1365 bp, Cannabis sativa
  modified_base (512)..(516): a, c, t, g, unknown or other
gaggttatttgagttggtttagaacttattgagtgttgtttttgtgtttgagcaaagttagaattttgcttgatttatgcttgttaaggcctagttaggtggtctaaaagttttggatcagtttggggtcgatttgatttgttaagaagggtttttgtggaaattgcactaaatcgatcgtttggttcacgttggacctataggaatcggtccaccggttcctcccctgtcaaccccacagaactgattttccggttgggaaccgatctaccatttgtggcattttagggcaccctaaattttcttgtttttacgatatttacgatatcaccatgttaaccatcgatagacaaacttttagtttttattttaagtccccaaaaagtgatttagcatgtgactcacccgttttacgaatattgtgacttaggggccagtaaatcatcgagcaatagctccactcaggttgatcgacacacctgaatttaaaaacgaggtaagattagtataannnnntgcatatgtgattacatgtttagtttgcatatttataaagcctgttagattatatagatagcggtatcaatatacgtagagttacattggatatcgataaatgtatgtgtggcttaagtattgattgacgctatcacatcagtacgactatggtaccgagtattggctgatgttattgtcaatagtaccgtcttatgaacgttctaaactcagtaccgtgtaggacgtggggatagggttgtggttggttgtatgggtgcctaattttaatccacgttatatttatgattatgattatgattatacttttcttactgagtctgtcgactcacagttactgtttgcatgtttaggtaacggcaaagctaaggctgagcaacagtgagtgcgggtggatgaagattgtacatggcaggacggttaggcttggagcgtacgattttcgggacagcaagccgtactttgtattgtcgctaggcgacaaattttgtataaaatattttgtaactcaactgtaaaaatttaaaatatgggatcctggttatagataagttactttcttttaattttaaggagtattttaataaatttttaaataatcacgattttcaataaacccatagattatcaatggactgcacgttactataaaatcatgataacacgtctaagctagtagggtgttacagagtacatgctcacccatagcaagtcaagtaatcaatcatagtgtgtaagactgtgaagaatcctacatttgaaggagaatcgggctcagatcttgataaaactctacgacagaaaggaacaggattagagatttaagtaaaaagatgttgggttttatgc

SEQ ID NO: 60009 - DNA, 2272 bp, Cannabis sativa
  modified_base (36)..(47): a, c, t, g, unknown or other
  modified_base (90)..(114): a, c, t, g, unknown or other
aattcatacattatgtatataatcatgaaataaatnnnnnnnnnnnngcaacataaaatgttatttctatctttattaataagtaaatcnnnnnnnnnnnnnnnnnnnnnnnnntagggcacaaaacccaatagttatgatatgcaactcaatagagcaacattcaactggagatagcaaagccaatcataatagtctttagtcaataagtcatcccaacactatccatgtcatcttctaagatgaacgtctttaaaagattactttgatgtaatatttgtcacttttaattcaattgccaagtgagtttatttcatctgtttcatcatagagtaatgtttagattgtaaattggtcttatcaaaaatttaccagatagaatatgatttgagtgtgttttagtatagttcgaaattttgaagattggagacttggtgttcataaggaatgtagaacttattaaaatttagacctttgagtatcaataattgtaaagtgaagaacttaattacaaacattcaatagtaaacattgaaatttagatctttgagtgtatataattgtagtgaagaacttgattataagcaattttctctgcaatttggaatttaattaagaacatttattgatgagtacgagttaaatgctaatctacactaagattttcaagtggattgttgataggaatatgaatgagaacttaaatttgtatgcctttatagattgtaagctctttgaattttatttatgtctatatttcttgagaataattggtagaggaccaacatattatttattttttgtatgttagtcatcgtattttgtatatacatgcgcctactttttcttcttcttcttttttttaaaaaaaaaatatgtagaatcttattaaaaaatatattatgtagaatcttacaggagcataattgttttactctttgttttacctcaccttttgtttagcatggttctttacctcattttctaattcttttctataggcttattaatgactttattaaaaaaatacacttaagactataatactaaattaaattatataattatttatcgtaccatttttaattaaattaaaaagtacctaacataaaattaaatatatgtgtcttgcacgtaactttcttctagtatatataaaagtaacataaatacagatcaataatataatttaataataaaattatagttttaaaagtaactaattagtaaaaaaaaaaatataattttaaaagtaatttattggtaagtaacaaagatacatatgacatactattatctcaaagtataacttatttaaaaaaaaaattaatattgtagtaacttactttttgataacatttagtaagtcttaaataatataaaataaatatatttttagatagattagtgacaataaaagaaatatttttaatatggtacatatttaattttatttgagtttaaaaattttattattttgtttgaataatttataaaggaaactaattaatgattacttttgattttaaatatgttatttggtgatggtaaaaaaatatacactatttacatatcaaaaagatcaacttaataagtaattacaataatattatattttcatgtagttgttattttttttaaaattgtaaaaaatagaaatagagatagattaaaaaataaaataaataaataaatcaaaagaaagattaatcatcataaagaagtgagaaaatgacaaaaaaaaaagtgtgccatttgaggttgacaataacgataaaaaaaaataataaataaattgcgacataaatatttaatgtttcagatcttatacactacctaatgtttatttttggaggtaaaaatacttaatgttacaattctcttacatcgttactactatttccgttaacccataaatatagccacgtggagggttcagatgcattatatttatttttattttttattaaaacttaatattcttaacatcagaaactaaatgctacttgttctaaaaaaaaaaaacagttctcataacaattttcacatgatattggtacttcaattcgataatcatgttccatatactgcactgattcactcagttatggtaatttagtattgctaatttagtattgcttctcttttttttaaaaaaaaaaaaacaagtactatttagtttttgatattaataattttaaattttaaaataaaataaataaatataatgcatttgagccctgcatgtgtctatatttatgataagttaacg

SEQ ID NO: 60010 - DNA, 2396 bp, Cannabis sativa
catcattgattggcaaggttagcattagtgcagtatttaacctctgcttcaactcttggaagctactttcacatttattagtccaaacaaacttacattcctttcaggttaattccattaagggtgtagaagttttggcaaacccttcaacgaaccttttgtagtatcctactaatcccaggaaacttctaacttcagtggcagacttgggtcgaagccaatctcgaaccgcttcaatcttcacttgatccaccaggatagcatccttgttcacaacatgacctaggaagcttacttgaagcagccaaaactcgcatttcttaaatttagtataaagcttatgctcccgaagacgttgcaacaccattcgaagatgtttctcatgtgcctcttctgcatcagagaagatcaaaatgtcatcaatgaagacaattacaaaattgtctagaaaatatttgaaaacttagttcatcaggtccataaatgtcgtcggagcattagttaatttaaaggacagcatcaagaattcatagtatccatatcgggtacgaaaagctatcttgggaatatcctcctctcgaatcctcagctggtggtaaccagatcaaatatcgatcttagaaaagacggtctttccttgtaactgatcaaacaaattatctatcattggcaaaggatacttgtccttcactgtcaacttattcaattccctatagtcgatacacatcctcaatgttccatcctttttctttacaaacacaactggcataccccaaggtgaggtactctgtctagtagatttcaagtccaacatacctggtaattaaaccttcaacgctttcagctctgcaggtgccatctgatatagagttttagatacaggttttccctctggtatcaaattaatttcaaagtcaatctcccgcttcggtggtaaccccagtagctcctctgaaaagacatctagaaactcttagaccaccagaacatgttccgatcccatcaatacttccttcgtggtgtccaccacactggctagaaatgcgacacatctattccacaacaaatctcttaccttaagcgctatgattattagaatttgggatccttgaaccctgcccacaaacacaaatgggtcctcacccttaggttcgaaagttaccatctttcttttacaattaatggtcgcgtggtacttttctagccaatccattcccagtataacatcaaaattttctaaatttgattcaattaaattgactaacaattctctaccttctacatacactggaaacaagctcgagcttgatattcaccctgatggcgtctcttgcacctcgggcactctggataggttctccagttttcgtttccacctcgtcggaaaccttgattaccttagaatctcttgttaggacccgtaactggtgggtcgttaggttttttcttacaatcattagagttagcacccttaccagaactgacattagatgtttgtttccacaaatctcttctcatactgtttctcttccaaatttgatcctctgcaccctcagcagcaagggctagctcaaccacctgagcataagttcgaacaactcctggtcgtttagcggctacaactacatcccgagtgatatgctcttccaacccctgaataaatttggcctttctagcagcctcagtggccacttcattagagacaaactttgccaaccaatcaaatttggtggcatgctctgtcaccgtcatgctgccctgagttagccgtataaactcttctgccttagccgcttgaatggtttcattataatatttttcagaaaataaaaatccgaaaggcatcccaggtcatgttagctagattatgatcctgagatactaatttccactaaatacgggcatccttgcacaacataaagatagcacatccaacccgattgttacccttaacacgcataatgttaaagatggatgctatcattcccatccattgctccgccttaagtggatcaacaccaccttcaaacactggcagattttacttcctgaactgcttgtacaacggctttagacgatttcccacatcatgtggcactactaatggtgctagaggattaggattaggatttagagcagaccgagcttgctgctctctacattctctgatctgttcaccttgtttttggatggtctcttgcatcgcgatgtacatttgttcccaattttgcagtagtggtggatttgcaccctcaccgacaaccccgagccaagaaagctcgcgattgaccctactagatcgccttgggtgcataatctaatacacctgtgactataacttcccaatatctagtatcttccataccaaagtcaatgctaataagcattaccgtaca

SEQ ID NO: 60011 - DNA, 1126 bp, Cannabis sativa
tatggtgccttcgaaacaggttttaccccaggtgccaaattaattacaaagtctagctctcgctgttgtggcaatcacgataactcctagaaaatacatcaagaaattctcatacaactctgacatcctcatgcccaaatgtttcaggtttgctagagtcaattacaactgcttaaaatcctacacatccactgtgtaataaatctttagcctttaaaactgaaataattaagattcgagaaccttgaacagatcaaacataaataaatagatctttgccctctggctgaaaagttaccatcttacgtttgcagtcaatgctggccgaatacttggacagaaaatctattccaagtacaattagattttcaattataaagttaagtattttaactaaaaaaagtttaattttattttaattttttttaaataattttttaaaaattcatttaatatctaacttttattataaacatattaaaattcaatgatttaattttaaaactacgtaatttaactaaaaaagtttaattttgttttttattatttttttttaaataattagattttattaaatattttttttaaaaaaattatttaatatttaagttttactataaacatattaaaattcaatgcgtttaatttttaaactaagtaatttagctaaaaaatttaatttgttttttttaaaaattattaaatattagatttttaatttaataaatttttgaaatttatataatatctaagttttattaaaagaaagataaatattataaatttgaatatcttaatatttcatttagaattatcaaaatactatttaaaataaaagtttaaaaatttcataaaatgaaataaaagcaccattagttcaacttgtacataaatcataaaatttgtgtcacacaaacaaattgaattataatttatttattgtaagtttttggtagatgacaatcgataagacttgggtgaccatgaaaaattgcaagaatccagtttattgggaaggtctccaagtctttatggcacttgcgtctaatcacaaagattacgacagaagaatgttctatccttgtgttagatgtaagaagaccagactgcatcctttgaacactgt

SEQ ID NO: 60012 - DNA, 1817 bp, Cannabis sativa
  modified_base (48)..(56): a, c, t, g, unknown or other
agtcaccctcatcagtgacgcgcgttgaagtgtcactatacacttttnnnnnnnnncaatgtgtgtcactaaaacccaattttctagtagtgaacattaacaaattaatattcaaatctattccaaaactataaaatttaaagaaggagaacagagatagcttaccttgagttgctatcttcaagtcttataattttccctagaaggagagaaaaagagttggaattctattttcttttcctaatttcatgcttaaatgtaataaagggatcaattcctttattcatctcaatgaaaataaaccttaaggattattttggcaaattaaggtcaaattactaatttaccctctttcttaactttgaagtaacattgccacctatgggtattttggtcacacctaataaccccaaacaacagtgacaaacaaaatatctatctataatgctcgctaaaaccaagatactaaacattgtctaagtgactctataggccaaccgtcgcattccactattacccgaaatgaaaatatgaaaaatataaaattcatatatatcataattagcactcctaaaattcaaacatatctccaaaatcataaaaataataattaaaagtctacttttgaaattagaccctaattatctactaattctcagaaataaactaagcggtcattacatatacagtaccttcactttgatgtctcactacatccgtaatccaaactaagatcacatgcactgaagaacgacagtgaactgcactagcaaccattgattaaggattccatttataaaagttatcaccatttagtttttcaagtactagtaaagtagtaagggaatttggcataataaacatgactgaaaaataaataaagtaacataagcattatgcatgagtaataaatatcattttggaattacaataaacgagatgaatgagcgcatacaagtaaaacacataaaatcttgtttaaattatttcacgataaagcgctttgaaaatttatcatcgccttagggtcagtataaagttaatttcattaagcctatgggagatttctcatctttattttttttgaaacttaaatatctcatatttttttaaaaaaaaatatataaagtacaactttttgaccaagttaacaactaaccactatgaagcttagttgtgctttgtgagtgtatccctttattttagatttcatgacttaacttagtgtgtcgccttaagggtcgatgtcacactaaaatacatcacttcctcttattatagtcaagagataaaccttaagcaacagtatagataaataccttccttaggggggacgcaaacaaagtcgtctaaaggccagtctatactccatcgatgtttaacaataatgttaagaccacttaactttaatttggaaataaacagatgattagggtttaattatgaaacttgtatattagttatgaattattattttacggagatttatttgaattcagaattcatatgaaatttaatatttttgcatgttttgtgtccgacaacattggaacgcgacgtttggcaattagaatcacattttagtatttttagtatagcggggccacatagttagacattgggaatatcgagattagtcgagattttagagttgaccaaattacctcttggtggttttgtgactttttggttaagtggagggataaatggtcattaacccttaatattatcccttaattaatacataaaacttatttttaattttcattttattaaaattagaagaagatacaaagattactctctctctctctctc

SEQ ID NO: 60013 - DNA, 712 bp, Cannabis sativa
ggacaacttcttctagcttgatatccttcatgttgttagttgagatcctttggatatctttccagaagtcgctcaatagaaggattccccccagcatggtcgtatatcggccttcttctgtaaagcctttgaccttggtggtcttggccatgaacctctggatgtaatccttcaaaggttctccttgttgttgtttgacttcgacaaggttttctagtgatggtataagccttgaggacgagaactgagtgtagaattctcgagaaaactaattctatgaattgaatcttcctggagccagcttgaagtaccattattgagctatttctgaaaaagttgttgggaatatgcggcatcgcacatcaccagtaatcttctggagatcaagttgtatatcaaagtacttgatgtgtgctagtgggtcttcttgctcggtatacatcttcgatactggcatcttgaacttggacaagggcaaggcatttatgtatgtcgagaatagtgatccccttgacttgtctagcttaaggtttgaaggttttggaccagctaggcccttgatcatgtcccttatttgatccaacagtacttgcacagaagcatccattgctgcagagacttgactgactagccctccttggatgggctacagactcaaatgttctagggtctggtcggacatactctaggagagtgtatggtggaggccagc

SEQ ID NO: 60014 - DNA, 776 bp, Cannabis sativa
attgcataatactagggttttatgtgatgtacatggattatgttcaaggggaaccaaagggggaggactttagctatttctatgacataaagagcattggccatgacagttttcattattttagtaaatgggcaaattctgaaattaacggggtagagggtacggtttccaatatgggagattgaaaatccaaatagttctatgcgtttaaagtaccaggagttaggactgacttcaatcgtcgacctagtatgtcgcgtatcctgacacttagtatatatttttattaccttgtatagtcgctaatgtccatttttatcaatcgtagatagatctactcgtcctgtattggatttactcgtagggagatcattgaggttttaggtagcctgcccgttcaagatcgtgattggcgactgttatgcactactgcaaatttgtgagaacataggatcatccccgagaacgccagtcttaagcgtgaacttgtatacaaggagccttttgagaaacaaaaggaaagaatagacaagcatctatctaaacagacattgagacctaatcaggtaatgtgtttggcattttcatgttcttttatgctgtgaaaatattcttatcctatggtcttctcacagaaatgactttcctaaagcaagctcccactctcaactgaaagcctaaggttggtactacaacgacttctctagtcattccgcagaagaggaaaagcgatgctggccctacacaagtggctgactcgttaaagaaacaacata

SEQ ID NO: 60015 - DNA, 784 bp, Cannabis sativa
aaccattaaatctagtgagatgaagcagaaacattaaaaccattaatattggggctatcatggtttttctaatgttatttctcggttgttccactattattttttatgtttaacaaatgttagtttcaaattacacaagttaaactaaccactaaatatttgtttgaggtgaccagaatgaaagaatcatggacagtaatactcttaccttccattaaaatggtgaaatctagaagaccaaaaagaggatggaagctggctggaaaaagaaacaacataacaaattaaatgcagtaaatgtgggcagctgaggcataacaagagaacataccggagaagacatcaaaaatgaaaagaagaagaacaactaaaaaatgatagtagaacaacggaaaaaactgaacatatattggagcatatgatactgatgaaaataacttacatacatatttcattattttcctattactattaaaaatagagcagtacaataatatttagaaaaatgtaataaaaaatgaaagaaaataacattaaaacaaccttaaaataataataaaaaactaccaaaataaaacagtaactaaaaaggataagttggagaaagatggtggacttggaagtacggtagagatggagacagctttttgagaccaaaaagaccgaatgatatgaacttagtgggagtttctaaaagaccaaaaagatttcatagagcaagctctccatctctctcacgcacacacaaccacactcttaactttccctattcttcttcttcttc

SEQ ID NO: 60016 - DNA, 3599 bp, Cannabis sativa
  modified_base (1934)..(1934): a, c, t, g, unknown or other
gagcaatctcgacgggctcgcgtgcgcatgtcaagataagtctgatttttttaaaaaaaaaaaatctgtaaaacttaaaatttgaccaatctcgacgaaccaatagaagctcgtcgttattggttcaacccatttctgtcgtggttaccaataatggtaggcctatattggcctactgagattggtcaaaaacagcccagcccgccctttaacctctccctttcatcttctttccattacattttctaaccaaccctattttcttccccaattcgaaaagggcagccatttttttctaatccaaaaattcaagcaaaaactaatgttctcttcttctatttcatcacaaccacttcaaaaaaaaaaaaaaaagtgagcttaaatataaactattgatttatttattttatattcttatccttgttaatttattttagtctaaaaagttagtaaaataataaaatgttagcttgtatttgaatgttttagattgaaatatgtttgggtaagcttcatacaacataaaaggatcttgagaattgattggagcttcattttggtgatttttgatttttttgttctttatttttttttttttggccgtaaatggtattttttttggccaaaaatattgttttttctttctttaataaaaaatgttagtaaaacaatgaaattataacctttatttggatattttatctttgaaattgtttgggtaaagtttcatacaacaaaacacaaaggctatttgggtgtgaattgcttagagatttatttgggtgagtttggttttttctttctttcttttttttttttttttttggctgaaaataactattaaatatgtcaaaatagctgctttattttaatgttgattttaaaagtttatattttctttaaaattggtaatggttatgtatatgattttttttaagtgttctaagtatatattgtactcatcatgatagtttaaatagtaaatatgagtatatataattttatagagttggtttatatatgatggatgattgatatttatgttgttgtgaataatttgtttagtgaaaagttttgtgtataaattggtaatggaaatagcatatgtgtttgttggtatagtagagtataggaatatgtatttatgtatattgaaatgtgagactagtggaatagtcaagtaaaactagtgtatagtattaatggccttgtaagttttttttataaatgttttttaagattttgtaattagttattctagggtaatgtttattcatttttaagtgttgcaatatatacctatatataaattagttattattattttttttttttgtataattgtgtaataattatttgtgtaatataaattttaaaagtttgtatattactagtttatcagctaattaaatatgatataatttagaaactttttaaatgttgaatgtgtagaaaatgtaaatataattttgtttttcttaaaagaaaagacaattgtgttgattaaattttaagttgtaatatatactaactttattattttgtgtaaaataaaattaaaaagtttagtttgagatatgtatatatattagtgattacgattataaaaaaaagttttgtataaatagtttatgatatatattgtgttactaaaattttaattttacaatatgtatgtggtattattatttttttgaacatattagataatataaaactttaatattgtaggttgtaaatttaattagcaaggattcattttacaaattgatgtgaagtgaagtttggtagttcattaaaagaagtgtgtacaatcactcatttctttacttaacaacataatattgttcatctaagaaaagtttgaatatctcaaatattcattcatagtgaagtaggttctaataaatttgtgtgctgcggagatataaggnagaaacttattgtgtgatatttgttatttgtagatataataggtacttatgaaagtggaaaatattatagaaacaggggaaaccctgcccaatttttaattatatttattgtgtgttgtttatcgtgttttttatttgttgatataagtacttgtaaaattagaaaatattatagaaacaaaggaaactctgtctaatttttaattatgtttattgtgtgttgtttattgtgtttgttatttgttgatataggtacttatgaaattagaaaatattatagaaacagagaaaattctacctaatttttaataacattgaatatttataagtactaaaataatttaacttgcttaaaaattgctttgatataatttttaacttgtaatagcattaaattattttaggtaattatagattaatatgtatagagattagatgaaaaagaatagattgttaaaagagtatgaagatggagttaactatttcatgaatttcgccatgcaaaatgaagaggatgccatacgtaaaaactctgcccaattgggaggagtctattgtacatgctctagtgacatgcccctctatttcttgtgtatcttgttttcatgtgcttgatatggttaaaaagtgtttactgacagctatttggaatgctaggaatgagcgtgtctggcagcaaaaaactatgagaattgctagtattgccgcttctgctaaatggcaccttaatcaatggagaattgctcaaaactcggaccttgagtcatcatggcctagtttctaggttggtgatggtgtggagtaatggagttcacctcaagttggtagcatcaaggtcaatgtggatgcggctttatttgaggattccagttgttatggtttcggtttcgtagctagggacgacaaaggtttcttgttggaaggatgcacaaagctcattcatgggtcagtttcaccagctttggttgaggcaatggggatatgtgaggcgctcagttggattaaagattatcattggcaacatatcttccttgaatctgattgcttgacgactatacaagctttacggaattctattcaaatgatctctatttttggccaagtgattaatgattgtaaaagtttaattgttgatttgcacaatattcctgttaattttgttaaatgatcagctaatatagtgtctcatatttttgctaaaacctctatattctatcctggttgttgtttcagattggaggatgtttcatgtgactggctttcatgtttggtagctgaaactttgatttaatattaaatctcgaattttcattaaaaaaaaaaagaatgagtagaacaaatattgtactagtttttaaggaatttaagaagaaaattagaaggataataattgtgataataaaatttaatacatgtaataattctatgtattttgtaagtttttatgttttttttttcttttctacgatgttagtacttacagtatctccaatgcaaataattctaaaagttgtcacaaaattccacatcattccaaaatataatattttattttctctctcatccacatcatttttggtcacttactactaaaaattactctaacacttaacaactctaaaagttactcctatagtcccacacatgtatttatcttcaatattt

SEQ ID NO: 60017 - DNA, 810 bp, Cannabis sativa
tgccaaacagtttggtcacttattctagaatcagacaaagaaaagataagaggtacacatgattttagaatcacaatgaatgtaataaagcctgccaatcttctcacccatcccaatcatttgcctcttcaagctgtcctgaatatcacagtttttatcatgaaagaaaaaggaataagcagcagtatttgttagtgtggaaacagacaacaaattatgctgaaatgctggaacataaagaacattatgcagaggcaaattaggaaaaatgttcacatcactaataccttcaactttgatattaccaccatgtggtaacttgacatgagtaatagaattatcaatatgaagattatggaataattttttgtcacaacaaacatggtgcgtagcaccggtatcaataatccatctagatttagaaagaaaagaattctcaccagagaaatgagagacaagtggagtatcctgctttggtgttgaaggcaggtctgaggttctttgagaaagtaaggccattaatttttgacactacatgacactcaagcttgacaccagatcctgacctccttgcatagcatctccactgttattttcatttcctccagagttaccctcaacattagcagcagatggcttaacattgccatttccagtcgattcagcatttcgatttggaaattttccatataatttgtggccaggaggatatccgtgcaatctatagcactttgacatgatgtgaccagcaacaccacaatggtgacacaccgttttaggcttgaaaggctgaacactgccagcaaattg

SEQ ID NO: 60018 - DNA, 1185 bp, Cannabis sativa
ccattaattcacttacatagagattaaacaaacacataagtaacacgtctacagtctacaaatctcataccttacaataggatttgttgttgcaagtggaagaaataagaataaaacttactgttcttagattgaacacaggcgtcatgcttcatacaacaggcatcaagcccatcacaaggcttctccccaggacatccactgtacaacaacccacaatacttgccatatctcaaaaaaggaggcacttatgtttttccaaccaaaaaagaaagaaatataaaaacaaaacagttacctttttcaaacagaacatgatagctaagccagtaaaaatttaacatgtatttgtaatatgtacctgaacagaagtccgactcacatgttcgactacagcttttactctgtaaagcgttatattcgatctcagtacttgcttagggcttttaattataagtaaaccaagaataaagtatatatgtatatatatatataactatatctctctatatatgtgaaagaaaacactaattactataaatgataaggtaataggaaaatagtttgataaatgagtcagtttatccaatagaaaataactagattagtcgaaaaagtaattaagtggagattgggagcaaaccacgctgacggaggcatcgatggcttggacgccgatgttgagggcaccgacggattgaaaccaattagaagagaccaacaagaagaatgggaaaaggtaggcctttaatgagtggcatagttgttcataaaccatttttgcaatgtggaaagggtgagagaagctaggttaggctctcaattatatggagaatggaatattataatattggcaatgacatgaatagtggtggaagaaaaaacgaggtaaattaattggatttattgtcttagaatggctcgtgaattttgtgtttcgtttttttgcgattgttgacaggtcatgttgtcatttcttttttctctcttccactgactcacgagctgaattcatggcagtcgtatatgcgtatgcttacgaaagttttatcctatactgcctcttatataacactattagggttggtttggaaagtcctattaggtagtattttattgtattgtattttattgaattagattatatattatatttttatataatattatgttaaactttaattt

SEQ ID NO: 60019 - DNA, 1035 bp, Cannabis sativa
aaataaaaaatatatataacctatgattgtagttatttggtaataatcaaaactataggcactactataaaaaaaagagttttagctacgaagtttttcaattattgaaaaaaagtgttagttatagctaaaaggaaaaaaatatcttggaattagaggcggttatttttaaagggtaacattcattactctttagaggcggttatttacaaataactgccactatagggtccttacagaggcaattatgagcaaataaccaccaccatatggttcttttagagacagtttttttcgaaccctttagcgacccttgaaacgcctacggttgcgaatattgttaaaatcatctctaacccttttttgtagtagtgaggggttgtggatccacatatatgacctcatatggcttcgataaataattaaagccatagggggttcttttgccttcgatttttttcgaccccttttcatttcacctaatacgccttcaattacgaaatttcttaaaatcaaagctaaagcacccaaataactaaaggtaaaggggatttttatagtaatgtccaatatttaacctaaatatcaaactaccttgagcattgttaaccccaaaaactagcgtggctatagttttcgagattagtcgagtatagcacacaattaactaagtcttgttagcaaggcaaaaaggatataaacccagacctcaagcttaaaggcttgaagcaccaagcctcaaggttccaagactttagcatctcaaccaaaggcttccttgaagcttctcggccatgtgctcaagaccttgagcatctcggccaagaggttccacgaccacatgctgaagacttggtcaagagactcttcatacccgaagctacatgtaagcctaaaagttgtggaggtttaggaatctgaagttttcatgatataatttttgtcttctgtcaaagcttggctggtttattgttaaaaatatgatgcgctttgtgttgggttttatgccctaaataaaactctgtttcaatgtaa

SEQ ID NO: 60020 - DNA, 1347 bp, Cannabis sativa
actttagtatttcctcgcagaagccgaagtttgctacataaaaattcaacatgacccttgcatgcacgtagtttttttgagcgtgaaatatcactgggggtatgatacatcttcaactctccttctcaaaattgaaggactgcttgaagtctatcacatggcaaattatgttgcaccctttggtcttttaaagcgacatcattgcttgaatttttatgcaactttagcttttcctagcgaaaggcgaagtctgcaacataaaaattcaacatgactctcgcatccatgtagttttttcatgcataaagatcactagggatatgatacatcttcaaacctctttcccaaatgggaaggactgcttgaagtctgtcacacgcccaatgatgtttcaccctttggtcttttaaagaaaattcatcacttgaatttttatgaaactttaacctttcttcgcgtaagccaaaatctaccacataaaaattcaacatgactcttgcatgcatgtagtttgtttgagcgtgaatgatcattaggggtatgatacatcttcaaccctccttcccaaaagagaagaattgcttcaagtctatcacacatccagtgttgtttcaccctttgctcttttaaagtgaagtcatcgctttaattttatgcaactttaacctttccttgtgtaagccaatgtctaccacataaatattcaacatgaatcttgcatgcacgtagtttttttgtgcatgaagagaagagctgcttgaagtctgtcatgtgccaagtgatgtttcaccctttggtcttttaaagtgaagtcatcgattgtatttttatgcaactttagcctttcctcccagaatctaaagtctgctacatgaaaattcaacatgactctagcttgcaagtagtttttttgtgtgtgaaagatcacagggaatatgatacgtcttcaaccgtccttcccagaagagaaggactgaatgaagtctgtctcagcttggatactaacttggaatagtttttgccataatactctcgtttatcattaacatggagaggaagtacttttcgttggtccatcagcttggatacttcattcatttgggtagctcctcgtgtaggtatctccctaggacactctgttgttgggtccgaatctgagcatgaacttgagttagccatatctacatcattaacaaaaaaaaaaatataaagttagttatacaagagtaactacgtaaattaaaataaagtatcacaagtaatctataacaaaaattaaatacattaacaaatattatcacaagtaagctattgcaagtaagttaccaattagacacattttctttt

SEQ ID NO: 60021 - DNA, 612 bp, Cannabis sativa
ctccgccccactcttggactcggatcaaagaccttgtgccactgtcgctattcagaaccacccatggagtagtgccttcgcactagaatactccctccaacatgaactcttctgagtccatcacaacgtccctccagtcaaccaagtagcgcttgcaacactgaccctgaagctaccacatcctctgatagtagctcactcgccaatcgtccaatgcatactcctttcgacaatgactaagtatggtgcacccctcggggtgaggttcgcaaactaactgttcccaatagcacctacaaaacacgcttccactgaagccaagtccctctagaaacttcacacgccaactccatggcgcaccatcatcacgatggcaaccgagcaagacactctcatcgcagggataaaattaggtgcgtcccacctggacgaggttcacaagccaactgcacccaatgcagcaccaagtgcactcttggacataatactcttcgtgaagttcacaacattggccctctggccctaccgcacacccacagcttcatgcaaaaggccccccggacccactgcatacttgctcctctgagctcctacttgtgtcggctccccaaa

SEQ ID NO: 60022 - DNA, 691 bp, Cannabis sativa
ttatgtaatgtcattttttttacatttccaaaatagaaaaggattcaaagaaaacaatatattaaaaagaaaaaaaaaaaacatagcataattcatgctatatgaatacaattaattttctctcccccaccaaagaaataaaatccaaaatattctaaaagaaaaagaaattactaatcacataaaacaatagtacaaaatgattaaaaagaataatcccaaccccataaaataaaaaacacattacttttttttttttgaaattaatagaacatgcatgttcatgacctatcttagatgtcgtccacgtgtcaagtttccaccctccaataagaataagaatatttatagagaagtgggtcccacaaaagcattacaaattagaaacacatcatgtgaagaaagcgcaagttagcattatgagtttatcatgcaccgttgaccgaacaatcaccgccgccgctgccatctgagttttgggcagcggcggtggtggcgagtggtctcgccgacgatagcgcgttttgttgattatgaatttccatcttctttatattttggtgatgatacacttgccttagtctctcaatttcattcttcaatgcctcttgatgagctaattaattaataataatttaaaaattaattaatatataagatcatattaatttcactcaaatttaattttaat

SEQ ID NO: 60023 - DNA, 1171 bp, Cannabis sativa
ttgtctgcatatccgaacgttttctctggccctttatctggtattgcccgaaagtccatgttatcggctgtggaaaaggagggtggttctgtgttgttgctgccggcggctacgggagatggtggtttgggttcgaagggaggttcgtcttacgtgcctcgacgtccgagccatcctgtgaaagggacagcccatgcggctgagggtcttgggaagacccatcgggctgtgtggttcccaaagaggcgtccttttgatgcagtgagaacagttgccatttctggctatggaggagagagaaacaacctgagtgtgagaaaggatactgcatccttacctgttttgccttcaaatagccaagattgtattttgtatgatggtcatttgaattctttgaccgttagagagaaggaagtggaaggtgggcctggggtcattgggccgtgtgggaatttcaacaaaaaggctggtcttgaggaaggtgataatgggcctagtcttttagctaaagataagtttggaaatgatgataatgggctcaaagttaattctagcaatattcctacgggtgggccttcacttaagggtatttatgttgagtctaatgtaaaccaagatttggtgggaccggtttctttgggtattggctccaactctaatgggccgactcttcaagcaaaagaacaagttgggtgtgtggaagctaattgtgatactaatatccaagtagcccatgagcaattaaatgaagaacaagcattgactcagttttttaatgcgcaagagagcttattgtatgaccttaagcattttgggaaacttgacttgtatgagattcgaagtattggaggtgatatcggggtcccagcttcctctgaagtcaatgagcgaacgacgccttttaagaagcgaaaatttgaagcgtctgcttctctttgctctagaccccacaaggttcctcgcaagtatcctgacgtggttcgtgattttccgtgggacaccaagtttaatggctctaatcctgaggtggagattgaagacccctcggaagatagctctagctccccgagctgctccggtatcttgaaaaatccgcttgtgggctcctttgttattgatgaatctgtttccagtgggtctgcttactcccacaaccctgtggaggaggatg

SEQ ID NO: 60024 - DNA, 842 bp, Cannabis sativa
tacatcattctttatataggctcaaaacaagatagaaagaatctatttagaattatgatttaaattaaaaaatacacatacaacgttatagcgtagaagacccagcgctataacgccatgcggtactctcgaggctttattttagtgcaaaaacaaacattttttttttccaaaattggcgctgtagcacaacaattttggtgctatagccacatgccattttttgtccctattttactacttcgatcttacttagtaaattatgcataattttcgcgttcagactccaaatgagatcatttaacatgttttgaaaagctgtgaacgagctctatcattttggatttcataagctctttgaaaaaaatgatataaacattgtcaaaaatgagctcaaagatctcagtcatcacaaaattatcttttaagcacaaacctatgcacttgagaaaacacatcaaatctatacaaaaaataaatactaatccatttaataattgactaagaatgagtgtacgaatgtgcactcatcagcatacgagcctcccactcgcacacacatgcacttgcacacacttgcacttgacacacacgactcacatgcgagcccccactcacacacacatgcacgctcgcatgcgagcccccgtctcaccatcttgcagcctcgcatgtgaatccctcattactgtggctcgcatggatgctccaccactggtgtaaagattccacggctcatacaaatgctccacggctcacccaaatgctccctagcttgtccaacggctcatgggcttgcacaatgtctcatgggatcgcacatgtaacaccctaactacctt

SEQ ID NO: 60025 - DNA, 813 bp, Cannabis sativa
catgaaagccgcatcgagcatcatttggccatgaatgacatctcagtcaaaatgcaagcaaatatggctattggtcagggcagatcagcaggtgttcgctcttttgccccacctaatcaacagtctgcatccaatggtcgtggccgaggtttctacaaatttcctaatcaaagagtggtttgtcaagtttgcatgaagactggccatacagcagctgtttgccactaccgatttgacaaaaattggtcaactcccaaaccaggtaaccctaccaatcgtgcttttctcactgaacttgattgtgattatgaccctcaggcctattcaacaaccatgattcaagattttggtgaggacaatctatggtatgtcgactctggagccaccacacatgtgacctttactcccaatactcttgatgacacaaagcccttctctggcaatgacactcttgctattggtgatggtaagaaattattcatttcccatgttggatctgtttctattccatcttattcttcatcttgtcctctccatatgcagtctgtgttaactgtcccttccatgactaaaaacctagttagtgtgtccaaacttactgaagataatgatatctttgttgaatttcacaaaaactggtgttttgtcaaggacaagacaacaggagctgtgctactcaaagggaaagctagggatggcctttacctgcttggtgattcctccagtcactcaaaaaccactctgcaatgtcatcttgcaacatctgccttcaatacctcagattgtacttgtaatatagacaattcttgtact

SEQ ID NO: 60026 - DNA, 978 bp, Cannabis sativa
gtcagttttaaagcaaaaaaaaaccttcttttcctttttttgagattaaacgaatggatgatctctctgactagcacattattatcttgaatattttaccatggaacaaaagctgcctgagtaaggcaaatcaacatgggcagaatcagtctaattctattttcaatgatttttgggataaccttgtaaaccacatttcaaagagaaatatgtttgaattgtgacactttttttttgggggttgggaaccttaggaattaggactacatttgtttcgttgagacccttatgcatagttcctaattgaaataaatccaaaactacctcacagagatttgcacccattgagttctagtattgcttaaagaacaagatagacataccatctagtcccggggctttcaaacttctcatagagaaaagtgtctttctaatttactcatgccctgggattaattctagctcaactggattaagggaagaaaggtgttccaaaatcaaatggtccatactctctagaggtccctggaccggattagtgaagatatccctcaagaaagacgagaactcctttccaaaatttctttcttattcgttatccagacccaattctattcaagatactctccacactattttgcctatttcggatggtggcagcaatgaaaaagaacttaaaacatttatcaccatccttaatccaagaaacacgagatctatattgctaatataatgctttccactgtaaagccttgttaagggcctttctcacttcaacttcatgggcccaattcttagaaccagctggcattttctatatattctggagatgatttttgagctggctaatgctagtatccaacttacaaaaattctctctactccacctactcaatgctagacgggtagcccccaccttcttaaaaattctagccagggcccactcatgagaagttgaattttgttaacattaatttt

SEQ ID NO: 60027 - DNA, 650 bp, Cannabis sativa
caatgacaaggagagttgggagctatttcagaacaagtactattctattggaacagatccatcaggtaatatactattcttcactctttttaacccaatcatcataatattctttcttttatttttgctaccatttatatttatacatgctatgttcctagtctgttgaaaagagatatgtttagctttaccagagttgataggaatattatactggtattagtgagataggatgtaactggcagagctcaatttaattatactttatgcatatgtttgacatgatgacaatctaagtagaattatgtaagcctccctacttaaaagttaaatcataattcttttgtggtcattttcaatggacaaattcagattcaaatgatgatgaagaaaggaagaaagaattagcggtagagatgcttagaaagtgctctggtctaccattagccatcattgtgctagctgggcttctatctaagaaacacaccatacatgactgggagttgatgaaagcgaatgtaattcgctgcattggtcaaggtgatcaacaacatgatgacgactcaaaataccgtagtgtttcaggggtgttaggtttgagttacagtgagttaccatctcacttgaagccttgttttttgtacttggct

SEQ ID NO: 60028 - DNA, 573 bp, Cannabis sativa
aatcagattgtaaagggttttatttagagcacaaaacccaacaggaacctcatgcattgtaccatacaattataaattctaactcaacaagttaatcaaagtaacttaattgagttctatcttttcaatttttatcatcttaaaaataaaaaactttcctcagcctaaagttttgaaatcgatgttgtcatcgctgactacttcgacattgtctttgtgcaaaacaatgcacttaactacgactaaattactaatatattaatgagaaaaaaaagaaaaaaattctaataaacatactcataaaagttctttgcctattgttaatagtatataaaaaattaaagatcaaaagatggggattttaatcatcatcaataaaaaatagtaataaataatattattactgataatgggagtttctagtgaagaatctagtgcttcaatacctaaacgatcgtcgcagtctctgctgttgttgatgaattagagaaaagtaaatctcaaaggtaatagtggtaaaaattcgcaaaatgttgattctcaaaggcaaaataataataaagaaataatctg

SEQ ID NO: 60029 - DNA, 1465 bp, Cannabis sativa
cagtttaaaatttttatttgtaaagttttaaaattacaaaaatacactttattcaaaaaaaataaataataactgaacaataacgagaaatcaacattcacaataactataaatcaatattaaataaattttaaaacaattcaaaaaataatctcataataactataatacaattataaaataacaataaaaaaaattgtctgttattttttcaaaagatgtattttataaataaaaaaattcaaaaataaaaaaagattttttttatattgcagtattttataatttttatcaaatttttggtgtgttatgtaattttttcttttaaaaaataataaagaatggtgagacaattagaaaagataaaacatttcaccaaaatcatgtatgtgtagaaggaggcaaaacgtgacaaaacgtattatgtagttttttgcttttttgtacggtaacctattaatatatagttcaataattaatgaaaaatgtcaaataaatacaataatctcaaaaacaaaaaaaaaagtttcaaatataataatttttaacatgataagtattactattaagtattaataatattcaatactatattgtaaaataaccatatacaagttgatagtaatcttttttaaaagagtactaattacaacttctacctctaaaattatatgcttaaatatttttttataaaagtattttgtatagttacagtatttttgttaatttttttaaaaaaatttaatagtttacagtataaaaaataaagttcttgatattccaatttattatattcaaaaaactttaaatatagttgtttttgacacgataaattattcgaaattgtttaaaaaaatacaaagataaaattataattataacgaccactgttatgaaaaaaaaataaaaaaatattttgatatatatttttaagtacgataattgattaagaaattataataaaaattaatggtgttggacattgattggtgtcgtttaacattttttaatcgacaattattttcttttttttataaatataattatttcaaattttagttaataattaaataactttttgctagatgctacattatttttattattagtattattattattattataattactttgtgtgtgattagcttttttgtaaaagcatgtatcatgtttcaagtgattaggttcttagtggggtatgcacattgcacggtcacacaataatttaataattgataaatagataaacacaacaatttttctttttaattaaagaatgggatcccctcaaataataataataataataataaataagaatcaaaaggtagctcttttttgtatagtaaaattctaaagaatatttaatttaatttgtcatgttttttaagctttgttagctttacaaactcgaatgggattatgttttctattttttctcgttttattcatatgcatatac

SEQ ID NO: 60030 - DNA, 849 bp, Cannabis sativa
acattgaaatagaattttatttagggcacaaagcccaacaataacaccattagacaactactctcaactggaattatctctgttgactatgtaaagtcaaaggataataatgcagattcactaaccaaagggttaaatagagaattggttgaaaaaattatcgatgggaatggggctaaagcctatgaatgaataagtcaatacatttgatacccaacctagttgactagagatctcaagatataggttcaaagggacaaccaaaactgtaaagactatggtggatcattgtgggggttatcctcaagtccattccgatgatgaaacagttgtactcataaggaaatattaagctatgtttgtcgaaacgtcgagcagagtaatacgagttactcttaaataagaaatcacctatgtgagaaagaagatgggtcgcttttataggaattgattaaggcttaattcctagaatatctcttgtagaaccaagaagatgttcaggtccaaaataaatatattagtgagaactaaagtatgccatgaaagatttttgtttgtggtatatcatcgtttacatgaacagcaaaacaattcaaagatatcacgtctaccgatcagctaataaagtaaatgtactcacacaagaaaatgttcaaggtaaaacctacctatcctatgcaacgttgaactctattcaaggtaagaaccatttgttgattattcttgagtcaatttttcattcatgtgaggattgttggaaaagttgagttagtcaatatttttttgaatgaaaaaagaagtgggttttagtcccacatttattttgtagttgttgcccctgaattcgcc

SEQ ID NO: 60031 - DNA, 1315 bp, Cannabis sativa
  modified_base (1277)..(1284): a, c, t, g, unknown or other
ttttcattttttttttttgagtttttctaattttcagtcacgcttttgggaaaaaaataagagtgtggtttctttattctaattttctataactgttcttgtaaatatagctgcaattgcatttggtgttaaggctgtgcagaagatggttagtttttttagtccttttttcttttgatttttttttatttattttagtgttattttacggttgttttgccataatttatttatttgacgtcaatttcacgatgttgctccatctcgctagaattaatggttgttttctaagtgttctcgtgttgctgtggtggttctatacgtgggtatggaagatgaagactataaatacattttttcttccttctctatgattgtttttgtgttttttttattctggttctcctataaatacatttgacaaactcattggccaaaaaaattttgaggggtgtggttcttttatattttttaagtggttatatatgcttcattgttttacatttatttttgtgttattttagtagttttttattcttattttcaggactgggcttgcaaatttagcctctattgtatctagtattgaggctatgcagaagatggttagtttttttagtcacttttttcttttatttttttcatttgtttttgtgttgttttatagttattttgccaagactatttatttgacgttgatttctctatttttgttccacattgctggaattaatgattgttttcaagtgtactcatattgctggggtagttctgtctgtgggtgtgcaagatagaggcttggtatgtgattttcagcatatacagtataaaagaaaaaaaaaagggaaagacagtataaatataatttttgccgtgtgatggtataaatgtaaacctttactcaaaatctaatatttttgtaagttgccctaactaaatccattttcatttgtacactttcgaagttttgtacatcttatttttagaaaaattatagtttgtcttgggttaaacttaaggtccaatatcaaaattaaatacatttctaaatgaggaaattatatcgtatacccactttattttatttattttttaatttttacttaacccacttttatagatgatgttccaattatagcccttaggttgatctaaattttgtgctagactttaggggtgtgcatgaatcgatcaaatccaatgagaactctctgatctaattacaatcgaccaccaaatattagatgtccaattgtgatcggattagattggatgtnnnnnnnnaatatccaattggatcggatcagatgttgga

SEQ ID NO: 60032 - DNA, 5409 bp, Cannabis sativa
  modified_base (5363)..(5369): a, c, t, g, unknown or other
atatataaggtacttttgccgtcacaattgcaaatattaaagagatttcgccgcaaatatccctgatatattattattggtacaattaatacaaaaaagttacttgtaattaaaacatagtatttagatacaagttgttactaaattagttttagtgtgacaacatgtattgtgactaaaaatacatttagtcacaataaattgtgatcttgtgatgaatatctttaatcacggatcttttagtcataatataaaaatggtgatttataattaattatatttttttcgcttttagtcacaaattttattgcgattaaaagatttttttgtaagtgagaaaattttattgcacatcaaaacaattataaacatcacgcctatttacaattcatccctatctgtcataaattggcataaccaatctctatcaacaacacttattttctatttttgtttcctgagaaaatctatcaataacaactcttttcatgttctttacaactatataaatcatatgtatattttagttccataagatttcattatagtactttactcgtaaaaatacttttgtagtgttagactgttagtatcgagttcattataacttaaataataatttttaaagaatattaactaattataaggtgttatttttaagtagtatgtactagacattcctagtgcctaatatagcattaagctcgcgcgattgagtgttgttttggttaatttcccaaattcatacatctatagggatggctgttatgtgctgtattttttttttttttaatgaaaaagatatataacttcatttataataaataaccaaaattaaggtgatcatgagattatcaatcttagtatctatctttagatggtggtttttgtgactgaattttatttagtgttcgagaaatacaactatatttatagggatcccctatatataaattatactagggtttgtagcaaaacatccgcacaaccaaaaaatccatacaatatatatttatatatattaattgtatattatgttaatatatataatatgtacgcgccaataaactataattgttttaattattatagttttgattaatttcttatattattaggtataatttaatcagtttattaaaaagattattaattattaatacagagaaactgaaatattattaagagtagaccatatatttcttgatatattaatgtataaacataatgaaagcataagtctccaaaagtagtttttattattaaatcaagctttgctaattggttgattaaaagtgattagttgaggttgttgaactacgtacgtactaatccaactatatatattttttgttttaaataattaataaatatgtggtggccgtttcaagatgatgatgaaggtcagtgctttaaaagataattaaattttagttcaggggaaaatataattattaatttaggattaggtagtcgaaattctcaaatgttcttatttcaaataatggatgtcattaactttttggaaatgaatacaattacacactgcgtgcactcatataattatgtattttatattaatttcataaagaaaaaaggctttagtaaattaaaagattgcatgtataaatctctttgtagatgatatatagcttgttgttttggatcacatgtaattttttcaaaaaagtaataattgtataattaattgttactttttatcatggtatatggagtaagtattaattctcatttccttaaacaaattatggttttatcttctttcttttgtttatttatttttttttttttttgaaagaacgaaagttcattaacactaagaacgaaggacaatgggaattataggagaaattttctccccttgaaacaaacccgcatctacttctaggctagagattctagctcttctagcaaggtcatccgcaaaaaaatttaaaatattacgatataataagaaagaaaacttacagacattaaacttcttaactaaatctaaaaccgataaagacacattccggaagctccaactcagagaacttctctgttttgagccagaaaattgatcactacttgagaatcagagaagatgtgaatttccttccaagaagaatggagcgcccaagagagagccatttgaattgctcgggtttcagcctccaacccagaagatgcttttatttgagctgaaaagtgcgcccaactgccatcagcaagattggtcatttctgctgcgatgtcagaactccggccttccacgatgcatcagtgcaaataacaatatcaacaccctccctgctaggcccgactattctctctgaatttttatctaatcttggagtcggggattgaagcaacgcactaaattcagtaaaagagactccaattttaaaggataccagacttagatcagcagtcccccccccctttcagtctgagagtgttcctttgctgtcaaacttctaaagcaacacaaccaacatacagcaacaccatatatccactggtgtttggaaaaatgagtataagaggttctaaaacctgagacaaagaatctcttggaataacatctaaccgacttaggaaagggccagaaaaccagacaactttcacaaaactacattctttgaaaaggtgaacacaacttttctccatattgccacacaaaagacactctttttcttctaaaaaaggaagccttaacctggtaggaagagcttcattcaggatcctccacaacataacagtcaccttaggatgaattaaaaggttccataaccatttccaaatctcttgcttcgacttgaatctcaaaacttgatccacgtaatgagcatccttgacggtaaactgtccatttttcctatgcttccaaaccagctgatcaccgaaaggagttaggattcttagaatttccaagactttgttggccatggaaggttcaaaagatctgtatgaccatctccttattccaacaattgttaattgagatatctaccactgttttcgttgtaaaactactacctcttaaacccctcattaactcttgaaagtccttaatcttcaactaagggatccaattaaggttgtttctaacagtcaatggaatttccaccggcatccaaggaaattgaccatttgagaataatatctctagagttaagaatgcccttccaaataccagaatcattagacttatgctccacttcaaacctccttaagcccaaacccccatgagtttttggttgacaatatacaatcccaagatttaaaagacatgaacctacccttgtccatgtttcctgtcgaccaaaattttctaatcatggcatccaaactgtgacaaattaaaagagggatcatattggtagacataacataaatcggcagagaagacaccactgattttataagagtgagtctaccagcataagacaacaacttcaatttccatccttccagacgtttagacatgttatccttgagtttttgatagttgtgttttttcctccttttaaaaacaaacggattgcccaaatgttgttcttctccagtggattgtttgatttccaagcatttcaataaagattgcttttgacaattactcatattactaaaaagagaacgctggattttgacttgctacactcctgcacaaaccacttctcgtaaagagacaagcattgaatgaatgctttagcttccccttcattggctcggccaaacagtatagtgttgtcggcaaatataagatgagaaatagggggttgagtgcgctattttaaccccatgtatcgtcccactcatttcagctctttgaatgagcttagaaagaacttcctaacataaaaggaatagataatataagagatagtggatcccctggactattttcttaagcagactcccattgagtaaaaccaaataagaggcactccttatataagctataataaggttgaaacttctctcatcaaacctattagctaagaaaactctatggctaaaaggtcattctatcttaccataaggtcttgaacatatctaacttgatcgccattaagatttccttttcctagctttcttcttttgaatcttgtgaataatttcttgggttaagatagtagattatttaatccatcttcctggaatgaaagcctctgacaaaggggaaaccaaaacatccattatagagcataacctattagagatgatctttgttgccaccactttatagagaaagttgcatagactaattggtctaaattgtttcattttttttcagagttctgaagctttggaataagatacatgagattttatcttaattaaaactaattgacaatgagagaagtagtcaatttataagatattttatttccacacattaacaatataagactaactctaataatgtctatatgagtatccttttctttaatacttttctagtcttattttcagattaaaaattaatatttttttaagtaaacattgcacatgttaaaaatttgaaataattgtcacgtatatatgtgctaactaaaaagttagtagaaaattatatttcaaagatacttatttcgtcacgtatatatttctaacacaaactaatcattcggattattaatatgtttaatatatatcatgtgctaagcttaacaatatatacaatttatatctctcacactaaattcatttcaaattataattagctagttgaccacatgcatgcttgttgttccagcacatgacaatataatgtggatatacgtacctcaatatatatatgtattaatgtatattattcttgaattaatgtattaattttaatatcatcattcttggttgtatgtatacgtacagctctttcaaatcatatgcatataattacaaataataaatcatttcacatgttgcataatatttgtacataatacatatgtatatttatcagtttttcttttttttttttcattctctcttttatatatactaacgtttcacattattaataagaggctctctaaagagctctttttaaataaataaaaaaaaatatgttaacatatgatgatttcgagcagaaaaattaacgagagattgtaattaatactcttaatattacatctagaactatttaattataaacgaaaatactactttttgttcactaaattcaaacctaatttttgtgttttggtcattttaattcaataattaatttttcaaatataaataaagaattggtttgcaagaggaattagggacttcatttttataagggttatttgcggtaaaaccccctaaagtaggtaggcttttgcaactaacccccaattctnnnnnnntggtggtaaaacctcctaaacccagcttctgttagcagtt

SEQ ID NO: 60033 - DNA, 1214 bp, Cannabis sativa
  modified_base (920)..(922): a, c, t, g, unknown or other
ccttgcttaggggtggacttcaaaccaaaaaaccagctaacctcatgtggagaaggcatatccctcttctgggaggcataaagaacaaagagggcggacagatacttaatgcccttaggagtgaactgggtcggacagaggcgaaagaagtctgccacattcttcaagtacgggtgcaaaggcaacaatgccccttgctaggcatgagcacccaaccacgcgcacatccccctttcagggtttgtggctcagttattgtgggcgggaatgtaacaatccaatttgcctaggtagccatcctggtcgagagcccgcaggcgcgccttagtaaccttggacggagggctcacccacctgacaccaaaggtaccttgccttctatgcggaaccgcagtagtaagttcctcactgacgtagtccacgccgtcaatcaagacgtctccatcagcatcgactggctccccagcctcattgtatcccccatagtttgggggtgcaacctcttcctccacctcagagggactgctaggatggacatcgtcctgctcttcaatctcctggacctcagggtccccttcatgatccccctcctcctggacggctggatcttgttcagtgctgggcaaagtggcttctcgagccacttgagagtcagatgcatcagccatgcgcattgtctttttggtatgagccatcattctatggctggacgaaagattcaagggagaatttctttcactggaagaaggtgggctagaacagagacgaggatggtcctcgtgcaagagttgaagcaagtcctggtcgattctatgttcgctttcccaaaactcactttggttcatctacaaaagacaacacacaagatgagggtttggttagaatatcgaacgttaaaacaagcaaatatgccgaccagnnntactcaacagattaaagaataagaatgttaaacgaaaagccaaaactcatgaagtttgaaactttcccgaattagggcaaaaaaattcataaagcttagaataagaaagatgaaagacaggcattatgcagttcaggaagcaaacattatggactgtgaaatcgcatgaacccatgacaaaagagaatcgtagagtctctaaacttagggtttcctacatatcttatacaacaaagtcgaaggtgcattcaaaaagtaaacatgcaaagtaaacataaaggaaatcgagaac

SEQ ID NO: 60034 - DNA, 1502 bp, Cannabis sativa
  modified_base (61)..(61): a, c, t, g, unknown or other
tcgttttagaaagttcatatgtagggtgttaatcaacattcttgtgagtagatctaagatnctggtaaaataaatttccaacatgcacagacctcattcccgtcatcatcagaagatcccacttcctaaatccgagatctatttcccagcctcaggaaatttctcaacactggagagaggttgacgcaaagatctcttggcataggttagggtcttgggttggctggtttctctgatagaaaccacgccaacttccttccaagatccacctgaaaccatgccaatcttcctctggatttcttcatcagcctgaggaggacgtttgagattgctcacaagatctataccctctgcgatcacttgtgagaatcggccatggcaggctacggggttcccctagtttggattggtcagaagctcctcaaccgtggaatccattgtttctggctccaagtgaggcttgaagtctgtagggacaaatggaaaatggttggtgcatctgggtattatgagtttggaaggacgaacctctaaactcagaagagaaattttggaaggaaggaaataatccattctaaaaatggatttcactcaagaagccaaagatttgtgaaaaataataagcttgggccgtcattttataaacgaagaccagtgacaagaaatccaaagactgagaaatctaactgttgggagttgtacagaatatgaataggcgattcataatgactcttgaaactgtacaaccaccagaatcaaaggaggcgtcctttccaagaaaggattttggcgaaaatgccctccgtaattaatgaactttttaaggggcaattgttatacccgaaattcggttggaggacacgtgtcaaggtaaagggaatgtgaatcggtgcaatatatttttatgcaataactcattaattacgtaagtatcatagtatatttgtaacctgctgactgtaaggtcttaggcgaagaatcaatgtacaaactagcacttagtgtttaactagaaaccatatgtcgctgaaggtgaatagcgaggcactggagaaaagtaacacataccttagcttgaaataagcaaactaagtgtgaaagtttgatcagctcgaagaacaagaatgagagatgaccatctcgctatgaggagacttcttatagcttcatccaactaacaggagcgaggctcataaccctggcaggtcagaagatttctgtatacccgcgattgacgtaagacatacattgtcgaccacagaaagaagaatggttccagatcaccattgggatcactattatcaaggttctgtcgagacatctccaaattcaactattaaagacgtgtttaatacacgatatttttgacccagtaaaatcgggaaaatcccagttatatgattttcaaaatcatacaccacatttacattttgtgatatgtaatcaaatcccacgattttaaggataatggctgtaaatatattttggtcagctttgtaatt

SEQ ID NO: 60035 - DNA, 849 bp, Cannabis sativa
accttgttgatataggtagtactaatcaatccatttaagcctcttcaactatgtagttctatacctacacagtctcagaatcatcgcgcatgactttccctaggtgacgtgggattgtacagctcccggtttttccccttcggatcacggggctctgactgtcacaatcaccccttttggaggtcagacgttgctctgataccattttgtatcgtccccgctttaagccttcattgggcccttacactcacggaatgatgactcttacacacaagtacgtcattttagttgcttcatggaatgacgacttaccctacaaaccaacacgagtatttctagcgtgttttgtcttcactcgcacacttcttaaaaaacttctcagaagatcaccatcataaaattaccccatgtcagtttttcgatactctatcacaaaagaattatacctaattttaaaacaattatataaataatattgtattcataatataaagaaaataaataattaaaaaataaatttttgtgtggtagtagaagatttttttaaaaaataataaaataattaaaaaataactttgtatatatgataggatatagatttttttattatattaattgtatattatttttttaaaattttaatttaaaaaaaaaaaagccaaaacgtggccaaaaaaaatctaataactaaattttttgttgagttatcatttttttaaaaaaagataaatgaattaagaaaaaatatattaattgtatattattttttaaaattttaatttaaaaaaaaagctaaaacgtggcaaaaaaaatctaataattaaatattttgttgttatcatatttttt

SEQ ID NO: 60036 - DNA, 1011 bp, Cannabis sativa
aaccaagaattgccgttaaataagcacttttaatatataaagatatatataagctatagctagggttttcataataaattaatattgttgccctaataatgaataaggacatgttcaccgaattattacttctttcaatattattattttgtattaaagggaaaagcttaattatatacaaaataatgatgatatgatgagtaagtatagtcctctctacctagaataatatatgaagagttgtttacaaaaaaataaataaagaataaattatgaagaggcctttaatttgcttctttttcaagtcaaagccaaatttttcacaaacacaatacatatttgttcccaaaactctaatggattatggaatatatatatacatcatgacaataacacattggatgacacaagctaatataatatttatatagagatacatatcttacctaaaactaaagaaaacatttttcatatgtagtgtttttgagtaagtgggtagtgtttttattatatatatataaccacaatcaacttcaaatccaaacatatttccataattaaaagtaaaacaaaacccaactagaatgacaatatatattaggttttatttcaagaaaaccaatattattttggtctacatgttaattttatgttattaacactactaaaaaaagtggtatattcccgtcgattttttttaaccgacactattaaaactgtacttctattactaaccgacgctattaattctaatagcgtcgttttataaccattcaaaattctcttttttcgtaggtttggaatggtcacatatgaccattaaaaaaaatcaaatccctttcctttcacattcatctctctccttctccatatgactagtcgcatatctctctcatttctccacctctctccgctaatggcagctccgactagagacgcagcactagccccgaccagagatgccatgcgaccaaccccatctatctccaagcaactctctctctctctctc

SEQ ID NO: 60037 - DNA, 1524 bp, Cannabis sativa
aatattattaattataattttatcattaattattaacaacagactttcatacacatgtttttaattacaatattacttttagcactatatttaaatctttcattgaaatcacatataaaaaatattataagtaaactatatacatattaattggctaatacttaaaattttgaaattgtcacaaccttattattataaatttcacacaacacttttagaaaaaaaaaataacatatataagttgacacaaaatattttacatttttaccttcctaagtttttttttttcttttttcttttatacatactataagcaacttcaaaatattatcaagaaatgcatatcttctttcatattgtaatacaaaaattattttatccaattataattataaacaaacttgtaaaaattcatggaacattattaagattgggatgactaggaaatgccagagagaatagatgaagttaaaaatgatatgttcatctattctatgattcgagaacggagccaaccttatgtcaaaggtagctatggcctcctcaaaattctaaaatggattattcttattttagttgtacatttttttctcattaattttttttctaaaaaattataatttgaccccccaaattttaatttcattcttttatcccttaactttcaagtctttaactcggtccttatcccaactatgatttgcatagcataagaaagctcattttggtgggcaaggtgttcatttttttcatgtgggactctaaaaattctacatatagtttctaattcagttcataatttctcttttataggataaaatattcattttgtgcatttagtaatacttagtttgaatataagaagaatgcaaatctataaaaatatttcactaattaatagtaataagtcttatcaattttgttttttgttttctgttaatacactacattagatttaaattatttgatatattgttacaaaataaggtgtatatttttcttaagtaaatcatccctctaacttgactacaatcacaatattttagagaaaaattagattgttctttttatttattttttaaaaaaccataattatattgtttaatggtaattaatattccaatgtaccgaacaataaaaatatttgggagaaaaacttttatttaagaataaataggaaagtaattaacccttaactttatctttattttagctaattttgccggtatgaatcctcctaatacttgtccaatttgtttgaatcataataggactacccttcatgcacttgaaagggtggatatgaaagaattggataagatgtgtaaaataatttctcatctgaacttccatctccactgctcttaaccacaactgtagactcttttcattgatttccttgatcattagattttaagtattagttttaatttatattgcatctcttgtcatcgtagtttgatctgaaaccaggttgcgtcttcaattgattacaaaatcttaatgtggccgatctttccacat

SEQ ID NO: 60038 - DNA, 828 bp, Cannabis sativa
taaaaggctacaataggaagaacattttagctagatgtatcatgaagattgaagtaaagcttatgatactgttgattggttatttgtagaaaagctgctcaaatgcatatgtttctcgtctagattcattcaatggatcatagtttatctgaaaggtacaaattataaccttttgatgaatgacagaatctaaggttcttttaaagggggaaaagggtcttagagagggagatcctacgtcaccattgctctttgtattgatcattgaatatctcaccaggctcttggctcaaagttccaacagtaagggattcgggtttaacccgatgtgtaagaatctcaggctaatgaatttattatgttttttcaaatgaccttcttattttttgaaagggcaatttgacatctatgagatgtgtgtttgaagctttccaaagcttttgtgatgccactttgtctttctgcaaacaattcgaaatctcatatttacgttggaggagccaaggaaaattgtaaagctaatattctcgagaaggttcatatggctgaaggtgaattccgttttaagtatcttagagttcatatgagacctacaaaatagagattctcggactgtggtgtgattttagataagcttaatagtaagcttaactattagactagtgcgtagaaatttttcttttgttggtagagcccaatcgattcatttggtcctcttaggcatcagtaacttttggatgagcctatttatcttaccttacaaagttacaactgctattgataagagttgtctgacttcctgtgggggtaaacatggcaacaagagta

SEQ ID NO: 60039 - DNA, 1518 bp, Cannabis sativa
accaggattcaagagcaacagatcgaaagatgcagcaactaaccaagtgcaggctaatgctgaatctaatccttccagtgaagaaagtcacaccttgttacctcaactcagtgtgtcccaatatcagcaacggctaaatcttttagctaatcaaccgagtaatataactgctactgatcctagctcatcttcgggagcaacaagtattatcttgtccaatcattatgtcaatcctaaaaatgaatcttggataatagattcgggagctacaagacatatttgcaacaacattaagagttttcatatgtctgtcctatccctaaagtcaggttaattctacctaataatgagtttctttttgttcaaaaaagtggttctattgttattaacaaagatctcactttgactgatgttctttatgcaccaagtttcaaatacaatattatctctgtgagtagtctaaccagctgcaattcgattgatgtcaattttactgttaacaattttcacatacaggacaaactccatctgaaggagattggcagaggtagcagtaacaatggcctctacaccttggatactgccagatctgagaatgttctatctgtcactgctgacctatggcattctagattaggacatttatcccagaaaagattggctctgttaagcaatctattgaattgtgttgttaatactctacataaacatactccttgttatatttgccctttggcaaaacaaagaaaattaccttttcctaataagaattcttttgctaataacagatttgatcttgttcattgtgatacatgaggcccctatcatatcccatctcattcaaactacaagtattttcttactctagtagatgatcacactagattcacttggatttatcttatgcaacaaaatatgaagttgttagcattgtgccacaattcatttcttatgttcaaactcaatttcattgcactatcaagtgttttcgatctgacaatgcacctaaattagtttttaaagatctctttgctaaacttggtatattgcatgatttcacttgtatagagacgcctgaacaaaatactatagctgaaagaaagcatcggcacttattaaatgttgctcgtgctctctattttcaagctaatatgcctatcaagttctggtccgagtgtattatgacaaccacttttctaataaaccgcacccctactcctcttcttaaaaataaaacaccttatgaacttttatttggtactacacctgattacactaatctaagaaattttggttgtcttgtttttgcatctaccctcacggctcatagaactaaattccctcctcgggctcaaccttgtgttttcttaggttacccacaaggtgtcaagggatataaactctatgacttaaatagcaaatagatttttatttcaagaaatgtgatatttcatgaacacatttacccttttcaaaggctaaatactgatgaaaatcacattgaccctttctctaata

SEQ ID NO: 60040 - DNA, 959 bp, Cannabis sativa
acgcaagtgcacgtatcgtttacaaataataactcacaagagtgaggtcgatcctacaaagattgtagttaaatactattaaattgaatactaaaacaaaaataaataaacaaagaggcaactaacaatgatcagaaatttaggacgtttaatttcaattgcatcaacttcttatggcaaaatacaatctagttatcttcaatttcatgcgatagcggattaataattatctatattcttattaggacatatagaatataaagtcaaagtcctatatttttgtggtaaattacatatataatttgcattaagcaaagaaattctaattgctacatagaccatattagtactctcgttcaatatcaaaatctatgtctttactatagcataatcaaatcccactttttaaattttacattgaaatcataaaataaattattggtaatcaagcaattataagcattaaacacgaatgaaatagattcacataagaaattagaaaaaaactaaaattgcattaaaccattgaaaagtatccaacaatattcactaaaaaccctaattagaagtttagtcctcattctcattctaaccaattgcataagactaattaaaaacataaagatggaggaaaaagaaaagaacttgttgaaaatcaatggcggtagtctccaaggttgctttctctttctattttcgtcctctccaaagtctcaaatcaaaagtcaggaaaatccttgaagatcgattgcaaatcgataactattcctgcttgttgtgtggtgatgaggtcgaaactatggaacacttgtttctacattgtaatcttgcttctcacctatggagggcttcaccttggggattgattcctattaatgataatgggggcacaatgtgggattgggttaaatttctttggagcttggagaatataggggtggttatgagagaggcattcc

SEQ ID NO: 60041 - DNA, 1346 bp, Cannabis sativa
ttattttaaatttaattaaaatgtgtccacttttataactccattaccgattataccctcacacctatacaagttagagttaaatggagagtcagagtatctttagatgataggatcacaattaatagagttgttgaaaaaagagtagaaatgaaaaatatagaaagaaaaagtaaaaattatacacaacaatttaaaagaggcataccatctaatttcctcactagacacaggtcggtttgctttcgctcgtctctatccacattcactgcaactttaatgtgataatcaacttacactaaagcccaatagacaaatagtaaaaagggggcaaatgaagaatataaacaattgtaaatatgagattattattgtataatttgtatggtatgaataaaaaatagcttcggaacataaatcaaagaagtatctaagaagtttgttaggaacttaagtaagcttttgtttaggtttgaagctgtacaactggctgagcgttggatctctgttctttgacgaaaaaagcaaataaaatatttgaggatgtaaaatttttgaatctagtagatggtaaataataatttatgtatagacatcacgagaagctaaaatagtcagactatctacacctagctagaacaaagttaagctactaaataatactattaacgttcgtttggtacgcggtattacattgtattgtattgtataatattgtattaaattgtattttatgcaatacttttatataaaactatatgtacttataatttttatagacacttaaatatataatattttaatatacattaaaatttaacatagtattatataaaaatatgatatatataatttaattcaatataatacaatcaaaagcggagccagaattgaattgtaaagggggccaatagcgcgagcaacatgtacaatgacaagacttcatatatagttattttaatgaccaaggttctttttagatgatgctaaatatttatgattgatctaatttaactcagattaatttacaatttttataaatatttttacacactagaacaaaatacatgaatcaaataattcaatagttaataagactcataagagtaatattcattatcaacctgtattgactagaaagtattttatattatttcaatgtttaaaataaatgattaaattgatggtgggagcatacttaaagatagtcagtggctaacaatgtgaataatgttaaacaaaagaaaaataaaaaattaaaccgtaagtaaattatatatataagtaaattaataataagaaatacttaatttatatatgcatttttgtataaatattttatttat

SEQ ID NO: 60042 - DNA, 1713 bp, Cannabis sativa
taattattaataacaaaaaaaaaaaaaaattagtaacttatgaaatatatctaattttgtttacacctaaagttttacttcttgaaaatgtaatatataatgtttaaaatattattttgtttccttaaaagtattttataaacctatcaaaattattttataaaaaataaatttatttggaatataatcttattacatctatgataaaataaaaaattaaaatactttttagtaacctataaagttgtaaactttcagttctctaaaaaaacctataaatttgtttaatcattgatttattaaattttgttcaagtttaaaaagtaattacttattaactaacaaaatataaaagaaactataatgttatatttgattttggttatgttttttagcaatgacaaaaaatatgtgctttcaatatgttaaaatgaatatcttaaaaagttatcaaaaaatattttaatataaaaaagaaagaaaagagaaatattttaatacaaaacatatacatatcaaaaaatgatgaatgtgtgaaaggagagaaagagtgacttgatagatgcaaagtgaaaaaataaaatcaatataccagtaaagtgattgggacttagaggagagaaaaatctctaactgtatatatacaaaaagtattaattttgtattgttatttcatacaataaaataagctggcatgcgtaattttctttttttttttcaaatgtaactcatggtatgatgtttgagataagatttatttcttatattttttttatttagaaatctatcaaaattgttctacgtacaaaaagcgtagctgatttaaaatactatatggtagcattaaaaaaaaaaaatactttttagtaatctacgatcaacaaccacttatttgagatatatttatgttacttttttagtaactttttatattaactttaattatatttaataaattataattaaatataaaaagttaccattataataggtatttattattttaaaatataacttattttatgatgtttaagttactatttagtattttcataaataattttaaagacctattgaaatcattttataattaagaaaagtacaatatagcttttaactattaattaaaaaaatagtaacttatgaagttgattggcttattagattttgtttaaatttaaaatttgattatttttttgttaattaatttgaaaaagaaactaaacgatatttgccttcgattattttttctagtgatgataaaaaattatgtgtgccacacattaaaatgatcatcttagtatgtcataatagtataatttttaaactcaaataattatcagtgtagtcggattttttttttttcaaattataaagagaagatagatagacaataaataacaaaaataataaaattaatcctaacttattttttaaaattaccaacaccaaatttttttaaaaagaatattgttattataataataaaaaagatttttttttttaactagaaataataaaaaagaaaagttgtaacttgaaataaaaaagtaagataaagacaaaaacatagatagatatattgtttaggacaaaaaacaaataagctaacgtgtatacataatgagagaaagaaaaaaaaacaaaacagtatgatgaaaagctgaagcaaaatagaatgataggtaaattggatatgtatgcacgtgtcta

SEQ ID NO: 60043 - DNA, 1894 bp, Cannabis sativa
ggtgttgtttgaaattatgcactttttgaagcgtaaggtttttgggaaggagggggttatgacgttaaaacttgatatgagtaaaccatatgagggtagagttgaattatctcaagtttatgcttcaaaaacttggtttttcacaacattgggtgcaactggttttaggttatttttttcacaatgaggtatcaggttgttcatggtggtcataggatggggcctattattccttcttgagggattaggtaaggagaccctttgtctccttctctgtttttaatttgtgctgaaggcttttcgacattacttcatcaagatgagtggaatcaattaataaaggggtgtcgtgtggctaggggtgctctgtcaatttctcatatgttgtttgttgatgataactatatttttttccaagctaacacaggaggggctcaaagagtgatagagattctatataattttgagaggatgtcaggataaaagattaatttggcaaaatctactgctttctttagtaggaatgcgagtgaagctattcgagagattgtttgtgttattttaaatataaatgaagctggtaagaataatatgtacttggatctccgaaggacccaagtacaatcggtcgaaacaaatctgctatattgggctttctaaaagagaagatgaggaagtgtatacaaagttagaatggtaaactcttgtcacgtgctagtaaggaggtcttggttcgtaaaatcttctaacttgtgctatgagcgttttccttttgcttgtgggaacgtgtcatgatttggaacaactaatggctaatttttggtggaagtcgtctacgaattcccatcaaagaattttgtggatgagttgggggaggatgacacgtagtaaggagtttgggggattgaggttcctctctcttcatgatttcaatttagctatgttgggtaaacaagcttggaggttcctgaccaagtctgattcgttggtttctaaagtgtacaaagcttgatacttaaaaatgagaactttcttttgatagaaattggtaataatccaagttatatttggagaaatcttgttgctaaaagggatttgattcgtcaggggcgcggaagggaattggtaatggagaggagactcttttatttgatgctctgtggcttccgaatgggtcaattctgagtcaaggtagtttggatcctgatttggctaatgaaaaggttactagtcttttggtggtgggtgagaaagctcgtgatgttgatgttctcaaagatttgtttgatgaggaaatgatagtcaatattcttggtattcttctttctaattcggttactaaggattactggtattaggggttaattcggttactaaggattactggtattaggggtttgaatcttttggcgagtatacagttaagagtgcgtttaaattattacaggcaaactgtgagggtagtgtggacgaggagattggaagaagttttggcaattaaagcttccttcaaaggcaaaaagttatgtatggagagcggttaatgggtgtcttcttacgagcgttcagttgaagactaaacatgtggatgtctctttattgtgcctgatttgtcatggggcagatgaatcaattttgcactatttagttcctgtgattttgtactgagttgttggcgggtagcagattcggctttgattccagttgatgtagggtcatttggggattggtttcttcatttgttctcacgactgggtagggaacaaagtgttcaggcggtggtgttggtttgggcaatttggtttgcacgaaatcaactcttgtggaagggtaggaaaagtcgggtggagtttgttgtcaatttggatcatatcactcttgatcagtggagaaa

SEQ ID NO: 60044 - DNA, 971 bp, Cannabis sativa
ggagcaaaggggagagagagggagagagtagagagctcccttggctagacggaggaaaggggagagatatggagggagtgagaatctcccttagttggatggggagcaaaggggagatagagggagggagtagggagctcccttggttgaacggaaagcaaaaggggagagagagggagcggggagctccctcctcaaactaactcttactctcatgtggtgtctcaccttgctactcggccccctattttattgcccatacactattagtgtactttaggattttccctcttattaatctagagatctccaaaaattaaacttaccaattttggggagtcaacacttgcccctagtctataagaattattttaagggttcttgtataaagagtttggtgatcttcgtctttatgacttaatttttcttctctcccttttttttttgtgttacctttcacgggtaagtgtagggtttaccaactatcttcaccctttttgtggttggtactcatcacaatgagagagtgttagctcgttgagctttcttaacctcctctgtgagttatcattattttgttgagaaagcccttagccacttggcctttctcgacctcttcacttatgtaaccttttgattgagagagtaccaactcttagagcgatctcgacctcttctcagctactcattttgtttgagggagttttttgacactttgacttttatcaacatcttttatggtgtaacctcttcgttgagtgaatattagctttgagaacattctcatcttcttattggttactcattggatataagggagcttgtggccccttaggctgcactcaacctttttctatatttaaaattgtattgggggagtttttagcctcttaggtagcactcaaccccttacattgtatatgtggcacttaaagcacattttgaatgttagagagttgatactcctttta

SEQ ID NO: 60045 - DNA, 1477 bp, Cannabis sativa
  modified_base (188)..(204): a, c, t, g, unknown or other
atttcaattccattttattaatacactccctaataatatattttatctttggtagttgctttcttaagtcttttaatcgaaagtagcttttgcagcatgcatgcactacacgtggaaaaatctaaagcaatggaaagaaacatatgattcagagttattatactaatatatatatatatagagagagnnnnnnnnnnnnnnnnngagagagagagagagaatccaatgctttatttattttcgttcaagcttttcctacacccaaaaaagcaagacccttcatatatataattcgatcaaatttaatcacattatcaataacgacctgtcgttggtagcttttattattattattattattttgtcagaattgtaattaataacgacatgttttttgccaacaacaatgtcgttattgataattatattaataacgacattgtcgttaggcataatttttttttcttttgaattatagccgttgaaagaagcggcaattttccctccaataaaaaacacactgacacactacaacgtgtcagtctaccactaacgacaatgtcgttagtagtagtcgttgggactaaattccccatctgatccccattaaatcatttctcccatttcaaaccaaccccataaccctagctgcgttttccaaacccactttcaacattcatctccctctcttcatctatccttctcttcattttcctttttttttatttttttatttttccaaatcttaaatttgtggctgaaccatattgtcgcaccaccacagtgtcgtcaccaacccttgtcggaccaccacactgttgtcggctcctttccaacgccgcctgaacgtcgccgaaccacctcaccgccgctattttcaggtaatatcattttattttctttaatagttatatataatatgtatatttatttatatttatatattattttaataatttgttttttttttttttgttgaaattcttttagatatagttgtgttaccatctatagtggagtcactataagcaactcagacaatatttttataatggaatcgtgagttttttttttcttatacttgttcattatatgtttatttttgttacttgtaaatatttgtaatttttataatatataaatctgttttacaaaaaaaaaaaaaattgtgtataatttttttaaaaaaacagatttattataattttgaaaataaaaaatagattatatatgtgaatttttttttttctaaatgttaataaattgtttaatatattttgaaaatatgtaatttttttgaataaaaaaaaaaaactgtaaatgtaaaaatattataaaattctgatgtatttggaaacttttgaagtatttagagtaggtttttatatttttggatatccaaaaatgtaaatgttatggcgattaaaattttgacataataaaaaaaaaattatgttaatttgataatttaaaatta

SEQ ID NO: 60046 - DNA, 997 bp, Cannabis sativa
aagtccctaggaccccaatggagtaaacccttttattttacttctttgtttggcgtacatgctttttatttgacacaatatggacaacaaagcagcttttaaacttggatttatatttacatgttgtttaagacaaacaacttatcgccttatcggaaagcttttaatcccagacttactctgcttctttatcataatataaatattgccttttgttttttgattttttctttttttgctagcttgttttatattaatgattgtaagggtataggtgccccccaagtgaccaagtagacctttgactctttgtcacttgtatttcaaaggttctattttgtcagtttggctttttggtttaggaaaacccttttttatgcatcttaggtagtcaaataacttactataatttgcaaaaagtataaaataaaataatatgaatgataattgatatatttattcatttattagtcggtatatatagttaccgtggtaacgtatatttattgaattataagaaactattacatgatctaactgatcattaatatttataacataaaacttttgaacgattattctgataaaaagacattactaaagagaaaagactttttaaaaactataccttgaaagtggtcatttgaccttagtactagttagtctctgaacctttgaatgaagttcgctcagaagaccatcacataagagtgatgtttaaacattgtgcattttatgtggtcctcagaccttttgcacttattgatagtattttcttaaatgttcaacattcaaataccttagtactagaacttactccatgttttcatcataccgaccaagcttgtatgcattatttttgtaacttcagttacttggtatggtccttccgaattaggcttcagcacactatccttagtattaaagaataaccttctgagtaccatgtctccgatgaaaaatttccttgctttcacttgcttgttaaaatatcgag

SEQ ID NO: 60047 - DNA, 926 bp, Cannabis sativa
tatgtccgtttatttttgtgataatctttacttcaggttcgaactcaagccttttggaattgatgtcattactgtggtgccaggagcgattgtatcaaacataggaaattctgcgttggctggctatgataagatgcctgaatggaaactatataagccatttgaagcagcaatacgttatagagccaatctttcccagagaccagactcaacccccacacaagtgtttgcaaagaagactgtagaagctatcctgaagaagaatccgcccccttggttctgttatggccgattttccaccatgatgtcgataatgtaccatatgccactctttcttagagatttagccttcaggaagttgatgaagagttgaaatctacgggtattttgtttgtatctctcctccatttatctaaaaagtgcatagttaatcatgttatcaaacaacaataaagatgcttcaattctagtataaagctgctttggctttgctttttcctttgaagtgctaaatgcttatggaggaccatgtagggaacagttgaaactttttgttgtaattgtcattattcatggaattaaaatctagaaaaagaaaatatgtacaatttctttttctttaactgatgataaagatgcagatgggtgtgtacaattttttacaattatattttttttttttaatttacactgaaaaatgttaagattataaatattattattatcaattattttgtgttcttttttatctttatttttctataatatcattaattatatttttttgaaattaccattaataagtagtgcttttataataagttaaaacctgaattaataataagtgttgagaattatggggttccatctcaaaaccaattggtaatgagtggagtagcccatatttttatatatggctcaatact

SEQ ID NO: 60048 - DNA, 1569 bp, Cannabis sativa
tagttatacaaatctaaatatagaaagttgaatcattaatatatctattataatttaattaagaatttgtatgaaattttgtaaatatgttttcaacgatgtgcatttttaaaattgtgtttttttgcacattttttgtaattatttaaaaaaatgtatacatttatgtaaatgccttttactatttcactttcgatccatttccacataatactattaatgccaacataatattatttttaagctatatattattatggttattttgaatgaatacattcattgccctaggaaatttaattaatagtaattgttaatcacagcaacataatatataataacacctcacttatttggggtgggcatcggtcagtttgattgattttttttttttatataaaaatttagaatttgattttcggtctagattagtgcaatccgaaaaccgactgatcaattcagaacctatcttaaaactgactgttttgaacctcgacttggtcggtttaaactgcccaaaccgaacttttttttttctttaaaatatgatccaatttattctataaatacattattatgcattttacaacttcaaacatacaatttaattgttcaaaaactaattatcttattcttttaactttaatattaataaaataataataatatattattattagtaactgcaatacataaaacaaaaaaaaattaataaattagtatttatgtataacggtcggttttagttttttcggttggtttattaccaaaataaaaactaactgttcaatgacgattttaactgttagcggttttttcaatttttggttccgttggcttcgactccaacgatattcggtagatcagtttgatcaattttttcaattttctaaattttatgctcaccctctctacgacatccacatgaccattttaagcaacacatttctgagttggggataatatcaagcgagcttcccacaagtagctagttgtagcatacttatctcaactcgcaatatttggttattcagtggctcttgagaaataagttctcaatgtactgcagataaatagttgtaacttgtaagtaaacgcaaatgtgtctaaagttgacactgttgcatcacctacaaaattaggaccacatctatggaaagcatgtcactcttgtacctgaccaccaccatttggtctaagactgctaccttaccaatcatagatacaatttatatgatttgtcctaatagagatgtgctaaagggaaccactaattaatccaacatatgctacatattttattattagtgcaatttaatattaaattttacgtattttaatttaattattatttttttttttgaaagatattttaatttaattattaatattaggtaaaactcactaatataaaagttagaattcgcgacggtcttaaaaatgatttttttttcgaggaccatcgctaacaattaagtgattgttttagactgttggaaaaaattgagtattcccaacagttaaaaatagtcatgagggcaatccgcgacagttttatgaatttatagc

SEQ ID NO: 60049 - DNA, 768 bp, Cannabis sativa
  modified_base (198)..(202): a, c, t, g, unknown or other
ctatactgaataataataataatttaggaaagctgattttccaacagtttattggactttttaaaggttttttaagttgggcagcagaaaaaaaaattaaaataacaattggggcctttttttagggctcaaatagcccatttcactttcaaaatttgaggcgcacgcctcttacgcctcagttcaacgcctcacccnnnnnggcgtacgcctctcttctcctcagtaaggcgcacgccttggtgtaatctttaaacgcctcaacttgaggtgcgcctcaaaaatgcctttttaaacattgacatttattgcaagagagttgagaatgttttgagatttttaattggaacactagattgctactaactactaagcatagtgggagtcatctagtacattgcatgataagttctttgccaaacgttggtgtctcgtggaatattgttttctagaaattataatttaggggtgtttggtatgcggcttgggtttggggggagtagagttgagaggagtttagattaaggtaatgtggaactcattcaagatttcaagattaccgtcaaataaagttaaattgtgggactcacctggaaaacacaaaccccccaagtcattaaaaatagatttaccaaacatgggtttggtatgtggcttgagtttggtgggagtagagttaagaggagtttagattaaggtaatgtggaactcattcaaggtttcaagattaccttgaaataaagctaaattgtgggactcacctggaaa

SEQ ID NO: 60050 - DNA, 1608 bp, Cannabis sativa
  modified_base (833)..(836): a, c, t, g, unknown or other
ttaaatgtattattcatgttctttgacttgttcattaaagttggccaagtggatcttcccaatacttacatcttggaaatatggtagtgcaatttagtgggtgtactaatcatagatatgaaattcatagcttctataactattagaagtgaaaagatgattaccttcgagcttagcttaacttgataaataattgagcgctcaattcagtaattatattagtttattgaaatattatttacaagtagctaagtattttaaagataaaatacattgaaggtgatatcacccaatttgttacactgcagtcgcgttggtaaatgggctatgttgtatccacaaagaggcataccactaaagattagtatatgatatggtagaaaatgaaaataataaaatgatagatgagagattgtgatcagataaagagcttggtaaggtagaaatgtagttatgcaaatccgattctaataccgatatcaattcaaaatacagttgtaattctacaccattaattacaactagaagatgtatatgttaaaagcacaaatttattaatcttgaataaattgaatctcacttctaatttgataacaaatcatattatatgtcataaattgacaaaatactattgaaaaaatacagtaaacgacatacaatgtaataaatttaccaaaacaattaacaacctaacttacataagaaaaatataattgaacttatataaaaaatactattaaatttagaaaaaaaaattagaagatgaagaaaaatttaataaatgagatatggaaatgaaacgcaaaagaatcaatatcaatattgagaataannnntacaatagctacactctaacctcaccaatatgactattttaattcactcattttttcactaaaataagtaaaaataaaataataataataagagagaaacaataaaatgacaaagtgtcttttttctactctaaaatttgatgcttttttcattgtatttggttcctatttatagaaagaatttaattgctcccaatgtagctatgtaatggaaagagtggctccaatccttgatgaaagtggctgtgtggtacatgaaagatcgttcaacgataatgatagtaacgaagaaattatactacatgcatcttttaacttgatggctttaatttttactctcttttaaaatttattatgtttatttctttttctaactactctacaaattttactcttatcacttcacgataattattattcttctctaatcaaagttcttccctaactttcccacaaacctacacatctatctataaagaaaataaatctataatgttttaaattatagcttagttatgtgagtgtgtgaggataatttaggtacaatactcataaaaaagaagtatatttgaattatgttttatttgaaagtaaatttgattaatgtataaaaaatggtatttttcaatcccgatagtaatggtggggtgaagctatcaactgtgttggtgggatcatggttccgtatgagaccttggaattgattgggtaaaatggcaatcattcatggctgcaaaattgaaggagaaaattacactctatacatttttta

SEQ ID NO: 60051 - DNA, 833 bp, Cannabis sativa
ttttcttgtttggcaccaagacgcctacatagatcaataatggaccaactatcttcaagggagatttcttctacctcgtcgtcctgattaactaagtcactagggtcattttctatcctataacggtaggcctttgcacctgagtgtcaggcatattattttgcacaactctgcctcacagagtagaagtgcgtccaaggttggaggcatcggtggccttctttctctgttgaggtgggttggtagtgttcatgttggttctaggaggaactcgagaagttttttgttagggttcacctactttacctttccccttgtccttttcaagagcaaagggtcctacgtcaaaagagtttgcccttttctctatactgatgtgctattttggaacattctcttcggagtcttcctcaacattatcgagccttgtttgcagccattctaatatttttttgcatctggagagagaatgcttattacaccgctaacttttgttgcgttttagcaagctcaacgagcatttagagcactttagggtcttgctcataatagtattcgtctttataatatccatctttgatctcgccatcatcttcttctatatctccatcattgatatggttcttctccacatattattcccgatgttgggttttatcagccgatcgactaccaactttaaacgcttcctcatcccctacagtgcttggttgaacgtgctatggaggaagcgggttgacgtcatccatgaagacatcttggctcagatgagtgggttgtgcgacaatggtcttcctggtagccaccattgttgggattacaaggtagcttca

SEQ ID NO: 60052 - DNA, 637 bp, Cannabis sativa
agatagagacaaaggagagaaaaaatctcttatccaccgattcaactctatgaatattcattcattcattcatttcacatgtagacgtggctcatttccattatacaaacaaacctatcacctcttttaacatcaaagtttagattttttttctactttttcttttttggtttgtttgtggttcttgtacatgatccttggaagatttctttcctttatttttttttgcctttttttatcaataaatgtggggaattacctcccttttttttaactttttttttttttaatttatgatttgagtttctaaagtaattgcagcgctagttgcaataagaatttctatacgattttttgttacaatttaagttacagcgctagttgcaataggaatttctatgtataattctataagaatacaaaaaaaaatatatattttaaagtgtaaaaataaaaaagactcaaatttttaccttaatttaaatgaggagttaataatttttaaggatttttatcttgacacttttttttccttcacatttttaattaaaaatgatcttttttaataattttacgcactataatttttttttggctaattaggattttttctccttaaactttgacatataccaaa

SEQ ID NO: 60053 - DNA, 739 bp, Cannabis sativa
taataaccacgacaaccaaggattgcaaccttgctcctcttgaagggaaggatatccaggttatctcgggagggccacatattgtgggagaaagtaacaatgcccaaaagagatatgtaaaagaagtgaagaatgagcagtcttctttttcttcggaaccatccaagaaagctaagactaaagaacctccgattgtattcttggaggtagatgaaaaaatcgtgagatatcctcacatcgacccactagtaattaccatccagctcgctaataagaggacaaaaagggtgctggtggacaacggaagttcagtgaacatcctttataaggatacactgaggaaaatggggcttgaaaaaaccaaactgaaaccttgcatggtaaatctatgtggatttataggcgacagtgtcgccagttaacgaataattaagctttcattaacattgggtgaaacacctttatccaccactgtaatgcaagactttttggttgttcacctgccatcagcctacaacatactactgggtcgactagcattaattggactaggggtagttagttcaattaagcacttatctctgaagttttagacatcaacgggtatgcgagtagtgtgaggtgaccaaatgcttgctcgtgaatgctaccgcaaaaagctgcagaacaaaggccggtcaccagctaatggcaatcttgactggagaaggtgactagaaggatgaagatcttgatcctc

SEQ ID NO: 60054 - DNA, 2463 bp, Cannabis sativa
taagaaatttaccaaaaccactagagcgcgagctatcactagatgaggaggtagaaggaccgtaatatccgctaaaatccctatagcctgtaatcttaaatatatcaaatggctcggtttgttctaaatcccaactcgcatctatatgacttgccctatctgtcatggtgccatattgctcggctataccataatacgacttgttacagttaatctgaacgtagaatctagggtaccagctgtcaaacctatgagcaattcagtctacgagaagggaattccaaatataaaaattaaggtggcaatcttggaaagtaactaatgtgttatgctcagccctaagtactgtgggtgaccaaccacattgattacctcagaatgctccttcaccgacttccaagactgaaaaagggacgaaaaaatcataagaaaaaaggccttggaaaaatatcataaatctaataagattgactcgtggaatatgcagaattttaactgcaaaatcacgtaaaatcctttatgttcatacttttttctttacaatttttattttttctgtgcaagtttatcgctgtttaggctcatatctggttaacaaaaatctgtgttaatagatttgatgaactgagtgttcaaggactttcttgacaaccttgtgattgtgttcattgatgatatcctggtttattctgagtcgaaggaagcacatgaacaacacctatgtatggtgctacaacatctccgagaacataagtcttacgctaagtttaagaaatttgaattctagtagtcccgagtaagtttcttaggacacatggtaagtaaagattagatttcggtggatccgcaaaaaatgaagcttttcgggatttaccacaacctaaaatagcaactgaggtcagaagtttctcagggttggttgggtaccataaaagatttgtagaaggttttgccaagatatctattcctttgacctagttgacctgaaaaattataagtttatgtggactgacaagtgtgaggacaacttttaggagttaaaagcaagattaattaccacaccagtgttgagtttgccaaccagttatgagaagtttatgatatactatgatgcctcaagatagggtttaggctgtgtgttaatgcaatctgggaaggtcattgtctatgcctataggcaattgaaggattatgagaagtgatatcctactcatgatatagaattgccagtagtggtttttactttaaaagtttggcgtcactacctgtatgctgagaaatgcaagattcatactgatcataagagtttaaaatacttcttcactcagaaggacttgaagatgaggtagttatggtgaatagagttagtcaaagattatgactatgaaatcctctaccatcccggcaaagaaaatatagtggttgatgcacttagccgaagaggaccaaggcaattgtatgacatgaagaagatccccccgaagctagcagaagacatacctagagaaaaacttgagttcgtggtcgggaagttgtccaatattatgctacaatctgacttgttggaaagaataaagattggccaacagagtgatccagagttaattgaacacaaaaagaaattcgaggcaagtactacaaaggatttctcggtttcaccaagtggattattgagatataaagataaggtttgtgttccaatagatgattaaattaggagggaaattctcgatgagttttacactactccatattcactatacccggggaaaacaaagatgtatcatgatgttaaagcattgaaaagtgacatagttgagtatgcttcaaaatgtttgacctgtcagcaagtaaaagttgaatatcagaggctagcaggtttactttagcctttgagagtaccgaatggaagagggaagatataactataaacttcgtggtaggtttacctaagaccataaggctaaatgattctataagagtaatagtggatagatttaccaagtcagcgcactttctgtctgtgcgtacaacctacactgtggatcaatatgctgatttatacatcagagaaatagtttgactcatggtgccccgaagtcgattatttcaaattgtgatcccaaatttacttctaagttttaggagagtttacagaaagcaatgggaaataagttgaaatttagaacaacctttcatcctcaaacaaatggtcagtctacaagaactactcagatactggaagacatgatacgagcatgtgtgatagattttgaaggttcctggaacaagtttctactttgattgagttctcgtacaataacagttatcagagtaccattggtatggcaccttacgagatgttgtatagaaggaaatgtcgatcacctattcaccgggatgaagccagtgacagaagatatcttgggcctaaagcggttcaaaggactagtgaatccatca

SEQ ID NO: 60055 - DNA, 956 bp, Cannabis sativa
ttacttttaataaatttataatacatgagtaataataaaaaattattatcataacaatataaactcaatatcaatattctacttaaagttgttctaaatgtcaacattttgtctaaaaataatatattaagtacatatatgataattatactgattggtttggtttgaaccgttactaagatttttaaaaacatgactgaactagagaattcaaaacggtccggattgatcaaatcatacacaccgaattcatttggtccggtctcaaatgatttggttcgaattgattggaatttggaaccatatataaattgcagattatataaacactcactgttgtactctgccttgtcagctatatgtataacctaaacacaataaaacataaagaataaatttaatttttatgcttatatatcttttaactcttaaattctgaaatatcacatttgttttctaacagaaaaagaaaatatgtattatttaaatatattttggtgaaacattattcaaatataataatgtaaaattcgtatgtaattaaaaacgacataaaaataaatgttaaagaataaaaagccatgagccaattttattcaattaaatatttatatttacaattattttcaaataaataaattgttagaccaaatatgtaatttattgtttagtatgtttttggagaattattttatatattattttttaattttatttttaatttataattttagttgctttagtggttgttcagttcatttttatatagggttttagctatgtaaattttagttgcaatttaaatcgctcaattaattattatgtgagtttttatattaatttccataaaaataaataaagaaaaactattttaaagtgtaaatttttttttttttaaaaaaatcttattattttgaacaaattggagtaaaattattaggtaagcgaactataat

SEQ ID NO: 60056 - DNA, 642 bp, Cannabis sativa
ttttaaaatgagatcaaacaatactctcaaataagataaactttagctattttaccattcctcttaccacaataaataaatagtaccttttttttttgaataaaatttaaaattttattacaaagaaatttcatccattacaatagaatgaactatcaacacactgaataagaacacggcatgtgtggttaaacaagagtttctcgcaatacaatgaactgtcttatttgtagatcgtttaacaaaacgtaaatacattactagtagaggaaagtaacacacgacaaccattcacaatcaagccaaattgagagggaagaatagcatttatagatagattgaacacacaatagactttcaatttcaaggtaataataataataataacaataacgtacaattttagagcttcatgtcaccgtcttatgtaataataatcataataataacaacaacaacaataatgtacgattttagagcgtcatctcaccgtcttatataataataataataataagaagaagaagaaaacgtgtggtggtattatatatatagtgtttttttttaagaaaataattagtttatgtttgatatttttatggaaaatttattaaaataatagtaaaatatcaattcgtagat

SEQ ID NO: 60057 - DNA, 2089 bp, Cannabis sativa
gtaggtggtgagtgaggttgaggttgaggctgaggtgggattttgaggattttgggtcgtaatgagtttcttcgctttgtatactttacgtgttttgatggggtcgttgttgtataagctaagaggagcaatttgcgtggtctgatatttgaggtgatattaggagttacgaaggagaaggcagctgaataattggtgcccgccattggtaatcctggttcggaaaaggatcaagctttgaaatttatgcttaatatattattctgagcagttgaagttgtcaacaataatataattaacaaaaacgagtacgaattggtataaatgtataattaaaatttcgactatggtggaagcaatactacttgaaaagattgaatatttctctttcaaaaaaaagggtgatatttgtgttagcagcagtagtattagctttgttgttagtaataatgtataatgtagtacaagtgtttgattgaatgattcactacttaaacagatctaaaacctcaaacagatcaataacagctactgacttcttgcgtacattttgtttgtttttctaatgtatgcactctttgttattggcccaattggaaggttcttaacatttatagcacctgaaaagttgaaatgttggcaagttttggagtcattttttccccttaatttgttataatcttaactataattatgaggtagtgttccaagttgagggctttgagatagattttgaggtgagaataaatttgagaaatagattaagtccgttgaatatatattcttctagttttaaaacaaaatgggttctgatgtgttaatcttaaatatatttcagcaatgtttcaaacatttgaacttgaaacttgttgtcatgaattatttgttataatttggtttctaatctagtctttttgggaaatccatgaggtacattagatttttggaccttaagaaatgggataaattagagtagtagtgttctttcttctctcaaattttcttgggcctcatggtggattagtatggtgggacttgggaagatgtggaagaatgggagtgaagctgtaaagcttagatgtgttgtgaaaaaaggtcagacatgtcatgaccttcttttccctaggaattgtgtcatttgcacaattttaatgtggaactatgatgctctttcgcaataagtggggatcttaggttcctattgatattgactattgaggcatttggatggtaagatggctgctactttcaagttctttctttctatcattgcataccagaacttagctctgtacaccacattcttcccctgaacccaactacccaagtttccatgtaaagatcctgatcctgatccaggccagtcatgtcattattaccaataaaaaacacatcagcaacaatgagtggcatagttgatatatctccaattatgaagacaaaaatggaagctctatgaataagctgtttacgtagtgtttagaggaagaagagatgttttggaaaatgcatgtaattaattggtttgagcagataaatatggaagaagacaaatataaatacaccaatttagaagtaaacgatgatattggtagtatcaaattgaataaaaatcaatgcactgataatttcatgcaaagcaattcataatctggaaatgtgtaagaaatctgtgcaactctcaaaatagaaattggtgactctcttgatacacatcaggatattatgctttcatttcattcattgcatagtcaaggaaaatatatcaaaatagaaagggttaagggtgtatgagtcaaaaccttaatttcccatatcaccaagtatatgacaacatgttgaatagaattttggccagtataagcagaggatctgaaatggtattcatgacttcatatataattaacagtttatgatggtacaaatgcccaataaagaagagggaaaaacttaaaacattttaacaaaagccaatcttctgtaaactagagactggtgcccttctgtacatagaaacttgtatttcaaattcttcttgcctatttggaaaaagaaaaaaaaagagactcaatgtgttcaatgtagtcca

SEQ ID NO: 60058 - DNA, 770 bp, Cannabis sativa
gtaacagagcagcctctcctctttgtgaacatgcctccattgcttctctcaaattaattgccttcttggatttatctttcagctcttcaaaaattaatttcttaagatgattatcgactggtttccagtaagaaaagttgtacagaatccttttcatgacctcaaactccccatacttgtttagataaacaaacatgtctttgaattccatcttaggtgccaaacaatgactaattatgtccttttgattaactgatttggaccatctttttctctgcattatagcttttggaataaataatctactgatgaaattacccataggtcccatgaggacaaaatctgagaaaaaaagcttaagagcagaaagagtgtcaagaacaatggctccaatgaatagtacataagtaacatcagtatctaacttattaaagccatgctttcctatgaaacgaaaaaccaagaagcctaaaaccgtgaagcaaatagtaatgaagcgaagggagtaaccaattattccatgtataacaactgccttggtgtgtagaacttggtacatgaagctgagctcatactcaaccagtctaaatgcgcgagcagcgttttcatggagaaaataacttcgactcgattctctgtctttggagctgagaatgaagccaacaataagccccttgaaagtttcatagtgggcatatgctactttgagtagtttcaactcttgtaaattttgtgaagattgttggttattgtctgaaatgtgttgagta

SEQ ID NO: 60059 - DNA, 1154 bp, Cannabis sativa
  modified_base (156)..(160): a, c, t, g, unknown or other
aatttttcgagagttgacttttactttttactttctagttgacttttgactttgagcttttgaagtcttcttttggatatggtcttgaattcttgatctgttgatgaaacttttggtattacaaagtatgaaatagttgatatacttattgaatcnnnnncttttattatgtttgactttaccgggtaaatattgatattttgtgaatttgtcttgcaaaatgattagtaacaaataataatcaaatatttgttaatcatcaaaataagtgagtgattaacttttggtcaacattagcaaccttaggaagcacaacaccctcctttaatcctgaaataccagccaccacaaaactgtgatgatctctaatcattccatcaaatctaaatttgctttcctcttcaaatataaatattcacattgaaattatcaatatctattttaaatcatagtcatttaaaaataaaaaataataataaaatccattatatatcaagaaaaaataacatatttacaaaaaatataatagtgcacttaaaaaatattttttatattgatcaaagtttaaaaagttatttactacaacaatagagtttcataataattttagcattatttagggttggaaccaaaatctagatccttttacaatgaagggaaagtcctttacagggaaatcttctaatggccttattagtaaggtattaattgtgaattttttgttgcttaataccataaatatgaaatgttaaacacttagttcccttagtccagcttaaagaccacgctcatttaggtggtaagtgaggaagagctgacttatttagtcttgatgtgactagtggcaaaccgattaaaataagagtttagagattaaataaaataatagaaaatagagatagagatttatacgtagtttgtagtccacgagtcaatcatacttggcgaaatcaccttgatgtattacaatggagttcctacaagcttaaaaaccctaacttctggttatagtgtttacacaatgaatttctagccatttgcatgagagtataaatgtagtgtttataggctaggatttgagttcgggtatacccgtgacacgctagggtttgcatgtaaacctggcccactaatggggtaagtatatataatat

SEQ ID NO: 60060 - DNA, 1252 bp, Cannabis sativa
ggcccaacactagatcaacctgggcgctagccccgtttcttggggctcgagtttgtggttttctccccgagttttcttgaatcttcattacttttgatgatggaaaaaaagccctaaacactttttgataaactcaatcaaaaatagcccaagttgacaatatgttaacttgggcgatgggtcccagttttgtcccttcagaaattctatttggtcctacaaaatagttgattcttaatattttccaaaagtaaagaagattctcgaaagtgttaatgaaaaactccatttaaaatggcccatgttgaaaaaatgttaacttgggcacaagaccaaccacaggtgtaaaccttagcactgggccctattttttacacccagaaagtgatttttcttctttgaaatgacctattttctaacgccctgtccaacagggacgccacatgtgtatttttataaaatttacacttgctacataagtataataataccaaaaagtgaggttaattaaaactttttaatttaaataaatacaaaacattcattaaaggtaattactaatctctgtttttcaaaatatttacaaccagtttaacaatgcttttacaatgtaagtttatatttcaaaatacaatcaaaatggaacaccctaatcactgggttgtaacaccgcggccgatatgtacattgctgctatgacctttaaactcatggttgctcagctttggccttctctttacctggaccatgtagcacccgtgagtcacagagactcagcaagaaaagtgaataaaacgataatccttataacatttatcgattacacttgaattaacatgcttaaacttttacacaacattgtaatcacagtcctggtacataaagtacccttaccactcgttaaccatgagctgaatatgtcactatcgttgcccaataaagcaaacaaaaagtaagaaacatatccgcggtttcaggagtaattacttgtaacggtaatgaccatttcccaaccctcaatcattactgaggcttaataaacaaataatctggatctcgatcataatcgagactatacaattcaattgttaatcacttaatcctaagtgttacataacacttttcttacctcggtccaaaactcaagtgtgcaggctgacttgagtggaaaataagctgggagattctggtcctatgtcatgacaacaaaatccaataaataacttttcaaaactctgaaatcaaaccctaa

SEQ ID NO: 60061 - DNA, 1134 bp, Cannabis sativa
tctcatttgtaagagcttattacaagttttcatttcatttcataaatcaaaggttatccaatcatgtgtagaaatagaatgatgagatttatttgggtatggtggaaaaaaggatatggttgagaacttagcatatatagtgtgaatttgttctttaataatatgtacatacaatggttatataatggcacacacataagttttttcttttttacttggctcaagttttggccttagtaacatggtagagacttatatttcttcaaggctattaggacatgttttcttatgtaatagataaaaaaatatgaaacggatgactccaaaatttgaaagagaaaaagaaagattgtcattattttaagaatatattgttgtgttgaaactttaattctgtgtttaaaccttaatttatttacggttgaaatatgtgatttgcttgaacttgattcaaaatttttgtattagtattaggtgtgctcaattttgatgttcattgttttgggatattattaggacctttggtatattgttggtagcaatgaacatcaaaattgttttgggatatttgtaattttccattacctacatttgtgcttcattttataagcgacgcaatatgtaaaaaaaatgtattttcgcaatggatatggcatttttgaactgacgtaataagttttttgtgacagttttaaaatgtcatcaacaattttgcgtcatttctaaaccgacgctgaagataaaataaaaaagtgaatattttgcgtcggtttataaaagtagacaattgtttttgttaaaacgacgccaataaaaaactatttgcgactacagtatataagtcggtttttttaaccgacgtaatttctttaaatgacatttaaaaatcgacgggaattatactttttgcagtagtgtaataataacagattgcattttccaattcctcttctcttcttctctttctctcaattgcacctctttcatgactgcatcttcacatggtatcgaagcttgatttcgttcatcaatggagattcctatctcgtccattggcgcaacatcaagactgaacaatgctcagccacagaagaaccaggatgtacatttaccaaaatcgtaccttgtttcttt

SEQ ID NO: 60062 - DNA, 1490 bp, Cannabis sativa
  modified_base (1421)..(1450): a, c, t, g, unknown or other
gagacttatctctaaaattgccaactcacatatcctgctcagtgcatatgagtttgtactttggtcgaatatctcttgattaccctgttcggacatcctgttgtaacagacatttagatcaaccaattgtgggctactagaaatactcctgtctgcccaggtaggaaaatgtaggacatgtgtcactcagctcattgccacgtcacggtgcaaaaaataggataacagtaataattgaaaatgttaaaggagtttggtcataaatatcccatataaatatcgaataaactttatatcgattacttctcttttctatagaaatataatcagctgtatgcttaacctatgtatgcaaaacctctaaaatttctttttgctacataagcttaccaattaatttagtcaaaggagatgctcattaagtgaaattgtcttgtttgataattttaatttaatttatttttctcttaaaaattcgaagttgtaaaccaaactcttaaggatatgcttaaaaaatatgtggaacctcccacatcctttttagttaccgcgcttacttaatacatcacatttatgaatctttgcaaaaaaaaaattcgaggatgctctcttcccatctattctatttggtacaaatcctttctctccttgcttttagcatttcctctgtactatgctaataaagaaaaccaaaatttaaagagatttggctccaagtggtggtaataacatactccccttgtattttattgatcagagttgcaaagtcaagaacatgctgttgaatgtaagaagtaaaaatggcagagtttttgctctttgagtgatgatttttagacccccttcccaggtcatgaatgaccccttacataggaaaaggttcagtgcatctcgctttaggagacaggaccttggtgctaaaatatctcaattgatcccttaaactttggggttggttgaggttcaattcttacagtaatatcctgctattttagtgggtttgtaactacctttgggcttcatgcgcaattggatgatgttgggagagtgttggatgtgtcggtctatgtggggtactccctagggtgcgacctgaccgttcgaccttataagggttgtactcacctcggggtggtatccccgagacatgtccccttgctcctcatgttgtgtttagtgcttagtatgtagtcttgatacttggagtaaatattatattgtccatgtccatatatagatagggtgtgataccaggatcataagagtgttgaggatgaagagtataccctcaagactaatttacaaccattgagtggatgatctactctcgggggtggtgactgtttgactcatcatgggggcagtaacctatctcacctcttgggggtgtatacattacgaaaaatcttacttttagtcannnnnnnnnnnnnnnnnnnnnnnnnnnnnnttgtgactaattataaatatcattcctatgttgtgactaa

SEQ ID NO: 60063 - DNA, 2478 bp, Cannabis sativa
actggatccccctttcggcctccagattaatcattttcttccctaaaagcacttgtttcctcatttttaatgaagatggacaaaattttcaagatagttcttcagtttgatgtttggaactgccgtaggttgaaaatatgtcaacctgggactaggtgcctaaggcacctggtgctctgggtgctaaaaaatgaaagtgcttcgaatctgattctgatacctcaaatatttttgtgacatgttaaattcatgtcccagtataaagtttgacccaattgcactaagacggtctcaaaaactgaaaccctagtaggggtgtcgacctgggcgctaggtgaaatcctaggctcctaggttgacttctgaggtgttgtttcgtgtattttcaacttgcgggccttggacttggatgcttcatggtacaaaatactgaaatatagtaaattggaaacaacttggtgcgatctaaacacccattccaaagtttccgaagtcaacctccccgcaagactaaggacccctcccaagtcgactgctatgactcgactactcaactccaggatattttttttcttgccatgtgtcaaacattaatgcatcacttgggtaagttattatatttaagtgttatataactaatgtacattttaatattgtagtttagaaagaagcaaaaatacgatgtggagacagagttgctactattgcaatatcaatggttatcgatatatacacagcacatgtactagctagatttagacttttaattttaggcaatagtactttttttgtgtttttattagtaaggacttattagcatgttataaagtatactttaactttgttataatataattaaattatattttgtaacctttaactttgaaatataattaaattgattttttttctttcaaaataaatgtttattcttataattagcttttaattatttcaaaaaaattaaattaaaattaaaataatattctaatttagacaaataattacaaaagaagaaaaacatacgagcagccctacgtcttcggttattacataataattgaagacaaaaaagacctatctctttggttattatgtaataatcgaagacgtaggatcttgcctgaggcaaccttgaaattaaactccacttttgtcttcccttattttgtaataactgaagacataggcactctttaatttattccgaccctacatctttgcttcaaatgacttcagtagcgagtatttttaaaaaccgaagataaactaagttaaaaactgaagagaaagatcttttttctagtagttaataattaagtttaatccctacctttagcatgtcgttaaactttgttcaaaaatgtgatattaagctctcaagttgcaagttctaattatttagtcaaaatcctaaatattaccttttccatcaaattaatgagcaaactcttatcatcattacattctatattcaaaaccaagtccaacaacgacatgtaatataactatatttaaattttgtatttatgaaacctcacttaagcgatgcaaaatgatgatcggtggcgataaatatcggtgcactaaaaatgtcgctaaaaataagggtagtatatatcaaaacgaccacctcatgaatgagtagatcacatttgtaccaactacttgtcaaaatggtacaaaagagcaaagctataaaaacatgacccaaaaaagtaataagttgggggaaatagcttagtggagattgttcttctcaaagagttgagtctactagtgaagacgaatggacacaggaggtaacggaaaaatacgttcaaagtttgaatctctaaactttgactcaaaatctcttgctaaaggtggcgaatgaggaggatccgctttgagagtgagatcttccgtgcctaggaatgacgtggcacgttagttcgtacggtagttggaaaatattcactggagttccacccgctatagttgtggttgtgggttttgctgaaagaaagaaaaagagagctgaagagataaaagcttgtacggatgagagagaagatggggttgatgttaaataataaaagtgggtctcaccacatttatgatggaggtcttagagcatctccaatggtttaagtttagaagatgcttagtgaggtgaacatattatatgacaaaatatcgagatgctatactactggagagaaaaggatgtcattctagaaatttgcatggatgctatgttgtagcattgatgctatttatttttttaataaaaaattgaagctaaaaaattattgtagctaaaaattaaggtatatattaaataataatgtatgagatcataataaagagtgttatacatcagagtgtttttaggagtaagagtgccaaaaatgatgtagaagagagataaaataaaatattatatttttaaggataattacataaggcaccatttttagtaaaatatttacattt

SEQ ID NO: 60064 - DNA, 706 bp, Cannabis sativa
ttttttttaattcggatgataaattaatgatgagaaatattaatgctgtttcctttcgaatatatgttgtacaatcaatgagttctagcaaatatatacaatttagctataaagtaatttataatgattatgacattattaaaacactgatgataacaaaagagaactgcagaaactgaatttactacttcatataccaataatctactatatgcataagaagaatggaattttgatagactttttgtggattcctattgtgtcgtcaaacttttattatttacttttattttaaaccgttcaatattatcatagtgggagtacaatttgttcactacaaacaaacatgaagcacatattcttactacttacactaacaaggatatgataattttaaatagtccacgaaataccctaaaaacaattaatggtaacacgtcattgaccaagaaatcgaatcagtatatttctaattttgtcccgaattttatagattcatctaaatgagtcagacccattgggtgcaacactacaagaaaagcgacttttgtcggcgttatttgctctagcaaaagttaattgaatttgcccgtaaatttttgtcagcaagttaatgcgcaggtaaaagttgacgacaataaacggtcgggaaagtgggttttctagcaaataaaattattttgctagtgaaagtcacttttgccga

SEQ ID NO: 60065 - DNA, 1106 bp, Cannabis sativa
ccccctgacttccaaggaagccaagtcaaggtgccaccccgatctccaagaaggttagcttggggtaccaccccgaccctcaaaggggtatctcggggtgaggctaaaaaaaaagatccaagatcaatgtttcaccaccacaaacacatttttatcaatttgatgaaaataaggttgggaaaatggagggaaattgaaactttttatgttcatagtgttcttcaacattcaagaacaccaccaacctaaaagtttcaaatctacttatttttcatcaaattaaaccaaatcaaagccaaaagacacattgcccatcacctatactacaaaacccaagcatcaaacactcacattatatcaagaaatccaacaatcccaatcaacatgtcaaattcagccatagcaagaaaaccaagaaaaagtttcaaaaatacaaccaaaaacatgatttcaatgtaaaaaatgactatggaggtgttataaatttacccatagtcaagaaatgttctaccaagtgtccaagaatcacttcaaagcttcaaaatctcctccaatggtggtaagatgtccaacccaaaaatgaagaccaaagtggagaagataaattttttgaaatgtgagggttttgtcttctttcctttcttacatatggaactttatttttgcaaaaagagggccttgtaacccaaaattgctattataaacctccactaccattgagggctaaagagcaatttccatatttttgttggtcattttctttgtaaataattttatttctttgaaatttaattattttcttgtaatttattttaattgggaaattattattgggctatattgtaaaatgtgaaaaaagtagtgagtgggaaatatttgtttgatttttttttaaaatgtaatttaagtataggcatagtatttttggtgccgctgtgccaagccgtcaacaacagaagcaagacccgaacagcacaagaaagttcctaccgtagggtcctaccgctagatacttagggggcaaatgtttacccaaattttaatgacgatgacgtgtcaagagtagcaccgcgtggcacaaaaataccaggactaaattaatgaag

SEQ ID NO: 60066 - DNA, 1259 bp, Cannabis sativa
  modified_base (1020)..(1025): a, c, t, g, unknown or other
agcaatttatagcgtaaatatttaaattcatgctgataaatatttaagtttaatttttaacgataataataattaagttatacttttagaattttcgtaagtacctggtcgttaagtgttaagtaggattagtcctagacatagacatgctaggtagaaacgggctaggccatacctaggcccacactttctaaggacctaaaataaaaaataaaattttcattagacttttatttaagtaaaattaaatgtattgtaaacaacatagttagctgaggtgtatgatacattacacaatagtttggatttgagtctcataatattgttttttaatatttttttttatatatttttgaaattgaaggcccaaaaaatttaaattgctataggctcatatattctcagggctggctttgatatatttaaattatttttaaataaaaaataaaaatttaataatatagacccatcaaaaattgtcacgtgactattaacttgatattttttttttgctaaaagaccaaatttcatttagctaaaataagaaatttggtgagcacgtagggactcacctcccataaacgaaacaaaccattacaaatatataagacaaaccccgtctagcaagagcatgagctgtctcattatgtatccgcgaaacccaattaaaaacaaaaataaactattactttcaaacccaattaatgtatagttatttatctgcaatcaaatataaactaaattagttatatgtagtagtttcgaaaggtacattttccccttcatttttaaatttttacatgcaaattaattagtatttttttactagctactttatttatatcatgaggagcttctttacacttttatttttaggtgaaatgaatcgatataattttttcatggcttcttgtttacgatttctttgcttattacatgatcaattaccaaattggttctatttgtgttatgtttgactaattatatatcataatgcttatacatatatatatatacatnnnnnnatatatatatatatattattcattcaatgaataaaatcgtaatttattatgctatcatttatgcaattcataatgagtatttcatcataacccatatatattattaacaaagagaaatatttcttatattcttataaaatataatgttatggtatgacatttttattaagtagtacccttttctaattttctaacttctaagtgttcttttattttaatgattaaaaatatatc

SEQ ID NO: 60067 - DNA, 3057 bp, Cannabis sativa
agggcaaattgagatcaccaaatgccaagagaaaacttgttagataatagtcctctttgagacgggacaaattttttaaaatacactcttcgagttagtgtcaaactccaattgaactaaagttctatttactctctatttactcattccctatccaacaataactacaccattacatatttatactaactagataatactaacaattagtaattagtccttataccctttcatgtaacactccccaacccttcaaaatcaccaaggtggtaaaaataaaaagagactaaaaaacaaacacagcagaaacatacaaaatataaaacatttcaagcccacatttatttatttttaaagattagcttcaagcccaggcccaaaattcttagggtagcaacatcttcttcacccgctacaagttacgtcccttgtttcttcatcttcttctcttctattttttttttgaatgcttggaaataaggaaataacactgtatatgtatatatattacctttataaaagtaaggaaatatatatatatatataatgatatatttctgcaaatggtaggagataaaagctaatgtcatcgtctctgctccgatggccttctccaatccggcgcgaccaagcttccgatcgtcctccagtgatcactttgtgccgtccctcgctgttaaagatccacagtccgatcacatatccactgtcgtccacgatcaaaaatcattcgatctatccgcagtgtgtgaattgattcccatagtgagtcaccattaacaacaaaaacagtctctctaacacgctcaaaatcttgtgcgcgaagatccaatgccatctctgtcttctccgacgttcgagttcttcgagctaccttcgttgatgcatatcgagaatccataacatccgatgaagccacgccgatctcctccgctttcggtgtttttcgagctccatttgttgccgaagatctagaatccttaacatccgatgaaatcatgggcatcttctccgactttggtgctctacttgctgttggcatcaacttacatcgagcatgagtcaattgcgatctacatgtatctgctccagtagaagcgttgctgccgacgaggatgagatgtttctccattggcttaatgatgctcactggttcctcggaactatcaatgatatttttgacctccggtgaaatagatggtgcatgagctgaggaatccaacagtgtcgcagtcgacaagccgtggctctcaaatatggcatccgtccgcaactccactgatctaatcattgatcttacgaactcacgaagctctttgttagtcatattgtggagctctatctctcgctgagattctctcaatgaaagcaccaattgttagataatagtcctcttcgagataagacaaaaaattctaaaatgcactattcgagtcagtgtcaaactccaattgaaccaaagttctatttactcattccatatccaacaataactataccattacatatttatactaactagacaatactaacaattattaattagtccttgtaccctttcgtgtaacaaaactatatatacacgaccattgaccatcctttggtgtcaatatagtcacaaataaagaaaagccaaggagaattggcactttaaccaaaatattgcatacatgctctcttagagattttatacatttatgaaagaaaattaaagtatattacaactctattacaatataaaatataaaaactaacaaaagagattaaataaatattacaacactaatattttatacaatatacatatatatgaaaagtagaagaagaagaatataacacatatatataacaaaagaagtatatataaaaagggaaaaggtgtgttgatgctctctcctttctctcatgtcgaagaggaagaaggtggtgtagaagcctgttactccggttgctgctatggagattgctccagttacgcttcctttgatccaacaggaatcgtgtgcccattctgagatttttttggacccgtgcgaagagctagaaactgacttgaaggaaggagatgaaggtctaactggggttaattccaattctcgttctgtaagttgggtagaggaggtagagatgtcagattttcaggcttcggcaaaggatgcttggagcaaattcaaggtaaatctaatttgaaccccttcatctaagttggattatactgaacccataaaaattggggatcaatttgttgctaaacttgacctagaagaagtagaaattgaggcgtcatattggaaatctgcaattgtccgtatagtcctaggtgcgaaccctcccttcaaagtgtttgaaggtttcattaagaggatttcgaggaacttgggagtggagaaaattgttaggatgcataactattttacattggtaagttttagggatgaagttaccagagatttagtcttagaaaccgaggtgtttcattttgacaagaaacttgtgttactcaggctgtggactacaaacatggatcctaatcaaatggtgaggtatgtccctgtttcggttagactaaatagcttaggactgcaatattgggggaagaacacattgagtgctttagttagcactataggcaaacctatcattgtggataaaagcactcctgagaggactatgatcaaatttgcctgagttttagtcgatgttgaaatttttgacaagcctccaagaactatatcatatgttaatgaaagaaacagccagtggaacaaactgttgaataagaatgtttgccttcaaaatgtgttgcatgtgctctcttgggacgtactgtagaaaatttcaataaaggcaaaccagttgtttggaagaagaagcaacaaggggagaagaagaagggcctgatggacaataaagggaaatcaggttctgaacttgtattacaacagcaagctatttctaccgtgagtaacacagaagaaaaatcgcagtagtttcatgttgttgcaaaagaaacttagatggtggtacaagataatcataaggaagtggtctttgatg

SEQ ID NO: 60068 - DNA, 1169 bp, Cannabis sativa
taagaatgtctgagaccgtttctcggtcaaagatgtttcgcagcttttgaatatcccacttcccattatttaacataatgtcagccacacagttcaggttggtagaagtaccctcgagaggtttcgggtggaaaccttttctatgcggaatccagggatcaccccagatcttcgtgttctcaccattagcaaccaacttacaagctcctttcctcaagatggaagtttccttcaccacacttttccaaaaccaagaatctgaatctttgtatctgcagctaaggaagtctttccctttgaggtatttggctataagaactcgacaacacagagattggcttccattcaggatattccatccccatttttccagaaatgcctgattcatctccttagttttcctgaagccaagaccacccagagatttaggaagacaaagtttgtcccaagccttaagataaattccgtgatttcctttctcaaaaccccaccaaaaatctctaatcataccatcaattttgtttaccattctagtagagagtttcgaagtttgcatcgcatacataggcatagacaagcccactgactttatcagagtagctcggcctgctttggataaagttttagccttccaaccctgaaactttgccgtaagattgtcaagaataaagttgaaatcaacatccttctgtctagatctaaataggggcaaacccaaatatttaatgcagccttcaggataatcaattcccaatgcttccttgatttcttctcgcaggcttaaaggggtatttttactgaagaaaatagacgttttgagcttattcacctgttgaccagaccacgagcagaaattctctaagcatctccagaatccattcacctcaagtaaattagctcgaccaactagaattaggtcatccgcaaagaaaatgtgagagagtacgggtccacctctacttagttgaactcccttaatagacccctgatcaagggcatcatgaaataatcttgaaaggacttcagctgcccaaatgaatagataaggggagaggggatcgccctgccgaaggccacaagaagggttaatccttccaacctgacccccattgaggcaaatgtttagagttgaagtggagatacactgagaaatccaaagccggaatttt

SEQ ID NO: 60069 - DNA, 1718 bp, Cannabis sativa
tttattcgtgcttacatgtcgtgccttttgtgtttctcgtgtccaagtccatattttttcgtgcctagtcgtgctcgtaccttccaagctcgtaccaatttcgtgtcgtgtcaaaaatttcagcctgtatatacagcactatatgaaactcattcaaaatatatgagggtttcgggtgtgagaatagcaataccgaactcatctgtttatagtgaggatttggacaagttgtggatttcagatttttattattattattctagttttgaattaaattgatttaaacatctatacaaaatcttttactttcacttttgtataatcataaataaagtttagtataactactatatgcaggttccagcatatgtggcaacaaagatgacaaagtttgaagcaagcttatttataccaagctcagaaaagtacagcaaagcaagtgtaagaagcataggttatgagaaatcttgttctccttactggtctcactccttgctttgcttcatcatatctctcctaccacataccttcctcaactaccttctctattcaaaaaatgttgccttaattaataattagtaatttatgctatgaacattaaacatgatgtaataactacatacttttgcttattaacatttgtaaaaaataggtgatggtttgtctttggttaagatttgtcctttgaagaaattatcagctatcacctcaccataattgaaatattgtcgtcctacgattaactgtcgttttaattgaaatattgtcaattgtgatgtcgttttaagaagatatcgtcgtttgtcttcttactctcttcaaaattctatttggagttcaattagagcactaagcagccagagagaaacagccccaatgtcacaatctttgtattgggttgttgcctaatcttttaaaagagctaaattttattaaaataaaataaaaagagctggtaaattctcaagaaagtaggtataagtagtttatcatagtctaatttgactcatcaacaagagttttgtgctgcattgccttttactttgtctctttgagttttgccaccttatttacggcaacaaagtaggaaaaatgccccaattgagtaaagtatgatgaggcaatgcatttgctatgaaccattggagagagtgagaccagtaaggggtacagatttgttcatacccaatgcttcttacacacccaatgctatgaagattgagctttcttttagctttgtcatctttgtggccacatatactggaatctgcatacatacacatagttgttgtaaataatgacacccaataaatgtagacagatacagtcataaaatcagaaagctaaaactagtttaacttgaactctattaatatctgatgataagacatatatctcatcatgacttgttcaatttgtatctgtagccaatttgtttacatattgattacaagagaaaagttcaatgaattcacctgtgaggaagctcaagatgtaacatttaaatgtatcaacattgttaaaactagatgtaatcaatggtcatactatggtattatagtgcaatagtccaaaacaataataagctaaaatgattcactacaaatcttacttaaaattaatttttttgaccatctgttttgcaaaagttatcgatttgactctttactttgttaaatgataaaatggactctgcattttccaaaatggtaaaaata

SEQ ID NO: 60070 - DNA, 1867 bp, Cannabis sativa
aaaaaaattaattataattaataattaactagttaatattattcatgagaagattatataccagccaagatccatcactaacatttagtgggttcatggatttgagaaatgttggataatcgagttcgaaacctgatgttagttctctcgctcttgtccatgcagctaatctatctttatgtgaagctatcgttgtcattttcaataatgtccaacgagtactgaagatttagttagcgacgattttaaactgatgcaagaacttcaacttattatagcgtcggtctagcttcttctgtacatgtttgtattcaacaaaaattaccatttagtaatgataaaaaagtaaaaaaataaataaaaaccaaagattttgacaaagaaatgtgttaaaaagacaaatagaagtgaaaagaagatcaagaaagaattagatccattattataagttcattgataaacatttcgcgaagaaaaactcatcatcatttgtaataaatccaacgagtgaaaaattaatgtcaatttttaaaccaaagcaaaaccttattatatatagcgttgctttaatcttctctatacaagtttgtatttatcataaattaccatttagtaatgataattaaagattatgaacaagaaatgtgttaaaaggactacaaataaatagaagtggaagaatgaagaagagggaattattaatccattaattataactaacttaataaatatttgtaggaactaagaaaaattcattaatgataattattaaagatcgatatataaagatattttaccagtttataatggattgggtttccatttttggtgacgaaatccttttctttttgtgttttgtgctccaagaaaatcataggctattcttgatgatgtgaaagaagaaaatagtacttaaatttataaaaccatggaaaataatttttatatatatatatatatatttatattgtccactccatgcaccgttaattaattatttaagtaatatatatgactatagccaaatttatcattaattaatttcacgtaatcaaacaaaataatgtaaaattaagggtgcatttgtaatattttttagtcagttttttattataattagaaaagtgaaaatattttctaaaaacatgttttttaaattattttacttttcaatttttattgagaatcaaaattttaaaaattttaaaaacttttttaaaaaaattaaacagtgtttttttttcttaatcaatattttagactgcgatcctaacctggaccttgggacccatacccaaattctagaccaagactcacacttcgatccgaacctgaacctcaactcggacccaaacccagaccctaacccaaactcagaccccaacctcgacccagaccctaaacacagacaccgacccttgccccgaaccccaatctcagacttggacccgaacactgaacacgaacctcaaccctaaccccagtactccagactcggaccccacccccgacctcagacaaggatcccgacctcagacccggactcctggctcagacacagactccaactctagccccatacctgaacttggacctgagcccaaacccgaactttggacccaaatttgccatcccttttaaaaaaaaaaacttaaattaattaattaatttttgtaagtaaaagagcattattattgaacattagtggtgtctagcactacttagaagtgacaccttacgattggttaagaatattccttaaaatttagggaaattatagtaaatggccccaaatcatagaagtatgttagtttatgtcctctttttaaaaaaatatagcaaatggccctaaatcataagactatgt

SEQ ID NO: 60071 - DNA, 1977 bp, Cannabis sativa
tgtttgaaggcttggaagttcaagagattcacagaagttccattgtccacgagtatacggtggacgttatccccgccaatatttacaacaatgactaatgtgttagaatgtgggtggtggacccatctggcatcactttccatgaacgtgatgtcatcgcactctctcttgaacaacttctccggtcgctcgcttaggttgttcacattggggagtggcttctctttggcttcttttgcatatcgctcctgcgactttttggagtcacctacaatatggggtccgcctatgatggtcaggatgttgtgaggagttcttgaaccactcgcattctgattttcttctttgtcatctgctcggggatgactttcctcattctttttgtatttactgaactttcctctcctggtcagctcttcaatctcgtcctccaaaacccaacactccaaagtagtgtgaccaatatctttatggtacttacagaattttttggggtctctcttgtcgcggattttccctgatcgggggaggcttcttgaagaccccattcttctcttcgattgcctagatatggtctcgaggtactgcgagctcggtatagttcacgaagcgcggtccacctttccttttcggggaggattccttctttggaggggacttggccagttttggacttcgctgtcactatggactgcgtcttcttgggcttcgtcctctagaattcttccctcgaggactgcgggatcgtgatcgcggcactggtgatttacgtttatctttgcctttctctaactctaccagagaattctcaatcctcttatgcggttcttccatggcaaagaattggaccagcaattctggtcttcgagcttgcagttccttccagaaatcggttcttggcaggacacctgttattaacatacacactagcgaagactatggagccttctcaacttttgttacttcagcattaaaacgcttaaaatagtcttgtaaagactcaccaggttcttatttgatgctagccagagtagtatagggcgccctataggtcatcgtggcttggaaatgcatgaggaacaggtcgacaaaggtctcccatgtcgagatagaagcctcgggcaattggctgaatcaatcgtgggcattctattccaatgtttccgagggaatgcgacattttgcaacctgaggtacctgatccacttccataatagtattgaaattctctaaataatcaatgggattagaggtacctttgtattttagggatttggataactggaatcccttagggagccgagcttgtcacacttccgcggtgaaaggggaggtcccatgcagcttgtatatgggctttctctgctgctcgagcattttcaaagcctgcaggagcatgctttggtcaatacccccgactaagggagcagtgactggtgcggttgcaagggctattgctattgcagcgaggtttgctgggatattaaccccagtagtcgcagctggtgcgttaggcgggttggtgcgagtatttacaccctgatcgcccatttgggaatcacggggctcttcgacatcacgaggtgcgtgggagcgtgctttgaaaacagcattaaggtgatcacgtagatcacccttgtgaaccttatatcgtcctccctgcggtgtttccacagaaccagacctcgtgtacctgctgggtgtgcgaccatgtgaggatgaggaggcagattgtacgtcattgtctcgcaaaagtgtgctgtgaggattgcgtcgttcggggtcttcctcggtctgtgcctcctggttgggatacctcgcaaattggtcccttgaggttggtcgattcaagtcgagtccttctgggttggtcctccgttccctgcgagtacgattattacgatgtctagaattagttacttgagggttttttgtgcgagcagtgggtgctcgaggaggacgtcgggccctgttctg

SEQ ID NO: 60072 - DNA, 507 bp, Cannabis sativa
gaccccgaacttagaccggaccttaacttggccccaaacggtaggttaggttcagggcccgatccaaggtgggatgtgttcatatcgtggtatgatataaaatattgacttttttagtaacaaaaaggaaaaatatacatgagttaaacactagtaaaattttaaaataataaaaaactattttccattctgacttttcataacacaattctaaaaacaaaaaacacaattctttttttagttattttttgaagatgatgttgagagttttggagtgcttggagatccttttacggacttgcctacgtgcctggtgtgagttctaaacggcttagagttaaccacgtatgcatacagtatttgctcaagtgatctccttgcttcggagttttcattcagtcccactaccagtctaccacacacagagtgagaggagggccaagaagtggccatggaagtggcaatgagctgctgcagtccttcgccatttctcggcaaattccgaac

SEQ ID NO: 60073 - DNA, 914 bp, Cannabis sativa
aaagtcttttttgatcacgttccaatggtgaatatagaaccccaccgacattccatctggccccggtgccttatcttgtcccatggatcttataaacttcagaatttcattctctagaggaatagagataagtgtctggtttgtagtgtcttcgatgagcggattgttgattagagagttcccatccaagtctgaacgtgttctgctggtgaaaatgctattgaattttgaggagaagagatcggctatagatctcggatcagttacccagtcaccgttttctgttcgcactgtttgaatgtaattcctccttcgtcgaatagcggttgaggccatgaaaaatttcgtgcatctatcaccttgttgaagccaagctaccctggatttttgtttccagaaaatctcttctctagtgagagcttcgctaaggttcgcccttgcttcccccaaggcctcttcatgaatttgatcttttaactctattttttccaaggctaacttcgcttcttcgacttgatgtctaatatgccgaaacttggtcttgttccacttctgtaaatggtcttttgtctttttaagtttacgatacagattaatcattgggttggtatggagctcctcacgccatgcattccgaactacccagaaacacctcgggtctcttccccacatcaattcatacttgaattgtggttttgaacatctcgcacccccctccgtattaagcattataggtttatgatccgacgtactaacagtgagaagttccactatcgcatttgggaataaaatgcgccattcagttgaggcgagagctctatcaagacgggctctttttaatcgcaacacttccttgggttgttgaagccttttggtaccacgtgaatctccccccttggcatcctaaatcaata

SEQ ID NO: 60074 - DNA, 1009 bp, Cannabis sativa
agaattaatgagtttcaacaagagtgtagttaatattaaacataaactaagaacacgaagttttatagaggtgcaaccctattatatggtaatagtttactccccttttagttgtatttaactgatgagtagaaaagcaagaatgacttgatctctcttgaaagctttacaagaaaaagaacagacaaatgattttggatcctttcataatggaattgttccactatttataggagatgattacaatggaaattggtttcccaaaagctataaaactatgaaaataggaaataaatgactttcctaaactgtgagaaatatatatatggaaatccccttaaattgggattcgattgcatgcaaaataggaaagaatctttaacgaatctgtctcatgcgatttctcctaatcgggcagcgtgaggtgctaactaaatccctccaaccaggacaacttcattcattctgtacgacaagcttttccttacttatctgttattgcatctaacaaggtgtatatcttaagcggacacttcaagagactctttcctctgcccaggtattgatgttatgatacatgtcacccaaagaaacatgccacatcacatgaacaagattcgagataacaaccctattaaatcaagagagttgatcactagggtcagtatctccagtatattgggtcatctcaggcattttgaaatttttggtaagcttagcttctaacacattcttagcgcacgactcccggtcctcattatcaaacttcgagtcatcacccccttctatctccggtatactttggcgagatccttccagtggattgcgagttcagccaatattccttcatttacgatatcttgttgttgtgttggctcacctctttgagtgtttatacaattcttgagatctccttgtttggcattaatcctttctctcaagtcaactggagaaattttctctgttaaccttttggggctgcatttctcatcccgcccttggtgtattg

SEQ ID NO: 60075 - DNA, 2092 bp, Cannabis sativa
tctctctctctctctctccatattcatcatcttcttcttcttcataggtttctcgcttttttttttcaaaatctatacaatcacattttttatttttaagtttctctccgtgttcttattttatttcttgtttagttcttcttcttcatcttcttttcatttttttctttagtttttgaagttttcagtcatgttttttggaaagataagagtatagttttttaatctgattttccagaactgggcttgcaaatataacctctattgcatcaagtcttgaggctgtgtagaaggttttttttttttttttttgaaaagggggaaactttattaaaaaaaaaagccaatacaaacaaaagcactaggccaaccaaacaacaaagcagcagccgaaaaaaggctgccacaacccacaacactaccaacttttaattacattaagaaaatacatatttttcctacattctttaaaaggacccttgcttaacaatctaagctggacaattttctgaacttctaaactcacacttctaggggttgcacaatagagatcaaacacacaacctttcatgttcttccaaatcaagtaaagcttagcagccacaacaacattcaacacacgacattgaggctgctggttcaaattgctgcaccagtgaagcaactccaaagtcaaactaggccaacaaaagtttcccaaccacttgttgatgacagaaaaaacctattttgagtagatacaattgaagaatcagtgatcgtgagtttctacttcagcttcacaaactggacagaggacactttgaatagctataattcggtttaggtagtcccgagttagcaattgggagttcaaaatttgccaaaaaataaacttatgttttggcacaataagtttatcccaactagcactagcatagtcaacctttacctcctctacaatcaagttatagaaccttttagcactgatttttttttcctttgacagcttgggaaagtcttgcttcatccatgttgtctcttatattcaatatcttcttgaagtaccaactatcatcaatcttctttggataattccatatgtcatgattcctaaaaaaaattgagttgatccatttaacccataaacaatcttgcttactagcaagagcccacaaatattttgccaaaaaggccttgttccactttttcccctctcgaaaaccaattcctccaaggtttttaggaaggcaaaccttctcctaagaagcttggtgaagcttactactattccctgaagatccccataaaaaatctcgacaactcttatcgatggcagctgttatcttagagggaatggtgaatatactcatccaaaaatttattataccaagcattaccgagtggatcaattgagcacgacccgcaaaggagaggtttctactcgcccagcaattgagattcttgttcagtttatccaagataactccacagtctttgaccttccatttggttggcctaagattgacccctaaatactcaaggggaaatcctccttcttcaattttgacaatgtccataatcttcgatttaacctcttcactaactcctcaaaagtagatatgagacttcgaggtgttagcagacaaacctgtgtcattgcagaacttcatgaaagcatcatgagtaagccttaccgaattgagatcacccttgcaaaagataactaaatcatctacaaaacacgaattcatcaattgaagattcttacataaagggtggaagccaaacccttttttatttgagctttgacgcagcaaccttgtgaggtaatccataatcagaacaaaaagtaaaggggacatgggatcttcttagcgaagccctttcttccctttgaagctaccttggattctaccattaagaagcaaatgatagtttgtacccttcaagcatgtcattatccacttgatgaatcgagaaggaaagcagagcaacttgagtaaatcatccacaaactcccagtcaactgtatcataagccttactaaggtcaattttcattatgcacctagttaagatattcttcctagtgtaatgttgggttttatgcc

SEQ ID NO: 60076 - DNA, 1303 bp, Cannabis sativa
tcttttcaatttcttttcttctttttctttcattttcagctacacatttaaacttccctatatgatttaaagaagaaatatctccaaaaaaaattgaaatctcacgatcttcaactgctattgaagaattagcccacgttttttttttctcttttgtttacaattttttatatatagctcgttcttcatcttctccaactccctctatgaaaaagttctaattacatgccctaaagcttcagaaatagggttgaaatctgtctccaaaaaaaaaaaaaggaaaaaggaaattagatgattgtttttcatatgataattttgttaagcccatacccaaataggggaagagtactgctaagaagaaatctaatatcgttaaagcagaggaaattgaaggaagtcctattgttgttcgttaaaaggggaagaatcaaaattctccttttattgaggtttgatatgacatacaactttaaatcaactgttatgcaactatttaaaaaatcaatatgcgcaatgtattaaagaaaatatttctccctgtatgagttctaaaaaatttaaaaaagtcaaataaattttcttttaacatataattgcttggatgtagaagaataggcttagatcgtcctttatttgaatggttggtaaccttctttcacttaatatttcagttacagttgagtgttttctttgttgcattctagcacttgtttcaacttgtgtacaagttcttcatattttcaatccattgagatgaattcgctactagctttgtaatttatacaacttattccttgatcaaattgcctattgtaaaatatgaaaaatagaattacgttcctttcctgacattttgaaaattcatttatggtcagtctactatgagaaaactataaggaaattgcaatgcaacagttatatttgcgagccaactaacataaaaccatataacaactaataatttcacatatttaacacaaacgaatattatacaacaatcatgttttatctgtttaggtcgtatatttgacaatttcgaaccatatttttataatactatgatgttgtagtagcaaaacagttattcaactaacgtgcaacttaattgcaactaaaaatgttaaatgtgaatttgtatatataagaaactatttgttagtattttttgtcactgatcgataattaattgtacctttatagtaatatgtgaagaaataattattagacctctataaactaactttatatcaactaatttagtatattaataaaactaaacatgttataaaagtttctttaa

SEQ ID NO: 60077 - DNA, 867 bp, Cannabis sativa
gagttgaccgtgtcaacccgttgaaccagccaacacggtcaaccccaacccatagacctgcaaacccgaaccatttcgcgggtcgggttcggatacaattttttgaacccgaaatccaatcaacccgcctgatgttcaacccgcccgatgtttagccctaatgcaaggtaatgtattttatttatttttaatattaaatatataataataattttgtcatttaaaatatatcttacaaaataactatcatataatatagtttaactcaaaaagacaatttagttaatttaaacattttgattacatttcctcataacgtaaacaagataaattattattattctattttcaaataattttagtaaataatatattataaatattgattctgatgattttttatttattctgttatattttttaattaatttattctgattctgaatgctgtataataaacatgctattagttgatagcatcatttttgctcttacaagtaatgtatttttataacatttgattctcaatctaatggtaataattcatttagttataatagggcatctcctagattaataacttgttttatttatttatcattcaaaaaaaaaaaaaaaccactcacattgcaataatgtagttcatgtttttattcaaagaaaattatcattgtttattattgaaagaaaagttacattaacaaacttaatcgaaaaatcttcattaacatgagatagaactattggaggaactcgcccatccgaaaaaccaaaaattttatacaaaatttatcaattgatctcacattttttattctattttaaaaaataatattataaccaacaaaataaaacaaaaagaactta

SEQ ID NO: 60078 - DNA, 6681 bp, Cannabis sativa
gagagagagagagaatgagaggtgtatttttagatttaatgtgaagtgaatctatttttaaaattttaaaatgtataagtttagagaattaattttccccattagtatgtataaataatcaaattcccttctattatatctttcaagagagatacattgatgcacactttatttatttcggcattcaaaagaatttttaaatctaatttttttcatattcgtgtacattataattttttaaaatatcttacaaaatcttaagaaattcgaaataatttacaatatagaacgcaatatttaacaatctacttcatacgcgtataaaataaaattttgcaaagtatcttaaatagttataacatacatgatcataagaaaaactttaactaaaatattatttcagataataaaacaggtaaaaatgtattgatacatttcttttaagggaatccattgaattttccaaaattatatttcgaattgatattttgcacaaaagattaaaaaggagagatccaactcattgaccaacccatcttaatctgtcttcttaatatacagaaaattttggttcaaaatatcaataaacatacttatagagttttaataacaattgaaaattttccttaaaactcgtgcaagtcaaattttttggctcaccccctattttcatttgaagttgccttctggttctgtacaaataacgaacttcacatattttctttcaaacaactcttatatttaatttccaatttagtggacatcattctatgttcttttgtagatacttcaatatccccttgctaaaaaggcaaagccacacccccaaaaaatgaagcagaaagggggatatcatgcaaaattgacacatgatggctctgcctctgcctatccgaagataggaaaataaaaatagtaaataaaagaacaaaaaagagagaaagatttgttgttaggggaacgagatgagtaacttttatataaagttctaagtgaccttatgcaatccgatgtttagatcggatgatatagaaatgacaagcggaagggattgaagccaaacggctttgaaaacccgtttgtgatgagctctaattgattgagatggtttgcttgcattgtacctaatatcaaagatgtgaatcatgggatctgcagagccagatgtaatgtataagccatcaggagaccatgactgatttatcagagctgattgagattcactgctttcttgcttccacccaaaagcatggatttctgtttgtctcagtctgatgtcaaacagacgaagctgcctctccagagtcctatcataagccaatcatgtcaatataccataacaggaacaaaggctgcataattgagtttagtccacataccacattgctcaaactataagcaaaaactctttctcagcatatatatataagcaaacaccataacagtttacataccacacattattcatttcaatatagttgttttcttgagcactataatgactggttaacaaataatggcacatcaaaacttaagggtcagaaaaaaaaaaataccaagatagtacatattatatgaatcactatttatgtacagtgttgatacaaaaacgaatcaagaaactattaaaacaaactaagacataactaactttaacaactaacagcaaagtgctatttatctatactaacacatattattatgaaaagaaagtagagacaaaaagagatattctcacccagcatgaaccatgaatagattaaagtcacatggatttggcaacacactcatgcatttactttctatctgatgcttgaactctgctcttcccacattagcatcaaagccaataattctcttgtccgccccaacagatagtacaatatgcttctgttgcatcccggcaactcccattacagcagacgaatgaaaattcctgtgcaatggctttgacttccaaatattgtcatctttctcttcccatagcataacagcatgatcactaccgccagtaacaaactgagaattttcccatggcatgaaaattatactattgataatacccttcacatgaggcttatcatccaaaaatgtgacgcgcgccttctgtcaatatcaaaacaaaaagacaatagatagtttgtcttgttaaataaaaggaaacacaaattctagaaatttttatgtttttgtctgggtaatatttattccacttccacaaatgaactcaaataataaaagaggcctagtctaggccttaccccttgtgttctattcaaatctagcacagatatctgagaatctccatcatcggcactatatgcagaaaataaactagttccatccgggtgccaagctatatcttctggccatctccttcgtttttgggatgcacaatcagtagtactaagcagagatgcacctgaactgcactcagtaaagtacagggacagaacatattaagcaaaagagtatatgacctgaaataagacaaaccagcagataaaatagacaagttcattcctatatctcatttaactcaagttttaaattattacaaaaaataactatatgcaaatttagaaagaaaaaagcttatcaagaagtaagagactttaccccctggcttgcacttgccaaaaactgactgctccatccaaagcactgtaaacatttaaaacacagcacaaaattaagttcccaagaaattattaattattgagagtaaaagttattataataagaaataaaagacttgcagattcaaacacaaagagataagcatgaggattttgaaaacactgaactttcccaaaccagatgacagatgacagttgctacaatgttatataaaaatactgatgatagaaaattgatccaaatgaagcacatttgtcagtctcaaacctatttttcaatgctcactgtatgaataataacttcagagatgcttttattactcctaaaagtataattattatttaagcattgttgttcttgttatgattccatatttctgttaatactaagatagaaactagttatcaaaaatattctatgttaaaagaaaggaagaagaagaagaaattttaatgaagttagatagctgcttcttttccctttttattctttaattttttattttttgaaaaacggaaaaggatcacttatcttaaactgacccccacccaagtttattgagtatccacacttaaggcggaggaaaaccatggttattggttacagagaaatatagaaaacaaaattatattctcttaaaacttaaaacaactaccccattggataaaacaattttcctttttatttttaagcattaaaatgaatttaaaataagtagacatcctaatgaaaatagaagttgttttatccaatgggggagttatatcataactatgtactaagcatttacaatgatctaaaattaaattgtaatcgagacatgctctttgactatagttttaattccatatcatacataagccaaattaataatggagctatgatcatcatcgtatcacttcctcttgcccacactctatttaataataaagaggtaaccatttgcatctagatgaggtactaattaacctgagtttagacatcaaaatttgctctaaacacatcatagtcaaccaaattggtacacaaaaatctttcaaaccataatagcctgtgacacaaatttattcataaaaaaacatgataattaccttgttacaaaaagctgatcatttactggacataaagcaagagctctcaattttctcttgtgctgacttgagatgtgattgctagtgtcacaccgaataatgcatggtttagagctattacgtaccaacggaatcaattctttatgctccttctgttctggaatatagaaaaaaatttaattaaaaaaatccaacaaaagaatataatagaatagaatatgacataaggttaacagaaaatgaaaagatgtcagtaattcgactcaagaggtacacattcaagaaactaaatgggagaaacactgaggcaaaacaataagactcttaccaaattttcttttagtccctttctccttctcatgggttttagtagtttcccgttcagaatatattcttgaagatttgtctccttttgctttgacagcactgttggagagattggagacagatgaactggcttgcacagtggagctacgtgaagttttagagcctgatgacactaaaggttgggaagtttttggagtaacagcaggaattaaaagttctggtttagattgtaattgttttctagaagaattttcattattccgaactggacttgatgatctgcgctccactttcacacttttggttccattatcaactattgatttagattgaaattgtttgctggagctttcattttgatgagaaggactaactgatcggcgctccatcttaatacttttatgtccgttatctgcatttttcttagatgacactgcacctcggagacgagccaacttagtttctgaatcaagcaaccttttctctgcttcttcaagctgtagagattttaaagtactattagcttacagaatccttttgcctaaccaatgtatggaacaatctacatggataacatcccaaaggaattaaaataaataataaaaaacctaatactttaatttaacgtataagctcatttaattagtatcccaaaccaataaaattagatacaatcaaatcatgtttgggaagagtttcaccaaaagttcaaatcatttattgtatcaaaaattcataaaagatactatatagaatcataagtgacatatacatacaaatgatgaaattatacaaaaataaaacgaaaatttacgagaaagagtaggataaggttgtccttaagagtaggaatgttgcaaactacagctaaaagagcaaaaaaaagttactaaacacaaccaaacaaagcattttttttagccaagagtagctaaggaaactgggggaaaacaaaattctgttgctagtgaaacccaaagaaaagctagaaacttaatttatttatttttcttgcaaaaaaatcacatccaactttttgcttcagagatggtgatttctttccaaccaaatgacacttgaagttgctataaccacacagcttcacataacagatgctaccttagacttgccaaaaccaatagtcttctcaaatcattaacacccccatatctttgaagaaacccccaagcaaactctgcttcatctacaaaaccatatatttctggccactctacagtgcagacactattattcagtgtctcactacttccttgcacatcacacaccgcaagggaaattgactaaggtggggttttttctttgtaccaattcacaagaataaatcctcctaagattaacccgtcaacaaaccttaattctcttagtaaggtggattcttttttctttgaaccaattcacaagtataaatctttctaagattaaccagtcaacaaaaaccttaattctcccgggaacatgtgatttccatatatatgtatacatagatatagatatatatttgaaaagttctcgaaaaaaagtaagatactcaaaatctgccaaagcatgaaaatgattttagccaggatagattcctgaatttcaaaccaggaaagaagcagcaacaaataaattttctaaaatgttttaataaagaaattggatcctccattgctgaatcatttcaattccgtctgacattaaattctaagaagatgaatatcaacagaattctaagtgagcagacaatggagatatttccataagtatcgttctagaaacgaactgaattccccagccctatagtattaccccatttagcaaatagaggaaaaatcattaaagttaaaccctgaattgactatatcccaagcaacgaagtggtttctcctttcattgtcaaaaccatccgcctaatgttgtcacaggcaacattatcagccaatgaagcaagcaactaacttttcagaaggttgaatcctagtattttcaaaaaagaagaaaccttcatttctcaaaacaaaattctaaacaagcttgccggaagagtaatacggattcgtacacacacacacatacacaaatatatattatataaaaggtagtgtggagattgaagatggattagctaaggacctgagattggtaataggagaggcggttgcggagatgttgaacttcgcgtgtacgatggtcgatgagagcgaccaaggcctcctcctgctctagacgctctagatgagtgtcgctgctatctccgttgtccgccattgttacttacttcttcattttcgtttttccttcttcttcttcttcttcttcttcgtgtcgttctattctgctcaatatgatgattatgaataagagaaagggaccgcccaaagcttcttgtatgccaaaccaaatgaaagaaaacccaaattgtaaaaactaactcctctcctctctaacccaatttgtaagaacgaacccatctgtctttttaatttttattattattataattattattatttattaatttattttctctaaaggaaatgttttagtggtgaatttaaattggagttttatttgtaaaaattataaatacatctcaattaaataataccatcacagaaaa

SEQ ID NO: 60079 - DNA, 1186 bp, Cannabis sativa
tgaaggaaaagatgaagaagtggcacaatagtaggatcaaagagagagtttttgtgaaaaatcagcaagtgttgttgtttaacttaacattgaagctattttcgggaaagctcaagtcccgttggtcgggtccatttacggtgatggaagtgtatcctttcggggctgttgtggtgaaagatgaaaagtccggaagagaattcaaggtcaatggacaacgattgaaatattattggggagaagaggtcaatcgagaaaagacttctatctccttggaggatgcttgaggttggtaagttgggggtgccaaaaagaaaaagaaaaagaaaaagaaaaaaaagagagattggattgagaaaagaaaaaaaaatgaaatgagagaaaaaaaattcaatgaaggcaccccatgaaaaaaaaaaagaaaaaaaaaagagaaaaaatatatatagctatacatatatacatacttatatgattatatatatatagaattctttctagttactaatgaatttgcaatgggtggtgatcttgatttcaggtgaaagaaaaatggaatgacagaaaaagagctgctgcaatctggtgtgagcaaaattgcatgttgaagcagtaggtcccagtacaacattggattagcatcgcttcagcattctgaagcagagatagttacagaatgaaattgctgaagcaatactgtagtgatgctgtactgggagtactgggttctaaaaatactagaagtggacttacatgctcactgattgaggggtttttcttctttaaaaatatatatataaatacagatacaatatctgatatacatataagaaaaaaaaattataatagattttagttatattaataagtatgtttttcttttttacttttaattttagcattgataaatacacttatatacatataaaaaaaaagagaaatcaaactcccaaaaatcagcatcgtcttcagcttcctctcctgaaaaccctagtcgtccaccattgcccatctccagtcactctccaagctcgaacccagccgcaccattcacccctgcacaaaccattcccatccgcacatcagtcgaaccaccaccgagcagctgaaccacccaatcacacccttcgcccagtcgacctacaccctctgcccagccacatcgacccacaacccgaagccacca

SEQ ID NO: 60080 - DNA, 933 bp, Cannabis sativa
  modified_base (71)..(78): a, c, t, g, unknown or other
atattttagtataatttaaagtttgacatagtattatataaaaatataatgtataatccaattcaatatannnnnnnncaatacaatacgacctaatacgccattccaaacgaaccctaaaaggagtattatatttacatatatactaagaatttatagatgcaccaatattaaataataataataataatagattgtaacatgaggaatcatcacttcgtgcgtatttttaacaaagttgtgcataaaacaatgtatttagaaatgtggtgtttttggcaaaatttatgggcgggctgaatctataactcaaggttgggcctactttgggctttagcttatgtggtatgtgggccttctttttagtgtatatttgggctttataactaccatatttaaactagatcgctattctaacatatatcctttcagccaaaaaaaaaaaaaaaactaacatatatccaaagattatgatagctttgaaaaaagagaaaaatgaaagaaagttagaatggtgttcatcctttactttttcttttcaaaaagataccagaaaaaaagtaagatttgtccggctgtcaagagtctaatatgaacaaaagtaagcaaaagtcaaaattaaccaaacttttgttttggacttgtgaagattgattccaattttttgtttacataaatggacttactttttcaactagaataatagactatgtctatcaatgatttcaattaatttatgtccttttctctttttcttttttgctctttttttttttttttcatattctttccatgtaatatgctcgaataatcaattaccacattttaaaaatacaataagagctataccacttctaaatctagtagactatcatgaacactcatgatatccttttccgagttttgcgattaggcatcagtacactacaaaaa

SEQ ID NO: 60081 - DNA, 858 bp, Cannabis sativa
  modified_base (47)..(63): a, c, t, g, unknown or other
ataaaatgatttctgatctttattaatttgtaaatctgattatattnnnnnnnnnnnnnnnnngggcacaaaacccaacagtaagtagcattaaaaactgtcacgcgtaacatgatatcaacactccaggaggcaagtcacaagccccattttgcaaaattttaaaagagaacttgtgggataaatgttgcctagaatttctcctaaaatacgtggcagttcagaagatagtgaggtggcaatggaacccacactacgggacatgccatctttaaccacttctgaagttcattattttgcaagaattataaaggattggtcatctccgagagggtctacctggatgacagatggttcttgtttcctgctctccatgagtgaatttaaggacaggtggagtataacacattgctcaaggttaagtcattgtatacgcatttagtgcagcatggagaagagcaactgacacattactctgaagtgacatgctaaaggctaaacccataattttttgatttcataatgcctcatacatcaattgatggctacataatgagctatctaatcacaagcaatagataagtaaggtctcaccaaaaacctatagcaagcttaaacacattataaagaagtaggcaatcatgccctatgatcaaatttagaaaattgtacaaagcatggttgatacaatcatgataatggtggaattttaccacaattatgagcctataaatatgtataaaaatggaacttttcagaattctctgtaagaaaaaaatgctcaccaataacagtagctcgtggactaaggttcattaatgccccaactacgtagaaagtgttgggttttatgcctta

SEQ ID NO: 60082 - DNA, 1684 bp, Cannabis sativa
tataagctcggtgctttggtggttggttttttttggatggagcatcatacatgaattcaatgagtaatgatttttctttatttaatcttgttgttggctgttatatttagtttataatgttgttttgatggttgatctgttagttgctgctgttttatgttattttttgtgtggaaatagttgttcttcaagttttttacgttttgttctggcctgatggtgttcaatagaggttcgatggtggcccgatggttaaatcagtttcaaggttagggatgatgtctacataggcccgatgggatagttcaataggtctgatgtcgtgttagtgtctcgatggtctgttcgatgccacttagaattttgttttatatgtcttattcgatgtcatgtctgatgcttgacaaatttatggctttttgaggattttttaatcacttttctgttagttttttttttttctaaattttaattatgtttaaatgtctgtggatgacatgttcaactgtttttgcgttcgttatgtataatggtgtttgggagcttgagttataaccgagctaagaaattaacattcgagattgatacaaatataagctactcacgtttggttgatcttttgtacgaagaactcgatgttgacaaagtgcaatatgacttgaaattagaaatgaattacaagtacatgaaaggcttattaatgtattgcccttaagtaattgaaatggtaagcgtgcaagattatttttgtttatgcttgcaagaagccagatgaatttacttccttgtttgtgactttggtgaagaagaatatttgtatcaattctagttacaccaagtactgttaatgatactcatagcgaggttgggagtttcgttcttgaaacgaatttagaggtgttggcagtcgatgtgttacctgaattaaacactacgatgccctttcatgatggttttggagatggtccgaccctgatggtatgttgaaggaaatgatgatgtaagagtctcgtttagcttcgtataaactgagtatattggaacatacttctcatctttcttctcctttttcttatcttttgatgaatctattgattcatccttcctctttccgtttgacccattgtgattcgaatttcccacttttgttgtcgcaatactcgtagttgcagtacttgagttgggtttgtctctcgagcctgttttgagcatttttatctcattttgtgcctcttgcttccgctcaaagactaatgctcttccattaaattcattaatgtttctgactagtcgacccttgcatttcattaaattcattaatgttttgtgttcgcaggttgtgttcgtgtcgtgtcgagacccatgtataattataataggtatatactcgatccgaacacgacccgtttaataattgtgtcagaaaatgaaacccgtttataaatggattgacacgaaacgacccgtgtaacctgtttataagcatattttatttaaacatataaatcaataacacgtttatgaagtatttaacacgtttataacccatttatgacattttaaagtactaaaattgttgaccaaaattcattcactcatttattttgatgataaacaaatatttgattattatttgttactaatcttttcttgattattttgcaagcaagttcacagagtatct

SEQ ID NO: 60083 - DNA, 1216 bp, Cannabis sativa
tgtgcaagttgcttttcatgtaaccgacttatggttaagaaaagacttagatggatttaatttcaacatatacatatatagatatttggtgttacgtttacaaattaaatcattttactatttttttattacattaactctgcagtaaaaactgcccacataaagacaaaaaaattaatgtgaattgtgactaatatataatggtgtgttttaacgtaattaatgtgtattgcacgtttaggggaatatgatggtaccaaagtctaatattattattggtgtaaattaatatggggtctaatttattttactttcatacaaattatagaaaattattaatcatttatagaggataaatttaagagtacatctttcttttaatccattaataaacaatactcaaagaatagtctgatgttcaacactattttccaaagtatgaatcttgatgattttgtcattcatctcttcattcggctatttattacttcttttgaaatgacggtgacctgcatgcctatccaagtcttgaattttatgcttggcatccttcactcgagtctccaatgggtcggcccgagatttcaaattttgtgtattttcgctcctttttggtagctggccacaacattgtttagggacacctcgaccttttcttggactaggtgcttcaccaaattattaggagaaatgctaaaggataattgggtgcttagtattctcctatatgtcaatatcactattggtccaactaagtataaggtctcatataatttaatataatagcttttaaggagtatcgctagccaattgcaacgcgatatgtcgagaaggtgctaggcactactagtgccttatagcaatgctcaattattagcttgagttttggcttcattgaatgcagctaggacttcctccttccagtcagacatggctcgctacctctttagagtctccagttcaagagacatcttggataccaccgtagaacatatttttgccaatgattaaaatacaagcacaagtgctaaaacaaaaaagtcattattaagcgaaaaaaattatatgtatagaaacaaatgtttaattttattttagattatatttttcttagaaagaagaatgaaatatacatttgatttaaatatatttgtattatatatatatatatatatatattagattttaaattattattttttacattaaaatgtta

SEQ ID NO: 60084 - DNA, 800 bp, Cannabis sativa
tctgattgactcgtggactaaggttcgttaatgtcctaatcacgtaaaattcttgtgtgttcgtattttattttctttgaatgatatttcttctggtcatatattcaaattattggtttctaaaatttggtaaacaattatatttaaaaataattttattatgatatagtattaaggatgtttattattattgttgttatattaatattttttggtattttgattttttttagttataatctctcaattaaaatataatttacttcatcccaaatatatattttctcatataaaagttttactgtatcaataaaaattaatacttgttaaagtaatttgcgtaggtaaatgtgtgccaacttatatgtacatttatgtggctggttatttttagataagttgtacttatcatataagtatatgctaatttaatgttaaaatgtatgagtagtaattaataacctccaatatattaatatcgttataagtattgaattcaatataatttaatataataacttttagaaaatatcactaaccaattgttagaaaatacttctaaaagatactaactactaggcattactagttcctaataacaatcccctttttcgtaatttatatgcgcacatgttattactcatcgattttaatggcactagtggtacctagcacctttaataggtgatgcccaacgattgcttaatgatatttctgaaaagttattttcttaaattatataagacctgatacataatcacaccaatagtattatgacaccgaggagggtaggtaccaat

SEQ ID NO: 60085 - DNA, 3490 bp, Cannabis sativa
  modified_base (3044)..(3044): a, c, t, g, unknown or other
aatgttggctcaaagtgtgtgaaaagtgtttgttggatttagacttaggagctcattaaactcacttgaatatgttaagtgtatgaataaatgctcagccaactagaattttttgggtaaaatcgagtttatatagggtttaaacaaaaactagccatttatagccattagacacacaaaatgagattgctactgggagattcggttcaccgtttcccaaatagtaaaccagtttctgggggaaacggttcaccgtttaggaaccacttaaccgaattccttacagtggaaaaatgtccattttttgtactgaaatgaccataactctctactcgtttatccgatttccaaaattctaattttgttatcttagttaaatgatatgtgatttaaaaagtcaatttaataattttatatatcatttggtgaaataacctgtcgcacaagttagtagaccaaaatttgttcttaaaactttttttaagtatggacttgaaaatcactatacaagactaggaaatgtaaataaaccttcatagagtcttgtcttgagttccttgagtattgaaatccactttgggccactttcaagatttttggtaaaattaccattttgcccttggagtgaagtttgccttagaaaattttattttatctttaattgtgctacaaaattagcaaatcattagtgacaaataataatcaaatatttgttaatcattaaaacaaggagacctaaaagttaaagttaataatctctccctttttgatgatatcaaatatttatttatttttaaaagggaaaggaaataaaattgaagcaatatattagattagctctcccttaatgtgtgcaagggataaaaaaaattaccttttagttttaccgtgcatgatttgtaaactccctctcaattttatacttatattcaaaaagcattagaagtctaaaaattgagtttggttgcaaaaaaaaaaaaataatcacttatagaatttctcccccttttgaatcatcaaaaagggtggaaaaggatttcacaaaataaatggcaaataaaagaaataaaacaaagaataccattcatcataaaccataaaaattcaaacatatatcatccaaacataaaaaaatgcaaaagcataacaaactaacacataaaagtcaaaaggcagtaagtctttgcaaacataccaaaaaaatataaatatgagaaaagttgctaaaaaatgtaagagagctaatttggcagaggtctaaaataatccatgtatgccctccattgtgctaacttctcttgagcatcgacaaacctgtgctccatgtcactactcatagtggccatgtcacctcttatggtagtcatctcattttagagagtagaaaaatgagtgttcatttcacctctcaagttgttgaaatttgaagcaatggaggtgtgaaggagagcaaaagcctccttaatattttattggagaaaatgaggtgttggaggcacttcttctttggcttcctctttgccttgagcttgggcttcttgctctttctcttcactttaacttgagaccaaagttgcttcctcatgggcttgtggaccttgtttggtggaaatccacttctttttcacttcattaaacttgtagcgcatagacttgaatgtgatctcaccaaggtgtcagaatccttgggttcataaatctcagtttcatcttcgattgggattcctaaaagtgggaactagtacctaagaagataaccatagggtaaggcttttctttggttaggcttgtacacttcattgatggttttaaggataaagtaacctaggttgatttggttgtctttcaaaatgattttgtaaagaattatttgatcaagtgcattcacttcatcttgatggtcttttataggaacaaggttagagcatataaaagcatggaggattttaccttaaagggtaaggaaagttcgtcttggttttgcgcgaaagttgtcacctacacaaacattattgttgaagaggctatagctgaaggtgtcatcattcttaagacaaagtttatggttaagcaagaggtctttgttgggtgcatttagaatatcattaagcttatctacagttaactcaaatgctacccctttgaggattcccttaacactatatggatcacacagggagtttcaatgcaagcataaaagctctaactagcataggatagatagtggtatgagtttctagcaatgtttcccattcaatatcttcaaaaagagaattgaacttgacatactcaagagctttgagatcacattgcttaccattaataatatcccttgtggagaagtcttcattgaattttcttgcatattttccatgggagaaaaggttattccttaccttggacctttgttcccttcattgcatcgaggatctttgcctctttgatcttgaagaagaagcatccatggtgaagatgaagaatggaaataggagggttaggtttagagagtgggtttttgagagaagagggggaaagggcttctaattagggttagaatatcttaatggggttaaaaaaggtttaggtagggttttatagaaaaaaaaatgcgagtttgaaatgactaaaggggccttgggatcgctacctgctacgaaacggttaaccgttttgtcaagtatgcaagaaatgattaactgtttcctgtagcagatagttttctcaaaaaaagcttcaaaacatgtttcatccaaccatttgaccccaaatattttctaaaactttaaatatgacaaaacaaaaccgctcaaacaagaaaattagaaaaatgttgaaaattgacaatttacggtaagcttttcaaaaattgccaagaaacctagaatattaccaaaaatgagttttatgcaacaaaatttaaaaattctttttccagtagtttgatgatgtgaaatgtgaggtgtacaaacttatggaatcaaaaaatgttaaaaaatgataaagtttggcaaaaaaaaaaaaaacactcttttaggcctaataanctataaaatcaacaagtagcgtactaaaaatttgttcaatgcatatttcagttaaagcaaacctataggcacaataaatacacttaatttgacatgttcaaacatataaacacacaagctagtcaaatatgcaaaaattcacatgttcacttgtttgacaataagtctaaagttcaccgaaaattgacacaatgacctataattttgagttttcaccaagtatagttcatataggtcaagtatcaagaaattttttcatctactcatataaattatataaatatcatatttggaacgaatatgcataaataagtgagtaaagagatatgtaatttccatagctagcgaaccttatatttcatttaagttggtcatgcctagctctcttctaatgaaactaaatctctcatcactaagaggcttggtgaatatatccgctaattgga

SEQ ID NO: 60086 - DNA, 1289 bp, Cannabis sativa
  modified_base (457)..(458): a, c, t, g, unknown or other
tacctcgaaactatttgcaatcactattgtcaagagcgatatagaggctactgtaataaatgctacagtaaatacaaatgtcttatatatcgagtaaggtaaaaatccattagaaaatcgacctaagaagttggtgctaatagacgaaaactgggaatgatttctctaatgaagaatggaatgtatcataatattttttcaacttgtacacatttaatacttttaaattcttaatactgacatgaaatatgttatgtagaaatagtcagctataggttccaaaaatagagcaaacgtttcttttatgcattctggtggaacaaaatcttttattcaatacttacatgaagatgttgtattttttttttgtgtaatagcattaaaatattattatatttaattttatttattatttaaatgtgaaatcaaaacaaagcataggtgatgaagtacaacnncaaactatgaagtgtggagagattgaaatatttcgaaaaactcattatacgattgagaatggatggatcaaccaaatagccaagggaaaatatgtatgttaactttaaaagtttatgattttatttaatagattttgtaaaagtaataaatcattattttattgttattctagaatgaaatggttgagttgccacgagacaaatttattcaatttgaaaatagcttgctactagtagtcgatgaggctgctatatataggtaggtgttaggtgaagaaaaatacggttggttacgaggtttaagtcctacacctggaaaaaaaaatttcagtggaattatcatccaaacgtaaaaagattgaagaaaaacgtttggacaaattagagaaaattattgaagatctaagaaaggaccaagataatattattgcaagaatcgttcaagagaatatgaaaatattctatgaatcacaacaagacagattattagagcagcgatcatcagagtcaccaatcaaaattccatcaatggttttattataaatttactctcacatatttttttttcatgtctttaaaataaattataacaatttttttattcaagataaacaaaatagttttttggagccaagtaaagaaaaagttcaaccctcatcttcacaaaaacccactaaatcgtccacaaattttgaagaagtgtgagattctccaattaaatttgagattcccaaaggcactttaaagggtgtaaaagctgcattactagctgttcgatttataaaagcttcacacactttttgcatggtcatggacccaaaaattttggat

SEQ ID NO: 60087 - DNA, 1434 bp, Cannabis sativa
tcattgtaacaaaaataatgagaatgaagcttgaaattttctagagtaataccagaggcctattccttttttgagtcagaatagagcttagagaaatcatgggtctttttcttttgtccttctttggaactgtagcagggacagcaactagttctacactgacaggatcatcttcaggcacttcactttcaaacccataatcattagcagagggttgtttttttagaacaaattcttcactaaaatcagactcaccctctaattcttgatcaacatcctcagtctcttcttttggtttagaatacgatgatgaaacagaaggggatgctcattgagacttttggcctttgaagatgaaaacatcactttcttccctttggagacttctttaggctgaaccacttctagtttctttggtgtggtgtggacaccttgtacctggtacgagagctcaccataggtaaaggaacaatagctctctcgacattgggaacaccattcgaagaagatgacttcgacaatgtgtgatcagatgaatgggattcatcatgatcaccaagcctagtggtcgggattcattctttataataaccatgttcaagggaatattatccccactaacgatattcatcagagcgattcgctttcttcatacctctttcttctctgtttgagggtttgtcctccttcattacccaagtaacccatcggtgggttcccatgaagcatgcagttggtctcaagatcgctcgtactcctcccactatctctcaccttttctttgctgacgaagtcttctctttagtgctttttcacctattgtggcttccgctattacagaattactcaatgaatatatcctggcatctggacaacaagtcaattgtgcaaaatcctccctttacttctctcccaacatggatacgaatataaaaaacgtccatcaccaatattcttaatgttcttatccacgaagcaatagagaaatagctgggtctctctcaatcctttgggtgttccaaaaaagaggccttcaatcacctttacaatcatgtttagactcatttgaacaagtagaattctactttcttttcaaaaggcagtaaagaagtcttactgaaattgatggttcaagcgattctgtcctatgccatggcttgtttcaaacttcctttccgctttcattctacattagagtctcttatgactaacttctggtggggtggaactgatcaaaataggaaaactcatagggtggcttggaaaactctttgtcgctccaagttccacagtggccttggatttcggtccatgaaagcttttaaccaagaaatgttggtaaagcaagcctagcgcctcattcaatctcctcaatctttggtggcttctctctttaaggcttgttactttctccagtctacgttcctggctact

SEQ ID NO: 60088 - DNA, 660 bp, Cannabis sativa
gttaactaaaagaattggtgtttcatcatggttcaccttattgaattgttagccctatccttggcacacgcattgagaaggtgccttatatataaggagggcttcatgagttcttcattcatttcacataagcatccttagcctagtggaagaccttgcatcattctcttaagaggtggtgagttcgatccttggctaattcacttttcaattctattttactttcttttgtttagtcaattttccaaaaaaaaaaaaaaaaattgggtaccaaggatgccgagaggccctaaccaagtggccctagttgagtggcgttcgaggtggacctagtggccctttccaagtggcctcctccactataaagttgattagatgaacaagaccccctctcatgtgcgcacaatcgagggaatgctaaagacctccaaggctgcaacctaaaagagaacaaagactacatacatatctgcttaaaggcacaatgagacaagagaactgaggctaaggaaattattgaagataaaatttggtgtttacgttttggtgttgaaacatttttaaagtcttccaaatcaaaggaaatcactcaagaaggtcagaaacaattgttagaattcaaaattgatgcctacctggtagcttcgcatgaaacgggct

SEQ ID NO: 60089 - DNA, 743 bp, Cannabis sativa
tctgtgttatcggtaagaaatctagttttttaggttgggcccgatgtaagcccaatgcatggaccgatgtaggtcgatgccatgtgttgtaaaaatgaaaatagaggttgaaggtaaaggcccgatgtaggcccaaattttattttttgaactagaagtcgggcccctattgtcccctatcaggcccctatcgtcctttatccgacctagaaccactttaaaaaataagggtaatttgcagccaaactccctaaactttgaagtttggcacggtttaaccccctagactgaaaaaaattatggctaaactccctaacctctattctataatcgttttggtcagcactcattctaatagtttttggttgttaagtgccaatgtgcacacgattgtacaagtggaaaaatattattgggctacttaatataataatttagaatttaaaaaatcaaaaaaactatataaaaaatattttttttctttcttttattttttcgctttttttttctttttcctttttctatttcttcttcacgcgctacctaaaaaaccacccccaaaaaacccaccacccactaactcccaccctaaaacccaccaccaccacctcaacctatattccatatccaaatcatacaaaaaaaaataaaaatctcatcaaagaataaaccatatacaaaactaaataaaaaaaacacattaaagaatataaatcatcaacaaaaaccacatcaaaaatctc

SEQ ID NO: 60090 - DNA, 953 bp, Cannabis sativa
gttcaaatcccatagcattcttcttttgatatttttttaactcttcttttgatatttttttcatatattttttagggccccaaaatttaattcgtcttaggcccatatatgttagaattagctttatctgagaaaattcgacaatacacattagtgaaaattcgatttattatcatcacactaagcgcgtggagattgattgtcactttatccgagaaaaagtctctcaaggagctctcaaattagtccatgtttcttccaacaacctagctaacatcttcactaaagctttactatcttcttctttcacaaatcttgtatatccaagatgaatgtcattaatcaatacactccatttcgaagggagctattagaattagctttagtagctttagtcaagttagttatgaccgttttcctgaatttgttagtccaacgaccctaacagtattcacacggtatatttccttgtattctcattttggagacaatttaattagagatttttctctttctctctcggaatctcatagagtatcaaacattacctacaatcttattacactaaatttaatagatatttgataatttatataacttttcacaatagtttatgagatgttggtattcaaccaaacaatataatttaattaataataatttaactaaataattatatgcgtatccaaacatagttattcaaataattatatcttttattttattattctaattaattagattatttttaatttctcctactaattgcctctatatgtatttttttagaaaattcctaaaagatattattggtgcttagtactctctttaatgtcatatcgtttaacgagtctcatataatttaaaaaaaaataatttttaaaaaatatcgctaactcataaactaatcaatgtttacatatacaaactacaaatttcgtacatggttgcca

SEQ ID NO: 60091 - DNA, 1302 bp, Cannabis sativa
tgatcgcaacaataattagaagaagtcaatcgaaaaaaaaattggtaaattcgttccaagtttgacattctatggtaagttttttttatagaactctcctttagtgaatttattacaaagttctcaatttttaataatcattatattaaatttctttttcttttgtagatctaacattgtatagtgattaattatttttttcacttttatgaatttcaaatacaatattctatggtgagttttctatagatttctctttctgcgagtttctttacaaagttttttatttttagtgttttcatccttatattccccgtgataatctcttaatcttatgacagtattttgatatttagataaatactatgtttactgtgatttagttaaaaaaaataacattgtatatgtgataatgtagtgtggtagcaacaataaatgaaagttttattaaatttttttattctatagattttgataatgtttggtcaaattttgatacggtgataataatgatatcgaatatagtaacgactacaagtaagatatagtgatgacaatagttttaaatgttcagatgactacaattgaaatacggtaataattaacaggactttgaatgtagcgcgtatgatgactacaagtcaaatacaacgatgaaagagaggaactacattaacacatttttttgttgaaagaaaaaactactttaacacatttttaataaactacattcaagaatagtggttttttcttaaaaatttttagttgaaggatttaatcggggtttgaaattaaatttacataaaaatatctaaaatatctatatcaattattaatatatatatgtgtatatatagattctaaaatttaaatttaaatgttaaatgttatttgattatatacacaacaaactaatttattaaatatgtatatattttaaaataattatttattaactaattaattttattagtaatttagtttcttataaaatatatatggtatataatattgttttaatgtattaaaaaaagaactaaatcaataataagatattattagataatttaatttcaaaatttttataaattaaaattattattttaaagttaattttttttcctttttattattatttaaatctgccgcacgaagggcggcaaagttatctagttacttaataaccacataaatatgcatgattagtgattgtaacgccctaatgttaaggcacgctacagtactttttcaattatagtgcaatcttttctaatcaaagaatttctcgaaaaacgtgtcaaa

SEQ ID NO: 60092 - DNA, 1209 bp, Cannabis sativa
gtaatttcaataaatttctaaaaaggtatagccactcatcttttttttttacatcgcatcgttagttagttgagctcaagagtggtatcatcacgacctattttttaataatgatcattttaatatatgaaaatcatatatttcagaaaaaatgatcaaaataaaaagcaaccttttagtttcctttatattttgttaacgaaaaagtaatcaaactttaatacattataaattattttctaatttcatatttataagttacctaatagtattctaagtgagtttatcttattgaaacagttttgataaattcctaaaagaacttataaagaaaccaaatagtatctgatcaatattaaaattgttaatattcaaaaattgcttctactaattttgatattaagtatactttattgtaactctgtaattttatcacacatgtttaaaggtaacgaaagttactaaaagaatgtgaagctatcttaaataacaatacatgaaaacttttaaatatgaaaataataataataaaatttaataatttgtgaagttagttggttaattttacttaaattaacagtttatttactctttggttaacataatataaaaagaaatggtagtgatgtctaactactatgtacgaggtgtctgttattgcaatcaaatattgggtcttaaagattttaatttaataattttttgtaaattatcactaatcattaataaaaaaaaaaaaaaagttactcacggtggtattggtactactagtgcctaatgtcaatgctaaaatatatagatatatataaaaaaaatatactttttatttggatcttttttttataataaaaaatatttatgtttttcatatattaaaataattgcctcgaaaagtaagttgttgcgatagtattgttttaaaaaattaataaaaaaataaaataaaattagtatttttttatttagtgtaactaatatttttcttacaaagatcaatagaaaagagaatatatatataataaacaaaaagacaaaaaaaagagacaacaaaagaaaaaagatttgagcacaaaaagaaaaaaaaaaacttcaatcgaaaaaggcagactctattttcatgattcggtgggttttttttttatggttcggtatgaatgcctttataattgtgtattattttcactaatactatttatataattatcttac

SEQ ID NO: 60093 - DNA, 1017 bp, Cannabis sativa
  modified_base (940)..(942): a, c, t, g, unknown or other
ttattttatttataaaaatatataaaatttctatgctcaactaaataaaataatttaattaacagtaatctaattaaatatttcaaataaccaaacacaataattaatttacttcatattctctttcataatattaaaaatgttaaaagatatttaatattgagtctgtcttattttaatttaataaaaattatagaaaatcaataactaacgataaaatgaaatgtcataaaagtgctaggcttgccccttaacaaagctcctaaaataggtgagtttgagattatctccaaaccacaaagtccaagacacctcttgtccaaaatatacgccgtgatcacctatatgttataacaatcgaaaattccaagttcggcacaattggatttttacggaaaccctttggaatttaaaactcgattccccttgacatgtctattgtatttgttggatcatcatctgatgatgatatatttatcatcatctggacgcaaccaaaagaaatcacaatcacatgcttagaacgacaaaaatactttcaatttcaaccccacttgtatataatgtcaatgcacgtgtcgatatgatagacttatatagaggcgtaagcaagataaactgtttattggatcacatctaatatttttaggcctattcagattcgatccaatcatatattagatgttagattttaccattagattcgatccaattaattttcattatccaatcgattcaacattcattggatgttagattagatcggttctatccattggatgtatttcatatatatttatttgtttaatttagatttatctaatattttacacttaatattttttaaatcagatcgtatctatccaatattttatgtctagtatgtattggattgaactggatacatccaattcaagaaaaaaaaagagtaaaattttannnttaattttcatatatacatataaatttgatgtataataatatgaaatctaatactcatccaaactaaatgaaaat

SEQ ID NO: 60094 - DNA, 830 bp, Cannabis sativa
gagtccgagtcttggtttgagtcttggaacatgaatctgactaagacccaaacccagacctgaactgtgacgcagacccgaataaaaactttgattgggtctcaggttacgaacccaaacatgatacaaacttggacacagacctagacccaagacctggaccgggattggagtctcagacctgtacccaggacccagacatagattgggcactcaaactcaaaattaaaactagaatcgggactttagaatagggttgggacccaagacccgacacaagtcttggtcttagaccaggacccggacacggacacagaccgacacccaagatccgaagtggaacgtgatcgtgaccgaagattgggagctggcccaacccatattcggcgtctagatcgtcgaatcataccaagacccaaatttagaacaatttctagacaaagcatccaaacccaacctcggacccgagacccaaaatcagaagaagaatcggaataaggactatggaacaggaattgaccttgacaaaaaacttgatctagatatggaacagaacacggacccggacctagaccgagatcgatacccggaccaaaacttgaacccagactcaaacttgcaccaggacctacgacccagaacctggaacccaggacccgtgactcgggacctggacctagaaccacactcaaaccaaaactcaaactcgaaccaaagactaggacacggaatgagattaggactgggacccagacccggactacaactgagacctgaacctagactaagaacagaacccatattggaaccgggaccgggagtgggacctt

SEQ ID NO: 60095 - DNA, 719 bp, Cannabis sativa
atatattttttattcatataatatactatttaataattttattttaatgtcacataatttaaagttaaatatttaattcaaatagtaataaaataatattatatattttttttctcatttcaatttataaatattttttgaatttataaatattgagaggtcatcaaattagtattatcaagccgaatggaatggaaaacaatctataggtgcatcttttgtcttcatatatacactacaacacaaaaaataaagtcaatctttatttctatatattaatatgaaagaaagcacacaagagtgtaggtggctttctataatttttcttcatatttttctaattttttgagagtactgtgttaatgtactaagaaaacatgattattcaatttactttttgtaataatcccacattatttagaaagtatagtgcaacattacataaacactataaataaattttttctcatgtcattttaatttttcccaaaatatgtatttgaacttgagacacattttctttttcagtgtaagtgtagtatcactaacctatgtctatgaccactgttaaatgataattttagactttatgttttgcaacatgaaatataataacaagctcaatattagtgaaaacaattacaattaagatagattagaaatcggataacaattgttaatgagggttaggaagaaaaagttttaagattagagtaaaa

SEQ ID NO: 60096 - DNA, 4358 bp, Cannabis sativa
aaattagaggtaaatttgattaaatgattaataaaagaggcatttttcaacttaccccaaaaaaataatacaaaattaaatgcatctattctggagactcggtcaaacaaagtaaaaaaaaaagttaataaaagaagtgggtaagacccacataataatttttaatttattcaaacccccactagacctctccttatcttctctctttccttctctctttccttctctttcttcaaaacaccaaagataaacccccctataaccactaccagtatagcacccacctctgatcaccgtctgatcacatgcatcggaactgcatgactactgattgattgtggtcttacaccttaagtttggtgataattggagcaaatacaaccatacgaaagcttcgaagtttcaccgtcaaaactttgaggcgacattgcgatcagctccgacccccatttgaaaaatggttggtaccattgaaatcagcattgcgagaggaacatcgcgcacgaaattatttttcttaacttgttactttgtcccgatgagatttgggtatctccgaccctttggaagcattttctggcacattcggtgattgtttaggctaacgggttgtaaatgtgtgatctactcattaagggggttgttttgacatgtattatccctatattcggcaacattctcagtacactaatttctaccgccaccgatagttaatggacacctcttgagtaagttttcagaactttacatttcatatatagtcatgttataggtcattggactcggtttgaagagtacattacaatgataataattatttatttgattggaaaatgttggataaagtgaattttagagtgactaagttatttgaacttaagaattgagggcttagaaacgtctcttttagagaaagcttgacgatcctaaaaaggcaaggacttaacttggttattggactttatttgtcactgtctatcatcatttttaattttcttttccatgtttgactgattcattgaatctaagattaaaatatagttagctagttatgctttttaagtccaaaattggggaatttgtttctagttttgcttattggattgtgttccgttccgttctttttatgcttctatatttttcaaatttggttttacatatactaatgttgattagggtacattacttattcgtagcttattagttcattaaatgtttttctgtgtagatctaatgtaagattctctaccatagttatttctgtctagttatgtgtcatagttgagtgtcattttaattggtaaattctgaactatagtatcttcttgatggtactttttattagctaaagatacttcttaagttcttattattacatttcgattctctatagtttcaagcatatttttgggttcttgtcgagtgatgatagtatgaataacattaatgttaacctaagatatgtttctaaaagaggggtgaattagaaatttaaactaatttcggtaaattaaaacatttaacacaaaactctacaattaaacacttaattaagtaaatgcaagtaatatggcaagcaaaaatgatagcaaataatcaaactagtaaagtaaagagtttaagggtaagaaattacaaactctcaatttttacaaggttcggtagagctatgccacctacgtccttggtcttcaaagctacggacctagctttgagttctaagatcgagccaagttaacgagcttgaccaacccttacaaccaggaaattttcaccaaggtatttccaaacctcttacaatagtttcacaccaccaagcactattaaccactttctcagattgttgtagtgacaatctcactataatcgggctgtttaaaatattggtgccaacctcacctcaatcacaataggaaaacgtgtttgaaattacaaacaaattcactctagaagtatgatgatacaatagaaacctggagtgataagcaagcacacttgaaatgaataaacacaagttttggctcaaagtgtgtgaaaagtatttgttggatttttaactttgcagctcattaatctcacttgaatgtgttaggtatgtgatccaaatgctcagccaactacaatttttgaggaaaaaaaataaagtttatataatgttggggtaaaatatagctatttatagctgttagcatgcattccaataaaaaacttgccatgaaccaaaatttcggatggaactagaatttcgaattgatgacaatcgtaattcgggattccaaccagaattttggatggctaacagtggcaaattttgtaattttttttgacaaaaacgtgtctaactttttactcgattactcaattttcagaaattctaatgttgttctcttagttaaatgaaatgtgatttagaaactcaatcaaaaaaaaatttgaatcatcgggtgagaaaacttgttgcacaagttagtgagtgggccacacggtgagcactgcgagaagaatgaaaaaaataataaaaaattaaatgcatctattgttgcacaagactaaattaaatttataccctttgattgtgcgtgttcttgatgtagatgagtttcctagcttgatttgcatgttttgatcaaaagttgagttttctcgagagtcgaatttgacttttgggttgacttttgagtttgagatcttgaagaccacttttgaatagggtcaattcttgatcccttgatgaatcttttgctcttatcaagttgaatccactttgggtcactttgagaagtttgataaaattaccattttgcattggaaaaatttattttatcttttaattttgctagaaaataaacaaatcattagcaataaataataatcaaatatttgttaatcatcaaaacacggagatctaaaactttgaattaagaatctccccatttttgatgatatcaaatatctgattattttcaaaagggaaagaaaaaattaaagcaatatatatttaattagctccccataatgtgtgtaaggaaaaaaaattaccttttaattttaccttgcatgattttgtaaaatccccctcaattttatacttatgtttaaaagattagatatctaataaaaattgaggttttgccaaaaaaataatcatataggatttctcccccttttgatgaatcaaaaagagtggcaatgaatccataaaataaaggcaattagaaaaaaaaataaaacaatacataccatgcattagaaaccaaaagagtcaacgtataacatccaacaacacacaaaaaaaattaacacccaacacataaagtcaaaaggcactaagtctttgcacacaaactaaaaacatagaaacatgagtaaagatggaaaaaaaaatatgcaagaaagctagtttggtggaggtccaaatctatccacgtatgccctcaattgtgccacctcttcttgaacatttgcaaacccacggaccatgtcactcttcatggcataaatatcattgttgaggttggtgaattaagagttgatgtcattatcaatgcttgaaattgactgtcaaccgaggtgtgaaggcgagcaagcctcctcaatgttgtagtgggaaaagtgaggcataggaggcgcttgatgatgcacttcttcttcttctctagttttacttgtgggcaagttaatatcctcatcttggtcttcatcatcactttctaagtcaatttgcattcgttttcctctttttggtgtaaaaacccatgcattatcagtaaaagcgatccttgaaagttttggatcctaaaatgttattagaggtggggtcaactttcttttcatgtaacgtagggattcctaaaaggggaaaaaaatagctaagaaggaaaccaaaggggagggtcttgaccataccgagtttatacacatcaataatgaattttagaatgagatagcctaagttgatgggtgtagtttttgctatgatgtgcatgagtaattggtctatggaattttggcctctatggtaagttgatgcctctttggtctcaagataatgggactatcaccacaaagattcttagagcactcatcaatgttgaaatttttatcattcttaagagaaagtttagtttcaagtaaaatactaccattgggtgctcctagcaatggattgagggaatcaacattaaggtcaaaagttactcctctaagtgtccctttaacccctaaaggtgcaaaacaaggtttaatacaagcataaaaaccttgtacatgcctaggatataatggtgtattaatgttgataaaggaggtccaacctagaacttcaaagtgatgactaaaatcatgaacataatcaaggc

SEQ ID NO: 60097 - DNA, 643 bp, Cannabis sativa
gttatacacttatcaaagactataagatcatttttcaaattaagaataatggaaaggatgatcatatgccataatttctaaatacaatttttagttcaggactcgtagaatatgtcaagccttatattgaagtgatttagagattataacttaaagatcagataagatgtatttagtatatacttaacatgttccattctttgaagaattctagtacaaattcttagtaagggacaatcactacatctacagaacaatttgtttctttctttttaataatattgtcttggtactatttttttttaattgctcaagatactatttttctttttatgtttacattgttataaaagtatgattccaacatacattacatctaagtaaacataatttatgctggttgtgtgtgtatgaagttcaaataaagctatgctcttcaccaaaaataaaaataaaaaatgaactaataggaacattagggaattgcggagaaagagtagaataataattttcaattaggcatatcaataatcatgaaatacaaacattgtgtaatccaaggttctaaaatgctttaatatattgtgaattttttcactataagtacttcttaatcttcaacatgagtactaaacttaggact

SEQ ID NO: 60098 - DNA, 1718 bp, Cannabis sativa
catgattaactgctaatttccaagttaaactaagcggtctttacatatttggctccacttctcccttaaactctcctttgctgactgacagtggtagttttgattcaggttcggctgggggaaatgtctctcaaattccttcacctgaatcactccatcactcaccaccttcctcagtttcccaacctaaaattgtgtctactcatcccatgatcacccgtgccaaggatggaatttttaaaccgaaaacttatctaagtcatgcaaaggagatcgctgccattactgaaccagtaagtgttgaagctgccttatctcacaaagggtggaacaaagccatgaatactgaagttatttctcttaaagccaaaaatacatgggttttggttcctccttcaagtgcctacaacctgattgggaacaagtgggtttttcgaatcaaattgaactcacatggtacagttcaaaagctaaaagctcgacttgttgcaaaggggtttcatcaacgacctggcttagattttggggagacttttagtccagttatcaaagcctcaaccgttcgaattattctaaccattgctgtgacaagaggatgggagatcaaacaactggacataaataatgcttttctgaacagtgatttagaggaagatgtttacatggcacaacccgaaggttttgttgatccaagcaaaccagactatgtttgcaaactgaacaagtcattgtatggcttgaaacaagctccaagagcttggtttgacaagttaaagaatacactgaccgagtggaaattcaagaattcaaagtcagacacatccttgttcttttacagagataaaaatgtaatcattcttgtcctaatctatgtggatgatataattgtcacaggaaatgatgctcaaagaatgaggaacttcattagtgagctcaacaaactttttgcattgaaagatcttggagagcttcactacttcttgggaattgaagttcatagggatgaatctggcctttagttaacgcaaaccaagtacataaaagatttgttgagaaaaactaatatgaccaatttgaagtcgtgcccaactcctgctactactggcaagccaatgtccaaaaatgatggtgaattgatgcataaccccactgcctacagaagtgttattgggacgcttcaatatctctgtcatactcggcccgacatagcctatgcattaaataaattaagtcaattcttacaagctcccactcttactcactggagtggagtaaagagagtgctaaggtatctcaaaggtactatgactcaaggccttcacatatgcagcagcaacaaactgtcattaaccggtttctcagatgccgattgggcatgttgtccagatgatagacgctcaattgatggctattatgtgtatttgggagaaaccttgatatcttggtcctccaagaaacaagctattgtatccagatcaagcactgaatttgaatatcgtgctcttgcacatgttgctgctgaaattttgtggatagaatcactcttggaagagcttaacttcaagttctcaaagccttcagtcacttggtgcgacaacattagtgcaggggccttggctgctaatcctgtatatcatgccagaacgaaacatatcgaaattgacatccattatgtccgtgacagggtgctgcagaaaaagcttgatgttcgttacatc

SEQ ID NO: 60099 - DNA, 1958 bp, Cannabis sativa
tgagaatcatgttgaattttatgtcgcggactttggtttcttgaagaaaggctaaactagcactaaaattgaatcgatgattttgcgttaaatgaccaaagggtatgaaacatcattgggcgtgtgagaaactttaactagtccttctcttctaggaaagagggttgaagacagataaaaccccgagtgatctgtcgcacacaaaaaaaccatgtacctgcgagaatcatgttgaattttatgtggtagactttggctttcataaagaaaggataaagtcgcactaaaatttaggcaatgattttgcattaaaagaccaaagggtgtgaaacatcactaggcgtgtgacagaattcaagttattgttctcttccaggaaggagggttgaagacgtatcgaacccctaatgatctttcatgcatagaaaaaccacgtgcttgggagaaacatgttgtattttttgtggcagactttggctttcatgaagaaaggattaagttgcacaaaaatttgggtgatgattacgtgttaaaagaccaaagggtgtgaaatatcaatgggtgtgtggcagacttcaagtagtcattctcttctgggaaggagggacgaagacatattgaacctcgagtgatctttcatgcatagaaaaaccacatgcctgcaagaatcatgtttaattttatgtggtagactttggatttcgtgaagaaaggctaaagtcgcactaaaaatcaagtgatgattttgtgttaaaagaccaaagggtgtgacacatcactaggcgtgtgacagacttcaagcagtccttctcttccgagaaggagggttaaagatgtatcgaactcctattgatttttcatgcatagaaaaaccatatgtttacgagaatcatgttgaatttcatatggcagactttaacttccatgaagaaaggataaaatggcactaaaatttaggtgatgattatgcattaaaataccaaagtgtgtgaaacatcactgggcgtgtgacagactttaagctatccttctctttagggaaggaggtttgaagatgtattggatccccagttatcttttacgcacggaaaaaccacgttcctgcaaaaatcatgttgaattttatgtgccaaaatttggcttccgtgaagaaaggctaaggtcacattaaaattcaagtaatgattttgcgttaaaagaccaaagggtgtgaaacatcaatgggtgtatgaaagaattcaagcagtccttctcttctgagaaggagtgttgaagacgtatcaaacccttactgatgtttcatgcaaggaaaaaccacgtgcctgcaagaattatgttgaattttatgtggcagactttggcttttgtgaagaaaggctaaagtcgcattaaaattcaagcgatgattttgcgttaattaaccaaagggtgtgaaacatcgctgggcgtgtgacaggcttcaagtagtccttttataccgtgaagaagggttaaagacgtatagaacccccaatgatcttttacgcacggaaaaaccacatgcctacaagaatcgtgttgaattttatgtggcagactttggcttctgtgaagaaatgataaattcacactaaaattaaagcgatgattttacgttaaaagaccaaagggtacgaaacatcactgggcgtttgaaaatttcaactagcccttctcttccaggaaggagggttgaagatagatcacacccccagtgacctttcacacacaaaaaaaccatgtgcctgcgagaatcgtgttgaattttatgtggtacactttggctttcatgaggaaaggataaagtcgcactaaaattcaggcaatgatttcgcactaaaagaccaaagggtgtgaaacatcactagacatgtgacagacttcaagttatatctcttctgggaaggaaggttgaagacaaatcgaacccctaattatct

SEQ ID NO: 60100 - DNA, 641 bp, Cannabis sativa
gaaaataaagaaatgggaggtaaaatatcaaattcaaatgatgtattcattcattctttgggagatagatacacaatgatagaatacagtactcaaattagggtttctgaattgtcaaattttcatgaaaaaataataataacacttcagcataatatgagatattttaagaagttacaaaaataaggggcagactagtataccctatattattagtgcacgattccgactattcattaattacactaataattgactccacaagttttaatatgttgccaaaattagttgagatcttctcttatgccattagatatgagtttaatattagaggacataaaaacgtataaattttatgattcaagtaaataataaattaaagattgtgaattctcacatattattttcttaaaattattcgtctagtgtctaatgatattttattttattttgtagatacttcattatcaactacttcatcatttgaaattgcagactttaaatatagcttgctaaaagttggagttggaagtttgtatttgcttgcatgttagttgtaattttataatattgttgttggaatttaattagtttcaagtttattattttgttttaattatgttgttgaaactttaaaaaga

SEQ ID NO: 60101 - DNA, 1599 bp, Cannabis sativa
gataaaagacaagtgagggtgctcaaaggagccataactcaaaaaattccacttaacaaaggcatcttgaatggcctacatttgagactttgacaagttggtctcgtgctaaattgagtaccaaaagtgtaaggtccatgctgacaactcgctcaataaactaacaaaaatgcaagccaccattggcaacaaaattaatgttttctttaaaatcccatgttacaaagataataatcatcggaataaaataagcgcaaaaaaattatgttcaacttcaattccaaagtcaccaagatatggaataaactaagttatatatgcttaaaaagttccaaagatttgaaaaggacttgttagtcttaactaacgagtactccacaccaagtggacataagtaaacccacccatgttggcccaagtgtcaatacacaatcaagaaaaatgtatatggcaaaaggagacataaacataaatatgttctcgcaaacaaaagaaaatgcataaaaacaaccatggagagcactacccacatgccacagctcttgcatgacacgtcaccccaagagagaacactaccaacatatcaactctcgcatgaaatatcactccaagggagagcattgccaactttccacaactctcatgtaccactcttttcctcaagattctgggattggttgagaagtgacctcctctgccttctaaagtaataacttctggttattattcaatcattaacgatattaaaattattctaaccccaacccagttaaaaatcttttctcaaactatttttggtcacttccttcaaattccagagtacattattcatttccaagtcttgcatggtctattgttgtggaaagttcaacaacctaatgagatagaattttgggtatctgttgctgggaagtttcttaaatttagtgtagaggaatttgtcttagtgacaggtttagattgccacattgaatttgatttttttcagttcaaataggacaagaatatgctagttgaatattatttaaaggataataaaaaaattaccaagaattcgattcaagttttcttaactgctaacaaccttagggataatgatgatcttccagtcaagttggctattttgtattttgttcagtgttacttgctcggaggtcctcttggaaaggttgtctctatttaggatcttgatattatcgataatggtcgttataatgagtatgggtggggaaataagtattttgagatgactattaaatctcttaatggtaagattaatgtcagtattaggacagttaggaagaaggataaggatggcagattttataagttgttaggttttccttattcactgcaagtttgattttttgagtgttgtccatacgtcgttgggaaaatttctttgtattcaaacattggcatacctaggcttcttaactggcctaaaattccaaaacttaaagtttctcagctaaaaatggacaatgtgaacaacatcatcttcaatcggcctttaaagcagttatatgtgtgttgttttccttttgttttttagttattttagtgttgtacattaatttttttttttttggattggat

SEQ ID NO: 60102 - DNA, 1371 bp, Cannabis sativa
  modified_base (592)..(607): a, c, t, g, unknown or other
ttgtccaacagtgaggggtagccggatttatccaagaggtgaaactccttgactggagaaaccattggtaggtcggaggcatggagttagatccttgatttggagtcccatcttttcgtaagcagtcttgaaaaatatgtttgaagaagctccattgtcgatcatggttctagccaccattttatgggctatctagacttccacgaccagcgggtcattgtgcggaaatctaatcttgacagcgtcttcattgttgaaagttatggttggctctcctgctcgtggaactttgggcttctttacttccatggccaggatgacttcttcttgttcatgctgtgctgtccgggcatacctctcttgagctttgcccgaatcttaagcaatgtgcgggcctctaacaatgacttgtaactgtccatctactggtggaggtagcaaatcttggttgttttgaccttggttggtcttgacatacttctgcaagtgcagattgttttcccttattaggaattcaatttcccgcttcaagttgtatcatttgttagtgtcgtagtctccgtggaaccaacaaaactttgtcatgtccctnnnnnnnnnnnnnnnnttcatgggcccaggcttcttgtacaggatcaacgactgagttgccatatatacactttctatatcttcaatcagaatagtgaatggagtgtatttggcatgattctcccggggaatctatccggatttatcagtgaactttcctttcttcccgtttccttatttgtggttgttgcttaaaggcttgccacttgagcttgaattatttgaatagttgggaagttgggcggatgtcccagtggaaggagcctttgacttgcccgacttttgttcacattccgctcgttgaatgccttcttcgagcttgatgcagccttcggctcggtcaaggaaatcactcattgagtctaccagcccgttcttccttatttctttccagagttcagcgaggacttcaatgccccccagtatcgcggatagctttccatcctcggttacccgcgaaactggtcgcttccgttatgaatctgctgatgtatgcccggagtggctcgcctggtcctcgcttaacctcgaccaaatctcccaaatgcaatgggagttggcgtgaggaggagaattgcgcatggaattccgaagagaaggttttccatgagctaaactttctaggagccaactgaaataccattgctgagcgactttcgacagagtggtggggaagattctacagcatacatcccctcgtgctccttgcaaatccatttgcatctcaaagtacttgagatgggaaatatgatcttctctcccagtatacatcttccacgt

SEQ ID NO: 60103 - DNA, 934 bp, Cannabis sativa
  modified_base (174)..(177): a, c, t, g, unknown or other
ataatatttatgtttcttaaaaataactattgcgatgctattatttattgtaattactaacaaatatatttttattattatttttgtaaaaaaaaaagtgtaaatattttttaaaaaaattaaaaattattataaaattaaaagtattacgattaaactaaaattataattaannnncaattataaataatattatgttttcttttataaatagtacttaaattaaattataaattttttaataaaagatgatattgttcattaaataacattaaaaaaattaactatataaccaaaaatatacaatcaaaataaaaataaaaattataattaaatatatgtgtattacatataatattaacggatgaataagtatttatgcagatataatatgcagcatataatatgctatagatgtgataaaattcaaaactcaaggaacttgatgtggtgacttattgaccatccagttaaagttaagattatttttattaaatttttaataaaattaaagttgagttacgttttatagagagagatgatagatatgtgttgatcaagagaaaactaaatagagagatgtagaaaagacaaagagctaaggaacctatacggtatatttctattattcacacttatataattattgtggatatatgatatgtgagggaaaagaatcaataatatatcaactatgttttcataatgaaatagttcatgattcccttcttggtgtctctgtcttatatggttgtgattattacataaaataattgcaagcagaacggcacctcgcagtcgcaggaaaatatagaaatacattatataacacaaatggaccattaaaaaattacaaaatattactcattgtatcaaggacaaacatcccaaaaattcattttattcagaaatttatcgtaagaaatcaaagaca

SEQ ID NO: 60104 - DNA, 663 bp, Cannabis sativa
aaaaatttctcatattgtattcgaatgacctctctttttatttcaaaatagaatagtctttttactatgggtgttcatataatttgcgatctgtagttttaaaccccaaccaattcggaccaaaccatttgagactggacaaatgaatctggtgtgaatgattcggtcattccaaactgtttacaattctcttgttcggtcacgattttaaaaatcttagtagcggttcaaaccaaattaatccgtataattattttatatatacttaatatatattgttttagacagaatattgatatttaagaacaactttaagtaaaatattgatattgatttaatattgttataaatatattttttttattgttatttatgtatcataaacgtattaaaagtaaaaaaattacccaaaaaataaacaatcactctaaaaaatttagaacaacttcaaaatacaaaccataattttgaaccaaactaatctgttcttgagtggattggttttgtttggtttgatcacttaattagtctggtttagttttgaattttttaaaaaaggtaatacttagggttgttcattaaaccgctcaaatcgctcgtatcgcaaaaaaaaatgtggtttgaaattatttgcggtgcggtcgcggtttgaatttttcctaa

SEQ ID NO: 60105 - DNA, 1082 bp, Cannabis sativa
aacttgattaaatttcctacatcagttggtagttgagtaattttcctacatttctccaacaatagtgtctccaaattatacaagttacaaattgtattaggtatctcctcaatcttttgacaatctaacttcaaatatcttaaatatttcaattttcctattgaatcaggaagctttgtaatctgatcatcatatatggatagtactctcaagcctcgaaatgacttatgcaagtcctccatttttaacagctttagacaagcatcaacccttgaatcttgttgccacaatatggtgcgcaagcacttaactttaaataactcctcaatttcattagggtcattggcttttgcacattcttgtacgtacgaaaaatgacgaaccttgtgagaacatttactgaaattattcatcatataacaaaactcaccagaaacaaatattgccaaatcatgtacaagatcatgcatgtgaaaagttggttccttctcatacccatccttattagatggttgaaaaattgacattgagattagatctttgaagtacttctttccgatttcttcaattctcactcccttcttaggaagtaaaagaccttcggccatccacaataagatcatatcttcttcattgtattcataatctttaggaaatatagcacaataagagaaacaagacttcaaaggtgaaggtaagtaaaaataactcagccataaagctggaagaatatcaacactctcactctcatacaacccccatatatcgttgtttaatatgtcatcccaatcctccttattttgtttcccacgtaaaagtcccccaagtgattttatagctaagggaaggccattacacttctcaacaatttttcgaccaattacttgtagatcagcatactcgtgcatgtccacatcaattgctgcacgtctaacaaacaactgccaacctttgtcaaacgatatagtgctgagggaataagttgatgttggcttagtttccataattgaagcaaccttattgctccgtgttgtcacaatgatcttgcttccatgcaaccctgattgaaagacactttttat

SEQ ID NO: 60106 - DNA, 1340 bp, Cannabis sativa
tgtagttgtaaaatcttaaacagataattatacgtgtataactgagaattgcctaaaataattagtcgtgcatgcacgagcatgtgtagcgttgactgttggggacaattttatttaaaggccaggaattaaaaaaaaaaaaaatcactaatttaatttatgagagttttttttgttattattattatttaagtgtcaccaacgtatacatataatgatataaataataatatataattgtattttgagcgccttgaggtgtcatcaacgtatattttgtggcaaggtgtcacatttttttttctggtaaataattaccctatattttattgaaacataatatcttatgttctcaataatattaatttagtaattataatttgaaattacatggtaccttaagctcaacaatcaccaattttttattttatcaatgtgatcgagttgtatttgtaattaaggaattgaatttaaatttgaaacttatacaattgaggacaatttggttttataattaaatttattgacgaaattttatctcagtatatttttaaattacatagatattaactcttcttatttaattttatattttacaaaattaattaaataaatcacatgcgcaagatataaaaaaacgaacaaaacaaaaaaaaaaatagataattgtctagctaaatgtaacctaaataaaacaatttgatattggccaatttaagacatccaagtaaaacaaactatttgaggcgaaaaagagaaccatctaccaaaaagataaagggagtttgaggaggtggtttgacaagaggctgtaaaagaggagccacttcattgtattttagccattttacaacccccataaggcacgatgaacatcttcatgagaaaggttacattggaattgatgtaagttccttctcttttcagcttggtcttggaagggagccaattgtgacagagcaatatttacacataaattccccccaatggtggtcactttcatagtgttacatctaacattgtagccacttttcccattatagttgccaattgtcattctttaagaaaaggccaaccaaggacatcaaaaacatcaatggagaccctgggattccaaaatccaaggagacccaacttccatacctcatgtaagaccatactaacttgaaagttgggctttctcactctccatctggtccccaaaatcataacctcacgttatcaaaggatgctactccaaagagcacaactatgattgaaatttgtagaaaaaaaaaattccccattcacatcatcttttaagctaaggaaaaaagaaactccacatcatctgcagtact

SEQ ID NO: 60107 - DNA, 1443 bp, Cannabis sativa
  modified_base (1330)..(1353): a, c, t, g, unknown or other
atgggtagcctgaagatgtggtactcgaagacatgtgagtaattaacttaggtgattcactgcataagtgatattaggccttgaaatggtgagatagatcagttcgccaatgaggcttctgtagacagagggatcggataatggttgtcctttatctttgctaagtttgatattaggttccattggagttgaagcaggtttagctccaaggtaccctctatcaattagtaattgcaaagtaaagggtctttgagatatagatatgcccttcgttcttctaccaatttcaagtccaagaaagaacctgagggttcctatgtctttgagtttgaattttttatctaaaaattgtttgaaatgggtgattgccatgtcattgttgctagctatgattatgtcatcgacatatattagtatagctagaaatattgtgtttgtgtttttgataaagagggaattgttagagagagatcgggtgaagcctttatttgtgagtgtggtgctgagtttttaataccactgtcttgaggcttgtttaagtctcgttgagcttgcatactgagttgggaggtgcattgtatactgggggtaatttcatgtacacttcttcatggagatcaccatgaataaatgcattattgatatcaagttggtgtatgttccaattgttcatggctgcaagggctggcaatatcttgagtgtattaaacttggctactggtgcataaatttgcaagtaatcactcccttgtttttgagtgaagcctttggctacaaggtgagccttgaatggcttaacctccccttattcatggtatttgaccttgtatacccacttgcatcaaacctttatggccaggaggtaattttgttactgtccaagttttgtttgttttttcaagggccttagtttcagtgtccatagccaggagccaatgcttgaattgtgaggcttcactataggattcaggcttgatttgggagtaagctgctaacacagtagccctgaattgggggctgggtttagcataggaaatgaatttctcaattggaaggcaatgaaataggtatggcaaacataatcctttaggtgggaaggtttggtcatttgacggccagtttttgatgtttgtattggggccttggaatgaatggctggtgtgggaatgacaccattgttgtcttgatgagacttactagatgcatctgctgtagcaatgacactagtattatttttgtgagactcagtagaagcatctggtgtgtgaatggcactagtagctttaaagggtgatttaatatctgtagtgttgggtcttatgccctaaannnnnnnnnnnnnnnnnnnnnnnnatttacttattaatatagatcataaataacatttaatgtagcatggttcacatgatttatttcatgattatgtacataatgtatgaattc

SEQ ID NO: 60108 - DNA, 1860 bp, Cannabis sativa
  modified_base (26)..(37): a, c, t, g, unknown or other
  modified_base (1312)..(1312): a, c, t, g, unknown or other
  modified_base (1400)..(1429): a, c, t, g, unknown or other
  modified_base (1611)..(1613): a, c, t, g, unknown or other
  modified_base (1809)..(1821): a, c, t, g, unknown or other
aagttcttatttaggatgttaataannnnnnnnnnnngtagatctaagatcctggtaaactaaatcccaacaaaaagattattctaagattatcaaatatgctcatagcaaatttctaatattccattaatctttggaggttacccaactaacttttcaaaatttatgttatatttaaaagaaataaaattaaatgtctaataaaataaaatgataaataaatatcatttatcttattttataatttaacttaaatcaaataacaaaaatttgaaagttgacaaaatatctagttggattttaaaaattttctagattattttaattaaaatatatcttattttaaatttcaaataaggtcattttataaaattaattaaataatgtaaaatataaaatatctaaccttatatttaaaaataagataaaataatcaatttttttaaaaaaaataagataactaattaagcaaaaaattagattttatccattttcaagttcaaaatatactaatatctaaaattaattaaaataaaattaatgaattttattctgataattagatttgagatttgaaaaataaaaatctaaatataaaattacacaaaaaattcgaaattatttccttgaaaaaatcatgaaaaattgagaaaatgcaaaaaattgcatttggtgcggatggtatggagtgcataccatcaacgcgcgcatgcatgggtgcacaaccaagaaacctcggtagatgaggctgctagcagcctttctgtgtgtggagtggggtttcaaacaaccccgtgtgtgtgtttccttggacacaccttgtccgaacacgtgtgtcacgtggtgtccgagcgcgcatggggtgcatccccattcctaatatttttctaattttcaaaaattcataactaattcaaataaaatcgaaatcaagttctctaaaaaaatgaattgcttaattttttacaaactatccatgaaaaataattccagaatgaaattaaaatttactttacgtaaaaattttgcaaacatcaatcaatcatcaataaacacatagatcaatatgaatcacatccaaatcacacatacttcgtttgaaatccatatttcttgaaagtaaattattaccatgactctaaggctagttgttggattatattctaccaggacctagatttactaacaagtatgttcttaacatcctaaatatgaatctctaaaatgataaaaattaaacacatataaagtatgacaaaccttacaatggttgcagcaaaattaaatgactctttccgctcagatctctaanccttgttcctttctgtcgcaaagtataataaagatctgagcccgacactcctttatttgtttcgattcttcacagtcttacacactannnnnnnnnnnnnnnnnnnnnnnnnnnnnnatgcactcaatcactaaggctcgagttttattgtgaagaacactatagaattttgaattagaagagagaaaagaaaaaaaaaaaaagaagtctcaaaactctagttgtctgacagaatgaaaactatgtttcaaaagcattagttggataatgagactattcttttctttttatactaattnnnttagggttaggattgaattatatagaataaaaaatgataaaataatagtaaaaataagggcatagtggtcggccacatagtggaccctacactaattatatttttgctctttttctcaaccatttatctatcatttcacagatgcaacattttccaattctaatcctataaatgctaaaactatttatttaataannnnnnnnnnnnntcaaataaaattgtcatttatattttttattaattagac

SEQ ID NO: 60109 - DNA, 861 bp, Cannabis sativa
aaattacccactggaatgcaaatcaaaatttccaaatcgggtagcatcaggttttctgcatctctggttctgcataatgtcttatttgtgcctgattttcaattcaatttgttcagtgtccctacaattctaaatgatgaatccaacagtgctttctttacaaaatcttgatgtcttctccagggttcccagaacaagaagattgggattgctaaacgggttagacatctctattttctgatgcaacaacctgttcttccccttcatgttttttcaaaatctgaatgtaataaatcatgtcttagtgttcattcttggcatgctagacttggacacccttctatgtctactacatcttttatcaataaaatgcttcatgtcaaagctcccaataatttttcaccatgcaatatttgtcatatggctaaacaaaaaaggctaccttttatttctaacaatcattttgctgccttcagttttgatattatccatctagacatttggggcccctttcatgtacatagcatagaaggatttcgatattttttgacaatagtagatgaccatagccgtttctgttgggtatacatgttaagatccaaatctgaagctcaacaagtcataccagatttttacaaattcatacaaacacaattttccactaatattaaagctattagatgtgacaatgcaaaagaactcaatatgacttccttttttgctcaaaaagggattcgaactaacaactcatgtgtggaaacacctcaacaaaactcagtagttgagcgcaaacaccaacacattctaaatgttgccagagcactaacattccagtcctctcttgcactggtttattggcca

SEQ ID NO: 60110 - DNA, 693 bp, Cannabis sativa
tgcttatgtattcattcgataacattgagattattaagttttacatcaaaaagtattttacttatacaatttataataatgttcacacaaaaagtggtgtgttacaatttttttaatcttaatatatggaattaagagaagaaaatctaaattaggatattttttttagagtataacaatattcacacttaattaaatgatacacaaaattgacacacaatatgttagttttctttcaatgaaagagagaaagagtagagaaaggtacaagaaagtaaataattaagatgcaatttcatattgattttgatacatgaaggtgttatatacaatctgaacaagagtccaagactctaacaaattaactaaaagcctacaagctcgaacagtaaaccaactaaaaatatagttataactaactaaatatattgctaaactactaaccgctcttaataattcccatgcatcttcaattctaagtttgtctcaaaaaacagagaacgtgctactagatatttccttttgtaaaaccatcaactattgatcaatagtaggcacatgcttgacttcaaccaactattggatgactttctctcaaacaaaatacaaattcatctcaatgtgcttattgctccttgcatggagattcaaattcatagtgagcaacactatgcacaaattgccacacgagat

SEQ ID NO: 60111 - DNA, 1094 bp, Cannabis sativa
ttatattttatttatatataaaaagttagagataaaaacaaaacaacaatggcaaaaatgaaatggccactcactcatgacccatgcaatgcattgcattgagatttgagtgagagtaatctctcttcaacatgacaccttgctattatagctacctttacagcctacaactcattatgtgcccacaaccttttttgtcttttcatttctgttaaattattagtaaatttttgaaattgttatattttaatatttaattttattgtgtaacaatacattttgttgaaattaaaaataaaaacaaactcaatggctgtccaattaaaaactgtaaaaaaacactattaaattattagtagagaaatttttactatcatattttttttttttagttaatggttcgaattttattatagccgcttattataatatattatgtttgactatttaggaagctagtttgttttagtggtgtcattcttattgggatgattatgagaactcttatgaagtgcatactgaacaattaagatcgaatcacgtataagatccctataactgatacgtggtcttcaaaattgtcaaagctatcaaaagagtaagaaagaaaatctacaccacttgatcctcgttgaaaccaacatttgccacaaaataaacaatatcatattatttttttttaaaaaaatattattttaaattttgtgttttataaaaatgattaattgaactatttgttttgttaaatgacaaattagattatgtgtatttttttagcaaaagaaaataatctaaaactagtttctagtgcaaacaaatataacaagtttagtcataatactttcaagtgtgaatattattgacttattgtatttaatttggataaaagttgaactaaagtattattttataccattttaaaaaataaaaaatctaaattataaaatagactgattgataactttagtaaaaaacactaactaactatgtatttatttatttattttagttgtatagttcaaacatgtttttcataatgtgtaaagttgtggtctcaaatactagttgtgttttaatgtacatttaatgtaaga

SEQ ID NO: 60112 - DNA, 883 bp, Cannabis sativa
  modified_base (171)..(171): a, c, t, g, unknown or other
atttattttcttataaaactttaacgaagattaattatattttaaattaaattaattataattattgattaatttttcatattttattattaaataagaatcatttagcaattttttttgctcttaaattattaaaatttttatagcaaaattctttataatttaaaattntacacatataatttcataattaaaattttattatacttatcactttaatttaaaatgattacacttaattatttagttttttttatttaaatacttaaaaagtaaaaaatgaaataggttgaatgtattttttttttaaaaaaaacgctaaactcttgcatattttttttataaggagtcatttactcaaaaccagagtcaaaaaataaagtcaaggtcccccataaaataagtaacctcaaacttgaatagaaaaactgattcttagtttaattaggttaaactagtataattagcctaatacaattatttaaataaggcaaatgggcttttacaattgagattgttaatgtgagggaatttattcttgaattaaataactgtttttcattgaataagcccaatactaattgtgcctaaataaaactatcatgtggatgatattttattttagcaacctagtccatttatatatctaaaaataaatgagattcttatatgcatctaagtccaaaagcaaacatataggctcacataggtcaaattgattttgataagtcctatcatgtttctaggtttacacgaatgaaaaaaatacaaaatttatatgttccacataattttaagatctattgacaattagactatgattaaaattagatcattagatctgtcaacaagttaatcattatatcaaataaataataggttt

SEQ ID NO: 60113 - DNA, 881 bp, Cannabis sativa
cctttgctactactggttcaaccaccctgtttagagatttgtcgagcttcaataagctggccagaaacatctcgtgcaaccatatcagccccataagaaccttagttagagaataaatccattgatcaaaacataactagcattaatccattgatcaaaagtagagttcgttaacacgaaaccttcattaacaaccggattcttatcatttcggattctccaaattgcccaacaaaacatacccacttcttgaacaacatgcttagaattatgactatagaaacatccaatatagccaagaagcaaaacacttagtagacaatagaagagttcataaattagtgatatatggatatggatgaatcatgtaatagtagtgaaactatttggttgaaattttttttatttccaatttagacgtagggaacagtgaatcatcatcagcatgagaaagaagaaattatggattacagctctgctttataaattttgaactttataatataaaagtgtgacataaatgggacccaaggcgagtagattatgatcgtgtgaggtagggcctacgattgatgatggtggagtcgtcttcctccgtttcctttacgaacatccacaaccgaaggttcatgagaatcgcacacctgagtcttgaacttacacccaaatcttctcgtcaacgatcctctccaccctttcaccaacgaaccaccgttaccgccgccttcttctccgaccggcccggtcttatcgatcttctcgatcacttttctcatcgtcgaacactctctttccagttggtgcactcgcgtcctcatgctatccatgtccaatcgaagcacctgattctctctcaccgccgctctccacgtgttggtcac

SEQ ID NO: 60114 - DNA, 963 bp, Cannabis sativa
ttcatttatacttttataattgacgttttattcatttataaaaataaaaacaacataacctcaaaatgaaaacatcataacctcaaaatagaaacaacataacatcgaaataaaaacaacataacttcaaaatagaaacaacataacttcaaaatggaaagagcttttataaaaatgaaaaaaatctaaaaaaacataaacaaaaaaaaaaagaaaattgaaaatgcagtgatttaaaatgtaaaaatgaaaaaacccaaaaaataaataaaataccttaatttcactaaagaaaagaatatagatttaattttactaaagaaaaagaaaatagattcattcagaaaaaaagaaagaaagaaaaaaagaatcatgcttttcttcttttacaacggcaagacaagtatatttttcttttggagtttatatatatttatttactacacagtaaaataaagaatgatatatatatgtatgtcatctttgagttttgtagttcaaagattttggttgttgcatacaattgattaatctggtttgtcaatatattatctttctctttttaatttttaaatatatgaataattaatttttgtatgtataatataataataatgttgcaattttttgtgttcatatagcttgcttcttcatttggagtcttcatcaatacgttcaaagatatttcactagcaaattaataaggtaattatttgatcaagttctttatttcttgttcaatattattaattatatatttagtatatatatagtttatcaatgtacattacaactcggatcataatgtttaatgcttttcttcattaactttgatagtcatcattttaaataagtgtaatttgcggttaaatttttatgtgctgtttagtaacactttgtttttttttttttatatattttttaatcacaaaatgaaagtaaaatttttgttttttttttttt

SEQ ID NO: 60115 - DNA, 906 bp, Cannabis sativa
aggactaattttattgctttcttgttgggcgcacagctgtctcatgattattctaacactttgtttatttctttgttgaagcagccaggcctatggaaaaccttttggctactcttgctgagacatatagccctgacgcttctctgcctccggctccatcccagttggtgacccccgggaggtcctcgtccaatgccccttcaggcacgatcgtcttgatagaagaggagggggaagtcgaggaagatgaggtcgaggctgcggccgccctcgcgcgcaagtggaagggcaagatggttgaaactgagccttctaagcgaacccggaggggggacactccagctgtgagcaatgactccgggattcctcccgaagcggaggagtatactgtgccccacggcattgtgctgaccctggtccctgtggatgaggaaaggcaaatgctccgtgttgccaaacacagctacgccctggacgagttcagtcggggacacgttgaggtggaggccctaaagaagattctgcgggaggagcagcagaaaactttgcacgaggacgccttccggaatccttaggaacttaacatggaccctttgacggattggttcaaccgctttgttaggcctaccctagctcccttcgcctcggagatgactagccaatttgtctcccacctgacacaattcccagccaagagatacgcggcttgtgcctccatgaactccgtatacctggtggaagacatcagctatgctctggccacggtgagtacttgtaatttcttcccttctcttatattttgtctaaggcatattatttcattcttgtttcttttcccagattactgctgagaccggccgcctttctaagaccctgatcgatcatgggttcgtcatgtctgaattt

SEQ ID NO: 60116 - DNA, 652 bp, Cannabis sativa
agacttcatccgagctgcctttgcattgacatgtcaagcgcgtttgttcgcgactcaatgtgaggctgactgggcatcccttcagttttttatctaataaacgctctgacaattaatatttcaaaatctaattttctcttaccacggttgacggctatgcttgattatttttaatttcccatattcgctttaagggggaaccgaggcgtctgagattcttttgatataattacccctttttgttgtttgcctataaatatcggtgggcgtttgtacataaactcatttttaccatccttctttgctaagcaagagcagagcgaaaagagaggtttttggctttaagtttgctgaagtaccttcatcaaaactgctcgtttggcttggcgttacctgaatccagacatctgatccttgagtaatttctagatttgctttatgtttactttgcatatttactttttgaatgaaccttcgaatttgctgtagaagatatgtaggaaaccctaagtttagaaactctgcgattttcctttgtcatggtttgtacgatttcacagtccataatgtttgctttctgaactgcataatgcatgtctttcatcttccttattctaagcttcataatattttttgccctaactcgagaaaa

SEQ ID NO: 60117 - DNA, 775 bp, Cannabis sativa
agcgaccatgaccacctatcaatcatctctctctctctcataacttctttattattttttattttgagatttatgtatttttgagatttttgtattttatagatcgtctgagatctctgggttgtggtttcagcaaaaccatggcccatatctcgactcttcgaagctcttaaggccaaacaaaactcccatcttggttttgaggaggatgaatgcgatgattttttttttgggaaatccactatggcgacgatttaaaatcgttgactatactatatgttacgatttaaaactgtcacctatagtataggcaacagttttaaaccatcgagaattcttttatactgaaattttgctatcgtcgcctattctacccagtattcacgacgctcgtacaggcgatggttttacaagtcgtcgagaattctttacccgacgatgtaaactgtattttgagtattttagtagagttttcattgtattttttttttcggacagttcgtggttggagtgacagggacactgctggaagtggcgacggacatggtcttgggtgggtggattgatggaaagccttctcctcccgctgcctgctactacatcagaggtgctgagtgattagtgttgacgacaccaacgataataaaaagagaagaagaagatggtttgttttgagtctttgagatttagaattagatagataagttagatacagtggagagagaaatagagagtgagagaagtctgaccatttggagtgttttttttttttttt

SEQ ID NO: 60118 - DNA, 803 bp, Cannabis sativa
aaaaagaattttcttaagtttaaatttttcctaatattattattattgtttgaataaattctctcctagtattattagacatagtctaaactaaaaaaagatagagagagaggtgtaagtttaaaaatttatcttttttatcatatttttgaaagaaaaaaataaatctactccaaaaaaaaaaaatcttttaagcttaaaaaattatcttttttatcttatgtttgaaagaaaaaattagatctactccaacaaaaagaaatctttcttaagtttaaattttcattccttatatatttttttaaataaattctcatattagacttaggctagacaaaaacgtaaaaaaagaagttatcttataagtttaaaaatttgacttttttcctccaaaagatattttttcttatttctttaaaaaaaaaattcttttctagaagcttacattttctctcttctaattatttttttagttaattagaatttttaatctttgaacattaacaaattaggatttttgactcctgatttaatacatgtcaaaatttgaatggtataatttagtagatattaaaatttaaaaaatatgatttagtatataaataattatagaattagtaaaattgaatgaaattagataaaaaatctttaaatctaacaatctcaataactaataaaaatatttaagaaaaaaattttaacgaaaaaaaaaatttaagagcataatttagtatataacaaaatttaaaagacaaaaatttaataagccattgttttactaaaaaaaagaagaaaaagaaaat

SEQ ID NO: 60119 - DNA, 2416 bp, Cannabis sativa
tcatataacttattaagaaactagtttttagagaatctagtaccactgatacctgataataatcttcgaaagtgctaattatacttttgaaaaattttaagatagggctttttcactctaaaaatttcatattaaaatatattgttttcttttttgaaagaaacatatttaaattctctagctaaaaaaacacaacttttgattattataataattaaattttcattcaatgaaaaataattaaaaaaataaaataaaaaacagttagagttctactactatctggtttgatttaaactggtaccaaattttatttatttattttgagtgactttattatcatatcgtttacgtatcaaactttataaagaaaaatgttgtttacttttgaaaaaacgtgaagtggtaaaattaaaaagaaataatagtaatggcaggttccaatatgttatttactactttcagaataaaattgtcgttgaaatttgtctgtgttttgtcccacattatttatatgtgagtaatttttgactaaattttgtacgtgggattgaaatatttattttcttagtaattttttaacatattagtaattttttaacatagtgattagaatcacttatgaatttacgttaaaaaaatttgaaatcagtacaagacactcctcgaactaaaataactcatcgtcttatcgaaaaatatgttatatcaaactataggttgctaaaatcttaatgcgaaccacatgggacaaaattactcataaaaatttagacaataaaactataacgtcttcaaagagtatctcaacacattgaaaaatactttcccattattaatagctatcactagagggcctagagccgaaactaaaaataaaaacatcgcaataccaaaccaaaaaaaatgtacattagaatgacaatcttcaacataaaaacttataattaaacacacagtctattttactagctcaacaatattaaaaaactaaaaactcataaagaaattctaactataatactgtaaaattttattatacgctcgtaaaatttttttagtaaaattttattatacgctcaatattataatactactatagaaaaatattgacttttgttgttgttactttcataacatgattttgaagattcaattactgaattgaatgaaagatcaatagatgactcataaccctacctcatttcctttttggaaggaaggtatctactaattttttgattctcaattagtaagagagatgttgaactaaaaaataggttctaaaagctaaaaaaaacatcatttcactaatcaagttattgatattcctcaagaaaattgtaatctttgttattttaagtatttttatgttattttacataaagatatgtaacaatatttagtcactaaatatattaatttttagctaataatatttgtttaaccccactctagctatgttggtaggaaggaaagaaggaaagagagggaaatgaatggagagactaaaaaggagggagaagagaagagaaaagttttaaggatttgcagaaagtcatctgatctaattattaattgatataatagaattagacatccaatcataattggattggattggatgtaaatttaaaaattcaattgagatcaaatcggttgttggatgagacatccgatccaatagataaccgaaccgaaccaattcaattatcattcaatggtcatttacttatacttatatatttttaaaatacatttataattttatatatttaatatatttttttttttaaaaaaaaaattagatctaaaatatttatttttatcttcctaaacattaatcaaattgtcaatgcgcattgaataagttttatatttttgcagttttatatgagttcatgagaattaagttggattaaactaatgtttattatgtacattggataattttttaattatgtttttttttttaaatatttatctcttaaggaaatcaacttaagtggtaactaaaatagattggatggatctaatctaatctaatagaaaaccagttaaaagctaaagagacaatccagaaaggtgcgtgcaatatggtatctgatggtaaagacaccaagatctgggaggatccctagattcctcatgaactagacttctatccccactccaatggtaatcattcccttaggctcaatttagtcgcggatcttctcacagagaggtaattaggacctccagaagcttcattccttatttgatcaggaaacaacccaagctattttaaaaggaagaaaaccttcgagtaaagggagggattcttgggtttggatgaaggaaagcagtggtaagttctcttgtaagtctgcatacttaactcaggctcttcaacgagcccccctttatgatgtct

SEQ ID NO: 60120 - DNA, 918 bp, Cannabis sativa
  modified_base (433)..(433): a, c, t, g, unknown or other
ttaaccttctctttcagctttgtcccctcagccataagctcctcctccttagacttattctcctcttccagctgaggaggacaaatcgaagggacgtcctttcatcttgaaggctatgcacttctgcagataaggtctcaatggtctcttcaagttggttagaagcctcgagatccttagtcaactcggttattttcttctgagcagtaaaaagcttcttattgacttcacccagctccatccgaatagctccaagttccaccttggcgtcatctgcatcctttttgcccaagtccacctccgccctcatggtgttggacaaagccactttccgggaagcagtagacttagctcgggagtatgtgtaagccaacttcagaccatcctacacagaggaaaaactttaaggtctgaaccaaataaagaagaattnaaggaaactatcaacaaaggcttaccctggtaaattccttcaagactccccccatcagcaactctagggaagactcgttatcaacactggccacctgctcacttacctcaggaaccaaccggttcatgtaatgagcaagcatctctctgcctttcttggcctctggaagcaccggcaaaggtagagtaggagcccacacctgctcaggtccactcttagctagctcggatccgccctttgattgctcaggcctgtccgagcttcctcctcgagaatccttggacttcgcaacttttgaagtagaagggtccgcaacaatcagctcctcggaaaggtcaataacctctccagctggtgccttttctttggaaggggtcgcctcaccgcctttagatttcttggccggtggagacgagcttgagcttcctccagctctcttctttagagcgtcaagcatcttttgagacatatctgcgcggaataaa

SEQ ID NO: 60121 - DNA, 830 bp, Cannabis sativa
cgagccccagcttgccatcaaagttaactcggctccattcccagcgaggcatccccatgagataaggcttaccgtatatctttaatatgcgttaatctcagcccaataaaagtggaatattcacagctttgtgatttctaaataaaaaccacatttacttagcgtgatttgtaatcaaatcccatgattcgggggaatagttgctgtaaagattacagtcaactttgtaattaactgctcactatattattttaaatagtggcaatcaagatgagaggggggacgaaaaaactctaacaaaagagggccagaaaaataatcagaaatttgaataggattgactcgtggactatgcataattttaactaaaatcccatgtaaaaaaccctgtgttcatatttttttaattttatagcctctacttcaaaacctaacaagaaaaagaagttgagcaacaacaaaaagcttctttaagttattaacacaacatataagggtaaaaaggttgctaattcatagacaaaaagaaaagggaaatacttttattgcaccaaatagggccactagaaaccctagtgtcctatgtttttggcaaagaatcaaggtatttctatttgtgttgagaattcatgtgttttagagaattattatccttttgagtttattaattctaaatctactaaccatgtgtatgttcttcttatttcatctctaacttcttggacttggattaatatcctagcgagttgatacagatagttggatagaggggtggagattctctaagcttgaagatgaagctcaaatttttattttatttttagaataat

SEQ ID NO: 60122 - DNA, 1800 bp, Cannabis sativa
caagtttggatatttattcctttggtacgtgcatgaacgccttgcatctaaacacctttagatgtgaatatcacacatctttccttgtccatactttttatggaatatcaaacttcaaaggtactgatggagatcttttgatcagataacatgcagtttgtaccgctgctccccaaaatagctttggtagcttagatgatctcatcatgcatctgaccctttctataatggtgtgattcattcgttctgctacaccattatattgaggagttctaagtaccgtgttttcatgtcaaatttaatgtttagagcaataatttctaaacttatgagaactatatttgccttcattgtctattcagagacactttaacaacttcccagtttctctttcaaccatagcatgggactattgaaaaacccaaacacctggtcttttgtctttagcatatagacctacacctttcttgatgcatcatctatgaaagtcacaaaataattggctcctcccaatgattcaacttctatgggaccatagacgtcagagtaaactcgctccagtacctcatttttcttagcagaggaactcttaaatgaaactctatgttactttccgactaagcaatatgttcacaaggatccgatatagtacatttctcctaaagaatgaacttcttctttacgagtagttgcaaaccctattcactcatatggccaagtcgtttgtgccataaatttgggaagtgctatttgctacattaatactattgttgcaagccttcccataagtcttgtacaacgaacaacataactttcctctcacaatgatcattgaccctttacagagtttccaattctttttgccgaagtaactttcgtacccttgctcatctaatttacggagatcagattaaggcacaaatcttaaacatgccttaccttattcattgtcaaatgacaaccaacattcgtttgaatacttacatctccaattccaataattttggagcatgtagaattacccatctttacatttccaaagtcaccagctttgtatgtggtaaacatctctctattgggagtgatgtggaaagaggctcgtgaatctaccacccactcaaccatgttatcttcgacatgcaaatattcgttaacaatcactatttccacatcttcttctatagtggcagctgtagctgtgttgttgtcaccattgtttttcttcttgttggcctcttgcattttctgcttcaaaatcctacaatttttcttaatgtggcctggcttgccacagtgaaagtagccatcgattttgcttatgtattttgatctgcctctggacttgtcatttctatttttaccttctttgttttgacttctccccataatttctaaaataagggcttgagactccacacctctcgccttgttttgcttttcaaacgaaaccaaggcctctacaatgacttcatactcaaacttgtccttcccataagtaagagttgtgataaggtgatcatatgatggaagaagtgttgccattattaacacatcattttcctcatcactaaacttcacttcaaactgtaacaattgagaaatcatgccattaaaattactcaaatgttggagcatatccacattatcttgcttccgcatctagtacaacactttccataagtaaaactttttagaaagattcttggacatgtacaaattctctaaagtctcccagatttctttagtcgtcttgcactctttcgattctatattttgcaagacgctatctgaaagatttag

SEQ ID NO: 60123 - DNA, 1118 bp, Cannabis sativa
gtcctggattggggagtctgctctgtacgcgagggtggatttgggtaagtgtattattaattctagactaattgaagatttttgattgctatagtctagtttgttctaggttctgggtaatttggtttcacattatgggtttttggttcaatccacttgctttaggtggtttatggttgtgttggaggagctccgtggtggttcgtttgtggttgtgtttgttccactgagtggtgttgggttggttacggtatggggttgggttggttacggtgtggtgtttggtttagttgtggcttagttcggttttggtgttgggagtcgattggaaccgggtgtgattacattttttttgggtgttcaggtgcgtcaggtatcgggttgggtgtagtcaggttgggcacggtcgggttcaggtcctattgggctgagcctgaatgtttaatttataggctgaaatgaattataaaaacaaaaagggtgagacaaaatattattccgttttggtttgtcaacgtaaaccgtaaactcaatggagccagagagatttcttcaccatctatccctcgatcttggcctatcaaaatagaagttaaaacattcagaatcaaatcactcatctttgaaaaatcaaaatctcattttctgaaaactgtaaaaaatacaatagaagcctacctgtccaagtctctgctacccagaaatcctctttccctgtttttatctctaagttttctgactagtttggaattggatgacgatgttagggacgccggactgagcccaccgcttggatgcgaccctaccagagaagagaagcagttgtcgtccgttcgtcgacgcctttggagaagaagaagcttgagggtgactcttcgtgtactgactactgtgtctatttgtaaggcaagctaaagaattcgaatatgtatttttttaaataataaagtctaaaaactgaaagtaaatattattaagtttttaataaaataaaaaaattaattttttaatactgctcgagttacggattacaacccgaataaaaaaaaacaattcactatacccgaattcaaagcccgagtggggtatttttaggttgaacctgacccgaccacatg

SEQ ID NO: 60124 - DNA, 732 bp, Cannabis sativa
ttctttaataaaattagacaaagtattccttaaatcaacaatttcaatagtttgagagaaatttttaacgattttaacgttcaggagtaaaaatttaaattagctttatatactgatatgatgaattttattcgattttttaattaatgattattccattttctctaaaaaaaaatggagtaaaaattgaaactatttgatctataaaaaaaaaagaaaagaaaaaaaaattgaaactatttgtgaatttttattttaatccataaaattataaatacacatcaatattagattaaattaatttttgtatatagtttatgtataaaaaaattatattattaatttcaataataattttcatataattttttaagataatgtatatttttattattttattttattgtaataagattttaataatttttttattttagttttaatcttaatatttaaaatatattttatttttgttatatatatgtatcttataagaataagagaaggttttttttttttttttttttttcaaaaactactatatatttttgtgaaacaaaagctagtatatattaaagatataaattttatataaactaaaaatattatcatctttttcttttttttttctagaagaataaaaatattaaattaagtatcattttaagagtgtaaataaaactacaaacaataataatacaaatacaatagctaatagtgaatagtgattgt

SEQ ID NO: 60125 - DNA, 1091 bp, Cannabis sativa
  modified_base (689)..(689): a, c, t, g, unknown or other
accaaattcagagatgaaaaattgtggaaggataaaaaaatcaattataagagagaataagagattggagatgagagagagagaaaagagtgttgttggagtcaagaatgccttcaagcccactgcatttgaggtcaagatgtatcacgtggcctgtgatgtcatcgcacgtgactccactccatctgtagcaatccttgcttatgtcccatgaaattgtactattaggattggttatgccataatattccaaatatgataatgaatgattgaagatggtgaaagagtttttaaagtggagcaaagcagagctttcatggggatggcacaatgaagaagaaggcatggaaagagaagaagaagaagtaagaatgaagattagagagtagatccatggaaacaaacttatcatatatatgtgtgctattggttcatcattgtttatatttataggcactcagcttttgtatgattataaagagttagtttatgaaataataataaactaaacagtgtaaatattaatgggaaacttaccaaaatattggaattttggttaatttttacaaaaatactatcacacggaaaagttttcaaaatactatcacacaaaacagaacaactcaaaacaacagtagaacaactaaaaaccaccagtagaacaccagtaaaaacttaacacagtatantgcagtatgaaacttataaaaatatacagtaaaaaagtaaaaaatactgcctggtagtatttttgtaaaaaatagtaaaagttagtataccactacaaaaaatcttacttttagtaacagaacttgtgactaaaagtgaaaaaataattgtgactaattgtaaattattattcctatgttgtgactaaaagatccgtagctaaaagtattagacacaaaaattacaatttgttgtgaatgtgactaaaactaaattagtgtaaaaagtaccatctagaggagttaaaagtgtcggggtgttttcagtgtggcatgctagggcattacaaaagggattgtccccaactaagaactgaagcaccaaagactgcagcgaagcccactccagcaagggtgttcgcg

SEQ ID NO: 60126 - DNA, 979 bp, Cannabis sativa
tgcattcagcattgatcccatgatgtttctatttatacgcattgtaacgagtggggaaactcttcctccccaagcctcctagccctataaatagtgatgtatgttcacagggcaggatatcggtcgaaaaacagttgagctaagactatactattatctaagaattatatattcagaaatactgttgtaagagctataagaaaagaaaacgaggattaggctattaccgaactgctcggggctgaacctatataaaattcatgtgtctttatattgctttatcatatatctgttattatatatcatttatcgcttataaaatagactcattgtcgttggctaaaagcgaaatcaacaggtactattatgagcaagatcctgaagtgcatcggatggctcaagaacttgctaaaacccagtaaaaatgggcgatgcaagaagacatttcccattagatgcaagagacattagtgtggctacatgccgaattcgaggccaataaggaaatctatgaggagaatgctctagaagagtccatgccattaaggtactcactaaccaccctctctttcaagtcctttagaagccagaatcttcaaggagactactcaagtgggccatggagctcaactaatttgatatttagtaccaaccaagaatatctattaagggtcaagccctagccgatttcattatggagtgcactaggatcattgatgatccggaagagccagttcaaggactggtgatttggaaagtctatgttgatggagcctcgaacgaaaaaggcttcaaagctagaatttctttaatttctcctcaaaggcaacaactccaaagagccctctagttcgaatttgttgcctctaataatgaagtggagcatgaataatgatcgctagtttgcaactagctaaagaagttgggaccgaaaacattgtgatctacaacgactcccagttagttgtgaaccaaatat

SEQ ID NO: 60127 - DNA, 1219 bp, Cannabis sativa
  modified_base (163)..(165): a, c, t, g, unknown or other
cagccctaactttaatcattgttagtttctcttttgaattacttgctttttaatttcactttctctttagtgttcttaaatttaattttctcttatttttgaatttaccaaatagaagtaaggatttaattttaaagtatttaactacaatccttgtgggatnnncctcactctttgtgagtctattacttatttacgatacgtacacttgcgtgttaagaataccacaataagtttttggcgccattgccagggattgatagttaatatcaataaaaattaaatcttgttctaatttggttcttaatttttcaattttagtactaatgctgtttgtttcaaaatcttattttttttttcaggttcaactagtttatgagttaaggtgcaactgccagattgcctgttgatcctgaaatagagaagacttgcagacagaatagaagaaggaaaatattagaaaaggctgcaatagagattgaacaaaaagtatatatggctgacaatgcccataatggcaacaacggtaacaatggaggagttgtagaagaccaggctaatggtcacaaccacaatgaccgtagtctgagggactatttgcttcctaacttgacaggggccaactcttgtataaggccacctgccgttgacgccaacaattttgagatcaagtcggccataatgcaggtggttcaatcttcagaccagtttgggggggctgccatcagaagacccaaacatgcatcaagctaacttcgaggaactctatcagaccttcaagatgaatggagttagcgatgtcgccataaggctaaggctgttcctattctcactaagggagcgagccaagagttggttggtatctttgtagcccaattctatcaacacttgggaggaattggccttaaaattcattttcaaattctttcctcctgcaaagatcgccaagttgagatctgaaatcaacaacttcacccagcatgacaacgaatctctttatgaagcctgggagagattcaaggacttattggggaagttcctgaactatgggattgaaaagtggttgcaagtgcataacttctatactagattagacttctatactggattagtcagcaacaccctaacactcatagatgttgtagctggtggggctttcatgaggagaagtgctaatgaggcctttgaactacttgaagagatggcgataactaatcaa

SEQ ID NO: 60128 - DNA, 827 bp, Cannabis sativa
tgtcagaacacacctgaaaagacaacacatacatattatataataatatagttctattaagcacataactaaattagtttcatcaatttacccctctcccaaaatgctcccgactcaccaacggggtctttaacatattaaaattcataaaatttcacatatattgaactataatataattcctcaattattcataatatctaattagggttttgctaatcctttttcttaattccgggtatcacactatcaatccacaaaaatagtgaataaatgacattcttaaattataagaaatatatatgaaaatccctttaaatcaggatttgactacatttaaaatgggaaactatctttaatgcatcctgtcgtgcattttctctctggtcagatcaaacaagtttctaattacttctgtccgaccaagtcagcttacattccgtccatgcagtgagctttaccttgctcgtctgttattacatccaattgagtatatgtcttaggcagacactccatgaggctcttttctctacccaaggcttgatgtgatgatgcgtgtcatccaaggaaatgtgccacatcatccaaacaaaattcaagataacatttatcctccaaatctacacagaaacttcctagttagctaatcatgaaaatataggctgtcattttaaatcttttttcaaatatttgatgcatttaatgcctaaatacgggttattgtgccctagaagcatgtgctaacggttgtattttataaagtactcattgcaaaatttgggagaaaacaaaaatttgattcggggtgttcaaattacaattgtatc

SEQ ID NO: 60129 - DNA, 920 bp, Cannabis sativa
  modified_base (555)..(556): a, c, t, g, unknown or other
  modified_base (675)..(678): a, c, t, g, unknown or other
ttggatggggacttccaaatacattgtaagttaaacccttgctgacgaataaccaacccacaatgaatagggaaggtattgtaatgctatgaatgacctagaatcgaatactggtaataatattagcaaaagaacgttctcctgtgcttctagacatttaagctctgcatattcttatacagtcaaaggggggtcgactctgtaaaagatgaaatcagtaaaaagaaattcactaaaatcagatctttgtgagattatccatagtgtactaagggtttttttagaggacaccaaattagtatagctatccttcttctgacacagcaacaaaatttcccaatcagttcgaaacgaagtgttagagaatttcttttttcttgttgcgtgtacatgtagaatttgtactattcaatagagtcttttttaaattcctgtatcactacaattcttgcaataactgtagtagtgcttgtaatataataatctaaaggttttttctatttctctattattagcttcggacttgaaattgaggatgaggtaaaaatactaganngtattagtattcaaggaaagaaaataataaataaataataatcaatattcatgatgcacagagtattgttttattatacccaaatgaaagggtctttcttgaactaattacaaagatgnnnntttgtatgtaattaagaaagacaaaatataaaaataagttcaattgaaagtaaaaaagtaaaggatattttcattataagctaagatcacttgacattctaatctaaaaattaagtaaagaaaaaaaaaaggattcgtcgatacaatcaaaaaataatcaaaaaaaaaagatttggtaattttatttcagcgtgatttaaagaaagtttcatttttgaatgaagttctaaaacaactatttt

SEQ ID NO: 60130 - DNA, 699 bp, Cannabis sativa
ttctttgcaaatcttccactgcatatggttcaatgtttggctatatattacgtataaatatttaatttatacatatatatatttatgcaagtaactaattccagagatttgaggggtgacatatacatacatgtataaatattatatataattgtacaagtttctatgttgactatacttatctctttatacataacaccatgtattcgaacaccaacattatgtttattatgtactgttcgatctatttactgtatttccaccaaaacaggaagaaaaagaaaattacagtacagccatatatatgtatacatatatcacacgtaagaaaaattagtatttcttttatgtctgaactatatatgatacttatgacaaaattacaactaaagtatggaattaaattatttaaaacttaattatcaggaaactatattatatattcactttattttatatgttttaatttttatatttttaaaaaaatacctacttttataaatgatgtttctattatacccttagattaatgcaaattatgtgtcatttcaaaaaaaaaaaatgtaaattatgtgttagagttaagtagaaggtgaagaggtattggtcaacccactcataaaaataggtatattttaataaaatatattttgagggtatttttaattaatagatagtatttctcaacttatcccaata

SEQ ID NO: 60131 - DNA, 684 bp, Cannabis sativa
gaggtgatattttctcgccgatgatgatctctggttctggctttgcttcaaaatcattctctggactaaaaattttcacaaaatcgttctctgttcggatcaaactttgcttcaaatctcaccattaacaacaacaaaaaaagtaattaagaacatacagaaaagattttcggggaggacgagttgagtaatcatcatccattttgaaatcgggcacacaatgattcattctcgtataaactcttaataattttgtcaagataaccactcaaaatccttgctctacaacagcaaaaattcgcaccctaattaattatcaataaaaaataaaaaagaacaatcgtaatatatataaaaaatgaaatataattaccgaacgaacaaaaagcagtgagggtattgttatggcggtagtggacgccaagaaccacataaagtctgtaccggtaggtgaggtttcgaagaggacggaggagccgcctctttagccagagaaaattcgaagggatgaattgggtgaggttgaggtagtgaacagtaggcacctgattaggttttagggattttttttattttttggcgtcggttgctaactattttgcctcgtttttaaaagctcacttaacacaatactcgagtgttaataaccgatgcaaaataaaaagtaatttttaaaatttttgc

SEQ ID NO: 60132 - DNA, 6944 bp, Cannabis sativa
  modified_base (5327)..(5328): a, c, t, g, unknown or other
  modified_base (6911)..(6917): a, c, t, g, unknown or other
atctcaacgtgtttagtgcgttcatgatagactggattttcactaatgtgaatggctgccgtgttgtcacagaagagagaggcgggccggttgagggggactccaaaatccttgagaagggcaatgatccaagttacttcaaaggttgtgttggccatggcacgatattcggcttcagctgaagaccgagagacaacttgctgttttttttatttccaagagacaagagcttgtccaagaaaaacacaatagccggaaatgaagcgacgtgtgtcttgggaagctccccaatccacatctgcaaaaaaagacaattgaacatttgagggagataggcttgtttcagcaaatgctgaaatgttaggacttgtattagatggaaagaaaagtccttgaccaggggtacgtttcatttattgaagcacacgatgtgtggcttgaagatagggtacccgtggagatgtgagaaattgactgaggttgttgacggcataagaaatgtcaggccgtgttatcgttaagtaaatgagttttccaatgaggctcctataggtggtaggatcgggtaagaggtttcccttgtccttgctaagcttgagattaggttccatgggagttgaagcgggttttgctcctaggtaacccgtgtcatttaaaagttgcaaggtgaatggtctttgagatattgaaatacctttgtttgatctagctatttctagaccaaggaaaaactgaagtggtccaatgtctttgagagaaaacttcttatccaagaagaatttgaattgagtgattgcaaccttattatatattgctagcaaggttggagtttttttgatgaataaggaattgtcaaaaagagattgttgaaaaccttcagattttaaggtggtactcaattttttgtaccattgtctagaggcttgttttaggccgtagatactcttgttgagtttacaaacgctatttggaggggctttatagcctggtgggattttcatgtcgacttcttcatgaagatcaccatgaagaaatgtattgttgatgtcaacttgatggatatcccaattgtacatggcagcaagggcaaggaatattttaagagtattgaacttagctatgggagcataagtttggtcataacctattccttgtttttgattaaatcctttggcgacaagacgagccttaaagcgaatggcttctccttgttgattgtacttcactttataaacctatttacatccaatggctttgagtccatcgggtaatttggtgactatccaagtatgattttttttctaaagcctcagtttcatcatacatggcttggagccaatgagtgaactgtgaggcctcggaatatgaacaaggttcaatatgggaacaggctgcaaggacagcggcttggaattgcggactaattttagcataggagatgaacttttcgattggaaaagctgtggatgcagtgtgacaaatgtagtcctttaaatgtgatggtttattgatgattcgggcacttttggattgtttatgttggtcaggatcaggtgggataattgtgggatttcgaatgctcacatcgggtgtgagggaagaagtaggtgtggctgctggtttgaatgtattagcaatagcagcttgtaaaggtggagaatcaattgtgatatcaattggaagatcagagttgcactttgtagagttattggcaataataggagctgtagtaatgttggacgaaaggtctgaaatagtatcagcaaccatgccatctggtgtggttttgtgagcagctggtatggcaaaaggtgctgagttatcatgcgagggtgctgctggtgtggaggtactgccagaaacacgaattggtgtggatttttgttgggatataccagttgaatctggtgtagtttttgtgtttacccgagacaatggttgagatatatgtaggcatggttcctggaaaaaattattgatgtgggaatgagatgtgtgaccaattaaaggaaaaattgattcataaaatacaacatctctagattgatatatttgttttgtctcaatatcaagtagggtatatgctttcattccttgggggtaaccaatgaaaattgaagcacgacttctaggtgaaaatttgtgcctagtagatgggagagtagatgcataagctaggcatccaaaacaccttaggtggtcatattgaggtggtttgttatggagtttctcatatgaggtgcaaccttgaaatagagtagaaggagttcgattcattaagtaggttgcggtatgaatgagatatgaccaataaggaaggggtaagttggattgaaaacaaagagctctagctatattcaagatgtgttggtgttttcttttcacaacggagttttgttgtggtctttccacacaagaatggtaatgaaagatgcctttggtagcataaaaggaatgcatattgagttctttggcattgtcggatctaatagcttttatggattttgaatattgtgtgcaaactatgttatagaaggtgggaatgatagtttgcacatcggatttatttttaagcataaaagtccatgtaaagcgagatttgtcatcaacaatggtgaggaaatacttatatccttcaatgcttattacatttaaaggtcccaaaatatccatatggacaagatcaaatatatcattagcaaaattatatggtttgatatgaatggaaaccttttttattttgcaatgtgacatatatgacaatgctgattttttgaaccatgtgaactagaaagaaactttttattgattgtattggaaagatacattgagggatgaccaaggcgtttgtgccattggtctccgttattagaagagagtaaagaacaagtagaacttgcaataggtatgaaatcttagagaagaacatatagctttccaagtcttttagctgtcccaatcaccacactcggagaatgagcctgtaaggtacaaaaatcatggtgaaaatgaaccttgttggtcatatcactaagaaggaatgtgggaatggacaataaattgaggttaaaggttggaacaaataatacatcataaagaatgagatgtgagtttatttgaactgtaccaattcatttaacaggtatttgattgccattagggagggtcacatatggtggaaaatcattgttagaaaaagatagaaaacaagattttgtaaaacacatattgtgagttgctccactatcaattatccaagagtgagtatgaaaaaaggattttttaccagccatgttagaagcggcagcagcagtagtagggtccttacgggtctgtccttggcttaattgttggctaagaagagatatgagttgttggcattgagtggaaagatcaatgatgttgttgttgtgttcgggtgtgttgacagtagcattattggaagcactctttcctttttcagacttctttttatctccatatcccggagggaaaccatgaaggaaatagcacttgtcaacatagtgccccggtttgccacaatttgtgcaagaaggtcttggtttctttgaacggctgggatttgttgatgatgaagggcgagcagctgtagccatggaggacaattccgaggatgaggaaccaagggttctttgtctctcttcttgaacaatcatggcaaaaacccgagagagattgggaattggttcatagagaagaatttgagcccgaaccgaagagtaagactcattaagacccgtgagaaattgtaagacttgattttgattgtaataatcaaggaacaatttcattgcaccacaagaacaagtagtgttgggttgaaattccttaagctcatcccatatagacttgagctttgtgaaatatgtggtgacggattgatcacctttccgcaaacaggtgagttgtgtttgcagctgaaaaattctaggccattaccctcattgaatctttcttgaagatcatgccacatgtccatggcaagatcgaagtatataatgctttgtgcaatctcaagagacacataatttatcaaccaagacattatcatgttattacatctattccaataattgagcaagggattaccagaaaccggccgaggaagtgtgccatcgataaaagctgatttgttcttggctgtcaacgccatggttatgcctctcttccaagattggtagtttgcaccgttgagcacagtggatacaagaacgagccctgggtgatcggtcgtgctgaggaaaaaagggcttgaaacatcctcatgagctaggcgatcgatagaggggtcttcgaggagggcagcaggtggaggagcgagttgaacagaggatgacaaatctggatcgatggcgtcttcttcctggggaggatgggatctggaaggttgagctcgacgggaagccatggaggggttgatgattggtacggaagtggaatcgggattggatatcgatgtagtctgctctgctgtgggcggcggaagaccgtcttgcgagcgagtggagggccttgccattgaagcttgagcaaggttatcgtctgataccatatgaggaataagcaacctgaattggtttgcagaggaaaagagaagaagaactctgttttattgaatgttgaatatgtgtattacagatggaaaaatatagccgagttaaatacccaaaaacaagggtaaaatagtcaacttaactaatcaagaattagttacaaaataaccacttaacaaccttaactaatctcataatgctaatatggatggctccttcaaggatggtaagtttggtggagcctttgtggcaatggacttcgatggaatcaatttggctctgagttgggttgaggagaaccgatggaagaatgtgattgtgtttttcagactctcaggtcactctcaatgcgattgcagttggaaaaccacctgactggaagctctggtctctcttcactgctgtcatggatcgaaagacgaagttaggagacattgtttttacttatgttaatcgtgatgttattagtgttgttgacaatctgtctaaagaggcgagagtttctattcttggcgaactcaactttcaaggggagggatttcccctatgcatcccagttatcttttattggattaattgaactgagattcctttttttaaaaaaaaataataattacacggtaattaattaaagtaaggtgtaattaaactatcttaaattattttcatggctcccatatatttttaagggtaaatactattttaaatcttgtcttttgtaaaaattaccaattggaccctctattttgttanntgacaaaatgaaccctgtatttttcaaaatggtacacataggaccttgaactgattttttttcaaaataaaatttaataataattatctgatctaaatgtgttacgaaaaaactatttacattttctgtatctgttcgtgttaagaattgtcttcaagttgactatattaagaaaaaaaaaagttgtctaaaattaagctcagagtcctatttttaccattttagaaaaatatggtccattttgtcatttaacaaaacagagaatccaattaataatttttgcaaaaacacgaattctaaaatggtatttaccttggcctcattaaaaatctcgagagaatttcagtaaaagagtgtcaaaatgtcattgattaacaaaatcacccattacaatcgattcaagacaaggagggtagtctgttcattaaaccttatgactatcttccaccatgcaagcttcgctaaggaatggacaacccccactacaaaatattagtgataaccttttagtcaccaaacattttttatgacaaaatgtgacttttggttactagtcacaacaaaaagttacttgtgactaaacatagcatttagatacaaggtttcactaatttagttttagtcgcaagtattgtgactaaaaacatatttaattagtcacaacaaattgtaatttttgtgacaatttgttgtgactaatacctttagtcacagatcatttagtcacaacataaaaataataatttataattagtcacaattattttatttttagtcacaagttttattgtgactaaaaataaaaaatattgtagtagctgttaacaaagagagaaaaatgatagaatgacacctcaaaaaaatcattacaaacaatgatgatatttctaagataattactaaaagagtcattacaatgactagcaatattttaggctaacatcacaaaaatagcccatcttttacatcattccgagcttttacaatgacaattatgttaatgctcaagaaacagagaaatgaaaatgaaagaaggaagcatttgatttcattgaatttgaaaagtgatacactggttcgatatatacaaccaagcttagagcaaactaatagaaagttagttagaagaagaagacagttgtaacccaactaactttaactaacttcactaactaacaactaactaggtactcttaacagcccccctcaaactgagggtggtgaagcagaccacaccaagtttgtcacgaagaaaagagaaccttgagcttgatattggtttagttagtgaatctgcaagttgatgttctgctggaacatgttgaactaagttttttttgtgcatcactttgcctcgaacatagctactgaatatcaatctttatatgcttcgcgcgtgcatgtaagatgggattggcaaagagttgcatgacactgagattataacaccatatgactagagtggttgctaaagattcactacaaaaaatcttacttttagtcacaacaaaatttatatgactagctgaaagtaaaaaaattgtgactaattataaattattattcctatattgtgactaaannnnnnntggcaaaaagtattagtcacaaaaatt

SEQ ID NO: 60133 - DNA, 732 bp, Cannabis sativa
aaaataaatgcaaatttaaaataaataaaacttaattaactatatatgtttttctataaaaaaaaaaacacccactgtattagtgtatttaataaaatttcacttttttaaatataatttttatgaggcctaactgtaagacaacatcagagatagaatatatttcttaaaagataaatgataagaggtatgtcaaggtgttaagcactacaaaaggtgatatacagtgcaatttaatatcggatcttacacattttcatttgtatgggaaactgctaaccatttataacgtttcgtattagtatgatgttaagcaccttaaagtaacatctctaatagagggctataaaagtggtgtattactgcccataatttagctcattcaaaataatgaaggttcaataatagtgtaaaaggtgtgtcaagtttggcacatgccaaaaattaagtaaaattttgcacaaaatatagaatggattaaatttataccataattaatgttatattttttatttactcatttgtcactaattaataatttttgctaattaaaagttttttaatattttagtatttattcatttaaataattttttatatagtttcaataaaaaaattaataattatgttgattttgaagtttgaaggttaatttacagtttgtgcattgaagtataattataaaatttggactaaatataacattaagctattttttaagttaaatttgca

SEQ ID NO: 60134 - DNA, 2098 bp, Cannabis sativa
aattaattaatcatactttataacaaatctattagttactttatttaaaatatctaaataaattatattaaattttatatattgaaaaaaatataattaaattgtattaaatttaattattattattattatttaaattaatatataattaaataatagcaactctaatataactctaataaagtataaaattatgtatatgtaggataacaggtgctatgggattgttttattatgggctgagaaatacaacagctacttatgcaacaaatttcctcaatttagttcctattgtcacatttgttttatcaattttactcaagtaagattttgtttttacatatatgttaataattaatcacataatactatatgaattactaataataaattaattaagaatctgattttgtttagtgtagattagagaggttgaatctacatacaaaagaaggtaaagtgaaatgtattggggcattaatgtgtgtaagtggagctcttataactagtctttacaaaggaaaatcatactacattataagtcatcaccatactacaaatcactctcataccattcctcacacaactcataccaattggccacttggcactctcatgttggttggcagctgtttctcttgctctgcatggttccttatacaagtatgcaccttcactatttatagatatatttatgcttttacacctcactattaagattgaagcattcctaattgtttatgttaattacttgattctagttatacatatattttggagaatgttagtaaaattgtaatttttattaagtttcatcagtatggacttaattagtgtcttaaacagaacatatttgtagaattagttattcttaatcttcttttaacaaattaaaaaatttagtttggttacaaatataggacattaacgaaatttgtatttaaaattacaattttaatgtcgttaaaaaaattattaaatttatatatataagttacatatataaaattttaagtacttatgctgcaaatatactttggatatataagatgttatgtatttaactatatataatggtaaatattattttagactttgtattttgtaaaagttactgatttgactatttattttgttaaataacaaaatgaatcttgtattttctaaattggcacagatgtgattctgagctcaatttttaacaatattttagcatgagcgtacatatatagaaaatgtaactaattttatcataacacataatctaaatcagtttattttgataaatcagctcatgattctatttgtactattttaaaaaatacaaaatttattttatcatttagcaaaacaaaaaatctaattaatttgtaatttttacgaaagacagaaactaaaataatatttatcctatacataatgttgccttaataatattctcaatcattgaaataagatctgagatttataaattctttaatttttattatatacatatgttcatttggtacatacataatttcaacttaacaattgttttgtcattgtatacctattattcccatttgatccattattttgcacatatgcacatgcacttgtacatcttacagtcaagattgaacattttcctaacatttttgcctttttcttctgaagtctgaataagatatttacttactaattgactttatgtatgtttttatgtgttacaaagtacaggttaagttgaagagaatatttccatatagatattgggcaattcttttgacatgccttataggagctgtgcaatcagctataattggtttatgtatagatacaagtgtaggttcatggacattaggctggaatctacaactcattactataatttactcagtaagtttatttagatgaaaattgtagtacaactttaaaagagtgtttcaatagattttttataaatattttgatatttagaagagttgtttttttatatcatcctatatattagttatttgagattatttgtaaatttttagaaaattctaaatagtttataatgacgaaaataaagtttaaagtgtttattttcagtattgtaaattattcaaaa

SEQ ID NO: 60135 - DNA, 4188 bp, Cannabis sativa
tttgcatctttttacaagatatgttttacaaggattcaaatcccagaccacacatgcactcacacaaccaactacttagtccaatctcaagtggcatgtagtgttgccatttcattattgttatttttatttttgtggtttgtgctttcatctattatattcataacactgaattttacatgcacaaatttattttgggtttatttcatatatacacaaaaacaataaaaatacggttgtaagaaattttaaatatttttagtttttaagatttcatttatagtaaaagtgtaagattttaccaaaaatagtattttgggtagatttctcatttatttttgtatcacataaattttacaatattgttagagttttaagaaatatattaaacatttattttctgtattttcaatcccccaaggatttctcaaaatccatagaaggagaaaaatgagaatttgagtaggccaacgggcctttaaagctgatgtttgtatgcaaatgcaaatattaacttgcttgttatggaatgcaggtcagacatatgtttccctaaagaggcccatgaagggacatggaagagaaatgattcaactgggtcttcccattgcagacgctccttttgacgatgaaatccatgcaggaacctcaaaaggtaggacctcatttgatcctcagaatcgaatgcttttcttgagcaatagtaaaatttgttgggttttcctttgtttaaaacattgcagaacgaagaatagaagctttacctcccttgctgcaggatgttaccgagcgcttgcttagcatgcaagttacaactgtgaagccagattcttgcattgttgatttctttaatgaggttggttattgtgagattttttgttcgtttttgttgatgtctttttgagaagcatggagtattgtgctaagcaagtgtaattttgtggttggcgatcgtaaagggtgatcactcacagcctcacacatggccaccttggttcggaaggcctatttgcgttctattcttgacagaatgcgatatgactttcggaagagtaataacaatagagcatcctggggaatataaaggcgcacttcggctttcgcttagacctgggtaacgatttcatcctttctttctagagttatttatttgtagcattatcctcattctagagttatcataggccttaaaaccttaaaagagttttatgttggacaacttcttagtacagcgtagtaacagaaggtggttagggagaagcatgactgttctgggctaaataagaaaaattaattagagaaaaggtaggatacatcatggttcttaggattttattaaccagaagtcctgatagaaaggcttgacattgctttctcatgatctaaaattgtaacattacagagcagggttaggacagagtaggttggttccttgaaagtaacttaaagaaatgctaataatgatgaattgcataataggttgttgcccttttaaattcattcagtgatgttaaacattggtggaaccatgatctgtaattttataacagcgatagcattctttcatggtcgggcgggatttaattcttgcacacttctcgtgtttcttgttggttttgaaactcattactaattttggatgctgctataaacaatgacacaatatgtgttccctacaacaatgcagatccctcctttcggtgacaggaaagtctgcagagtttgtgaagtatgcaattccttctgttcgcaaacaacgcataattgttacattcaccaagtcacaaccgaagaaatccttgcccagtgatggtcatcagcgtatgccctcacccggtgtgactccatcttctcattggggtccaccaaccattagatctcctaatcacattcgccattctggtcctaagcactatgcaccagttccaaccacaggtgttttgccagcaccggctattcgtccccaaataccacctccaaacaatatgcagccgctgtttgtgactgcttcgattgcaccagccatgccttttcccgcacctgttcctcttcctcctggtacaagtggatggccagctgctccaccgaggcatcctccacctcgcttgcctgttcctggcactggagttttcctccctccatcgggctctggtaactcatcaacccctcctcaacaggcaccaagcaacgaaacaacaaaccatgctgctgacactgtttccccacccgaaaaagaaaatggaccagggaaaccgagccatggttcggccgcttccccaaaggaaacattcgacgggaaaactaagaaacatgaatgcaacggaagcgttgatgggactgaaagtgaaaagtcagggacaaaggaggacaacacagaaatgagcaattcaaatgcagtttagaaataagggcatacatatatatatatttatagagagagagagagagagaaagatagaaaaagaatgagaagaaacagagagagagagagaggattaattgttggaaggaaataggctgcaaagtgggaatgagtttgaagcaaatgtaaagagcggcaagattgaagacttttgacatgagatgatatgaagcagaggtttggggagacattttagagggaactctttttgagttgtcattgaaatctcctcctcctcctctgttcatcttttcattttttctttttttggtacttgtccaattatataaatgaactcttacacaataggtccaaagcacaaccttaatttaatttaatcttcccttcttcttcttcttcttcatcttatttttccaaagattttttgattgatgtgatggtctctaaattaatccttattcattcatctcccacataaatttcatcattcactttctctctttgttcataaagaatgtatgtttattttgattcataaacaagaacatgttggacatcattacaaggatcaccttgctaacaagaacatgaaaagactaatgaaacatgtcataaagtattgcctattttgatcctctggaagttgaaatagaactcaaaattattttgtcaagcttttattagaattgctcaaaagatgatttcttttcgtcttcttttgtatgtgtattgatatgtaatactatattcaagagaaaggatcccatacgacccactgaacaaggtaaaacagagataaaatatttgtttaaataaaatttgtatggtgatccactaatttatttacttgaaaagtaataggcacattaaaattagagacttaaattacatataatgatatatagtcacacaatttaaatgataacatatcataacatttttttatttgaatataaaatgcagttttttattttatttcttattttattttataaaatgtagtttttttttgttaactctttgtgttatttttataataaagtaattatcatattttttcatcgcccaactagattagtaggaactgatattggcctagtgcaagatgcaaatgttgtctcctattaatttttgggtgtctcatcgataatttaaaattattttagtgagaacatcttggtttttttggcttggtggtcagaattagggaatctccaaatctatattgaccttttgttatgtgttctaatatgattaagtatcataacatggttaatcgtgttatttctcttgtcccaatttttattagagaatgattggctgataatctttaataggtagattctatgaaatgtttatttagtttggaagcataatatacttctcacttctttaattgttaaaattttcttctatatttttgtaaattgcttgatatgcctattttttttcttcatgattttgcactttgagctaaatttttatataatgaattttgtctcatttaccttttaatgaatattttttaaacaaaagttcatattttgtttttgcccattttataatgttattgctaatgatgttttaatgaaacttttactatttttgaccatgggttttcttttcacaaatgttattttagggtttgagacttttaattatatttctgtttttcagacttattccatagacaaattatagtgcaaatattatattttgtaaaaattattaatcaagactttttatttcgttaaatgataaaataaatttgaaatttttacatgaaaaatcctttttacacactt

SEQ ID NO: 60136 - DNA, 863 bp, Cannabis sativa
cagcctgtacacaagatgcaaatagacacattttccctctagcattctctattgtggattcaaaaaataacaactcatgggaatagtttttttacaaaattgagggaagcatatggggtaagagaagaacagtgtttgatctcagatataaatgagagcataattaaggctgctggtcatgtatttctagacataactcacgggattgtgtgtaccacgtattgagcaacctttaagacgaatgctagcaaactcaataaaccattctttgcattagaggaaatttgaataccatatgagagagcttgacagcttagacaagcgtgttagaccctttttacaacaagttggataccacaaatggttaaggtatcacagaaaacataacaggtatacaactatgacttctaacatagctgaatctctaaactcaacaaacttagcaactagagaactaccaatcattgcactagtggagtcattgagagctttgacataacaatatacatacataaatacgaaaaaagcacagaagacaacaataattttgacacctactgcttagaagaagttaatcaacaattttgtggactcaatgacagaaattgtaagaattcattaaacgataagttgcataacagttgcgttgtagtttctttttaattttgttaacattaagtacacattactaaatatgtaggtgaaaccaataaacgatagcatgtttgaagtggtacaataaataaagtcatagatggtcaatctaaaagaaaaaatatgcagttgcaataaattctaacaagacgaactaccatgtgctcatgcttttgctgtgatgaaagagatgaacttaaatatttaca

SEQ ID NO: 60137 - DNA, 948 bp, Cannabis sativa
  modified_base (900)..(915): a, c, t, g, unknown or other
tagagtcttttggagggattttagtatattttggtggaaaatagtagaagtcggtgagcttgattttacaaggcggaacttaattacaaatttcgatgaccttagaggtataactgtacttggagctcagcatgaaagtcttagatcttgttcttatctttctggaacatcttgaatcgtctaattccgagtaatatcgtgagagttatggccaaaatactatcagtcatcgcagtaagaaatttctgaaaaaaaaagatagtttttcaagtagagttgcaatttttttatttttttttttaaagatgagttatcttttctgttagtgagatatttcataatactatacatagagtcctaagtctaaggagattcatatatcttttcaagtactataaatagaatcctaattctaaggggattcatctatcttttcaagtactataaataagacctcttaggctacgaatttatgaattctaaagcgaaaaatgagagagagagcaaggaagcaatggagatcggcttcgaaatgttcttcattctagttcttttcttctccttctactcttattaaatattatgattttcattataatgtctaattcagagtagttttcttttagttaagggttatttgaaaacccgaaacatgaattcttaattcattattgaatgttaatttataatttccaccatatgaaattgcttctattttttctatgtcaatggtatgattattgttttaatcatgtttagatggtgactaaattatgttttactttaacctaccgccatcttaggattactattcacctaatagttttggattctaaatgtttgtgacaagttacaattttatttgtgatgaagaatagaacttaggttaaatgaattatnnnnnnnnnnnnnnnnttgactagattagtctatctccataaaactcaa

SEQ ID NO: 60138 - DNA, 811 bp, Cannabis sativa
gtatcactttcaactaacatagaaaaaaactagcataaaatttaatatacgtgccttgcacgtagctttttgctagtataattatatatttatatatatcaggtaaacatatatagttatatttatttttagttttattaaaaaaaaattaccatgacgaagagaaagcaatcaaacaattcaaattttgatatgaagactaatagaaaggataacattgagaaaaaggaagttaatgaagaagctgacatgatcatcaagaatcgtcgtcaaattatttgtattaatcatctaaaaaagaacaagatgaaaaaggataattcctactttagggcttttactggaattggttatcgtcttgatggaaattcaataattaatactccagtaatctttactacgaaaagtagtagtgtaaaatcaagtcatgatgagtctcgattcaagagctgttgagaataaaccagaaaaaagtttggcccgttcgaaattacatcacaagcatcatctaatctagattcgctaccgcctgagctacaagagtttccctgtaccgacaccggacgatcgccggcgccaccggcgccaccgacaaaccttttcctagacggattcgatgtttcatcatcgtcgccgtcatcgttttccgacgacgaacactttctcttcaaagtcgagttccagcgttgttcgtacgaccttcgagaagtctagcaatggtggcccacttgttaccgtgttttgaatgggcgtcgattatgatctgatcctccatagcggtaaacggacggtgtttaacctcaggagagag

SEQ ID NO: 60139 - DNA, 635 bp, Cannabis sativa
gagaacttaaaaagaacctgcatcgaaatagtttaaaacaataagtacattttatatatttacacctcttcaatcataaccaaagggaaatccctttagttggactctttacttccaaaaaaactcccttcacttttaccaagattataaagcagaaaataagaggagaaagaggggttatacatacataccaacaaagtacatacatattttaactatatgtacagaagctacctgagatgggttattatcctgtttgatggcgcaatacaaaaatttttttttggggggttaaaaatcgattctacaccctttgattgtagtccaagaagctaagatgagactgcgcattattgtgattctggttattgttggatgactgaggcatatgaagttgttgttgttgttgttgatgctattgctgctgagtttggtggctaccaaagtgatgcatgtcaggctggtgggaggagaattgaggagtgagtcctcggttgaacatattgtcgttgacagttatattttagagctgtaatcgcatatggattctaagggattagaaattcttatttaaaaattagatttggtttagcttgtgttccgtgttatggttataggattaaaatttaaaagta

SEQ ID NO: 60140 - DNA, 1003 bp, Cannabis sativa
atataaatatttatgtactttttattatttaatacacaaattatatttttactgtcaattatttcttctcatttattattttatttcacttctcctaaatctcatgtgcgaagcacagagattatactagtatacatataaatacattttatatctaatttttgtaacaccttttctctctcttacaaaaaaaaaatcaagagcactcatcttatattttttattttttacatgatcaataaaagtagtatatttttttttgaatatcttgttgtttattcagagttaattaatgaataatttgtatactttaacaagattgatgtctttttatttttctgttgatttatagttaatttacagttatttttatgttgttatttaggtgttctattgatagtttatagttatttttatgtgttttccattttgtatagttgttgtttagtttatgtgtatttttgtggtgtatattttcaatttattccagagaatatttttgttgtatatatatgtgcatttgttttgttatttttatgttgttttttagttgtttttcaatttatagttattttttaactataactaacttaaaaagaaaaggaaaaaaaagttaaaagaataaagttgtaataaaaaaatgtatgaaataaaataatataatagtacaaatatataaatcaagttgtcaaaattaagtaaaaagaaatcgtaatacaaaaacatattgaggagttgatattatttttcttattgcagttaggtcaataatttgtaatttttctgttgctttgtaattatatttttgttattttaagtttttttcatgttgtttgttaagttgttttagggttattttttatttatttttctattttactaaaacacagtatttttataattttaaaactttaagcacagtatttttataaaattgatacactaacaatgtaaaaaactttggattacataatttttataaactttctcccataagtttccc

SEQ ID NO: 60141 - DNA, 626 bp, Cannabis sativa
  modified_base (236)..(236): a, c, t, g, unknown or other
aacttaatctaaaattaatactaaaaataacctaacactatgtcgtgcggttgacttactatctagatagatgtggatcgaaagctcacaaagaatatggttatcatgccatgacaagaaacatgaaggtctatctcaaaccttgaccttccacccttgagccccttttctgtgcgtctttctccttttctccttcttggatgtgcacgatagtggtggtgctccggtcaccgcangccaaaatggaggccacgaatcgtggtggtgctctggttgaactctcgtggttggctggattgatgaaaaagatgaacaagaaaaaaaaaatgaaaaatagaaatatatatataataaaataaaataaaataaatttatgattttaaaatatattttgtagatttttatattattttaattttttttattaaaattattatttggaccaattaaaaattgacacgtggcactttatttgggtttaacggatcagttaaaaaggaccaatggacttacaaaaaatatcactttggggactattactgccaatttttgatgttggggactaatttacatcaaccctaagtttttggaaacttttgctgcagttattttatatatatatatat

SEQ ID NO: 60142 - DNA, 1711 bp, Cannabis sativa
tggatgctactaattgaaataataacattaaatcacaccatataaagctgaatgtaaatcagagaagatcaagatttacaagcttcccttgcatcgaacacacatttcgaccaggtggtgcttaggttccctaaactagggtaaataactccaataagaatcattgtcaagatacaaactccaattagtaaatcaaatgtatgtaaaacaatacagtgaaaattcttacaaaattttaccctaagatcttgattaaccaaccaagattcaaatctaagtctccttagattcaaagacaagctccccttacttcgattgagttgaaatcccttcagttatgaatctgaactcttttcagatgaaatacctccattatcatttcatcacaaaagcttaagctcttcaacaatatatgaacctgcaagaaacaaagaagaagaataaaaatatttttaccctagagagaaaaatctttataaaagaatcaaatgagtgagagttggttaggcactttaagaatcaagtatctataacctcaactctcaccaaaccaactttgacagctcacatgtcagctcgtgacagctagccaagatatttatcacttaatagctgacctgtcaaagcttaaaatgtaaacccaaaaaatgcttacttagatggaactactaggtgatcagaaggtacaaacacataaatttccatactaaacaatatggttcttacatttatacgatactatgctgaattcagagcagaatatcccattgtcattcataagaaacttaatctgatctattcaataaaaataaacatcccttgttttctatccatatatacataacttatcaattgtgccttcaacagggttttaaactaaaaaggcaaagtctgtggaagtcctctttatgttggcaagttatctcaggcatcaaacacccttttactagccattttatggctaatcaacaaacccctggtatgcaaatagctcagttgagttgcgatgctctgcagctgtaagtagtaactatttcatgttgaaaacaataacattttcttcaattttattttgttgctttttatcttcgtttgatttggtcctcaaatttttagagcgcaactagacacttgaattcagatcgaaagaatgtagaagttgaatcgactgaggttgctagaaagccaagctcccaacaaatagtcaaaaaatattttcgaatagaggtaggtacatcattttcatcccttaatattgatgattagtcttaaaaaattctcattatgatattgaacaatgcctttttcatatgcagatcatggataagcatccagaaaatgttgatgaggaggatccagacttttaagcacttgaaaatggatttgtgggttaaaacatgttttgttagataaataaataagttttttgtgacactccaaagttttagtgacccacattatgaaaattgtagtgacccgcaatttttgtgggtgtcactaaattatgtccctaaatatataaattgtagtagtggcattactaaagtaaagtaaatacatcaataagaatagtgcttattttcatcatgattcctgcaattgaagtaaacaacatatttaaactaattttaattcataattaatccaattaaaagtaaatttaattactaatcaatcacataagtcataatcattgtgtaaataaacttac

SEQ ID NO: 60143 - DNA, 822 bp, Cannabis sativa
taggcaccaagttggcatcgggaatgtcatattgacatcctcaacttccagctccgtgactcaaaatctttttgacttgttaactcagattattgaagaatggggacttagaaacaacttggcgggatttgaatacctagtcaagagttccccatgtcaacctgggcactggactagggacccatcgcgaggttgactgactaggaatacataactccgtgaatatttttcttcttgccacgtgttaaaaatgatgtccatgtcagtggggccaattttttgataaatatgtatatctattaataaaaaattccccttctataaatacaatttgcagttttttaatcaaagaaaaacatcattaatcaacacacaactatacaaccaaaacagagcctgattaaaaccggctccaacacactcaaagctgactcatatacaatctagccagtctatctctctttgtattctccccttattcacaagtactaatcgcaccttgatacttccttcaatcattttttctatacaatctattaataaacacttttgttaaaaaatacaaagattcttattcagccagagactatatactactctagctaaagccgcaaacttaactttgttgtatgtttcttgtagaaaatagtaataaaaggtcatattgttattttttttttactaggggtgtgcataaatcgatccaatataatgataactaaccgatctaattataatcgacagccaaacattgaatatccaattatgatcggattggatttatttttgaatattcaattggatcggattggatgttggatg

SEQ ID NO: 60144 - DNA, 1736 bp, Cannabis sativa
atggtcagtaagctcacctaaagatattcttgttatggcctttgagtagtgaagttacttgactctggctttacttgatggctattaactacatttggcatcgtccatttagttttgacttttttttttttaaataattgtcttctaattattgtcatcaggattttatggtttgattacggcgacaaaaatgctagcattgtgaattgatgaggatgaaacctctgtattttgattatgctagtgaacaattagagattcaagagtatgatcattagtttttgttatattgtattttgttgcttttaattttattaaatatttttacacgaatattgtatattactatttattttggaattttatttattatgaaaaaactcatcctaacattgataacactatcaagcatgtgaatttgtacttcaacatattggtgattggagatttgaccaaaaacaagttttaagtagagtgatatccaagttataattttatttaacattacacagacaagataataatgaaagctctttttgaaagtatgtctttttgttcttgccttttgtttttgtgattgctctttagggcactgtctaagaaacatgatttggtgagacagttaatatgtgatctcttgttttttttttttgctttgattgcttacataggttttttttttttttcaattttagctaccatgtggttgtatgagtttgtattggtggccaattagccagtcacatacgtaacagcttaacagttgttttttttttatgtgaatggtcagtaagctcacctaaagaaatgcttgttggtggtcttttagtagtgaaggtacttgactctggctttacttgatgactactaactacattcttcgttattcattttattttggatttcttctcttagaataatttttatctaattattgtcattatttatactgttgttgtttgattaaggttgtagaaatgccagcatattcaggaccataaaatctctgccttgaattaataacaaattaagcatgtgaaattgtacttaatcatgttggtgttggtcataaaatagttgataaaaattatacattaattcaagtgatatataaaaatatgcttgttttaatactaactttttagataaaaactttgtatgagaagtaatatatgttgaatatgtgccttattcattctttttgttgttcttctgtgacacatgctttgggaagaccgttaatgtgatctcttgtttctttttgttatgattgccttggtgattttttgtggctactatgtggttatatgaaattttatgtacttattagtaggcataaaggttggtggccaattagccagtctcatacatatcagcataacagctgttttttatgtgaatggtcagtaagctcacctaaagaaatgcttgtcggtggcctttttgtagtaaacctaatcaactctggctttactgaatggctactaactacattccttatcattcactttattttggatttgttgttttagaataattgttatctcgtcaggtgtatttgtttttcattagggtgatagaaagtaacatattgaggatcataaaatttctgtctaacaatgataatattttaagtatgtgaagttgtacttaatcacactggttatcagaagttgattaaaatcatgttttaattcaagcgatatcacaaaatcatgtttgctttaatacttctt

SEQ ID NO: 60145 - DNA, 1194 bp, Cannabis sativa
aaaatttgagtcgattgaatagttttttgccgtgttagctcatatttttagtgattagtagttaatgaacttagcatctgtatgtgtaaaatctagttaaagcagaagcgtgggtttttatagttaactaaagtctttgatgagcaggccctttccaactagagttatgtgttgtatgatttgtcccaaataagctattgccacatcaccatattattttatccatgtcattggttagttaagttagttatctaacttgacacctaagcaataccaacctactcgattcaaccaatgcctataaaaagaaagcaccaaggcttcaaccaattgctcatccttagagatgacttctaccatgtgaggtttgatttgtaatgtgttctacacttagactcaattgaatacatggatcggattgtaaaggtgcttgacaattgaataaaattttctatttgaatcaaagctaagtctatttatctttcattgttcaattctggtatttttctggtttgaagtttatgtcttgattacttgttctatttttctgctgttcttgttgctttggcactggtttggccaagaatcaagggtgttcttcacaacaaatggtatcagagcaaggttgattttgaagatcaagaactgcattcaagtgttcaagattcatcttcaaactttcaagaaccaaattcaagtcatcaagaatcaaattcaagcttcaagaacccaatctgaaatgacttctacaaggttcgaggtggacaaatttactagctccaatgatttcagcttatggaggattaaaatgagagctttcctagtgcatcaagggatctatgaggctctggatcctgatgcaatggacttgattgatgacaaaagaaagaagctggaaattgaaacaaaagcacacagtgctatcttgctagtcttggagatgaggttctgagggaagttgctgacgaagaaaaggctctaggcctctggaacttgttggcatcaatttacatgaagaaatctttggccaaaaaactctaccacaagaagaaactgtatacattgagaatggatgaaactaaataactaatgaagcacctagatgactacaacaagatcattttggatctaaacaacctgggagtgaaaattgaggatgaagatcaggctataatcctgttaagctcactcccc

SEQ ID NO: 60146 - DNA, 1072 bp, Cannabis sativa
gagaaaaaatttgactaaaatttttttttagatactaaaatggatagagatataccggtgcatcccttttaaggagtacattatagaatttttctataatttatacatatcataaataattaaaattattttgattatcatccataatcatatcatatgcttaaattatgaagatctaatgacgataataaactaatgatcattgtagattacaagtgtaaatatattttcttctcgattcttagtttcatctttatttattttttaatttgttgggagacttaagaagtatgagactatgatactatacttaggttattttttttttcaaactttgagacatgtttatttttttatcttttattggactatgctttttttttttttttttaactatgaggcagatttattttttattttctatagattatgaaggtataataaatatttgcaaaaatattggtttaatttaaataaatttttttttcaattattttaaattattaattttttccgtttttcctttaatggatacccgatggattctccataatcgataagtattctcttatcccgcgttcgctgattattagacggggatagagtgaaaatggaggcataaatagctggcagggatgggggcggggattgcatcccattacattaattgcccaatttccatctctacttaaatttaacagttttaatagttcatgaatgatttttaacggccttaaaagtttaggaggaatgatttggtacatgttaaaattatccatatatatactattttttttttaaatttacagtttaggtcgttccgatagttgctcagtagtttcaatataaaagcagccaataatatatattttcaagaaattttaaacaaaccgtgtatgtattttgtagcatcatatattttcaagaatgtgaaagtattgagccatatataagtaacatggggttccaactcaaaaccaattagcaatgagtggagtagcccatatgtcttatatatggctcaatactttcacatttaatccatgtgggacaatattctccaatatccccc

SEQ ID NO: 60147 - DNA, 678 bp, Cannabis sativa
catacattttttaggttttaagagctgttgggataaaactcacttaacctatcaagtcagtagctctatctattttctcatcacatgaatcttaagaaagttgttataacatattagctttaataccaacttaaaggggactccaccaacaactgtaaataggtgttcctctattctcaaagagaaattctgagctgtgatctctaatctcttaggctcatacttcagttttagattcgagtttagagagagagagtccaagatcatagtgagtgtgtgtatggagggatgtaattggagtatcactcttgtagtgatttccctcaatgtgagatatttctttgtaattattcaccgtgttaagatttattcttggacatattaaattttgtactactgactattcaagctattaagattcatgattcattcattctcgagttaagtttttattgtctaatttcaattaagttatagttttgatttcgtgattagttttagttttgtttgtacattcttgaatattgttattgctgtaacaacctattttgagggtgagcattcaccacaaattgtatcagagctcacacttttgagttcaagaatcacattcaaccaaacaagactcatcttcaacatttcaagaatcaaactcgaactttcaagaattagattcaa

SEQ ID NO: 60148 - DNA, 971 bp, Cannabis sativa
taaacaattattatcaaagtccaattagagatcactttttaacattttttttacatattatgtgtggtgaattaatcaccctccaaaaacataacaaacactaagaattagagaataataaagaaaatactaaaatgacaatgctatgaaattcaatcacaagcagtgagcttggattaatttcctccttgggtaaaactaccttcaaattttgcctttattaattgatgatgatgctcagagttagtacatcacagggacatagttcttcatcagtaacggattcttactcctctaaaaatgactctctcccagggcctgaattatacaaattttagaaccctttacatcaattttctctcaactcaacaacttactattgagtaacaaaatagtatttatatagaccagtacaatgagaactcgagccactaacacgacagaaattaactaactattccctaactaacttaacagtctaacttgtacaagtgtataaaccccacaaattccacctgatttatatacttgaacaagtataaactctgagcaagaaataattgggcaaaatagttccattagcagggttttcctccatgagtagaggatcagcaatcttcttattcagcagctttagacatagcctaaacttctcagtagtaacacacttattaaacatatcaattggattttcatgtgtgttaatcttcttcactttatcgttattgctagcaagaatgtctttgacaaagtgtaacttgatatcaatacgtttggacctttcatgatgaaattctgtattttaatattatgcgagtttattatttaattaaatgcggaataataaaaccggtactaaaataatttttttctgtaggtacagaagataactctgtaactccaaaataaaccagaaaaataaatggtgtagaaaagtaaaaacacacaagatttttgtacgtggtttcaac

SEQ ID NO: 60149 - DNA, 653 bp, Cannabis sativa
ggtccatagtatatttgtaatttttttttcctttttttgtatttttctgtttttttcccttaaattaatgagattatgttcaaaatgtattcttttgcaccttatccgaatacttgagtttaaattatggttgatttctggttaattctgcaagtatgaaataatgcgtattgtattggcatttaatgagatattagggagatagggggagaattttacatttgtaaaatagattaatgttttttttataattgttgtgacattattttaatttgtttgtcgtaaacctatgaatgtagagtgaaagttggaagatcaaataaagaggaatgtgagttgcatgagaaaataataataaaaaaagtgcaataaatgtggcaaaaaggacataagaacactagctaaaattgaacccaaggcgttgaaaatagcaatgcaacaacaaaaacctattgagaaaacaatattttttctttcaattctttagtgctaaacaatttgacaaatagtgacggtgataagttagttgataattagttaattggacaatattaatattactaaaacacattcaataaatattaatgattaatgatgaatataacaacttatatgcaacaataaaacaaccaaaaataaataagtaaataatt

SEQ ID NO: 60150 - DNA, 2329 bp, Cannabis sativa
  modified_base (1619)..(1619): a, c, t, g, unknown or other
atagcttaaaggtctaagctagccttagtggcttgaactaaagattgaactttcttatatatagtattttattacatgaattttggatttttatgttatgttttgatttttatattattatttagatagacctattacttattaggttaaatatatactttgaaaaaataaaagtaaaaaaattaataaaaaatataaaattatttaacaaaaaagtaattaattataaattctgctcaaatcgtgatttcgaaccaaattaatccatttttaatggtttggtttggtttaatttagtttgaaaaaattattactctaatttaatttttaatattcaaaaaatcattatactattaattcaaaaaaaaatatataaaaaattagaccaaaacatcataaacaccttaattacaatgcaatattgtttactatttattcaaaataattagggcacatgtaataaattacattcatattttctatatttggagggtgtcatgtcatctaattatgggttatgtttatggaaaattttgaccaatcaatgatgttgtgattgctgtcattttctaaaacttttagtggttttattttgttttgaaccatttttttaaagctttattttgtgtatgtgactgagtcattcaaataaaattgtgcgttttttttattattaccgaaaataatttgcggtataaatatttaaattttaactctagttgcaaataaatatttaagtttaatttttggcggtaataatacttaatttatatttttaaaacttctgtaggtaagcattaagtaaattgtcatgtgacaatccctgattggtccacattattaaatttttatcttttttaaaaaaaataatttaaatataataataaaaaataacacgtggataataatttgacatttaaaggtcaaatacctataaagttcaaaaaaaatataactaggtattattactgtcaaaaattaaatttaaatatttatttacaactgagagttaaacttaactatttatgccacaaattactctatcatgtattaagagcattgaaaatcgtttttatttgcataaatttaaatggttttatggtggtttttttttttttttttttgaaatcaggttttatgattgtttaaaaataaaaaataaaaatcttaaaaaaaaaataataataataaaatggcacttacgggattatataataggaatgtaaaaaagtgagatgttatgaaatattatttatgtatgtccaaatcatcaaattaattatcaccattaatatttggttgtatttttctttagatgagtgctaattacaacctatttgtcaacctacacgtccgaaatcacatgccgaaatattttttttcaattttttttcatagcggtattcgttatagttacagtatcatccatgtaaatttttgaaaaatttcgaatagtttacaataccgaaaataaagtacttgataatccagtttaccacgcgtgttcaaaaaactttaaacgtcttttcgacactgtaaaatattaaaaaaaatcaaaaatttacaggaatgatgttgtaagcataacgaacacccccgtgaaaaaaaaaattgaaaanaaatattccgacatatattttcgggcgtagaggttgactaagaggttgtaacaggaggttgacggaagtactcctcttttctttattgcattgatttagtttctcattcttttagtcatatttttgtataaatataagttcactcttttggaataaacaactgaaaaattctcattcaatttctctttttctattcatcttcttcttcttttccaattcttatctataatatattattctatattattttataacacgttatcagcataagtttctgcccaagccctaaggtaaatattttgttaaagttcttgaattatttcaaaattacgatacactaaatatatatttatatatctactcatttgactgaaacaattgaaaaaattcttttttctttttctttttaatttatatatttatgtattatatatgtatgtatatgttgttattcttatatatttattattgatttcatatatatatatattatgttcttattatttataatatttacaatatatttgtgcttatgatatgatagaaaaatctatataaattatatatatattcaaaagattatgtattcatgattagggatggcaattatactcacgggtacccgcacctaataggatgggtattgggaatattttaccaggatctacatttactaacaagtatgttgaattgacatcctaaatatgaat

SEQ ID NO: 60151 - DNA, 1636 bp, Cannabis sativa
tgaatgtaacgtaaactaatcaaaccaactgacgtacactcctaaccaaaagcaattagaaacaattggttgtttacatcgtatgccacaataactcgccatgcttcatcttcaaaaatgtgtcatagatactaacaacatgatgacagaaattaaaccccctcatgcatgcaccaagtgataaaaaaataatacttgaactgttcatcctctatatacaagtcaataataatacttggaatcttctattacaatgtacaagtattctggtagctttatataggaaaacaccgacatactcctaacatacgtaagtgccttctccctacacctccacgccttcacataactcatttggataccattggcatcaaacatactcctctgtgtgtctttagtcttgtacttagttccatcttgagtctggatacgttctgaagcttgcttgagaaattaaaattttggaaacactatagacaatgtatcaaaaaaccatcaacatatcatcgacaattaatgcaaaaatttcttgtgtgttgtgtgtgctttattaatttgaggtaaatacatatataatttctttttaactttttataaatactttaaatattctagttaagaacaaaattcttttgaacaacatttgaccctttccaaaatacaaataaacttacaaaaatttggctaaaacatgggtacaccaattatgggaaaaatccaaacaaagtaatactaaattacaattattaggtgattgtgacattaataataaataattggtaatttttatggtaaactacttaaaaattatttatagtataaatacttaaatttaatttttagttgtaaataaatacttaaatttaatttttagcagtaataatacctaagttatattttcagaactttgtaagtacatggttgttaaatgttaagtaaattaacacgtgacaatccctgattggtccaggttatgaaattttattttttaaaaaaattaatttaaatataccaataaaaaaatgacacgtggataatgacttgacatttaacagtcagatacctacagagttctagaaatataatttaggtattattatcgccaaaaattatagttaagtatttatttgaaactaagaggtaaacttaagtatttatgtcacaaattactcctctttaaaataatcattttggtacatttttatttatttcatcattcagaattttttttttattatttcttttcctatgatcatgtatattgtactatatttagagttatttgtaaaaaaaaatttaaaaaaatctaaatagtttacattataaaattaaatattttattatatgcgtaattattttttcttatatcaatagtaagtaattatttaaattttttattttgtcaaaggtaaattatttaaaatattctaaaaatttataaatagtcctaaaaaaataaagataaagaaaaataaactacatatttttttctaaatgtgaaaatgattcataagaatgtaccgaaactatttttaggacttgtttggtatattgtattaagtcgtattgcattgtattatattgtattatattaaattggattatatattatatttttatataatattatcttaaa

SEQ ID NO: 60152 - DNA, 576 bp, Cannabis sativa
tatatgctaagtattttcacagtcgatatgcgtcgcttttatcttcccagatgtaacgaggttgatgcctctctttgtgcatccaatgacgtatggtttctcgttaatacactaagcaacagtttgtatatcttttcctcgcataagactttgtggtcagcgaattgtaagtatactctgctacttacgcaattaatgagttattccattaaaattgatcacatcgatccatattccctttatcagggcacgtgtcctccactgatatggtagccgaattttgggtataacaatatatatataaaggagaagtatgagacggtgacatgacaccctcaaatcactccaaatatttctatttaatctctccttaattttctcattttcttaatttttctttgatcaaaaaatatttaattattcatttatgctaaaaaaatctttctccacttatttatacgcattaaaaaaatatacacggtaaattctttaaaaataaatcttataaaaacattaacatataaaaacgtatgaaatataattatatataattttactattttttttaatttttat

SEQ ID NO: 60153 - DNA, 4278 bp, Cannabis sativa
aagttttattcatcaaaataaagcatccaaccaatgacttataaaaaagtatttgatattactataataagaaatataagtaatgagttgaaactatatcataactaataatactacaagtacaagtttaaggtttggctaatagcgtgtattgttattgtcaaacatttctaattatacaatacattacattatatcaacacatacatatacttcccctaacaaatctttaataataataatataagttgatatatctttaatattgttaattagtttgaaaaacagtttcccgccaaccaaaaattaaccagaattagagttaacaaccaagaaatgaatggatccaactggagaacccttccatttcccaattcccattccgaaaaggaaaaggattttctcaacaatctcttccaacctcaccacctccgtccatggcgccttcagtcaacgtcacagtagattcgccattgccaccactctccaaacctccaggaagccgcgggacccacttctcaccgccatcatcatcatcgcgccgccacgttctcttctccgatcaaacctcgagcggtaccgatctttattccacaacagcaacaaacaaacgcaccagcagaaaatgccgctcctgttggcttggttgcttagcctggtcagctatggtgaccttcgccttcgtactcgtcctcctcctgttcacaatcatagccgcctcatttctcaactccttgattccagagatctcgcttcacagcatcaaattcgaaaacatgagagctattcacccgagttctcccaggcgaaaaccctcaatcgcagcagatatggtgtacgtgatgagattcgctaataataatgagaaaacgacagtgagtttcagttcgttgacggttgtggctctgtggaaggggagcaaattgggggaagctgtgatcggtgcttttactgagaaacctaaatcgaggaaggaattgagtctgcgaacgagagttgagaatggagagaaggacgatgcttattctttcgatgcaggtttgatgactgatgagaattctgtgattgatttgttgtttgaaggagtttttggtttcaaaaatggtcagtttgaattgaaaggggttcctatgatcgtttcttgtagtctcaaacattctgatgctatggcccatagatcttctctttgttctgttcgctactgctttcatcgaaaaatcgttgacaattaataattaattaattaatcacacctaattaattattactatactactatatatataacataaatgcaccatatatatatatatatatattgataagtccagtctcctccttcttctttcttaatttgttttctttgttaatttctgtgatgatcatgtcatggaaactaagaagaatttgtttgacctacctttctttgttctatctcaaacttaattaatattcgaaagtaattgattatgaagacaccatatatcatcactttttgtttttggttttatgaattagtagtacagtattgaaatgtatagatgtaattatttattgagtaattctattatatattgaaactgaggaaataaatttattcaaactcaaccaccaaagagattacatgtttttcagagattaatcacttcaagctctctttttcttagtcttaacaacattctggatcaactcatttacatgactaaaagtaagttgtagctgcaacaatagcgacagtaaggaactaaatcaagccagatcgaggttcggcaaaccaaacattccaagaactgaaatccagaggccaatcaaagggaccaaaccagccaaggacagcttgaaccacctctgactctgagagaagaatatacatcaaaaagagatgatggtggctcttctcaataacccaacaaactgggcaaagatcagagtgtcaataggcaaattgcttttaggcttgtccctaattgtgagaatatgttcattgatagcttgccataagataaatgtatgctttgggacacttaaacgacactaaacagctttctgataatctaacagggttgtgagaggaattttgacgatattgaatttatgcgagtactcacttattagattagcgtactccacttctgaagagatttcttgtgttgtttttagaggtggcaaaacgtgtcgtgttcgtgtcatatttaaaatatgactcgcttttatatttcgtgtcaggtgtgtcgatccgttgtttgactcgtgtctaattttctcaactctaacccgatcggtaaaaacccttattgtgttcgtgtcgacccatagtgacccattttgctattattgaaactgaagttgtagaaaaaaaatgataaatttaggttcaattagaaaatttatatagataaaatttatgtgtatatcatttgttatatataataaaaattaaaaattttaaaatatttttaatttcatgttaaaaaaagttaagttttaaattttttaattttacattgaatcactaaattaatatttttatttaaattttttaactttacatggctgtcacgagacgtggaaattctagtgaaccacaaggccctatgatcacggatcccaatgttcaagtgtcgcctgctgtaaccaacctgaacgtggctgcctgaccaccacgttccagccagctggccggcccctctaccacgaaggtccagctaggagaccaacccctactggacccactttccaatcaactactgatgttcctgacacgggggttagaccttgtgtttatgttggtgagactggacctgagattaatagccctaacattaatgaacgaacccatgttaacttaggggacgactttgaacttgctaggcaggattgaccgattccagggcttgcctgaaaacaaataaagaagggaaaatgtcccaccaaggcaagaccggagcaggtctcgcagtggggagtcctaccccaatcctaatgaagatagtgccactagtcacctaagtagtgagcgcactaatcggagaactcaaaatattcggcacaacaatgacactccaccccgaaatactcaaacaccgttttgacccaagacttaaggattctgtgtttgacagaattggccctcatgtaagagtagatcttcgggctggattgaacaagagaagaaatgctcgggatgggcacatcccgccctaaaatactcaaccaatgggaaaggacagaactaatcctaccaaccccaaagatatacctcctatcaacccaccgaccaggctggccgaggaagggttggcatgacaagatttagctgaataaaggccagctgatgttgatcttatagtgcaggcacaactggatcaattcaagaacatgatacaaggcatgtccgaccaaaagttgtctgacttagagcttgacaggacctaatgatcaccctttcctgtgcgcatcaatgtgttgcccctgctaaccaagttcaagatgtccacttggaagatgtacacagggaaagaagattccttggctcacatcaaatattttgagatccagatgtatttgcaaaatgtgaagattgatacctgttgcaggattttgctagcaaccttgtctgaaactacacagtagtggtttttcaaactagctgctgaaaggttcgattcgtggaactctttcacaagagagttttacacccagttctcatcttctaggaaaataccatacaggctggaagacttagtttaagtcaaacagagacttgatgaacctttaaaagactgcgtgtaaagattcatgactgaggctaccaaagtcaagaatataacaggagaaggatggtacacaaccatcatgagcagcatactgcctttgggtgagctatggaaagatatccgccaacactcaactcaaacacatggttgacttccttgatcgggttgaaggctttattaagcttgaagaagttgtccgacatgcccaaactgggagaaaggcaagtgtcgggcatgccttaattggaagataccccttaattccgcctagtacatcttccagcacgagcaatgcaggctagccctccaacaatcagaatagtggaggcaaacacaacaacaatggctatgggcagggaaatggaaaaaaaaaaaaaaagaaattcaataatcaccctatgccataaaactcaagggagaaggtggagaagtttacatgcttcaatctcttatcaaaaactcttgaaacagcctacacaaccataaaactaataattggtac

SEQ ID NO: 60154 - DNA, 687 bp, Cannabis sativa
atattttgttccatatatatatatttcaatcaatacaaaatatgaaaatcaaataaatacctcagccaaaatttaagaattaaattataaaatatttttgtcaaattaataatgctagaaatggaattaacaatcttctcttttgacactttgattgacaaaatattttataagaggaaaacctacatcaagtgttagaaataaaaacaataaagtatagaaaatactccccctgcatgaaagcatactaacacaaaaaacataataactttttcaatagaaaagttcaaaaaccacaaacaaagaaactccctgtaaaacaagggttcagagttgtaaccaacaatcccaaaaaaaaaaaaaaaaaaaatactactccccctatttgtctatcaaggagccaaagataacaaacacaaatagaaaattatcatgatagttctacaaaatatagataataagcaaaaaaaaaaataaaaattgaatcactttggcatcctcattggattgaaagaactttatgatgtcgtccatcctcctaagaagcagggcttgacttgtctccattcttcacaaatgtaagtttacttcaaccatttttgtagaagcagaagtggagattgatgagtagtaggttcatattagggttgtacaaaaaaattcgtaaaccgtccaaaccgaataacc

SEQ ID NO: 60155 - DNA, 591 bp, Cannabis sativa
tttttttttttttgtaaaatcccttttatatatatatttagagaaaaataagcccaagcccaataacaaaaaaggtgtagattagggtttcatataaatatatatttctatctcatactttcctccatatctgctcccacactctcttccggtgactcgctcttttcgttctccgccgtcaacttcttcagtcaggtatgcaatagcttttcattttcttgttatggcatatctgttgttttgaatttttaaactttgttaatttcatggttaacagtacactcgctagattttccattaagggaatctagcctccgataaagatggcgacctccaagactgtcaaagatgtttcacctcatgaatttgtcaaggcatacgccgctcacctgaaaaggtctggaaaggtttgtactcttcctcaatatcttgtttggtttgtcagaaaacgcagcagaatagtgagaacttataaccctaaccttgttcaaccatgttttgttcttggcgacaattgtatggtattgttattcattatttagaaatattagtcaggtgttattgctttgttatcataatgaaagttttcat

SEQ ID NO: 60156 - DNA, 2688 bp, Cannabis sativa
ttaatttgctagaaaggttatatggttttagaatgattttttctctttctttagatgataacattaacaggtttaatgagattattgtaggattgactaacataaatcataaaattgattaagaaagtcagaccatcattttattaagatgcctcccaattgcatatcaagaagtcaaggttgccatcaaatatggtaaagatgtaatttttttggagggtgttattgctgcactcaagtaaaaggaatttgaattgcaattggagaaggaatccaagaatgacgaagtgtacctagcaagaagagatcaccaaagagagtaaattcgaagagtaaacaccacatctcttaattaagatcgaagtccaaggaggaatcatggaagtgttacttctgcggaaggcctgaacacttacaaagatactccaagaagtacaaggagcaacaaggcttaaacaaatcttataatgtagataggaaggactacaagcataatcacaagaagaaagatttggttacaatcgcatgggaaagtgacgactgctcaacaaattggagaattgttttctatctcaaaatcctcaatgaatagggagatgattcttgatttaggatgcacttatcacatgtgtctgaatcaagaataatttttttattataaatcagttgatagaggtaaagttctaatggaaaataaattttcttgcagggtcattataatcagaaaaatttccatcagatagtatgttggtcgaatcaaagtgctaaaaatgtaagccacatttcgaagttaagaagaaacctcaaatccctaggtgcacttgaagatgagggttatagatacaagtccatgaacagagaattttgtatgttctttgatagtaatgaaaggtgaaaagatcaacggtttgtatgttcttcaaagagaattttgttcatgccagagaaactagcttagtgaaagggcaagaatcatatatgcagttgtggcatcacaaacttgggcatattagtgaacaagacctcaaagaattgtacaaacaaggtatcattaaaaatttaaattttttgccttaccattttgtgaaacttttgttttaggcaaacaacataagttaaaattcacaccagtaaggcatacaataaagaagatacttgaatatatgcatgctgatctctgggggcataaaaagttcttactcacttcggtaagcaatactttctttctatagttaatgattttaataggtgtgtttggacttatctgttgacaactaagaatgaatgcctagaacagtttaagatttaaaaaattcaggtggaaaaccaaaccgacttgaaagttaagaaccttagaactaataatggtttggagtttattaactctaaatttgataagttatgccaagagtatgggattataggcacaaagccattgtcaaaacaccatagcaaaatggcaaattaacaaaattaattttctattatttgatttttttttttcaaaattgagaaatattttctttaaaaaaaaataaattctgaaaatatattttttataatttttaattgattatattaggtgaatcaatataaatgtcccacgtgtacatgatggtacacatagacagtccatgacagcagttaactgcgataaatttgggtgacaccttaaatttgctaagagctcatttggtacattgtattaggtcgtattgtattgtattgtattatattgaattaaattatatatcatatttttatataatactatgttaattttattttattttttttgaaaagaggaaactttattcaaaaaacaagcaagctacaaccaaacaaggcacagaccaaccacaacaacatggcagccacttaacagccagcagccaccaaaaaaaacaaaaggactaccaactcttaattacattaactaaatataagtttctttggctccttttaaaggtacttttactcaaacttctaagctgaacaacatgtctaacttataaactaaggcttttaggagcagcacaagcacaagacaaatcgaagatacaacgatttctatttatccgaagctgataaaaaacggctcctggcaccatatttatgaaccggttttggagatcttgcttcttgaaatcacacctgtaattgagatcaacattcgagttagggcaaatgtgaactccaagccaagagttcacttccttttgcacctatttggtaaagatgcagctgtaaaaaatatgttcgtgagttttagcctcactttcacacactgggcacataacgttttgcagcggcaaaagcttactaaggaaatctctagttagcaattgggagttgataatctgccagtaaacaaatctatgtttaggcagcaacaagttgtcccaaatgcctcttgaatacttgacttttagctcctctaaaagcaagttatagaatgtcttcgctttgagttttgtacctgtcactgcaagcctcaacatggcctcatctgtgttgtcccgaagcttcaacaatttcttaaaataccagctggtatcatgattctttgggaagctccatatgtcaccacccttcaaatagttggagtttatccatttaacccataagcaatcttttttgttggtactatgttaaatttaatttatactaaaatattatatatttagg

SEQ ID NO: 60157 - DNA, 715 bp, Cannabis sativa
atatatataggttaatttgaagagagttcttatattcaacttctttggccatccggccatatatcgggggaccatcggggtgcaaaattaatcttggccatcgggccatataccggacaccatcaggtcaaaaatctggcccgatcccatataggcatcgggctatgtatcgggccccatcgggcccgtcgggcctgcaagcatttttggtgcatcggactatctaatgaccatcggaccgactatcgggcccatatcgggccctacatcggaccttcttcttccttgatggaacaaaccctaatcacaccctaaatcacatactaaatcacagatcctaaatctatcaaggaaaagcattttaaacctaaatcaacaattaaaaaattaaaaaataccataaaatctaaccttggctgactttgcgtgttcgcccgtgagtttgcctttgatctccggtggtgttcggccgactttcgtggttcgtcgtgcgtggtggattggcgtgcgtggttcggtcgagatgggtgtagatgaatgggcgtggatggtgaacgtcgtgcgtgggtggttcgaggaggaagagaggaatcgcgtgggtggttccacgaggaagagatttgggtaaatgggtggtcccgtggtgattcggccggtatggtatgggttgattttgggtttgatttgagagagaaaggaggaagagagagagatg

SEQ ID NO: 60158 - DNA, 674 bp, Cannabis sativa
aaaatgcaggcgtgtgttttgtctcttctatctctcttaaattaaattaaattgaattaaattaaattaattacatttcaattcccattttaaccattataagaacgttgtaattgtcaagccaaacttgtttttttaaagaaaagataaattaccttattaataaccatcaaaatttaacatatcaataataataataaaaaatattaacaatatcttctaataaaaattctaaatttaacatgctaccattaaatctattaaattacatgaattaatcctaatatcaaaatataggaaaactaagtaaaagtaactatgtactcttaggtaatcagagagataattaatattttaaagaattaactaattatttcatatattattttttaatttttttttttcaaatttacaatttgtgttgttctggtaatttttctgatagtttttatgtgagttgttatacgaattttattagttataatttaagttgttccgttagttgctatagaagtttctacatgaaattccgtaaaaatacaaacaaaaaaaatattttaaagtgtaaaaagaaaaaaaaaaaccctttttgttttttccattttttttaatttttttttttaaaaaaaagtatttcataaaatattttgtttgagaaaaaaaaaatcatattt

SEQ ID NO: 60159 - DNA, 927 bp, Cannabis sativa
ttttgtcgccatcctttattggtttcttatgttttctctcgtttcaacatggatgatttcttgggtctttacaattctctcgcggtggagaatgatcatgtgaatgagttttgtcatgatatcgaccctaaattgcttgaggaccgtgtggaaaaaattgcgcattttcttatgggtagaattataagtacgaaaaagatttctcatgatgtcgttattggcatggttaagttttattggcgacttcagtggactcttgagatggaagcccacgagcgaaacatcttcctgtattgttttcaattgcttaccaactgaaagattttttttcttgaaagtggcccgtgggtatttgatgattacctttaggttttagaggaggcaaaggctttcatagatccaggtgatatgaattttgattttgcttattttttggatttaaatacataagtgttatttgtatttttgagcatgcgacacattacatttaaagaaagcaattaacctcataattcccttaattgaaactcctcgctacaatcatgtcctagagaagcctcctggaaccaggaacaagttaagattgacgagtatacggaagtccatttggccctaccttagcttcttagatgcggaaggcgtattgcctctctcaaacccgaaggaatccaaattgttaattttatggtactaaatcaggtacgcatcaaaagagtttcgtgttatatgattatcatcgtaccataaccacaagatctccatacgtgtgtacattaaatcaaaacaataaaaagatataagtttagagtatacctattgaagcctatcaggttatcctcaaaatttctcgtaagttgtatcgcttaatccagttgatgaggaattaacaatttagactcacaccagtgtcttccaaatcgatccacc

SEQ ID NO: 60160 - DNA, 641 bp, Cannabis sativa
atagatttaaaatattttttcttcgaggtttatattttaataaataattttattaataataatataatgtaattagataacataattttattattattacatttttctcaagttctatttattatataattatattaataaatagctattttttattataatattaaaaaaaattaaaatagaaaagcgcctagattaactagtataaataaattatatattgttttaaaaatttatcaaatacgattttacatcaattaattaatttttgaaaagacttcaatatagcgttattttcaattttcttaaaaggtgatattgagctaagaatagaaaattattatattttaaaaattattataaaattaaatgaataatattaaaatatgaaaatatatataaaaaaataaataaatatttataaatctaataaaaaataaaaaaatatataaaaaaacttaattatcattaaagtaccatttttctgtattagcattttcctagtataactattttcaatgtaggaacacttcttaatgagtattagcctgcatagatactaaacaaatttaactatgaatattaattttaaaaatatcaaaccctcaaattttgatctaataacgaataatgaaatcaca

SEQ ID NO: 60161 - DNA, 826 bp, Cannabis sativa
agttggttgtaatccctgtatatatattcccctttgggttctgtaataagatgagattctcttttcttctccaacagactatctttcctttcttctctctttactcctctttcctttcgtttgctctttgtgttcttcaatggcttacaggtttaacaatcagttacacttgtacacaatgtaagctcttgtattgtcgacttggaattagaaattttccattctatggacaaggattgaatttcttttggcatttcattcaaataactatccacatcatctttatcttccaagttaagtctccactttcgaatgtgaaatttttctgagagccttttcaagtaatccacgtctgtaatcagaagagagtttaaactctgcaaaacttgtggcgataactcaagcttttccatctcatctaactttggaggaagactagtcaagttaatgcaaccatcaatctcgagatattgtagattaaccaatttcccaaaatttgttggtaactttgtaaggttggaacaagaggagagtctcaatgtttgtaaattgatgaggtgggtgatggattcaggcaatttcacaatacactcattttctgaaagatcaagatacttcaaaagcttcaactttccgatacaacatggcactatctgaagccctgaagcatgcatatccagtgcttgtaaatatctaaatgagttgcttattttctccaagactgttatcacatttatcccgctatatctccgtcttgcctgacctgaggaaataattgtccgcatcttgtctgctccaaacttctccaattcttttgttgatgata

SEQ ID NO: 60162 - DNA, 1863 bp, Cannabis sativa
gcctttcttcatcaagacttagcgattaatttaaatgttaagatcttttggtccacgtgtccctgtccggttggtccacgtatattgagcaaaatcaggggcaacaccagatttcaactttcggtctgggttggtgtaatccgaaaactgaccgaccaatataggaaactccttagaaccgaccaatgtaaaccgcagtttggtcagttcaaaccgccgaaaccaatttttttttgtttttaatattatcaaaaaaaaaaaagattgttggaatttattttttggttggtttcttctagccaattttctctactgtagtagtttagcatctttaaaattaagagaatgtatgagaaaaaaatttattttgtatatgaaggatatatagaaagatgatgaataaaaagatactcactgagattgatttatggagtggatgcttaaaattttgtaagatgtgatcaattattatgatttatgagattgagattgagatgacaagagataaatttagttcacttgcagcttgcctttggaatggaaaactgacagaagcaaaaaaaaaaaaatcattgagcgggaaagagagaagaaaaacagaattgagagagtatatatgtacacataaattattttttttcattaatattaatataataatcatataacttttatatacattatatatacatacataaatttttaaattaaatagtatatatataaatttatttatgttttatgtaaattcggtcagcttcagttttttcggtcggtttgcgaaataaaaaatcaactgtttaagggcgattttaaccgttaacagttttttcaattttcggtttgaacggtttcgattttagcagtgttcggtaggtcgatttaaacagtctgaacggttttttgaattttatgctcaaccctaatttttccacatacatttattatttaaaaaaaaaaaaataattattaaattaatttaaaagaaattaataataaataaaataaaataaatcatgtatatatttacaagggtagctattcgatcattcatagtacgtttgaagtacctcataattatctaaagttgtcatagactatcaaatttagattagatcgaaggtaaatcgagatcgttcagatatttttcagtgcaaaaattttctactatttataatgcattttttatttaaaaaattattattcaatttttgagatattattattattattattgcatgtgttattttattgttcactattatagtttttgtaatacaaccatcaatatatattaataaataaaaatttaagattttctaccataataattacaaactttacaatttttatagtataagaattgttccaaattagtaaatattaaagaaatttattttattgtttagaaaaaagtaaaaaattttaaattattaaattaatttaaaagtttaaattaaaaaaaatcatgtattttgaaagaattgaactcatgttattgtacatgatataaggtaattttaccatttataccataattatattattaattttattaattattgtaggattaaataacttaaatattttatatttttctagctacaattattgtattaagtagaaagtaaaattaattaaaaataaatatataaattctaaattaaaaagtaattaattgaaaattataaatagtcatatgtaagtaagaaaactataggtttaaagttaggtgtgaagttttattagttagagttaattaataatatttaaaattaattataaaaaaatttattatttatgtttaagttttcaagaattaatttgagccatttaattaaattaatgactataaattactat

SEQ ID NO: 60163 - DNA, 1458 bp, Cannabis sativa
cattcccaatgtctaactataatgccccgctatactaaaaatactaaaatatgattctaatggccaaacgccacattccgatgttgccggacacaaaacatgcaaaaacttaaaattacatatatgacatataaaatacattctaaattcaaataaatctccattaaatgataatttatatttaatattccaatttcataattaaaacctaattgtctgctaatttctaaattaaagttaagcggtctttacagccatgtcaaaaagatattaccaaaattgactgccaaattcggtgatgaagtggaattaaaaatttggttacggtctggtcagtttgattttagtttttcagtttttatgaacacccctaatttttggcctaccatgaagaaagattgcctagaatacgtccgtaaaggcaatgcctgttaaaggtttgcaaaaatccccagggctccaccaaatgagatcactctgatgactagcccctagccattcacaaaatggggaattgatttcatcggatcccttccaactaggaaaggggagtcaagtatgccattgtagcggtagactatttcaccaagtggactaaggatgagtcgatgaactctatcgctaagagatccttagactttgtgatcaagaacattgtatgttgatatggatttccccacaactccacaagatagtctcagacaatgagtagcagtttgatagtgaatacttcatgaaattttgtgagaaacacggaatcgaaaaagtgtctccgtcgtagcaaggccccaagccaatgagaaagcagtagctgtgactaaaattttgaagaccactctaaaaaagaaactacatgcttgcaagaacaattgcctggaggaatcaccacaagtattatgggcttatcgaacaacgacccagacatccacaaggcatttgccattttttatggtttattgatgtggggatatgttgttagcggaacatattgtaccatctcatagaaggacaacttactgccactaaccagtccatgctccaagagtccctcgactttgtcgaagaactcaaggaagattctcaaatgcaccttgcatcatattaaaggaaaggggccaagtattttaactgaaaagtaagagataggaaattcatagtgggagacttggtactaagacgagttttccctatatcacaagatcccagagtgggggtgttaggacccaattaggagggaacgtacgaaatcaaagatgaaatttaagttggaacttaccgcctcaagcggatggatggatcctagatgccaagagctttgaatgatgatcatctccaaaagtactaccagtagttaggagttcaatatttgatttcatctccagtattttgtaatagacttaaaggtcattttgaccaagacaatatattttgaaaaagtaatgaactgatgacattaat

SEQ ID NO: 60164 - DNA, 1273 bp, Cannabis sativa
atccaacctctccacaagtgctttaatgtctgatgtattagctgcagtcgttggagcggtcaaagtagatggctactctacttctggaggtggtggtggcagaactatatttgccttgcggacggcttcagcaatggtgttggcttgcgtttcaaataccaaattttgtgtaccatcgacgtccaccatctcatcaacgtccatctgaaaacaaagacgaggtttaccttcattgatggacttgaagtactcctcctcactggatcgaggacacaaacacttctttataaccaactgaaaacaaaaatattaaaaaatgttaggttttgcaaattacaatcaatcagtaaaaatcaataaactaagaataatgtcgacattgtttgcgacatatgtcgacatctaacagttatttcaataaaaatagcaatattgactttatcgatatatgtcgacattaatcgcgacatatatcgatatctaacagaccctgcaagcaaaaatttaatattaaaattatcgatatatgtcgacattaatcacaacatatatcgatatccaatagactctaaccaaaattctaatattaaacttattgatatatgtcaacattaatcgcgacatatatcgatatcatcaagatctattataaaaaattcagttaattgtattattatattataaatgcagtgtaagaaaaaattaccctttggttgaacaattgtgcaatgccaaatgctttcaagtcctgtttccgctggtcctccttagctttccaatttatcatccgagggaaccttgtgccactacaattaacatacttttttctcacttcctatatggctttatatcacaatattgtatggtaggtacatagccatgtacggtataatttgcctcctgagtaaccttcttgtcctttttcttatcaacgttctgcttgtaacgcatcatgtccttactcatagaccatattaattaacttccaaaaattatgctcgtcccacgaatatttgaagaagaattcgaggtcctcaacaaatttcaacatctctagccaaaattagacattacctttttttacaaccaatacacccttaataaaagcaataagaccaagcttgtacacatcatctgctacatcccatctccctaattggagcaacagtgtatccaactgcacaccactcttcccttcaaaatacgtcctcactaaacggtcactggacttggcttttatctcttcctttgtagggccactacccataagtaa

SEQ ID NO: 60165 - DNA, 1475 bp, Cannabis sativa
tgtcacctcctttataaggtaggggtttgaggtaagttacaccaggtatccacgggtctgcagcacagcaaatgctgtggccgtcaccaaccttccatcttagacctttaattagaagttctttgccccatattatgcctctccaagttagagaatgataaattctagtatcagcatccagacggtgattatgtttgaagtatcttggcttgagaacacggcaaagaagggaatttggatccgaaaaaatccgccaagcttgcttagcgaataaagcttggttaaaatgaacgaaactcttaaagcccataccaccttctactttagcttgacatagagcattccaagttttccaattgataccagttttcgaagaattagagccccaccagaacttattcatcatgacctctatttgatcaatgagtgaattagaaagtcgaaaacaactcatggcataagttggtatcgactgtgcaaccgcctttaacaacacttctttaccaccaattgagaagagttgttcttgccaagaggaaagaaatttccaaagctttttcttaatatcagcaaacaataatttcttatccctccgagagtaagatgtcaatcccaaatatctttcatggcatggctgaatgggcatatccatgatttattggaaattcaattgaacatgttgagaagtgtttgatgagaaagatagtattgattttgctacatttaacctctgccccgaggcacgacagtaggtgtttaaagatcttcatatagctttagcagaccgagtattggctttgcaaagaactaggatgtcgtctacgaaaaataagtgagaaattgcaggagcccaacgcgcaacacgcaaaccagagagattacctgctgcttcttcaaactgaagcaatcttgaaagaccttcagcacatattatgaacaaatatggagataaagggtctccttgtcgtatgccacgagttggtaacacttctccatgaggtgagccattgatgagaaaagagtaagagacactcgatatgcagcgatagataagatccacaattgtgtggtggaaacccatagcagtcatcattccatggatgaaatgccactccaccctatcgaatgctttactcatatctaatttgagataaatttttctaaaaactttaagcatttgtatttattttttttcttaaaaaatatactattatattccttttcataaagttttaaaataaatattattctactaaaataatattatttatctaataaattatatataatatttttattcaacttttaaaaatcaaaatacatatacaaaaaaatttatttagtcacaataaaatttgtgatttaaagtaaaaaattgtgactaattataaatcttcatttttttattgtgcctaaaaggtccgtagtgtattagtctcaaaaattacaatttattatgactaaatatattttta

SEQ ID NO: 60166 - DNA, 1334 bp, Cannabis sativa
agataaccaagatatcctctccttcaacaggaggaggttgtaatctttggttgcctgggttattgggcggattgggctggttatgttcgttgccctgccttttcacatattgcctgaagtggccttgcgcgatgagactctctatctcatccttcaactaacaacactcgtctgtcgtgtgcccgatgactttgtggtggttgcagtatttggttggatctcttttatgtctcacgtgcctcatgggcttaggtttactaaatgtaaccttgtgctcatgcgcgagatagatgttttcccgagtttcatgaagctcggtgtaaacggtgtaaattggcacgtacttattgtgcttcttttgtttcttcttgtctttagttgaccccttatggtcgtctttcctctttgaactaaatgccctaggttatcagctttactcgagacagtatttattgaagcagtgttgggtttacttcccgagccagtttttaacaagttcatctctttttgagcttcttcctttcgaacaaacacttgagccctttcattgaactcggtgatttttttcactggacgaccctataagtcgtcccataatttgcctccaatagtggagagatcaatagtaatccctgcttgaagagcagtaagctgggtactattatttaaatttcttacttttgcagcagccgtgctaaaacgacttaagtatgcctttagcatctcgccagtttgttgctttatgttggtgagtgaggacgcttcgggtcgcctatcccttgcggcctagaactgctttttgaagtccttagacaactgttcccaggaagtgatggaatgatgagtaaatttattgaaccagctgcttgctgctccaactagtgaattgccaaacaaaatacaacgtagattgtctgtaacattgctagctcgcattatattatgaaaaattatttaaatgcgagagcagatcagtggtcccatcgtatgacgagacgtgggggttttcgaatccccagggaaaaagattattcataatgtctggatgaaatggcttgagttgctcatctgagtcatatccagattgttttccttgctccccgacttgatagctcatgaacttatcctcaaactcatctattcgcaattggattggatccccttgctttggaccgagttgttggcaaacattaagtttttttttgagtgttctcacagatctggttggttataattgctagcagacctcgtcctactcacggacttggtcctactcatggatctcgtactgctcatggaccttgtccttcagtaactttcagttttacttgtgc

SEQ ID NO: 60167 - DNA, 841 bp, Cannabis sativa
ttttttttgtaacatataattaatatttttaattttgtagcattggagagttgggttccagaaattctgaagttaatgttacagatgtgatcgtcaatacagtcaagttttttgaaactttatttggagttagaattaaaacaattaaggtaattaattaattcatctatatacttatatgtataatgttaattttcattatattgtattaagtgttcttaatttttttatgttgtttaaaaaatatgcagggtggttcaggaattgcaaataatatgaaatttgaaaatattgaaatgaataatgtacagaaccccatcataattgaacaaggttattgtgaccaaaatgataagctttgcataaaccaaaaggtatatatatatatatatataaataatgtaaatttgattttttatttcttttattattcattctatataatgtgtgaaattttttaacaggattcaacatcatctgaagttgaaattagagatatattattcgaaaacattaaaggtacaagcatagcaaagatgggtattaaattggattgccatgaaagatttccttgcagagggattacattggataatgttgatttagaatactataataagcatagtcataccaaagcattgtgtaaaaatgttgagttcacacattttgaaaatgttgttccaaactgttacaaacaaactaatcactcaacatctcaacctccaaagccagcacctcaaactcctcaaccaaaaccaaaacaaacaccaacacctcagcctcagcctatgcctcaacctcaaccccaacctaaatcagcacctcaacctcaaccaacacc

SEQ ID NO: 60168 - DNA, 523 bp, Cannabis sativa
aacatttatatgagatacctataaactgaaaaagaattagtaatttagtttgttgaaaaagaaaaaaaactaatcaataaaaatataagatacccctactaccaaaagcctattttttattaatattgtgttagaaatttttttattgcaaaatgaatatataaaatatgagctcatttgttgattataagtttcatcacaattagccagccacgtggcatacggaacaagttccgctggtatgtgggcgtgacagaatcgtccccctaatttgtatatatatatatatgttttatttatatatatatatattattaatgtgtagatttttttatttatatatataaaatatatagtatatattaatgtgtatataatttgtatatattgtaacagtgatatatatattgtattgtgtttatttgtagctttttttattaatttcagtaattgataatatggtatattatttgttttcagattaagaaatttttttagcactttggagaaggtggacacaaaa

SEQ ID NO: 60169 - DNA, 1512 bp, Cannabis sativa
gaaatacaaccgtaatttctattatgtaagtgtggtaattatgtgccctataaagttttgggtggtttggacaggttccggtagtgtttcgatgagtgcgtaaactttgaaaattacactttttgcccctcaccaaccggtcatctggttctcgtagaagctgtttggtaattcgagaatcatatttttgccgtaacttttcacttggtgtctattttggacgttctatataccgtttcgaagcttacgacaagaactatcatatggtgtatgttttagaggcaaaacataagttttattttagtgtatttgaaatacgagatttggtaagaaaccctaagttgttctttgcagctgtcaagcagtattttgggataaacacttattggtttatcattgttatgacatagggcccgagatcattaatcgttctccaagtaggttggccaacatacctataccagaacatgaggtaagaaaagtaaattgtaccatgtggcatgagaggttttgtgatcctcggctgtctgattagacagtaataatatgaatgcgacatacaacttcacctgattcagtgatatgatagatgctttcaaattgtgaaatgagcttgcctgattaggcaatatatgatatctaaatacacctgattaggtgatatagatatagtgccaagctatgacataggctgagcttgcctgattaggcaatgcaacatatgtatatatatgatgaatgtcaggctatggcataaacttgtatgagtataatatgataaatggatactgacattcaagttgtacgtgtggagcaatcgttataaagtcatgattatgaatcgaaatcgttgttaggtttctaactggcaacgtaccttattagatgcgggcaacaataatatgaaaatgcgtagttatggcatagatcgaaactgatattaggtttccaactggcggtgtaccttattagatatggacgacagtaatatgaaaatacttagttattgcatagatcgaaaccgctgttaggtttccaactggcgacgtaccttattagatacggacgacagtaatatgaaaatgcctggttatggcatagatcgaaacatttgttaggtttccaactggtagcgtaccttattagatatgggcggtagtaatatgaaaattgtcaggttaaggcacaaaatgaaccgttgtagggttttctcctggcgacgtatcgagcgtaggtacgggcgttagtgacatatgagtatcgagcataggtacgggctcgtctgattaggtgatgtgttatattagtgtcaggtcgtggcacgatctcacctgattaggtggtgcaatggtattatatatgatattatattatgacattggcttgcctgataaggcaatataaatatatgatcaaatctatttctatgcatttggctggttatattacctaatgttgaaagttatggtttaattattttatgataataaaatatataattagttatttaac

SEQ ID NO: 60170 - DNA, 730 bp, Cannabis sativa
taggttgaatactcgcacttgtcgtttctcttaaaattctctttcgtattagtaaaatcatataatttggtgttgcgaaattcacttgacaacagttatgaatagataataatgtgtgattttgtgtgatttttttatgcatgatatataattctatcctcaatatatatcacaataagtacattaataaatataaattaatatgaggagtaaaaaaatacctgatattcaaatggagagtacaatactagttcacagttaaaatccaacagcagtggccacaaattgtgttgaaaacgtaataaaaatatgaagaaaagctgacaacaaaatgtgtgaaaattatatttatcgaaattgtatgaaataacaatgtcagtaaatatatgaatcaaataatcaaataattatcgttcacaaataaaccctacataaatatacatgtactatgaatatgcacttttagtgagaccaatatccaaaatcaaaacagtaggaccaatgttaaattggcaagtgagaaaatggaagaaaaagatgaagttaaatactataaattatatacttttataagcagagtagtggaaagtaccgaaatataatatccaaaatcgctgggtctttcagaaatgagaagattggaagataatggtgaacattggaggattatcacagagatttgcggaagaaatcttcatagtgttgcgacaaacagagaaaagagtaatgt

SEQ ID NO: 60171 - DNA, 615 bp, Cannabis sativa
tcaaaaataagaaaccgttcctagtttcctttagattgtgcttgaattttcaaacgaagaaggaaaaaacaaaattgaaaaaaaaatgaaaataagatgaagagcttaaggatgaaggtgatgatgaaaaatagaagaaggaaatgatgtgatcaaatggcaataacgtgtgattatattgagaagaaaaagaaaaggtgacagaagtgacaaatgtcactcggacagtataaaagtaatttttttaaaaaaaaactaacacaatataagcacaggttagaaaaagttgagtttgacataaatatttttatataagcatatttttgatatagtgtaaaaagagatatttttttaaaagagatatttttttaattttaattaaataactaaattaagcgtagaaattcaaatttctcttttattattcaccatcagatcaaaatctaataatttaatatttttaaaattaatatttatcgttaaatttatttggtaactattaataggtaatacttattgaaaagtgttatagatataatttttcccaaactataatccttgaaaggcttgctcctgaactatttttgtttgaacttttttcacccacaaaaaaaa

SEQ ID NO: 60172 - DNA, 626 bp, Cannabis sativa
aggatttttacttcgaaattttggtatataccaaattatattcttaaaagtcccttaaaaattataatttttacacttcatactgaaatttttaatttttttacttttttactgtagagcggaattttttttaaaatactgtgattttttaaaaaacattgtgtaagttttcactgttgttacactgttgttttttaattgttccactgctgttttaattgttctgttttgttgttatacggttgttttataaaaaaaatagtatttttgtaaaatattccatgtaacagtaaaattataaaattttgcccaaaatctaatattttataaaaactcccttaaaaatattgaaaaaaaaaagtaaaggtaacttttcatctttaaactttgtgtaacaccttaattaaaagaacaacgtgacgattacaatgtgtcaatcacgttgatcgatgtctaatatgttaagtgaatttaaataaaataactgataaattaaaacaaacttataataacttaaactttaaaacaaaataatatttacataattgggattctataaaatctaattcaaaatattacaagctgtttacacaaaaaccgacaaaagcagcaaaaccaaacttttt

SEQ ID NO: 60173 - DNA, 1119 bp, Cannabis sativa
tataacttttaaaattaattttttgaataaaagggagaaaatttttgtattggtcaaagttcaggggataaaattgttaatttttaacagtaaaagaaacaaaatctaacagaagtggcataattatgtaattgtcatattttagaaaaatattttaataagtcgtatattttaagggacaaaatgaggtaaagttcaggagacataaatgctaattattttaaaaaaattattagtatataaataaaatattaaataataaaaaaatataataagatagtgtttagtgtagtggtagagaatgttattttaaaataagaggtaagagatccatttccaacttctacttttctatattttttagaaatatttaatgtgtagttatgaaaaattggttcaagatttttaatttttttttcaagtactagaaatattaatttgataataattaaattatttatataggcgccccaaaatttaattttgtgctcttaagcctaatatactttaggaccgatcttattggcacatgtaatactcatcaatcaatttaagctcttttaatctgtgtagtctcatacaattatacacttgacctagataatatgagattgtacaacttatttacgaaagtcaaacacccttgattattaatttatttgaatcaaaattaaaacaagaataattaataatccatttgagactcaaattcataattttattgactggaaaactctcaaaaacaaagaaaaatcattgtcaattgagttatccattggactagtcagcctaattaatttggcagaactcatcaaacactatattttagagattttttccctcattttttttccacgagaaaaataagataaatattttgcaaattaaatcttaatagttattattatagagtaatcaaacacatgaagaatgtttttttttatcccaattgcagtatttacctaaagtgaaaattaattaattaattaattacatttagtatatagagagtaagctttagttacattcatgcacatgagataagataaatatattttacagtttttttttctactttttttccacgcgaaaaataagataaatattttgcaaattaaa

SEQ ID NO: 60174 - DNA, 4509 bp, Cannabis sativa
  modified_base (4454)..(4472): a, c, t, g, unknown or other
attatattgaaattggttttatttagggcacaaaacccaacatctatatgacactcccaaaagggtacaaacccaagagacaaattctcccaactgatgtttgtaagttaacaaaaagtctttatggcttgaaataagcctctagacaatggtacaaaaaactcaacaattatcttctatccattggcttcactcagtctctcttaaaccacaccttattcattaaaaatgattaaggcatttttctcgccatattaatatatgttgatgacattatgattacctctaataatgattatgttacatcttttaaaaagtaacttaactatatgtttcagcttaaggacctgggtcctttactttttttcttgggattggagattggttgttcttcctccgggatatctgtctcccaacgacctttcacccttcaaattttgactgacacaggttttttaggagcttctactgctcccaccttaatggaatacaacattcgactctcatccgatgttggaaaaccattagaaaatccaaaaatgtaccgtagcctcattggtaaactcctttacttaaccattacacggcctgatatctcttttaccgtaaacaaactcagtcaatttctatccaatctaagggctccccacctcactactgctcatagaatactacaatatcttaagggtacctctggccaagggctatttttttactcagcatcttccactaacttatctgcttatgttgaaactaatacatcaaagatagactttcatctcaaaatgttttcagatgtttattgggcttcctgcagtgacactagaaggtccgttttgcgctactctgtcttccttggcagatcacttatctcttggaaattgtaaaagcagtccattgtttctcgttcttccgctgaagcagagtaccaggctatggctcttgccacttgtgagatcacctggttgttggcactctttcaagactttggcatccatcatagagatcctgctatcctttattgtcaaaacactaccaccatgaacgcacaaagcacatcgagattgactgccatgttgtctgagagaagatccaagagggcacactaaaactaattcatgtcaccaccaaaaaccacattgttgacatccttaccaagcctcttttcactggctattttcacactattgtaaccaagatgaacttaaaaaaatatatatttcatctagagatggggtattagaattagctggcccatattagtattacctgatgcactatttttgacccactttgtttcatgggcttctttctccttttccctatatatacatctctttgtaataacctaaagacattttggcatttctacaaattattgcaacagtaaaataagagacttttcatctctatcaaaaagaaatttttttgatgtccttttgctagcggccactcttacccgcccatttcttcatcttttgtttttgatttacttcagtgtaacactggaccaatgccagtttctcaacccaagattcacttttaaaccgaccagtccctctcatgaaatcaacacccgcctctcagtcgagctcattttcaaacttaagtcatggcctctttagtcttcgaaattgcagcttacatggtccttgtcaggtaaaagtaattttcatatgtaatttagccgactacacagtcatgtgggagttgtagttgtttcatttataatcttgttgtcttgcatctaccgttatctaccaaagataattaacaatatatatagtcttagtttttctttctaatgttatggatttatagttttgcttgttatttatatatatggtgtgtgtatgtctatctatatgtacatagatattgaattttttggagtaggaatttactttaatacccaccggtgaggatatttatatgtatagtatgtggggcatttctaaaataccctcttggtagggtttagaatttggaatgaggtatatgctaaaaattggcacacttacaagggctcacaacgaatcacaaacgactcatttgtgattcgctttttggacgagcgatactttgagctcacaatggatcacaaccggctctaataccatgttagaatttgagataacgtacataggactccatgtcgaaactaattgataatggaaggagtaacctatttatcttatatataataatttattttcacacaatgtgggactaactctaatagacggagggaaatattatgacaaattctctgtttgtttctattactcctaactttacagttatatgttcatataatagttccatttattcaaattggtacccaacacggcaattctatgtcgaaatttcttatggaattctcactaatgtctcttaatttaccatctaccgatacatagctccagcatttttaagcgtgaatggcatcaccttgtaccagtaaacacctttatcggtttggaagctagttgatctacatccgtgatgtgcattataatttgattatacacaaagtatgcatccatgaagctgagaaacttgtacctagacgtggcatctacaatttgatctatcggtggaagcggaaaacaatctattgggaaggccttgttcaagtcgataaagttgatgcacattctcaatgagccattgggtttcgaaatcagaacagggtttgcgagccatactgggtaaaattcttctcgcaagaaatcattggcagtcaacctgtccacttctgtctttactgttttagccctaactgggtctaaaggcctctttttcttgaagatgggggttgcatcttctcagatgttcaaagcgtggcagatggtgttgccataaatccctgtcatgttagaatggctccatgccaacatatcttgattccttttgaccgtgtttatgatgtcctctcttatggacaggggtaggcttcttccaactctaatagttcttgtgggatcttcataactaatgcttatctgctttgcctcctccattggttctagattcctatctgtcccaaccctaggatccaatttatcttgaaaatcatcccggtcgattttagtatccatcaattattttgctttgagggaaataagcatctcttcccagacaatgaacatagtctgcattgagacattgtagcaatttcttgtgcttttccaatcgactttgatcatgccagtgcatccattgtcacatgggtacttcatgcacaaatgcctgatgatggttattgccctgaaatccactagggtcggtcgccctagtatggcattatacgcagttgggtagtctaccacaacaaaggttgagtgcttaaaagcacttgcaatattctcccctttgagagtgatagacaactgaactttacccattggcattagggcatcaccattgaagccttgcaattgaatgcgcaaggggttaagtccgcttccattagcctgatttcctggaatgaaaatttgaataggatgttaactgagcttccattgtccacaagaaacctgaaaactcgtttgttggcgatctacgcatcaatcactaaaggatcattattggggatgtgaacattttttgcctcatcctcggtaaaggtgattggcaaattcatcattctagggtgctgagcgggagattacactagcgtgcacactttcccttcttttacctccctcaaatatctcttttgtgcgttttgagtactttcaacgagatggggtccacaaaaaattattgctacgtgtctgcccacaagaggtggagcatgtccaagaggatatggggttcccggtcctagtgcaagtaatggtaccccagctgaggctggtggagcagggactgcatgtaatgatgttcctggagcttaagaatgtcctacccactgtagaggatttatagagctctattgtctgggaacaatcatgtttccatgtagaaccccctttctgggataaatgattgcgatgcgaacccactatcccaaatatctcgctcaaaccaaaatttcaatctcatccttcaaataatcacacttgcatgtagtgtgacccttctccccatgagactcacatcctgagtttcaatcatgtatatttcttcctccatgtgacgttcacagaggtttcctgtaatggaccatattgtaggttgctttgtagacattttcctgagtgtctattaaacttgtatactaggtgtatttatggtcataatccttcctttgcttttttgaagaatcactacggttgtggctcttaacccctctcttgctcgtggaatgaccggcattagaatccaagatcttagtttttatttgtcttggagccacgctatatccgatctgtgccacaccgtatttggaaaaatagttctgtgtaggcgcgagaccggaggtagtatgtgttgggttttatgccctnnnnnnnnnnnnnnnnnnnataatcagatttacttactaatatagatcagaaataa

SEQ ID NO: 60175 - DNA, 792 bp, Cannabis sativa
aacaaattaggatatatgcataccatacatgtattttttttttttttgtaaaatataacgtaataatattttacaatcaattaataggttaaaggtgctgggtttaagtccataacatcttctttttttacattcctcacccaccactagtggctttgcatacatggtaacttagttattattttttgtcgtgtatatacatattatgataaagtgctattgccacatgttaaaaaggttattcaaatattcaacacgttgtgtcgttgtcactgtggagatgtaatgtcaaccacaaaatattgtcaccaaactcgtaaaccaatttaagaaaagaaaaattcataaacagtaattttagtatttatttattttattttattttattttttgaaatttttacttaaaagcactacaattaatttctctacgctattttttaaaaatatcaacaaaaaccactgtttaattgtgttttcaattttaaattttcaaaaataaaaataaaaaataatttaataaagtttgactaatgttttttaaagttatttttaatttttcttactaaaaaaccttcaatattctacaccataccacaacatgaatctaacccacctcgaacctgaccctggaccccaaactcagacccttacctcaatcctgatcccaggtgcggactcagacccaaaccctagcccggacacgaacccaaacccaagacttagaactcgagacctagacctagactcggacctaaactcactccaaaccccggtctcgtgttgatctaat

SEQ ID NO: 60176 - DNA, 576 bp, Cannabis sativa
  modified_base (172)..(172): a, c, t, g, unknown or other
ggccatgagtcaaaggtctcccagcaatgtacatattagctgtggggtcttggcttctgggaagcaggatcgaattcctttctatgtttggaaatgtaatctatcgtcaaagaatatttttactttataaacaggggatccctatattacgacagtatttaaaatgaaagtntttattttgaatttatatcaagatttaaattaaaccacatttttccaaaatttatagaatagtgataataagttttttaaaagcacacacgtggcgtccctgggggtcagggcgttacactttttttttttatctttgtgtggcttaaaccaaggtaaatggcttcgtacgtggatcagttgaaaaagataaggagagttctttttgtgacaccctactaaattaagcgtgttatcatgatttcttaatgttgagcactcctatgctgatcaaaggatttatagaaaaacgtgaataatttaaatttttctaaattaagctttaaacttgaataagtaaatactttacataatctggaatcctctttttaaaaatacaactggtttacaaaatacttagttacg

SEQ ID NO: 60177 - DNA, 1057 bp, Cannabis sativa
tggcccctacctcgtcaatgttgattgtgtatttagggagggttactctttttttttttaaaaaaagaactacatgttcatagattaaaaaagtcgatgggaatcacagggggattaccctccccttgatacaaaacagccaactcactagcaattttagcgttttagctacaccatccgccaaggtattaaaactacggttaataaaaaagaagcgaactacagagagtactttaattacagtgacaatagaataaaataagcttgacaccttccaatctggggccctttttttgcaattaaggattgaactgcaatctttgaatctgaaagaatatgcacttcttgccaaccacccttgactgcccaattcaaagcaaggagaattgcactgagttcagcttccagagctgattgtgcttgaattttttgagccttgacatactggctaccagtggaggagttaacagcaattgctgcaataccagcagttccacgcacccatgaagcatcagtgaagaaaacatggctaacctgcatgatatggggattcaaaggcactgcaattcctaggcctactggtgtcgaaattggctcaaaatcctcacctctggatggtggattcgagtgttgaaactcctgaaaactgttatcgattcttgccaaagcagagatggggttagcaggattgttgttaatgcttaaggcatttctctgttgccagatttcagagaaaagacaaccaatataatatggtgtaattgtataatctattatttttggtatggtaattctaatgattcaatactaaatatattacactaattatgataccaaataaaaataatctgtttcataaatttcacattttatattatttacattaataattaataataactaacttatgatataattatagatattgtcaataaataatttatgattaaattttaaaataattaaaacattaaataataagagagtatgctgaaataatgtttagtatagtagtggagagtgttatttgaaagtaggtggtcacgagaataattcc

SEQ ID NO: 60178 - DNA, 1289 bp, Cannabis sativa
attgtgttacttgaccattttatccctaaaccttaaagttacttaagcttgaaataaaaggtaaaattagaatttcaccttaagttgggttttgattttagtggaattagtaggcttttatttggctgttctagctgatttgattaaggaataaaataaaattaaataaagaaaatgagttatccatttttagtaaagttagaaatcaattctctcccctaaaaacctctatctttttggccctaattagaaaaatcagcacaaccaggtccttttcttcattaattcttagaggaattcagtaggaattaaaggaaaattagagagcaagacctaaggtaaatcctaaaacacctttctctttggtttttgggagaaaattgttagttggagcatgcaattttgagggttaggttgtttatggtttgatttttgggttaatttagagttttttttgttgcttgttggattggtttttgatggctggttgaggtgttgagtaagatgttgttattgctagaaatatatttatagggatgttattaggtattctagagagttttgtgaagtttggggttgatttgagttaagaattgaaattctttagaatttctatagaaaaacggttcattatatttccaaaaatggtgaacagttttcccatgcaggatctcaggaaatggtttaccatttgggaattcggtggaccagttgaggtggttttcaagaatcctaatttttacattttctcgatatttaggttattgctacattatttatcaatagataaactttcaatttcatgtttaagttcctgaaaacgtttcagcaagttacttattcattttacataaatgtgacataaggcctccgttcaacgagcgatattttcattcaggttgaccgacacacttgaatctagaaatgagataagattagtataagatatatttatatatgtgtgcatgtgatatacatgttgaattatatgattgtatactaccaatactagtacggttgaagtacgtagtgcattggtacaatatattattaagaggatatgacactgcgttaccaacgttagtacgagacgaggatggagtgtatgtggtatgacaattagttatactcgaggtacaaacaaaccctaccaacaaatgtattagaaagatacttggtgcatatggtttagagatcgtaccttcgttaagaacgttcttgattcatatgttaagccttgtagataggtgtatgagtgcctagttgcaagttggtattatgcatggtcg

SEQ ID NO: 60179 - DNA, 2138 bp, Cannabis sativa
tttttttattttcattttccattgatgttatttgattgagccttgtggataatgcttatactaagtgtggaagagaaaaattgtcgtgtctattcaatattttttttttctccttagttgtttagttatttattttattattgttttttagtttatattagttttttttttcttaaaaaaaaaattagtgagcatggttttagtaaaattttgttgacaataattgttcttgtttgatatgtgactctattttgatctcttgtgcatggccttttaaaaaataattgggttgatgataaaatttttgattgtgtgataattatgattctaggaaaatgataaactctcataatttgtgtgcttaactcgtaattaattactgctcaagtttaatttttttaagctttaggacaccctaaggactagcaaaccagacttgtctacccaagggacatagggaaaaatgttggaattttatgccctaaataaaattcaattttattgtaatcttatttactttcaataaagatcaaaatcatatcttgacattgtcatatgccttgttcatatgttttatacatgattatatgtttaatatataagttctattaaatctcaaacatatagttattcacacagtgatgtcatcatagtggaatttatgcttcaaatataaagtctcaagatttatcagtgcacaagatttacactgacatgataatcaataaggtgtacttacacttggataggtggaatatttttttaaggtcattagtaaagtaaactagcatcaaatgtatcgactatacattgaattggaccgatattgacaatgaaaaagatatcataaacttcccgttatatattttctaagtcaatatcacttagttgatgatcgatcatttgatctcaatcttgagatggttaaagtttagctgaaatgtattgcatgagttctttgacttgttcgttacaagcttaccgtagaaccagctcaatacttacatcttgggaactcggtagtgcaattgactgggagttttaaccatagatatgaacatttatagcttctataactatttagaagtgaaatgatgattttcttagagcttggcttaacatgataaatgatagagcgctcatttcagtatttatattagtttcccgaaatatcatttacaagtagctaagtgttctaaggataaaatacattgaaggtcaaaacaataatttttctatacttaatatgtaaaccatctataaaggatcaatgattgttgtgattgaaatagtggataattcatagcatatttggtatatagagttttctatgtaatcatgagtgcaatttcaaatttataatagagtcgtgaagaattaataagataggaaatttacccgataaatttcaaatctacttattaggagcttggttaggcccatggttcccacattgtctgagataatatcatcttgtagactcaattaattagtttaataagttaattagaattcgaaaatagactttatgtcttatttgagaattttcacaaagtttgtgtaattttgagaagaaaagcgaaataggaatttatttgttaattattactctttgtgtgtctaattaataaatatatttaaattatattgtatttgataattataaaataaaaattgtatttaaataattagatgaaataagtagtaaaatagaaagagacacattgtttcatttagatgagataaagtgacaaaaatctaactctaaggctcattgtatgattcggccctacacttgatttaagaagtccaagtcttttatttcagcagcccatttcatctaacataaccctaagtgaaagcctatataaggaaagtaatgagaagagagatctaatctaacctaattcaatgtcagacaactctattctcttctttcttttatatttcaaatcaaatgcactctctttctcaaaattttgttctaacggtgtggaagattgtgatgaacacaatcgaaagagaagaagatccaggttcagatattgattaaactctgctacaaacagaaattaagggtaagcaatctgaatagaaggaaacataatatttcgctgcatcaaatgtaagattttcta

SEQ ID NO: 60180 - DNA, 805 bp, Cannabis sativa
gtagcagtatacccccttatcggtcctaaagctagtgcactcttggtctgcggtgtgcatcttgatttggttgtaaccggcatatgcgtccatgaaggacaacagcttgaatcctaaggtggcatccaccatctggtcgattcttggcaaggggaaataatcttttgggcaggctttgtttagatcagtaaaatctatacaaacccgccatgtgctgtttggctttggtaccagtaccggattggccagccattctgggtaatatacgttccggatcatgccactggttagtaatttgtccacctctttctctagggcttcagcttttaccgagtggaggggtgtcttttctgttgaaccggtggcatgtccgagttgacattgaggacgtgggttatgatgtgggggcttatgccggtcatgtcctcctgacaccatgcaaaaacatccgtggcagcccttagtgtctttattatatattctttttcctccggttctagactttttcctagccggaggaccttggtggggtcgaggtcgcacactgacacttcctcgacgtcctccatggattctacaatattttcggatcccacacggggatccaactcatcttcctttgccatttgtggctcaataatttcacggaccattaggacgggtagatgggcagcaacgtattaacattgcttggcctctccctcgttccctcttacggttcctatcctagcctcttgagtagggaacttcagacacaagtgcctaatcgatgtgactgcatcaaaatccaccagggccggtcggc

SEQ ID NO: 60181 - DNA, 1660 bp, Cannabis sativa
tattttaatgggtgttgtttctttaacatttttagtatttttttttttatcgttttatgaattttttaggttttaaaagtaacttgaattttatgagtgaaaattaatggatttattatttttatgactaggtgatgttggaggatgaaaaaactcaccaaaataatattttcctagttttgaaaatccatgaagtcccaaaacttgagatttggcactgtagcgaaggttagaggttcgtcgcaacgaacaaatgagaagcttgcttgcagggcgttgtggccgcggcgaagagaaaggcttgccgcggcgaggaagctgtggccgcagccaagggagaggctcgccgcggcgaggacacgattctagcgttttaaaattttatctttttttttttttttaaaaaaaaaaagaaaattgtagatttttgaggggatatataaaggacttttagggttcgatttttagcacttttgaaactgcatttttgaaggagacactcagagagagagagagagaaagagaagaagtaggagattgtgacaccaattgttcatcatcattgtttattttcttctccttaatcttgcactttttattatgattttcattatataagttcaaagtagttcctttttcgttaggtgttatctcaaaacccaagacatgaattcttaatttcaatgatgaacgttgtttcgttagtttctaatatattgaattggttatattttttattctcaatgccatgattgttgttttaatcttatttataggatcacaaaattaagttttgtttcaatctattatcaacttaggattatgttaacttagaaaccttccctggcgacgtggacactaatgttttacacgtggcaagaagaatgacatcacggagttgagtagacctgagtcatagtagttgacttggcaagggaccctagttgggagctctgagatgaaagtttagacttcaataacttgaatctaactcacaacttgcttctcgaaagccaacttgagcacataggatttcacatggcccccatgttgacattctcaactagggttttaatttcctggaccgttttagtgcaaatgggccaaactttgcatggaaacattaactatacatactacaaacatatttgaggcatcaaaatattagttcatttttgagcacccggagcaaccggtcctgggcaccccagcgcccaagttgacaatttgtcaatctgtgcaccttccaagtattcgatcgatgattcgactttttcatcttctttgtcttcatcaaaaatgaggaaatatgtactttcagtgaagaaacaatacttcctgggtaccaaaagcaaggcccagtgcccatgttgaaacctggggctggcccaaggcctaggctgacattttgtcaacctgggccaattctgatgatatttttttagaactcttctgagcatcttcatttttcttcaaaaaatattatgattcaactatttttggggaccaaatggaacatctaaagggccataactgggacccagcgctcaagttgaaacctggtgctgggcccagcacccaggttaacatatcctcagcctatatgtcaacctaggctgcttccaataaagttctcaaaaaagtgtttcgagcatttttt

SEQ ID NO: 60182 - DNA, 776 bp, Cannabis sativa
ttcttctttgcaaagaataaaaaaagttatagtaatacatgaattataaccttaaatatgtataagctctcttttatcatcaataagaagctagaataccaatttgtttgtgataacaagaatatgatatgtttatgtttatgtgcagtgaaatggagtaacatcatgactgataaatagtaactatacacattgctttaaagtatttttgcacatgcaatttgttatacctttaaataagaatgctagctgctatcgattaagtgaatggagcagactcaaatctgccacacctctgtgcttttgtaatgatgaaaaagttccacaataaactaagcatcaacatcctaatcgttcggcacaaacaaaatgttcaaaataagatgtactcaagatttagaaagttgtgcaaagtttaagaccattttgtttagcacaacctataaactattaacttgtcaagacatgttaaccggtttactgaatgaaaacccacaactcaaagcaaaacaactttcaactttgtacgatataaagcttggttttcactcaaggtatttccttgtagacaattaaattatttacttattaattagtaggatatacattatctaaaaatgctctcttacttgcaagcggctatgcacattcagcatgaaatcatggaaatgaatccctttcttgctccaattgcatggcctgggacaaaaacaaaatgaaaaaagattaagtatgaatgcattaagaataaaaagcttaattgagcttgagagaac

SEQ ID NO: 60183 - DNA, 1142 bp, Cannabis sativa
  modified_base (46)..(60): a, c, t, g, unknown or other
ataaaatggtatttctgatctttattaactaataaatctgattatnnnnnnnnnnnnnnnatttagggcataaaacccgacacttagtaaatgtggtacagaggtcgtacttttattaaaaatattcttgatcatctgtaaagccttgtagataggtgtatgggtgtctgaatacgtgtcggtaatatgatatatattatatgtttttcttactgagtctgttgactcacatatattgattacatgtgtaggtaaatgaaagactaaaattgagcaccaatgagtctagagcttagggatggttgtacatatcaggatgttagacctagagagttcgatctcgggatgactttggccttcattttgtagtcgttgagcaacaattttgtaattgagtattgtaaactttatacatgggatcccgagttttatgtacggttataaatttataaaagtttaaattgacacattttttgagaaatcctttgattagcaaaggtgtgcacggtaagcagaaaagcactgtagcgtgcctaagcaagtagggtgttacacaatgtgatctattagtcctcaaaatgtaatttaattactaattggattggattattttttaattggatatccaattacatacctaatttttaatattaacttaaaaatatgaagaaaaatgcgtaaaaattaaatatcaccctttatttaggtttaatactccataaaaatatcattgttatttgttacaaatgtaatgcaactgaaatattaaaatatgtaaaacaataacattactaagtaataaaataaaacaaaacatcatgacaacaaatatacaaaataaacaaatgttgcaaattcaaccaaaaaatactaaaaatataattcaaatatatactttttattatacataaataaatataaataattttttaatgtataaatgtaattgaattagatgagtttttaattagattttgagaatgacatccaataacctattcaatccaattagaatctaacttttaacatccaatccattctgattgtaattggatatctaattttttgtaattgaattggattggaatggatattactcacactcagtcaataaagccttataatctagtagcttctttaaa

SEQ ID NO: 60184 - DNA, 528 bp, Cannabis sativa
taattattaattaaaataaaaaaactaaaatattaaataaaactaacactacgtaacaatcacctagtattatataaaaaccccaaagataaaacgtattgctagtaaagactaatgaaaaattctttatagctctttatttcgtactaaaaatgtttaattaattatttactacgcgtataaaagaaataatcacacataaaataaaatatataaatttatttttgataatataaattactcaaaaaaaaaatttataaataattttaaataagtgtaacataaacgatcataacaaaaatttgaaaaaacccattagcattagcgtgctttataatttctattcttgccgagtctctacttaattatttaatattattattagacagtattaattagttatattttataaaaattattaaattaaattatataaaatttaatatttaattataactagtaatattatattttaaaaaatattaaataccagtaatacatttttaaggcttctccttttgttatttt

SEQ ID NO: 60185 - DNA, 1189 bp, Cannabis sativa
aatacgaataaggctctcaagacttggaaccaacaaagttttgaattttgtgataggaagctgcaggagatgaagcagaaactctcgctattttagaatgagcctgtctctcaatctttattggaggaggaagcgactattcaactagagattatggagttggaaggtagaatggagcctgtgtggaagcgaaaattccgtgaatgttggctgaaatttggagatggagatatgaagttattccatgcttctactatgatctattaaagatgtaactgtattggatgtattgaatccatgtctgggatttagattcgagattaaggtatgattggtgagtatttttagagaaattttgcagaaatctatcgatctacaaagcctattattgatgatgattttgaaagtttatttcgagatcttaatacaatttctgaggaggaaaataaagttcttagtagtattttgagtgatggggaaattcgtgagatagtgttcatgatgcatcctttgaaggccccaggttcgattgggttccctagtattttttttttcataaatagtggcacattgtgggagaacatgtgtgttgtatggttaaggagttcttccgtatgcgtattcttcatcaatagttgcatcgtactttcttatgtttcagtctgaaggtggaaaatgttgttgtgtttgaacagtttcggcatataagcttatgtaattttggatacaatatcttttctcgcattttaataaatcaactcaaagatatcactgatagacttgtctctcccaaccaatcaacctttattccagggagatggattgttgaatgttctcttatggcgcagtagatccttcattccttaaaagacaaaaaggggaaaaagggtcttatggcagccaaaattgatatgaataaggcctatgattgcatcgaatgggacttcctccatcgggtgctcaaggctaatggttttagtgaaaaggcttcttatctcattatggcatgtgtgacgccagttattttctcggtcctacttaatggcactctgatgactcccttcaatcctaattgtgggctcagacagggggacccactgtctccttttctatttatactatttagtgaagtcctctccaaactggtgttgagagcagagcagtgtagaggtatatctgtgattagcat

SEQ ID NO: 60186 - DNA, 995 bp, Cannabis sativa
ttttttttttttgattttttttctatctttttcacctgaaattccaattaataaatgtaaaactatttgattatttataatgaacacttggaagtgatcagacaaaagtacccaaatggagatcacaacgttctacacaagaaatattttcagccgtgatttcagaagaaggtgaatatggatgtagtaaaagtttattattttaaatggtgtttgtcattctttgataaggtatttatttttatagatatatgacttgcacaagtttggatcattagagaatggcaaagagtttttaactttagcatatgagtttgatcacttaggtacttattatgaaggctgtattgtgaatggagttcgattatggctagcaaacaagatgagaagaggagcacacaaaatagttgagtgcttgtggctgaaacataaggttttaattattatggcacacttgaagaagtactaaagttaaccttcactagtgtttactctgtcacattatttaagtgcaagtggtttaatacagatccaatacggaagaaaacaatcattgagaactatatcactagtattaatgttaatggtgaatggtataaagatgactcatacatacttgcaaatcaagcagagcaagtattttacctcgatttactgagaggaaaaaaatagaaaatagttgagaatgtaaaccatcaacaaatccgagacatcgtggatgatgacactaatgtcgaagttgatttggtacatgacacaagctcatcaaattttgttttaactgttgatcttggagagttaattatgcaacctaatcaaccttcgattaacattggcactgaacaaaatttgcatgttaacaaagaggatcacaacatggacgaagaagaagttgctgaagaatttgacgataaaattttagttgacctttgtgaagatgatgtgaacaataatttaattaataatgatagtgatatggatgattaattttcaga

SEQ ID NO: 60187 - DNA, 1181 bp, Cannabis sativa
atcttgggttaattgttaatttatctaacatggagaacttctattatgatcatattatatgtataacactttttctatgtttaatattatatgatatatcaacttattgttgtatttaacttgtactatattcttccaatctcatgatgtgtaggggaaattataaagttaatttaactttgacgtgcggctaattcttcaagctattaattaagtgcatccttgatatgtaacaacaagaatttcaaatgatatataaactttgtagaatattattaatgtccaatgtgatatagtagtcatcacattattaatactctatatatcactacaaaattttttgctttcagtaacaataaattttttttaaaaaaagaactaattataagttgttattcctacgttgcgaataaaaattccgtggctaaaaatattattagttacaaaaatcacaatttgttgtgactaaatttatttttagtcacaatacttgttgtgactaaaattaaattagtaacaacttgtgtctaaatattatatttagtcataaataatttttttacttgactaaaagttacatttagtcataaaatttttttgttatgactaaaaaaattactaaaagtgatttttttttagtgtatattgtactctataaattattcttgttttatatgtgtgcatataaagttgaatatttttttttttttttacaaaaactacgtcatttggtgatgattgtaacttccttaattattagctcacttttattatcactatatgcatttagtatttcaaaatatattccaatccacataattagtttatgagtaataatatgggcactcaaattagacatcaaaatttatacacatgaacgtgagtacatttttttttttaaaatgtaataattggttgataaaaactaatatgtcacacttgatacatgttgctttaatgttttgattcccttatgacactataaaaaaaaatcatacttttagttacaataaaacttctgactaaaagtaaaaaaattgtgattaattgtaaattatcattccatgttataaaaagtttgtgagattttaagtcacaatacttattgtaattaaattaaattagtgacaatttgtatttaaatactatatattttttttttttttgaaagaaaatggtaa

SEQ ID NO: 60188 - DNA, 1030 bp, Cannabis sativa
catctgcatgttaagatttaagattagcttgctaattcattttgaagccttaagacaatataacacaaacatatgtagttttatgttcagaactgcgttaacaactaataagatgatgatccatttacagatttgttttgggcggttacaatggtcagaacgtaatgtcttctgttgagatttttgaccctcgtcgtggctcttggatgatgggggactccatgaatgactctcggggctattctgcaactgctgtgattgaagatacaatttatgccattggcggcataaagggtgacaatgagattttagagaccgtaagtttgatattttcatttctacagaaaataagtgacacctttcgtcttagcaaggttttgatacagaaaagcttgaatgtacaggtggaatgctacaaagaaggtcatggatggcaaaagactaatctcaaagccattgggaaaaggtgcttcttctctgccattgttttgtaaggttggagactgaaagctggtgttgtctaacaaactaacacgtccggttgcagctgattataatcttaaatagtattataacaagtacaaatactaaagctgaaaacaaatactatccactcgtacttccacactttaaaaaatatggtgtttatataaatattacttaaaaatagctatgtccaaacatgagttactttgcaaaaaagaaaagggaaatttggaattctcaacgggcttccgtatgttatcattattcattatcattacaagcaaatcgcttactgttaattcattttaatatggaggggaaatcagcgttgacataaggagagccagccattttggcaaatggtgttttaccttctctttttaatttggtgttgcagatgctaacatatatttctacacagtaaaagataacgagtgttttttatggtgcacccctaaaagtcctcatcgtgtttttttaattgtggttattttattaatttacaaaataatttattttatgtgtataaaaaaaaaaaaaaaaa

SEQ ID NO: 60189 - DNA, 874 bp, Cannabis sativa
tactgaaacagttattctgtaagtacagaacacaactctataactacaaaataaaaccaaatagtgcagaaaaataaaaacacacaaggttcttatatgtggcattactaattcttacaaattgttactagtccacggggctacgtccaaagataagattcattaaatagatctcaaaatgagaaagtaactgacttatgcataaatagactctttcttattatatgtcgtaagcttgatgtattccaccttctaatcgaatcttttttaaaattcaagtgctcaaacttccttcgatctccttgaagagtgcttgttttctccagaggcaagacttgaaaagtaatcttttgaaagcttatagaaccttctcccgaaggtagcaccgttgttctttttttttttttttttatagacttgaatacaaactcaagataatacaaaatacatataaacagagtaagagacgaacacactcttctctacgaaataaagactctcttttttaaagataggaatacaatttaaagtgtacgaaagagatgcacgacctagctggtataaggtgtatttataataaatatacaccttattgacagttcatacacggtctaaagaagaccacaactcactagacaattgtgtaaaataaatcttcaatcataccaagaatttttatttctgtacctacaaaattgtgagcaataagtgcgactttccttttatagaaaaggaaaatcttgcttccattttcttcgcaagaaatctaattaaacatattcaaaaactcacaaagaattagatattcacagctggaaagataaaaaatgatgagtcatcaaacttactatttacaccttattttccataaata

SEQ ID NO: 60190 - DNA, 1955 bp, Cannabis sativa
  modified_base (656)..(657): a, c, t, g, unknown or other
  modified_base (871)..(873): a, c, t, g, unknown or other
tttatacattaaacataatcatgaaataaatcaggtgaatcatgcaacgtagaataatttttgatcttttattaattagtaaatttgattatattaaaataagtttaatttagagcacaaaacccaacatatatatcgttcccacgaggactgactatcaattaccaatcgattaattctttgtttccatttgattaataaaaatattggagaaaagtaaataaaataacatagtgattaaaatttagagaaataatgatgggaaaaataaggattattatgatctctaactatcttttattttactttctaaggaaattacgcaatttttcttcttcctattcaattgacaagttgaattaagtagttcataatctggttaagactttatatttttatggtaaaatttaatcataaagaaaacattaaacaaagcaactcataaaatcgtacaaataatctagatactttcgtcctaaattaatctgcatttttaacatttaaagcatattcaaatctcacttttcagaattttaatttaaactcatagataataattataagtgatcagtcaataattgcaaaattaaattaaattgcatagaatttaattaagagaagaagatgacattgaataactacattaatccataaannaaattcaagtggttcacataataattttttaaagaaattagctcataaaggtcattctaaaacaacaaagattcaattaaaaatataaaagacaaagatagatgagaaaaaacactatttggagtcttccaaaggtgtcttctgctcgtaaccttcctcatatgctccaaattggcctccaagctcgattgataaaggaaacctagctccaacnnnttttatagacaaaatttgggaagtttcccattttttcgctagagtcgcgacattggatagagagtcacgactctcttatttttcttattttctactataatgactgatagtattttggtcataactctctcgatattacttagaattgaacgatttaagatgttttggaaatttgaaagagagatctataactttcattcagaatgtttttcgtaaaagtgaatggatcttagtcaaaaattagcttgaagcttcagactttattttcaatgacaaacagagcgtgttgaacatccaaaatgtagaatttttcacccatggtatcttaaagctctaaaattcatgataaatccataaaattcatattatttaacatattttctctcattttaacccacatgatatatgtgaccattaaaacctaaaataaaaagaattcaagcgtaaacctgaataaaaacaaataaaaactactaatataaatactaaaatggactttaaaaattcataaaaataaacttaacaataacactgctttgtctttgtagccattagatttcttgcttcctttgtattatttcttgagtgttcttcctttagcagcaagaagtccttctccagtgttatcaaatctgtcatctccacctttcttctaaatttcctttgagcttagagctactttaacttctgtcatggtaagaggatatttaccatacagaattgtatccacgaaatgctcataggttcttggcagagaacttaatagaataattggttgatcttcatcatcaattttaactccaatattgttcaggtctagaatgatcttgttgtagtaatctagatgcttctcaattcttttgactcatccattctaagtgtgtaaagtttatttctcaaatacaacttattggctaaggatttaatcatgtaaatggaggaaaacttaccccataaacctaaggcttttccttcatcaaaaacctctctcagtacttcatctcctagactcaacaatatggttgttgggttttatgccctaaataaaactccctttcaatgtaatccattttattcaacat

SEQ ID NO: 60191 - DNA, 1581 bp, Cannabis sativa
taaggaaaagaggaatgttgattacaattaatgacaataaataaaagatttggacatccacataattaataatatttataacaattcataattaattttatcaattttatcaaatatgacaataaaaaaattatattctctattaataaaaattattttatcctttcatcttcttttaattttatttttaataaagaatctgatttgaaaattaatattatattacaaagaattatttacatatattattaaaaaaaattgtagcataaatacttaaatttaatttatagttgcaaataaatatgtaaacttaattttttgtggtaataatacttaagttataattttgaaacttctgtaaatacctagctgttaagtgttaagtaaattaccacgtgatttggtttaagtcattaaatttttattttttctaaaaaaaattagcttaaatataccaataagaaaatgataataacttaatatttaatggtcaggtagctacagaattctaaaaatataacttaagtattattacactgaaaaatcaaatttaaatatttatttataatcggaagttaaacataaatatttatgccataaattactttagaaaaatattattgttcttaggtggtttgtgtcacacgttatttgattttttgtttttttttgtttttttttttttttttgaaagaacacacgctatttgatttttgtttttgaaaaggtacacactatttgatttgatgaagattgaagggtgtgttttcacgaggtatataacgaatacgtgtcccaagacgtaaaaacacttacttgactgaccatgaccaattgactctggaataattatctatttacatacagaaaattaatatacattaataaagaaaagaagttatgtttacagaaaagacacaataaacgaaaacccagtatagttattttcaggcaatttaaagattgagttgattggtttcaatgaatttggtacaattccatttgaaaaaggagaaactactaaataaactttacgtaaagccacgtttctatttgactgcaaaagctagtaaagattagacactatatagtaacacactaacaatttcttttcttataaatgtcccaaatatatcaaactccttaattaatataagagaatgaacttttgaatgcaccaatgtttcaggggttgcctccccgtgtatgtacatgcctctttgtggcttttgtctttttttaaattaagttttcaatagtttctcattcaagaaatcaaattggtttttgtccattgcatattatatatattaagttgggctaaattaaacttgagttggtttagtacatctgactttagactatttaggttgttgaaaacaaactagcctaacatttgtgctttataatattttatgaattaaaattagtctatttaaatgcttgtactcgtgtttaataaccacactaaattttagatacattattcttttttttttttttttaaaaaaaaaaagtgattttagattaatactataaattagatctcatggtctatacataaaatgttatctggtagtt

SEQ ID NO: 60192 - DNA, 8257 bp, Cannabis sativa
tacatgtcatggcggcgcgaccatgtcatggcggcgcgacctggagtgttcggtctcgggacatcatggggttatcattttgtagtcgctgtacgacatgacttttgtattctgaatattttataaaaagtttattaacgagatctcaacacttgtaaatatttttataaagttcataaagtttcatatttaatactaaaagtttaaattagacacgattttcaagaaaattctttgattagcaaagatagcacttcaattgaaaaatcattgtagcgtgccttagcaatagggcgttatagtaaatgtcctaaatacgtttcatcatcagaaaccttttacttcttattcgattgagtcaatgctactctaaataattcattatttaaaataacataaaaataacaagacatcaatcttgttaaaatatgtaaattatttataaattaactctacataaattacaaaacatccaaaaaaaaaaaatatactacttttattaatcatgtaaaagatagaaaaatacaggagtgctcttaatttcttttgcaagagagagagaaaaagattgttaaaaaataatatataaaaatgcacacttattgtatatatacaaagataaaaaaaacatagtttgagaaaaaaaaaaaaagagagaattgaaaaaaaaacaataaaaaagaaaaatagagagagagaagagaaagaaaaaaaaaaggtgagcaactaacttaaaagaaaaagaataagctaaagcttactaaaaaaatataaagaagagaaattttttttttgaagctttaataagtaaaaacacaataaaaaaaattaagtaggaaaagtataaatataaaaatttctttattgaaatataaatgtcaaatttagaaaaaatttaatatttagtgtaaattctccgataaataaatattgagctcaaagcaaaaagtttaatattgagtcactttaaattattccaaagattgccacaatagatacttttttgaaatatcaaatttagagatgctcacattttatggttctgatgctctctaggagcaaacttcttggaagttcatagaggataactgctactgttaatcgctctacatcatatcaccatctactgtcattcgaatcctcctggtattctactgtcatggacccagcagggattagtgatctttttgaagaatccatacaattgtcccaaagtgacttaacattcagcctcaatcctggcgaggtggatgaaccccaggagtccaacaaggttctattggggaagataatcaacagacataaactaggcaaagctgccatccagggatcgctcaaactttcctggaatgccataaaaggctggaagtggaaggaaattgagggaggcctgattcagttcacatttgctaggagagacgacgccatgaatgtgctggcccgaagaccatggtttatctgtggggctctggtggttatcatgccatggcctgcttggctaacaccagcagaagttcggttcgataaaacacctctatgggtaaatgtggaaagcataccacctttctattggaacttatctaatctcaaggagttggcttcaaaagcatcccctgtacacgaactcccacaaggcattgaagatgcaatcggtctgagtactctcagattcagggccacaattgatctaaacaagccaatctactctggtttttttcttcgcagacagaagctcaaagacctctggatccaatataggtatgagaagcttccaaaactctgctttaaatgtggacttctcacccatgaccaaagcacctacttcaaagtcccaaccattgtcaaagatgaatttggcaatttctatcccatgttcggagtctggttgaaaaacgatgcccaagaaaaatccaccttcaccactcctcttgcaaaatggtttcaagattgggtcctccaaaaacgcctgggaaccgatcctgtgcttcgaaaccagatgaaaattcatagggccattagaaatagcgaggaagctgaaatacgtgagtgcagaatgcaactccctacctagaaaagaatagtcaccgattccgaagatgaaggaagcgcagccacggcggagcaagttattacccaactcccgttggtttacctgccaggcattggagaggttgccccttttggcaataactccaaaagaatggtaattcaggacctgatcgatgcagcaattgaggcctcagatgaaacctccaaaagcaaggctggtttgggtaaacagggagcagcttcagagcagtcaaagaagacaatacggaccaacgagacagggacagatagcaccatttcccttcccagtatcgacaatgaaggtaacattgccctacactctgataacgttcctggagttagtacacagcccgaagagcacactgtcccttgtgccgaaagtagaagaaaggacaagggcaaacatatagccgttgggaatgactctaattttagacaaatcttgccttataaggcttcacctcttgggacacaagcccaaatcatcaattggccctctaaggaatgttgggcccaaccaaaggcccgtgagcttctaatgggggcccttactgtggacaaattccacagagaaccaactttgttcaatcccattttggatattgaagattttagggtccaagaacatctaaacggcccaaggaaaaggaaagggtctgatggcattattttcaattcccctcccaaatcgaagcccaatcaaaaaccattttcgcaagcaaggaggtggggcctttggaatatgaacacaaacttcctaaccttgatccactcgcaccagacttagagactcttgcagaaagtgttccccatcaattcgtgcctgggaagaaccccgaaaacctgactgcctctcgaaggggaagaccaaggaaatctattccaatcccaaattccacaagtccttcaccaaaaagaagaggcaggccgcctaaggtgcaagagggactttccccaaccccaaaatcattcaaaggaaaaaacaatcgaaggaagaagggagaactcaacacaacgatcacgagtctatgggaaggtaaaacaattgacctgaaggtggacctaaataaccacttcgtggtgatagaaaactcttcgaacactgtctcaaggtgtcagttaacagaaattcaagatgaaccacaacaaagtttcacatccaacaagtcggaagtggattttcgttttggggctacggagacttgcccacaaaagtctccagagtcgccatgaaaatcttagcttggaactgtcgtgggctcggaaacgccacgacagttcgacaattggcggctctaatccgtcaatttcaacccgagatgttacttctttcggaaactcgcattcctagcaataaattccaaagagtgtgcaacaaactcaagtttgatgatcatcattatgtccctcccgtggggctctctggaggcctggggctttgttggctaaaaggagtccaatgcaacattcttaaagcaaccaaatatgttatctggggtgaaatcacttcagatcctcctggagaaaaatggcatttatatgctacgtatggccccccaaatggaaacaataaagaagccttctggaatgccattggagactcgataatctcatcctctcttccaacacttctaataggagatttgaatggtacgctcctggattatgaatgtttgaattatgctaaacaaggaaattcctctaagtattcttttgacctgcgccgaatggttaaccgcacgggcctagtggatttgggattcattggacccatcttcacttggtctaaaaacaatagaggtctcccagttggcggagtaatgaagaaggcaagactggatagaggcctcgcttctacggattggcggcttcttttcccaagcgcaatacttaatcacgttacggcttcagtttcagaccacaggccaatcttgctggatacttacgggggaatcaattgtaaaggcaaaatgtttaagtacgagaacatgtgggctagagaccaaagatgtttttgggtagtcaaagaagcctgggctaaaagacttcatcagaatccaatgataaacttccatagaaaagtgaggaacaccagccgcaaactccaactgtggaataaaactcaattcaaacatctctcgcgtcaggtccaagaagccacttctgccttggcagaggctgaaagactcacacctgacaacttcgaggccatagacgagtcgaagaaacaactttctgaggccctcctcagagaagaaattcactggaagcagaaatcccgagtccaatggcttaaggaaggggacaagtgcacaaaattctttatgacctccacggtggttagaagaagaagaaactatattcagtgtatcaaaggtagtgaggatggggattggattcgtgatcaaaaggccattgctgagtgttttctagatagcttcaaggatctatttaaaaagcaccaatctcagggcccccctacactgaacggagtattccaaaatcggatagacgagtcacttaacgaagctttaaacgaaatcccaaacttggaagaagtgaagatggcaattatggagatggggcaagacaaagcgcctggaccggatggccttccccctagtttctacaatcaccattgggatactatagccccggacttccttgaaatgatcaatcattttttctgcaacattgagctcccccactgtataaacgacacatcaatagtccttattccaaagaaagacaatccgactttcaccaaagactatcgccccatagccctctgtaaagttgcatataaagtgatttccaagatactcgctactcggctacggagtgtcattcaagaacttatatccccgaatcaagcggccttcgttaaaggcagatgtattgcggaaaataccatgattgcaagggagattgttcattcctttagcaagaaaaaaggtaaaagaggattcatgatgataaaacttgatctcgagaaggcttacgacaaaatggactgggactttatcttgttagtcttgacgcaacttggcttcactcaccccttctcaagctggatcaaagagtgcatctcagtaaaaggaattaagctcctcctcaatggaacaatagcaggcaaatttactcccggacgaggcttacgacaaggtgacccgttgtctcccactctattcatccttgcagccgaaactctctctcgtttactgatcaacaaggaaaaagaggggaagctcaaaggattcaaactcaatagacatggaacctcggtaagccaccttatgttcgcagatgatatcatcctctttgggcaggctaccttgaaagaagccaaaaccttcatggaatgcttgtcattgtattgtaaaaagtcgggccaatctcttaaccgccagaaatcatccatattcttctctaaaggcgttgacagaaggaaaaggcaagagatatctcagtttttggagataaaaaagatggctcccaatgccacctacctgggccttccactattccaatctcagaaaagatcagaggacttcaaacctcttcaggaaaaagttcttaaaagagtccaaggttggaagagcaagcttctttcaaacgcaggaagagcgtgtcttattaaatcggttggctcttccttatcaaactacttagcttcttcggatgcccttccaaaagccaccgccaactcaattgacagaacccttagagagttttggtggggcgataaggaggacaggatagtgctgcatccgatcgcttgggagtcgctttgtaagccgaaagttcatgggggcctggggtttaggaccaccgaagctactaataaggctttccttataatatgggcgtggaaaatactcaatgacgactacagtctttggaaaaaaatcatgataggcaaatatctcaagcagcaacaatttcttgatatggagtcgaagccttcggactcattactttggaaggccattcttcaaaccagaccaactctcttgagaggcttatgcaaaaagataggggatggtaaatcaacttccatttggtttcacccttgggtcccaggaaacattcttcaaccccaaccccgttttgatgccactgaaggagttagtttggttagccacttcatcctcaataatgaatgggaggatagagtgagatcttggttccatcctgatgattcgaagaggatcctaaatattacgctccccaacaaccccattaaggactcttggctctggctgccggagaacaacgggaaattcagcataaagtcagcctatagaacaatcaagaatctgaattccgagtcagccatctgcgacatatggagaaccatttggggagcaaaaattcataaccgggcaaagatgctttggtggaaaattgctgccgattgcctccttagtcgaggtaaactccaatctcttttccccatccaagataaccgatgtcctttatgttcccttgaagtagaaacctccttccatcttttttgggaatgtcattttgcccgtgctatttggttcggctgtctctggaatatcagatcctcttcaattcccaactgtgggggatgggaggattggattcgatggttcaaaatgggagctaatagaccgcctaatgtctcaaattgtaccttcatgggaggatcagctactatctttgaagctatttggagggaaaggaatgacttagtccataatggaaaatccactccagtgaatcaactaatcatccataccaaccgaagactattggaattgatgcagcatcaagatactacgaccgtcgctcccacaatttggcttccccccctaaagggtggcacttgtgcaacactgacattgctatgggtataaataattcacatggtgcagccgtcttcagaattgaagatagtagcatcacccacatccacacaactcgcattatgcagtgtgatcctctggcgggagaactctacactctcacttggggggctgagcaggcagtcaaactaggcctcaaaaatgttatcttccaaagtgactcgaagggcgcggtggaggccatcaatggtgctctctccaaaaactcagatatgcatttcaacattactgatctagtgaatcgtttccttgattcggctaagaagttcgagctttgggaggcttgctggatcccaaggactgcgaacggtgtggcccatgccgtggccaaatgggcgaaccggtcttctcacgttggggagattgagccgtccaattttcacagtttcctgcatgtttccacagcagatggctgttctaatgactgactctaaagtagttttttttagtttttgactcttttagttccttttgttagtttgctcttggttgttttgttatttccttcctagtttagtgtaacctggcagctgcttttggcatgccgccttgttctctgtctgtttcttttgcttgctttgaggcataattaatcaaaaaaaaaaaaattagtaaattttgaacatatatcacattagtaataaaagaaaaaaaaaagaattggtcagtttgaaaagtgtaaatttcttattttgagtaactaattcctatatgttttcaagatatatttatttattttctataaaacaagaagagtaatttgcggcggaacccctttatattttaatttttatacacttaactgcttatcttttttttttgtggcaaaacccccttatgttttagtttttatacacttaacctccttatcttttttttttttgtggcaaaactcccttatgttttaatttttatacacttaacctctttatcttttattttggtggcaaaacccttttaagtttactttttttatttgcaaatttaaagttttagttagatattaccgttaaatactaactggattactactgtatcgactttgaagttttacttttacatatacacaggtgtatacagtggtcatccagttatatttaacggtaatatttaattggtgtgtcaaatttgtaaagaaaaataaacataaggggattttgccaccaaaaaaaataaaggggttaagtgtataaaaattaaaacataagaggattttactaccaaaaaaaaaaagataagggggttaagtgtatcaaaattaaaacataagagaattttaccacaaaaaaaaa

SEQ ID NO: 60193 - DNA, 1069 bp, Cannabis sativa
aaaaaaaaaatcctcctacgaagaattttatttacactctaaaaacttataaatacatcatatttctatagttttattttacataaaatatatatattatagtttttgttttctaatttttctagagatctatatctttctatcgatagatatttatatttgttgatgctttttcgtcaactagtctaagaagatcgtaaaaaacaagagaactgtgatgaattaatttggctaaataaaaccgtgataaataaaaagggtacaacatggatttataatagttcactcccatatcgcaatggtaatagggcgacatctactttatttttattaattgaatccgacacactagagttatgttctcaagagtgtgtggataatagtacaaaaaagaatttctaggcaaaattaatatcaaagcttatgggaaaaaaagctcatgggagacccaataccataaacctgataaacaatggtagtggtaacattcttgggaacaatacaccaatgggacaagaaagagaatggtctcttattcttagtaattgtgcatattaatgatgtttgagtaatggaggtgtggtgtcgtaccagtattaaaaactttagaaaaagataaagaaaggcaatctgaaaaaatcaagtgttcttagcagggaagcaagtgattcgtcccctttatcctagcctactactctctttatataagccttaggatttgtttaattaatgatcccccacatgtcgggttatcccattaataaatcttgtatcttattcccaataatgaataaacaattacaaataaataaaaatcttcttattatttctaggccgacatctcacaaacattggaaaaatagttattctcggctagagatgcaccaaattgaagtggagtgacaaggaatgtcacctctcgccttgggattcatgacattggtgagaagtgttggaaatatgtgttttgggatgccacatggactgtggcatggttctccaacatcccacacttacttacactactatcaattcccaagtaatgtgtgtactagcttgccttgtgagc

SEQ ID NO: 60194 - DNA, 893 bp, Cannabis sativa
tgtaagcatatttaaattaaattgaaaatataacaactattacaaataattaattaaataaggaaactacgtaccgatatacatagacaaatgggtcacaaagcctaaaactattaatcataaataaaatatttataatatttacacaataataaactatagataaagtctataaaataaaaaccaaatttaccaagaataaaaaactgtttacataacaataaattctaaaaaatatttataaaaaccaagactataaaatagataacaagtaaataatagatagtttaatttttgaaaaggtaaataatttaaaattggccaattattaattaactaaaaaagtaaaaaaattaaaaaagttaataagatttgaaaataataataataataaatatagtgcaagataataggaatcaaccataaataaaataaatttttatcacctaaaactaacatagaaagaataaaaaataaacagcattaaaaactattagtaattatgatagaatcataaaattaaaagaggaggttgacttttttaaaaaattataacatataagaacaaatcaaatatattaaatactataaataaatatgataaatacataattacttatcagcgcgataaacatcggccgataccattgagaaagtaacctaaaaagctgcgaccacccacaacaaagtcagaaagggtcaaaaggcagaaggtggtgagataaaaacacgaaatctaaccacaacatattcttttgaaattaaaaatgataaagaaaaatatacagaaataaaagaaaaaattaaaagaagaacatacatatatatatgcaataataaaagggaaaatttgaatttccatgcttaaataacccatatattattcccctaaa

SEQ ID NO: 60195 - DNA, 1203 bp, Cannabis sativa
  modified_base (806)..(807): a, c, t, g, unknown or other
ttcttttggtaataataaattgagaaaattactttatatatccactttattttatctattttaatttttacctttatttctatatttttaagatatacccacttttataaaatgatgtctctattatactccttaaattaatataaattatgtgctagatttaagtggagaatgagagtatattagacaacccactcacaaaataggtacattttaataaaatataatataaatgtatttttaattaatgaatataaaaaagaaatattcctcaatttatcccataataattggttttaggtaaatggataaaaggcccataagaagatgtagacctatctgatatagaaatcataggcctgtagagctgaacatgacatgcggcactgagtctagtccagatttgaatgtccattatttgataattttggtccaaaatgctggctacagtaacgacactcattacccattttactattattattacacaacacacactatattatcacctaaatatttttcaccaattaaattattgattaataataataattttgaaattatacaaattactcttgcattgccccatgtatctaattttgggcccatagtattattatagttggcccattttgcattctcttacatttttctcgtgctttctcaaaacaacaatatatatgcaatgcagcccccccttcactttgtcaccattcaaaaatttcaaaacaaaacttatttatttattttgttaatttttctcaaataaattgtgttaaatgatttttcttttttcttttttcttnntttttttttttattttcaaaacttgaaggaacaacattgaacatataatatagtttatttaatggaattaatagcacatattctttatctcatttagtcccgttaattgctacactaattacggctaatgttttcttttctttctttttttttttttgggttttgttttaaacaaatatgcctcttaaaagcatacaaggtatatagtcaagaaaaagtgaaatgtaaattgaacccaaaaatcaggattaatggaaggatagtgttgtgtaatttttctcccaaccaaaaaaaaaaaaaaaatctagaaaagtagtactagcttagatctagggaggttttatttaattttcaataagtcaaattaaaacagaggcattggtatttgagtgagtg

SEQ ID NO: 60196 - DNA, 923 bp, Cannabis sativa
ttttgaaaaaaaaaatgatgtctcaaagagaattaaaaaaaaaaatcataaaaacttagtaaaccaataaacttaagtgaaatagtatgtatagttaaaaaaaaaagagtataatcaataaaaagcctaatatatgaagttattttaattgtagtagttatgattttaaaacttaaatatatacatatatcatatcggggcgggtatctattccccgccctgtttctaactcgggtataaatctttaaacccatacccacccccgtctccgaaaattaactcccgtacccgccctatggtttctcattttatttctcacttttccttttaagctatccattgaataatttttcaccaagtttaatcctttcttcttttgatgccctatttactttttgtactgcttgtgttgtgttctttgatttttcaaatctttatggccaagacaaaagctataggttcatcaccaaaggttggttgacgctttcagttttttggcccttgagataaataaaatgggagagtagtaaattttaatattttagattgtgtactcatctttggactatttcttttaaggaaagttgagtttggtttacgtgttaattttttttttaaagttagcattttttttgtattaatggtctgcttttaaggggagtttatttttgtgatattactaactttattttaaaaattaaaaaaaatattttgattatctaaaatgtcaaagaaaaaaagattgttaggtcattttttttttagatattttagctgtcaaaatattatttaattaataatatttaatgtaaattaaatattattttcttgtgtgtttctcgttttatagtgatgtcacccaattaattacactgcgatcgcggtaataaacgggctacgtcgtatccacaggaaggtaaatt

SEQ ID NO: 60197 - DNA, 798 bp, Cannabis sativa
atttatatctcaaaagtttataagtgtaacaatattttaataacttttattttacataaaatagatatttttacttatattagttttttttttttaatttttttcttccaattcataagcttaagaataaacttatcaaacaaaaataaattgtatttcaaatttataacaaaaaaattaaaataaaaatttgtgaaattttattagaaaaataaaaaataaaaattatacatgatataaaaaagattatgaaaataaaattaaaaagtattgaaattaacacaaaataatatgagaaaaaaaaattgaaagtgatttttaaaaattattttaagtttgattttttttaatattgaagtatacttattattttgtgggatgccaataaaacttcctataaaaattcaatagaactgaggtcatgaaattccaatgaaaacaagtttcactaaggtgacatttggttgagacttgaaatgaatgaaaaaataagaatataaatgagaatgaaaatagaaatagaaatagaataaaataaaatttaaaatatgtaagaaattgaataaaaataattaatttttttctcgctttttattattattttaaattggaatagtcattcgactaaaataatagaaaaattattttattggaatgacaaaaaacaaccaaacaaatgaataaaatgaaagttttcttttttattccattttatttcattacttctaatcaaacaccacctcgtaaattcatcaataaattataaatttgttataaatattattaattatgtggatg

SEQ ID NO: 60198 - DNA, 792 bp, Cannabis sativa
  modified_base (36)..(40): a, c, t, g, unknown or other
  modified_base (75)..(77): a, c, t, g, unknown or other
  modified_base (128)..(156): a, c, t, g, unknown or other
gacactataagcatgaacaaatacatatgttctggnnnnnatagaatttatacattaaacaatcatgaaataaannntgtgaaccatgcaacataaattgcagcatctgatctttattaattagtaannnnnnnnnnnnnnnnnnnnnnnnnnnnnagggcacaaaacccaacaaagccctccttaccgaggaccaatctctgtgctgcagggtgttgagagccaaatatctgaaaagcaagccgtttttggatgcaacttataaagattctgactcttggttctggaagaatgtgttaagtccttagccatcatcaggaaaggggcctgtaagctcgtctcgaatggagaagatacgaatgtttggtcagacccttggctcgtccatggtaatgagttctacccgaaacccatttctccttgtcatgagaatgtggttaaggtggctaatctactcaatagtgatggaaattgggatatacccaggctcgaatcccttttcgactctgaaacgatttcttgtatccttaaagggcgaaggccctcgggccaggggagtgataggtagatttggactaaggaagggagcagaaatttaccactaaatctgcttatttgttataggcgtataagagagcccccgcctgtatggtggcgccagccttatggaacaaactatggaattctaagattttaaaaagacataaaatcctttggtggagcatcctttcaaatgctttgttgggttttatgcccaaaataaaactctatttcaatgtaatccagattatt

SEQ ID NO: 60199 - DNA, 1424 bp, Cannabis sativa
acacctaattaccataagtacactgtccaacgcgtataagtgagtcttgaacgttcttaactatagtacaattaaccataatattagcctatactcagaactctaatcacactgatgtggtataatcaatccacactataagtacaattaaccataacaccaaattacactcactactctagtgcttactgagatttttggaaacttattaagttagagcttaagaaatagtaaaaacattaaataaaatagataaagagttttatgtggtttggatattgataatcccaagtccacgaatcattatattggccttataagtcgtgtttaatatattacaatggtatttacagtataactctaactctgctctcttggtttctcttgagggagaagaaagcttagagatattttcacagagcttcggctattactttttttgattccccctttacgtataaataaatgggcatttataggctaaaatacaagcatggtcatgcccatgactcatctagggtttctacaaaaagcccataatcaagtacatatacactaaacatgtacatatgtgtatctgaatattaatcttatcttaattccataatcaagtgtagtagttaacctgagtggaaaattgcttaatgagcgaagaccttatgtcacattaacgtaaaactaataagtgtctcactaaaatactttcaggagcttaaactcataatttgaagtttccatattgataaatatcgttgcagtatgctaaatactgagaaaatataaaaactatggtacccaaaaattctcctaaatggacgaccggatccctaaacagttgcccaaaattctgggcaagacacatttatttgtttcccccaaattggtaccctttttgtattagagtttcccgaactcgagttttgcaactaaaatctaccctacacctgtttaaactctaccaaaattttcaggacattcctataataagttcaaaatctaaactacaacttagtaacaaacattaaacccataattaaaaaatacaattgaagctccaaattttgagtttttaaaactcaaacttggtttcagtcaactacaactgcaatatttccacaattcaaatataattctcaattaaaaacaagcaattaaacatgtctaaactcaacacaaactagagaacctaaaaactttttctcttcaaaactaccaagataaagagactagggttttaccttgcaatttttactaattactcttcaattacaacttgaaaacttgcaccaattagtagaatttgtctaaaaaatggttagtcttccttggtttagtctagggaagagagagaaatttcgttttggtttttgattaatataattttctcttgattattttaatgttttcagaatatatcctcaatc

SEQ ID NO: 60200 - DNA, 787 bp, Cannabis sativa
ggagaagttcacgcctgtaatgagtgcaaactaaaccactctaaatctgagctcctttcgaccaatgtaaaaccgcatgtgcaaatccgcctcaacatcaaccttcatcttgtgtaacatgacttggtgaaataacactgaggagaatgtctggggtacgacatttcaaaagttgtcgaaaccgctttctttcaccgtgttattcaaattgtactcctcaaaccgagatttgatatttgcaaaagcactggtgcctctatatgtcacatggccagtaaaatgctcggatcctagaactattagtcgtggagcaatctaaaaaaatatataacaaaaaaaaattactgatgccctcaaaaaaaattatcgacaaaatgtttacatcatgtcgatattctgtcgatattatcacacttagaaatgacagaaaacaatcaaatcacattgtcgacaacatatcgacatcttgttgacaaattatcgacaaattaggtcaaaaaattattgtacttatagtgtcgacattatatcgatacaccttcgacatcttatcgatataacaaataaattctttcaaaaatatatcctaatcaaatgtcaataaacaatcgacaacatgtcgataacctatcaatatgcagtaacaacacaaaaaattcttaagctcaaactactttcaatttttgtcgacattatattgataacctattgatatctcatcgataacattgttaaaacaaacagacaccactgatgaacatgcagaaaaatacacattatccaaaat

SEQ ID NO: 60201 - DNA, 1280 bp, Cannabis sativa
aacttcttaaacatgttctattacaaacagccactaaaaactaacaaaaatcttacaaaactaataaatttcaggttaggttttaccttagaagttttgaggaggtaagggttgaactcgttgataagattcggcaagaaatatgcattaaaatggtagaaacttttggtttttggacctggttcagaagccgcgaaggagagggagaaggagaaggtgatttgatgttttttgactttcctttttgcttatggttcctttttactttatttttccttttttgttttcttcctaagcagttattcatcctcaaaaggatgagccacatccacctatcccttctaaaaagagtgactaatctcttagggcaaaaagactaaaatacccttacttccccgctaagttatcttgtacttggccaaataagccaacaaccatttataagagaaattcaaaaatgggaggcccttgagcgagatgtatgggatgttcgaacagtacgagctgacacctctgcatgccatgtgatgaattggccacctactagatcaacggtcagatctcttctagcgaaaattagccctaaattcacgtgaatgaagagaccgcctataaatacccctaaatttcacgagataggggcaacacttaggagtctaaaaaccattatttactaacaaaaaactgtaccgaaattcctattgagcttcgtcttcttcaagaggaacaagaggaatgcagagtccaagtccataatataactacttgtaatattcatcatttcccaataaggctaataaaataggctcacaaaataaggatagttaatacctgaaccacataaaaagccttacattaattatttattattttatttctttcttaagctctaaatatttagtttccaaaaatctcgataaacgtatatatattagggttagatgtgtaatgggtcgatcgagtaatatattacagtttcttttatttaagttttgtttgtgtcggcctctatttgatgctactttgcggcagtttccaactgacacaaaatctacatatgtcatttttcaatcgacgtaatgtagctacagatagaaactaatgaaaaatttagaactaatctttttgtgtcgatgtttactgttgattgatgtgttgaccaaagcaaaaattcaattttttagtagtgcgttgacaatttctcactatcaacagtagtgatggtgaagcatttcgccttgtggtggttgtggtgatggtttcgctgtggtggtagttgt

SEQ ID NO: 60202 - DNA, 1089 bp, Cannabis sativa
cctcacttgcgtgagtatactacttgattgcgtgcacttgcgtagtaattaataattttcgcaacaaggtaaaaagacaatttaccccttttgcttacacattaagtaatctaaacaatttaggtaaaatggtctaaaattacaattccgaaaaattcttgacattttaaatgtctaactatgttaccccactagctcaaaagtactaaatcatatctaagtgactatataggccaaacattgtgttacactgttaccgacataaattatgaaaaacataaaatttcacatatatcataattaatacacttaaaatttaaataaatctctataattgtaaaataataattaaaagcctacttctgaaaataagtcataattatctgctaattctcataataaaatttagcggtcattacaatgttaaaccttacacatttcatgttcccaaaaatgcagatgacagaaagattttgaaattcaaatgatgataagagacagaacctctgacaaaactcaagaatctagaaagaaaaatagattccgattgaatactaaacatacgtgtacaatagcaactgtaaagactcgtaaagtaaattaaattctcgttcggagttatgttgagggagaaactgtcccatgggcctaatgaggacaagtcccattttattaaaaagaaaaatgaaaatctagtgtgcaataactgacgatattaaataaagcagtgagctcttgagtgtttaataccacggatggcggcatccaagataaattcacaaaagaaccaaaacataagccacaccacaacaaatttaagaaaagagacatctttaacccaacttaagtgtgccatacttggcaaccaagttacgaatatacatcaaacagtttatgtaccgaaacaacccaaaaactgagatatcaaattaacattgatcgactcaaacctaacagattttactattcgagataaacatatacatcatccaacccacacaatcaagtgatcgtgataagtagatatctaaatcattcagtgtaatgttctaatctgtaagggtgccacgtgtgtaattttataaatta

SEQ ID NO: 60203 - DNA, 2036 bp, Cannabis sativa
taaactactaaatgttatttaaaattattttttttctcacttttattttggaccattattagagtgacataatagtacatacttttttttttttattattatttcaagtattcacaccgcttaacaaaaaaatgtttattataaaaccagggaattaagctgcgcgccacttcgcacagggttcaatttttataagtttttatgatataaaatatagtatacttgttgagtgatataaattaaaatatagtattttgatatgtgtaagtaatagtattaaaattaaaaaaatattatttttaaaatatataaaaagatgatattttgtgatatatattgaaaatagtagaattaacaaagaaattgcatgtattaacataaaagaataaataaaaaaaaactatttataaatttattaaattgggtttgtgattgatggtgtagttctttttaaaaaaactatttagacctatttttttaatagaaagaaacaattataactactatttatgaaaatttttatattttgtttcatatataaaatgacaactataaaaaggggcgtcacaatattatctatttttaaaaattaaaaaaaaaatgagagatttatataaaagtgttaatgataaaattggtctattatatgaaatatttaataagagaactaattttaataaattatgtggaggtgatatatatatgcttaaatcataatgatggaaagggatgtcacgattcatatgactaatttcttctatatggaaatgtttatttgtcttactgttttgtaataattaaaatgataaataccgcatgaagttggttgtgcaatcgggtgattgttataattatatcgtgtcttgtacaattattataattattgaaaaattaaatttaatttatgattattttttttttgtatttttttaatttagaaatttatatattaagtatttttttttattagatgagtatataaatatattagataattatatataaagttgatctgagaactcaaaataataataaaaaaagattataactaattgggtaatatcaagtgataaattagccatgtatatttagaaaagtcaaaatgaatgtaagaatactttatttataatttggaagtataaattttttaatccatgtggaattttaattacaaaaaaaaaaagttactaagaagccatatttctcaatatttacaaaataaaatataatgatacaaagagtctaattgtaattaaatatttttactctaatcttaaaactttttcttcctaaccctcattaacaattgttaccccattcaaaatgctactgatgaagcaaagaaggagctccttgaaactcagctgaaattacaatctgatcctcttaattcagacctcaaagctatagaaattgatgttcgtataaaatatgggcagctcctgaaaggtctcaactcctttttgcaccaaaaatccaaggtctcttggattaaaaatggagatgacaacacagccatcttccatgctagtaccaaggagaggagaaggtctaacagtattctttctattgaagaccaacaaggagttcgaactgataaagcagatgagatttcagctgctttcctttctttttatcagcacctacttggctctaaaatggaaggaaggaggaaggttaacagaggagttatgatgttggggcctcttgttaacaaagaacaagcagatttgttgttgaaagaattttccaaagatgaagtcaagaaagctatatttgcaatcctggaatcaaagcaccaggtccagatggctacactagttgcttttttcaggataattgggacttaataggagaagatatcagtgaagcggtgttgtctctcttgcatacaggtcagatcctcaaagaaattaatactactgttttaacacttattcctaaatgtaagtgccctaatacagtaagtgacttccgtcctattgcatgatgtaatgtcatttataaaacccccactaaactcatttgttcaaggt

SEQ ID NO: 60204 - DNA, 656 bp, Cannabis sativa
aactacttgcaaatagatgaacaatatcagagctaaatttatgggcaatcatttcttatctcatatatataaaactttgctgagagtgaaaatggtaaattgaatatctcctaatatttatttcgctatttaggattttcacctcctgaattatgacctgtacattattgtatctcctgaatttttcagctcgttaaaaataatccctaaactatttacagtattgtaaagtggtcattttgttaagtttttagacatgtggcaaacagaataatgacgtgaatatttatattattaccactaccacatcagcaccatgtgtgtaatttaaaataaaaaaaaaataatatatgtattttgaaagaattattaagctaaaaatccattaataatataagagttttcaatttagtttaatcattaatggatttttagcttaatattttttttcaaaatacatattttattattattattattttaaattatacatttgagctgacatgacaataatctaaacatcacatcatcattttgtttgccacatgtaacaaaatttcacggaagaatcacaattaacaacactgtgaatagttcaaggactatttttaacgggctgaaaaattcagagaacacaataatatataagtcatagt

SEQ ID NO: 60205 - DNA, 1509 bp, Cannabis sativa
ctttcgagtaaagtctactggtgtggttgcccttgcacaagcccataacatttgtttaagtagcaagccagaatgttcttttttgaaattagagtatagatgcctcacacaaaatctaatttctgctccaccaaataagtcagataatgctttttctaaccccttttgcctatcgcccatcattgtgaagatgtttggcctttgaatgttaagatcctcaacaattagctttagaaaccatgtccaagaatctgtattttctttctcaactattgcataagcaataggaaactgtgaattgtttggatctattccaacagcagccaacaacatacctttgcaatagccttttaagaaacatccatccaatcctatgagaggcctgcaacccttattaaatccatctttacaggctttcaaacaaatgtataccctctcaaacactcttttcccatcaatcagtctagttttaagtatagctgtgcttcctgggtttgtttctagcaactgcctacaataatcgtcaaggattgcatattgatccttcaccgacccatttaacaaatctcttgctttcttcttagccctgtaaaatgtagaacatgagatgtcactgtatttagacttagatatcatctccctgaaggcctcatattgcatgtttggattaagtctaaactgttccaagtaatgactggctaaccaagaacttgtgacaagtttgttatcaaagactatgccacaatcatgttcattattcaatttgttaaccctaacagtgttgttatccccacttactaatcttgcataaataaaccatttgcatccttcagctttgcatttggctctgagcctatgtttgtcattgaaaacaaatgagtactgtctatttgtttttataaatacctctttcaatgcattccttagatggccaattgtaggaaatagcatatatctcttaaactcaaaatcatcaaagtttgactttgggttgaattcgttctcactccttcgaattggattattttcgtcttcgctatccaagctgtgcaagtcatcttcagatattactccttcagaatcatctccatgattttcattgcataattcagtcactgaagaccaccatatacttggattagtagtattctctaaatcaatttcatgttctttgtgatgagaatattcttcctcttcgaattcatcatcatcttcaatggcaactttcttctttcctttccaaggcctagtcttttgtacttgatcatggacatcttcattagcttcttggtggacattttcattcaattcttcatgttgggcttcttgggtttcatgttgtggattcactacaatattagcaagcacattagcatcagggaactccccaattgtgcaagaagacttcatattactattttctaaaactgctattaggaagatatcaacttttctatattttcttcttttcatatcaaaagccattagactaatctctttatctgaaat

SEQ ID NO: 60206 - DNA, 1269 bp, Cannabis sativa
taaaatatagagggaaaaattttggagtttgtcgggaaaaatgaaaattttagtaatcgggtttgcttttggtattaattatctaatttactatatttatatattatttaatattttatgttctgcacttagttatttccatccatttgccacattggactatctatgtgtacacactgtgttgtctattttcggtgacatttaattaatgttattaaattctaagtttagatattgtagtatattttttaaatgtcattaaattattatttttgtaatattttttggcaaatctcagctatttataattttagtagtgaaaccacactaacacaatttgaatagaaaacaacaatagagagtacacatataatattaattaatatatcatgttatcattatatatatgcatacacttgatcaatatttggttaaaataataattttattcatcaaaattcttcactaaattgtacatatgaaaaataatatatacatatgcatctctaacggcaatttatgtgttaacaaaaaagacatacctttttaataatctcttaaattttgtccaataaatagatattacagtgtagattataccacggattcaagaattgtgagaagaataaaaattaaaaggagaaacgagaagtaatggaaaaaaaattggcatttacatttatctgtagatttatataatcttttcaaagaaacatttgaaatattatattaataattaattttctaaattaaaatctaaaaaacatttaaaaaaacaaaatagttacgttgaatgaagtcttattaaaatgaattaatttgtatacatactatatataaaaataataataaaaaaatatgcaaagaaataactaactaattattaggcaaatcaaaataataaattttaaaataaaaaagtctaagaataacaattatcacctattaatgtgataaaatatctaatcaatattatttattaatacattattttattttaaatatattgatttttaccaaaaaaaaaatattactcaggacgatcctttcaataaaaaaataattaatgaacatatatatatatatatataagtttgttaattaaattattactaagcatatatattatttgttcttttgtagctcactagcattatattttttagtagttaaaatatttgtacgtagtgacataatatacattaaatatagtaatttgattttatattttatcgtgactaaataattagttggtatatataaaccatt

SEQ ID NO: 60207 - DNA, 803 bp, Cannabis sativa
ttctgtttgctatactccaagagataacaatacccatgcacatcatatggcaaaggaagctttagggcttgatgaggaattagtttggaaagatacttgtccaaacttaatcattgtaacttgaacttcttgaatatctgttgagttacaatcgtcaaaaaaaaaaaaaaaaaaactattttatctaaagaaaagaacttttattatttacaaaaatatcacctctttaaatatatcatcaagactaagataattacacaaatgctaaaatttttaaagatgttacaaaaatacaatccttaaaatatcaccatgattccttaatcgtgactaataagataaggaaaattatcctttgggatttctagagaggtatattttctgggttctatgacattaatctttacatatcttttccaacaaatttcatcttatatctcaacttcattctccctcttctcatatccatcatccatcatttctataaatttactatcatcactcattattttcattgttttatatagttcttctgttgtaggcagaaataaatagcaaaaactaataataaatatatatattaaaggagtaaataataaaacacacagaattatagcaattcgcctactttacgagagatagctgatattattaatctgagtagataatatatatatatatatagaatacaaatacaaatttgctattaataacatctatctagtatttccttaagtgttcccaaactcatcaaagtgtttcgcaaagtttgactatacaaatgctctctctctctctctctc

SEQ ID NO: 60208 - DNA, 957 bp, Cannabis sativa
ttccctgttggttcgagaaggacgttggcaatgtctcggtggcaacccacctgtcccaggttgagtcccaggatttccctcgttctcatgggggaattcatgttgcctggtcccgggacgccttttgttctcatttctgtgagaaggctctggttggtcgtttggttgttcattctcagagggagtgacagtggttccccaggttgttcttcttaagcgttttgaggattctcctgagctgtatcatgcctcctagtttgtgagccacaaggtctacctcgtggtcttctcactccaaaattaggttggttttgtgtgttgttctcttgttctaccctagccgtgtctgcctcacgttccaactcagcatttcgttggttttcctcctccaggcgacgcctgagatggcaattctctaacaactcgacaactggcaagtgtcttctcgtgggatcataggcaccatcattctcatactccatggtttgagaaccaccagcacttatgttgggttcttcattccctatttctggattctagccatatccacgttgggtccttcttaactatgtggaccgtgtattttggccaccttcaggttgggtccttctggagtgagtggaccgtgtagatcgtgagttgagaggcctacgtgagcccattggctcttttccaggacgatgagtggtctattcagaatgagtatcaaaattttctccattatcagccatggagaaaggtttttcttttgatcaggaggtttttttctgagcttttttcacgtaggctctcaatgaaagtaccaaaattttaatgtagatttttgttaacgacataaagcctttttatgataggattagcacagaaataattgaaaataaaataaaataagaagaactatgaaaagatcacaccaagttttttacgtggttttgtagttaaaattctgcatagtcc

SEQ ID NO: 60209 - DNA, 1222 bp, Cannabis sativa
aaattctgacatatcaccgtcctcccctcaatcttgctctttggggtagggcccaaaggcttgcttgctcgatcgattgcctgccgggggggggaagactagaatatcatccagttgacctccgaggatagctttgtgaagtaccggctctatttaaaggacttcattcccaaaccagtgaaaggggaggaagaggaaatctgatgctcgacgggttgaacgagctcatccagagaatgagctgattcaacttaagtgtgaggctaagttgaagggaggttcaagagccaagcaatatgcttaggagccttgaatcctgaagatgaggctgaggaagagcaggtgactacgctcaagaggaggaagaaacttccggcctcgcccaggcctgttgaacatgcaattcgcgtaaggggagcccatctcaccttctcggctgtcccctcccgtgttcggaaaagggaaagccgtcatgtctgaaataaaagcgatgtaaggtgatgatggacttttgatccttacttgggcaatcaccttgcataacagttcgtcttgttcttaagctttttgactattttgcctcatgattctgatgtctgttttctctaaccatgttgtttttcgttccgtacggatatgtctcggcagatgcttgacgctctgaagaagagaatgggtggaagctctagtgcctctcctccagccaataagtctaaaggcggtgaggggtcctcttctaaggaaaagatgcctgctggggaggtcattgatctttccaaggagttaacagctacaaacccctctaccccaaaagctgctaagtccaaggagtcttggggaggaagctcggacaggtctgaaccaccgaagggtgggtctgagctagtcagaagtggacccaaaacaggtgcaggcccctactcaacctttcccggtgcttccacaggccaagaagggcaaagagatgcttgcacgcaatatgaaccagctagttcctgaggttcgtgagcaactggctagtgctgacaatgactcttctttggagctgctgatgggcggagtttagaaggaattcactagggtaagtctttcttgaaacttccctttaatcttctgtacttagttcaaatgctaaagttttttcgttgtggaggctggtctgaagttggcctacacttactcccgggctaagtctgacgcttctaggaacacggctctgtcc

SEQ ID NO: 60210 - DNA, 1946 bp, Cannabis sativa
tcttaaataaaggtcaaaggcagaaatagcttttttattattattatttatttcgataccatgttaaaatttaagataaagtgaaagtatcataaagtgcaaagaatatatataagatacgagacaaacacaatacgcaaggctctaatacaaattaggataataaaagaatatttatacattaagctatttaatgctattacttaatgagattgttatataatgatactttttaaatttttcaataatattgattgagaataattatttatatgataaaagctattttttaaaaaataataatatattctattcttcctttaaataatgttaggagttttataatatttcatttgtatggttaattttgatttatgtttacttttatgtttcaaatttctaataaaataatttttatttattatttgaatggaataaactttgatgtaatagttctttattttagtgttgctttgctcacataaaaaaatatatatactagcacatacaaggtacatgcaagctttttaagtctcctaaaaaaacgttttggtagaccccttatttattttggcatatatgaagctcaatattgttttataagtatatacattgtagttttttaggattacttataaattttctaaaaatttcgaatagttgacaatactaagaataaggttgaattattttattgcacgcgtgactgttttttcttatatgcattgtaagcaattgtttgaaccttattttcagtgttgtgaactattcataattttctataaatttttagaaggtcataaataactctaacgtccacgatcataaaaaaatttggactaattttttttttcttaaacattgaaacaaaaaaaaggatctaccaaaacacctcttttagtggagtgtattacatattttctataagtatttttttaaaaaaaaattaaaataattacaagataaaaatttaagagaagtatttatcgtaggaactgttgtttcgttgtgcaggaataattttagtctattttttatgattgtgtacgctgtaattgtttaagatatcctgcaaaattttgagaaattcagaataatatatgttatacctgaaatttggctagcacatcagaagaagacacgtgtcaagatgggaagaataagaactcagacacgtaatcataattatacttgagatggaataactcattaaaggcataattaacagagtatatttacaactcggctaactgaatggtcttatgcgagacaaaaatatacaaacttttgccttgtgcctcgatgaaaaatcatgtaacttcaggtgtacaaaacgagacactaacctcgttacgtggaggacatataatgacagtgaaaatacttagcaaactaagtataatagacgggtgagccaaagcaagtgatagcgaggtgaccacctcgccataggaagacatgcacacaaaaaagatcatctcgccatcagaaactgtggttgtcaaattcagagtaaaggcaacgggatttacattatcaaccttggtaagaaatacgacaaactctagcttgctatcaagattaactgtactcttattcccaaccgagacattccatttacgatatggtttacaacatatttaacacacgttcattttgacccagtagaagcgggatattcacagttgtgtgatattcaaataataatcgcatttacttaatgcgatatgtaatcagatcccatgattttaggggataatcgttgtaaaaacatcaatcaactctgtaattaattgcctactatgtgattataaatagaggcaagtgggatcaaaaaaggaggacaaaaaaatcataagaaaaagaggccctgaaaaaactatcagaaatctaataagattgactcgtggactatgtagaaatttaattgtaaaaccacgtaaaaa

SEQ ID NO: 60211 - DNA, 1032 bp, Cannabis sativa
tattattttatataataattgtgaattagtaaatactgatttaatgctaatggaaattaatattaaaataatttaatattaatacagctaatgaaaatcaatagacacaaacttttattttaatacatttatatacatataatataatattaatacaattaatagaaatcaatagactcaaacttttctttttatacatttatatacaaaaataataaaagcataaaatatacatgaattaataaacactacttatttcgcctattcataatttcgtatgatcaattgggcagtttatattttgttttaaatgctaaatattattgttttttgtatttattgatttcaatgtgtgtaattatatgtgttatgtatagtgataaagctacaactattactaaactacccttagttagttaatatagttaataacagattcttgtaacaacttcttttctgttattctgttttccttgcctttctttgtattgccccctatataaacatatcaaagcttaataataattcaacttttgcataatcttgaattgcaatcttatagattgaattctattagatcttactgcatagataagctctttcatggtatcagatagctcctgaccaccgtcttcaatggttcctcgtcaccctaaaaacccaccacgctccacagttcaaacacaacccaccgccgcccctgctccgaccaatcctccatggaatccgttccaaaactctctccattcatctcttactgtcaaattggatcgctccaactttctggcgtggaaatctcaagtcatcctcaccgtgattggccatggactcgatgatattcttcttggaggtgtttctccaccagagctgctggtctctggacaacccaatccggagttcatcacttggaaaagaaaagatcagcttcttttgagttggcttcgatcgtctatgacagaatctattctctcttgcacaattttaaagttcgtattcagcttggcgggctcttgaacagaaatatgccagtca

SEQ ID NO: 60212 - DNA, 1052 bp, Cannabis sativa
acacaggggacagctctcatcctcaataggaaatctcctacctattgccgagcgaatcggaagagctttggaaagaatacaccaccacagaaccttgagtctgtcagggattttgctgttccacagtttattccacatggagggagccacctctcctggatttaccctatcctcagcccgggctctataggctgatttacaggaaaaacgaccattattttccaaagtccagacccagctgtctttaccagagccagtaggagtacctcccttgagaatagcagagacagtatcgcgatcaaaataacaattaagcttttggatgttccatccgccactagtttgaaataactcggccacctttgattccctaatcagagcccgcccaatcggcttgggagtgaaaccttttaggtgtgtaatccaagggtcagaccagatgttcgtctcctgtccatcacccacacgcttacaggcaccctttcgaatgatcgttctggactttatcacatttttccagaaccatgagtctgaggccttcggtttacaatcaagaaatgacttacccttcaggtatttggcttcgagaatacgacagcataaagattgattacctgttaggaggttccaaccccatttagcaaggaaagcctgattcatttctttggatttacggaatcctaatcctcctaacgacttggggagacaaagtttatcccaagcttttaggtacaagccgtggttccccttttccgagccccaccagaaatcacgcaccaaaccatcaatcttagacgccaagcgattggataacttagtagtttgcatagcgtacagaggtaaagatagacccactgactttataagcgtagctcgccccgctttcgagagcgtcttggccttccaaccatgaagcttctcagtcaggttttccaggataaagttgaagtcagcatctttttgtcttgatctgaataaagggagtcctagatacttaactttaccttctggtgatcctattcccagcatttccttgatcctctgtttcatag

SEQ ID NO: 60213 - DNA, 1230 bp, Cannabis sativa
caatcaaaacttttgtgcataattttgcaaagtatttttttagaggcaaatgtgcttactagatatatgggcccagctccaagcgctgcacccatccttgctctgtgtggcaaactcacttacaaccgatagccaattccacactaaactaggaattttacaaactcctccctcaacagacaagttttccatcatgttgtaactcctaaatttgttgatattctaacccatctctcagatatagtcgttgtaaaaaatgggagatgagggtgaggcctttgccttgcctttccctttgcttgatgccttggccttttgtgttttcacctttacaacggcattgaacaggattctcagggataggggcctgagagggcacttctatgggtgcctcgacccctgcatcctccatgttcacaacctcaaggttgaactcctcattgaggtcaagcactaaaaaagaacagattagggaggacataggcaattaaatatccaatatgttaaggataatacgggtattggagagggcctctcctgaaatatcttagagaggtccccaccaaacctataactcaaaaaacatcatcctcgcgaaatgatgcctcaaaacggtagttcaagatcccacaacaaactcactggataatacaaaagctacagattgatcccatcagagctttaacagctccaaatgagtaggaaaagtaaaaatcaacctagaacttcctaagaatcactcttgccaagtttgaatttttacccttattttccagaaaaatgcatatgcacacttatagcatgacatttttgaccttaatcagttcagtaccatacaacaccctaaatatcgtttctaaagcaatcgcatgcaagataaatccaaagcaaaacttgaataaatgacttctatcctagaatagaatcaaaaattttaacatgttctggaaaacttacttgtgatgcgattggaagaagaggattagttattggaagtgatttatgaacctcatgcctagttgaggaatcgctcaaaaccttcttgaacattgaactcttcgcttgactgggggtgggttttgttagatcgagagtcggtgtgtttagaaaatggggtgttcaaatatgtagaaggtagtttatgagagaatcgaagctttcattcattcaccggtaaaaatatggaataaacgttttggatttttcagtctagattctaggaaaaaagag

SEQ ID NO: 60214 - DNA, 975 bp, Cannabis sativa
gacttcctttaatttataaaattttaaaaatacaaaaaataaaaataaaaattaaaaatataactaattatgcgtccaacgtacataataaaaacctaatataagtaagtatgtcttttattgttttgtggatgctgatttttgtaacatttattctattttatttaacaaaattttcccttttaataaaaaaaaaaagaaaaataagattattcataaaaaaaggtaattatatttgcaccccaaataattataagtacatcgcatgtttaagttgaccccatttaataaattaaaatattattacaattatagtctttgaatcaaaagtacaccccactccacctacctttactatttttattccctttttctttcatcaattttttttttctcaatctccatctctcttactattaaacatagtatcaattttgttatataaactgttatcattggaatataaagaatataaagcctacgagtcttcaattatgttcaacaaaaaaatcttttaaaaaaatacaaattaattacagagttacagtaatataaaattaaaagaatcagttttttttaaaggaagtttactgtaacataaaccacatcaaggagagataaatctccattaacataagaggaagttattggggaacccatccccaaaatcgaaactcttatacaactaaattaatatggaaatcgaatctagaaataaacggcccaataaaataaagaactccaaaaaggcccacgttaaaaggcccatcaaaataaatacatccaggcccaagaatataaagggagacccaactcggtatgatcaagctattgatcctagttgccaatccataagggagcactacggacaaaaagaaggaaaacggtaaacgataataaacaagtaaagagagcgccgacagaaacagaaggaagaacgggagggaataggtaatcgacggatcgaagatcaac

SEQ ID NO: 60215 - DNA, 1121 bp, Cannabis sativa
tgaagaaaaggacagacataccatgtgcaagataaacctcgagcaccatgtgcatcaagatagccccaagcatagcttagtagttaatagatatccatatatctagttttatatcacatttattaattatagatctcacaatatcaatatggaaataaagtaattatcaataaagtatttatatatttttattatccataaaaataggacacaaattggcaactatcaacatgatgtgacatccacgtcaacaaaggtttaatgcctcatgagtcgggcaatgtattttgtgtatttatcccattagtgggcaaagtttagataggagaatcctaacactaaaaagataagaaaaatcattcatgcaaaagggttagaatctcattctaaaacaaattctaaactcttactacacgccatcctctcttaactcctccgcgaaattctttgacaggaacatgtagacgactttcaccaaaaattagccataagttgttccaactcatgacatgttctcgtaggcaaaaggaaaatactcatagcataagttggaagactttgagctttattacaaagtaggacctctataacagcatgcgacaagagtttaccattccatctttgtatatgcttcctcatcttctccttaagaaagcccaatacatcagacttgtttcgatcgattgtacttgggagacccaagtacacactattctcaacaacttcatttatattaaaaatagcacaaacaactttccgaatagcaccactcacattcctactaaagaaagcagtagatttagtcaaattaatcttttgacctgacatcctctcaaaactatgtagaatctccatcactctatgagccccttagcttggacaaatagatagctatcatcaacaaataatatatgagaaattgacggaatacccctagccacacgacacctttttattaactgattatgctcatatcgacaaagtaatgccgagaagcctttagcacaaataaaaaataaataaggagacaaaaggtctctttgccttaaccctctacaaggaacaataagccgtattatatgaccaccgtgaacaatctaatacctcatcgtggaaaaaca

SEQ ID NO: 60216 - DNA, 1147 bp, Cannabis sativa
ataaagttacttcaataatcattgttaattgattttgagaaagaattccgtatatcttatcatacatctaactattatattctttactttcccaaccacactagcaagacatttaagtgtggttgagaaagtaatatattataaaatacatttcaattggtattataaaatactcaaataaataatatatttttacctcaagcttcaaaataattgtttttagtattaaaatttttaggtgttgaaacctaattataatatatttgtaataaataaacaaattgaatatgcttgtgggtggaatgaagacagctcaaattaattaaattctcccaataatcaatattttgtgtatcttgttaaaacaagaagttgctagacaaatcaattaaattaatactcatccaaaaatttctcattcatcttgaaaattaaacttgccaagttgcattggtcccccactagacaagcctactgcaattattgtcttccactctttcgtatatgattacacgtgtattattagaccattcctaaattaatattaatggtgtatattttgagttaaatttgacttgaaatatattataaatctatatttggtttaatttttatatttgtgttcattacaaatttttttacttttattcaaaacaaaatttatgacaaaagaaaaaaaattgagactaaaaatattagtcacaaaaatctcaatttattgtaactaaatgtgtttttagttacaatatttattgtaactaaaagtaaattagtgaaaaatatatttaaatactatatttcagtcacaagtaactttttgttgtgactaaaagtcacatttaatcaataaaaatttattttttgacaagaagattgtcacttaaggtaattgttttttgagcattgctattaggcaccagtggtgcaccttccataggtgtcaccctatgattggttagcgatattccctaaaacttattttttaagttatatgggacctgctatttaattacaccaatagcggcatgacactaaggagggtgttaggcaccagtggtgcccttttgtaatgtccccgcttcaagcctccattgggtccttaacccacggaataatggctctcgtacacgagtacgtcactttggct

SEQ ID NO: 60217 - DNA, 1167 bp, Cannabis sativa
tattataatccaaaagaggcccaaatatgtgtttttatgtgaaactcttagtagaaaagataccttggaaaaagttaaaagtgctatcggttttgagggtctcctgacagtcgatgcttgtggtagaagtggtggtattgccctcctttggaaagttcaggatgaagttcaattacttggctactctaacaattatatagatgtcacgattcaagatgaaacaaagggttcttggcgtcttactggatgttatggcgagcctaatagaagtctccgtcacaagacttggactttgctgaaaactcttgctgcacaatatgattatccttggtgtgtaataggtgacatgaacaatgtggtgagtcaagaagacaaaaagggaggtaatcaatatcctagttggcttatagaaggttttaatactgctctttctgagagtaacttgtgtgatcttgatcttattgggcacccttacacgtgggagaagggaagaggcacatctaattgggttgaagtaaggcttgatagggctgtagttaatcaaaagtggctagatatgttcacctctgctaaattatttaatttagaaatctctagcagtgaccatacacctattcttctttccctttctgcacccgatttcaccactgccaagaagagatttagattcgaaaatgcctggttgagagagcctttatgtacccaaatagtcaaggacagctgggaatttagtaactctaattcaatcactgaaaaaatcgatttgtgcggcaaagctcttgcggattgggggcaatgttacacgggtaattttaaaaagaaaattcagcaatgtaagaaggaagtccagctgtggaagaaaggaagagatgatatctccatagccaagtttcaagatgctcaaaatgaactgttcgagacctacgctaagcgagaagttttttggagacaaaggtcgaaacaattatggctgcgggatggtgatcacaacagtaagtattttcattcccttgcttcttcgcggaaaaaacataattcaattaccaaacttaaggattctaatggtgattggattggttggcaagatggtctgactgatgttataacctcctacttcgagaatttattttgctctaatggtgtggatacttcgggggttataaacaa

SEQ ID NO: 60218 - DNA, 958 bp, Cannabis sativa
aattaaatattacaaaataaacaatttaaaaaataagacattttatggttaggatattatcaattttattaaaaaaaaaataaattttctaagtttgattcaaaccaaaactaactaattttcaaaatttcatgtgtatttttgccaaaattaattttaattaaaaaaaatatctaataaaataaaatattaaaaataaaatttttaaaatcttataattttaattttaataaaaaatatttcaaaaattagaaattttgaaaaaaaaaaagatatggttagtatattttgaaatttaaactagattatttaaaaaaatatatttttatatcaaaataagatcattcaaattttaataataaaattaagcaatatctgatcttataattaaaataaataaaataatcatgaatttcaaaaattaaccatacggctatatttgtgaaaaatcaaattttcaaaattcaaagcctactaatatctaaaactaattttaattaattaaaaactaataaaaattaattttattcttataattagatttttaatttaaaatttagattctacacaaaattctaccaaattttaaattttgtttcaatgacaaatgatttttgaaaaaaaagtatgagaaaaacaattttggtgcatacccctgcacgcgcggatggggagaatctgaccgagacagcccttggtgccgagtttcctcggtcaaactattttaaaccacgtgattaggctgagtgtctcccttggtgcgcgtgcgtgtgtgcatcaacttcaaacagtttcatccaaattcaaaaaatcataactaattcataaaaaattaaaatttagttgtgtaaaagcctaaattaattaatttttgtctactttctagtaaaaatattttcagaacgaaataaaaaatatttttacaacatacatcgtgatttccatacaatcatcaaat

SEQ ID NO: 60219 - DNA, 1052 bp, Cannabis sativa
  modified_base (1004)..(1008): a, c, t, g, unknown or other
ggaagattctgtggaagagtttctccatgatgatttggagctggaggaacggtgggcgtttcgatcgacggagcatctggaatcgaagaggaagtatgcggcggcggagtgcgaccggaatgtcttgatccagtagctcgtgttctgaccatggtgaatcaatggtgagaaaacttggtcgagagagaaagaaggagaagagttaatcttctgataccatgttagagagtgaacaaaagtgagaaattgtattattgaacgtaatgtaaaataaggacaaggtacttatacatctatctcataaagagttagttacaaaccaggagaagataaccaacataacaacctgaactaactgcctaataactaacatagctgactgtaaaactaactaataccctctaataacccaaatggtcattccaaattataagtttgaaagctattcaacaaaagtggaatttgctagtgccaaaacacaacaaatggtgacagtggcatgtcacattgcaactaattttctggcgccccagctgcattggaattctctgtcccagctgcatctgttgggtttgaggtccctgccccagttgcattagaagtcccgagcccagctacttcctccctagctttttgttttttcttttcttttctttctcttgattgtttcttgagtagggttttggacaggcgggcgacctcatatgacatattatcttacttgacacaatgactgtttatgaagctagaattctaaaacccaattacatactggtggtgcttgttcatttttacatgttcttctactatgtctaacttgcccacatttaccacaatgattgagttgttcttttttactatgcttagttgcatcagcaggggtggctcattagcatctctccttcttttctttttctgtcttccaggcagatttttttagggcaacattagaatattttatttatggaaattgttttctaattaaggaaatgattttctatttnnnnnaataaataaataattgattttctgttaaatgaatattttatatt

SEQ ID NO: 60220 - DNA, 900 bp, Cannabis sativa
cttcttttatgacgctcaaactagtaagatcagagaaccaagcttcaaagaatctgaaagggcgaggccctctaggcctaaaagcacaagagtctaacaagatggctccatgatcagaacttatgataggtaagttgcgaactccacctttaggacaaaggctcaaccagcttgtatcaacaatcacacggtcaatgcgctccttcaccaatcgaccagatcctcttttattctgccaagtgtacttgcagccattaaaacccatatcaacacccccggttgagaacaagaaattcctcaaaacagagccatcacggtaggcaaagctacgtcctcccgatttatcctccttagccaaaataacattcagatctcccatgagtgcccaggggccattacaagagtttatttggactgccaaattctcccaaaactcagacttttgatcagcgtaaggagtcccgtaaaccgcaaaaagatgccaagagttctgagacccgtggtcattcacccaacaaacaaagcccgaatccaccttctttaaaatctttatgttaacacaattattccataacaaacaaaagccaccacctatgccaaccgagggaatgtaactgccattatcaaaatgaagagtcttacaagtgtttctcatgtggttctcccctatcttcgtctccataagaaaaacacagtccacttgccatttctttacccaagctaaaatagcttggattgccgagggtctcgcaagccctcggcagttccacgacagggctttcatgggatcgggtgaaacagattttatcgggtatttggtcgacggcaggaaaatggagaattaaatccttagaacagggattgtgggggttcttcttcgacaacttgtctgataaggaa

SEQ ID NO: 60221 - DNA, 808 bp, Cannabis sativa
ttcatgttgtagctcattctaaaaaagagtcccagtccagattctagcttggagtaaagctaactgttgttcgccatcgacctttttagttttggaagcctcctccttaaatctctttatgaaattcttcagggtctccattgggtagttgttttatgttggtcaaggcacttattttgaggttaaacctccttactgccacaaactgtcaccgaaagctaacttgtagcttgtctcaatagtctacagatttgggttctaacttcttgaaccactcctcagcggatccacttagtgttagtgggaaacataaacactttgcgtcattactgactcaaaaacttgaataggtctgaaagaaatgtagtctatggcctattcataaaaataagtataggtctaaaagaaatgtgggctatggcctattcataaaaacttgcataggtctaaaaaaatgtgatctaagtaatatcagtctacatttcttttagacctacgcaagtttttctgaatattagtcaaatgtacaattactatgagaagctaagtaatatatatgtatttattaattaaaaatacgagcggaagttattctgccaaacgtatttggcgggttggaatcggcaacctatatatatattgttgacctcgcttttagccaacgacaatgagtcaattaataagcgataagaaatgtaattaagatagagtaaaaactagtaagcaatacagagcacaagattttaaagaggttcggaccctttagttcggtaatacgcgatctgaagttagaacccaaatctgtaga

SEQ ID NO: 60222 - DNA, 996 bp, Cannabis sativa
ataggaattaggtaattaccagctgaggccaaaagcaatgcaatacagagaaaacccatgagaatgatagctttagaagaaaccatctctatttttgttgttgatatgatcgatattataatgtacttctatttgttcttatatatatttttatggtaacgtggattaggctgtaataatgatatatatactacaaaaatagaatcataaacctatccacttaattaatttgatgagatctctttttttgggaagaaatctctcgattaaaatggaccttttattttgaaaacgaattggatttcttcctatatattggtggttacattttttgttggtcttgttttaatggataaaatttttatttttagacttaaactaattatatacttaaaataaattattttttaattaaaatatttaataattttttttaaaattaatatttacaattttttttaaataaaataaatcaaatcaaattatagtagcaaattacaagtaatatattaattatttttaataaatttttaaattaattacaaccgtctaataatgatgtataacggttaaaagacattacgtattattagcctcttttagcatttttaatataatatttttggcttagaacaaagagcattgttattgggcatcttacaattggttaacaatattttttaaattaaagtaatttgcggcgaaatttttttatgttttaatttttatacacttatctatttaatttttttttgtggtaaaattaccttatgtttatttttctttgtaaatttgacacgccagttaaatattaccattaaatatcaacggaaagattattgtacgcacatgtgtatatataacagtaaaatctcgaaattaatatagtagtaattctgttgttatttaacattaatatttaattaaaaccttaaattcgcaaagaaaaataaacttaagcagattttgtcacaatgtcacaaaaaaaaaaaaaaa

SEQ ID NO: 60223 - DNA, 975 bp, Cannabis sativa
agcttgcaaagcacactggctggaagaacttccaagagttctttgggcctacagaacaactaaaagaacttcaaccggccatactccatactctatgacatatggatccaaagcagtaatcctagttgaatccatagtgccttcacataggagagaatcctatgaccctactcgaaaccacgctctacttcaagaatctttagatttgcatcggtcgctcgtcctcaatccaacagacaagtcaaagctatgaataaaactttgaaagacaccctaaaaaggagactcaaagtggcaaaagggaactggcccgaagagctccctcaagtgctttggtcataccacacctcacattggacctcgactaggcacacccttttctcgcttacttttggaagtgaagccatgaatcctgtggagatcaatattgcttctcatcgcacacaatattacgaacaacactgtaatcatttgttgctagaagagtctcttgacttacttgatgagagaagggaagaatcacaaataaggaacacgacctactaacaaagggtcaaaacatatttcaatacccaagtacgcagcagagagatcaaaatagtaaatatggtacttagaagagtttttttctcgcaacacgggacccatctgtaggagtacttgaactaaattgggaaggaccttaccaaatatcctccataattcatcgaggggtgtacaagattgccagattaaatagggacttggtgccaagaatatggaacaaataacatttgcggaaattctatcagtaatgacagttgtcaagttatttttatggtttttgagcttcaaaggaacgtcatttaaatttcctttttagacaattggatatttatcttttaatatatgtttgcaccttttgcaaaaatatctcttttgtaatgttacgtcctcacccaaatattttacaagtaacccaatacttttacaact

SEQ ID NO: 60224 - DNA, 1124 bp, Cannabis sativa
  modified_base (707)..(724): a, c, t, g, unknown or other
tctcttgatcaatgattggctaatgcacaaaagaatcccacaattttaggatatatcttgacagctcatgattgagtgatatcagcagaatccaatattgacagcacaccaaaattgggctgtgatctggtgcggcatactctttgtttattttaacaaacactatcattagcttattaaaaaagaagaaatattttaaatattgcctcattctatggaaattacactaaagaaaactagctcacctattctattgaatcacctatacattaaatattatttgtacatacttaaccaaactattatatagattgtcccacaactacagaataataaggaaagactattttcttagtctcttaattgattaatctcaacgcctaactacctctgaaaactatgtgtgagagggtctaaattattatgtaagtttttatgataatattgcatgtgatatagtatagggtgttatatatattgaatgtgatatcatttatatatactaaatataactactgtgacaaaacttaagcaatcgttactacaaaaaaactgttattttttagtaacaattttttagtcacaacataattttttgttactaaatgtgatttttagttacaacaaaatgttgtgactaaaacatagtatttagttacaagttgtcactaatttagttttcgtcacaacaaatattgtgactaaannnnnnnnnnnnnnnnnnaaattgtaatttttgtgactataattaatatatctttagccacggaccttatagtcacaacatagaaataataatttataattaattagtcacaattttttcatttttagtcataagttttgttgtgactaaaagtaagatttgttgtagtacaaagtttgcttaattactctcttatatatgatcatagcattactattgggcattattggtatccaacaactttataggtaacgctatatgattagttagtgattttttctaaaaattattttcttaagttatataagactcgatacttaaatacactaatagcagttataataacaccaagattgtgctaagcatcaattgacttttagtaattttcttattgttattagggttttttttttttttt

SEQ ID NO: 60225 - DNA, 689 bp, Cannabis sativa
tgtttgatgtttatttaaagttatttttttttttttgttaatttgtttatattttgtgtatttgtcatatatgatatattttgtatatctattttatacaaagtatgcttatataacaaaattattagtttatgaaaaattgatgggtgactttttatttctattaaaaataaaataatttatgagaaattcataggtcactttttatttatatataataaaataaatctattaaatccaaaaaaaaaaattatttctatctctctctacgaataagaaataatgctgagttttaaattattaaggaaaaacgtcttttctcggcctgctttatcaagggattatcttctcagactcgaaatggaagtttactcattgatcaatctcttctttagtctcttaaatgttctttaatttggttttcgttgccttgtttacacataatgaattgaggtggagacttgagatgaataccaaaacgtctttatttggatctgcggaaatacaatagctttttatttttaatcgtaaacatataccattttttttctaaaatttattgctagtccctgttgaagtcttttaaatatatattatatatatatttttaatattatatccattgtcgtactgctttggttcactgttttttccatatgcattgtcgtttggtcttttttttttttttt

SEQ ID NO: 60226 - DNA, 1598 bp, Cannabis sativa
  modified_base (1558)..(1559): a, c, t, g, unknown or other
ggttcaatgagcttaaattcctcactactcaaatcaaaagcaactacaccatcagttacatgactttgactacaacaaatagaaattgaccagtgaattgagcaactaacattaactgacaccatattatagattggaaaactaaacaactcatcatcagagaatagtttattaggcttaaccatagttttccatcaattacttttcaaactataaactgaaaattgcccaatactttttgcatccaccactttgaaatcattggtcaatgtccatacattctatatggagatgaatcatatggagatggtgggagtttcttatggtttttgattattgggttccaaaggttgtcactactttatatgaaattcgtgtacttgagaagaaatttgatcaaaattttcgtagatacgaattgagaaaagctcctgcctcgagtcacatgaaccagtgactgatgagggtacgaggtaactgtcgtttgtggtgggcaagcattaaatttgggttgtttatttgagacaaccaagatttacatctaatattaggagtatatcttccattaagtcattggtaatttgtagaagccatgccccaaactgaaagcctcaattttcaatagcgaattacaaactaccattgcatcatccacaaactctaactagtattttgcaaagaataaaggaaacaaatctaactagtaactgctatttatttattttgttttccaagataacaaaaaaaaatctaaattttaaatgtaatctttctttttttttttttgttgagagagaaaagtaatcttttttctttttaatacatattttaatctcgtttttattaaacaataaacataataatttattttgagtcacgttttctagattaatccgtatgtggtccttgtttgaagggagtattattgggggtatcaacctaagtcccacattggaagaataggtaagagttgtcttgaatataaatgttatgaagtagtggcccaacagaaaaaatagggtccaaatttattcgtagacttttgttgttggttcattatttatttatttatttatttattttatgtttttgtatatttgttgtttttatagttgataattttgattgtatttgaatattaaaattgaaatttcgaatttaaatatgagtatttttttttattctattttttgaaaatattgtttaatattttaatgtttattcaattcatatttattttttaatattaatttaaattataattattttaattttaaaagacatatactatacatttatttttttaaaccaattatttaaacattaaaactaacaacaataaaaaaatatatatatatatatatatatataaatatcagtttaaacagattaatcagaccaaactgacaaaaatcattgcagtgattacactttttttattttttcattggatgaattataattaaatatttataactagacaaacatttatattaagttggtaaaaataaattataaatgtttgtctagttataaatatttaagccactaaggctannttagtggtgagggagggatggaaaaagggagaggtcatg

SEQ ID NO: 60227 - DNA, 1416 bp, Cannabis sativa
aaaaaaaaaaaaactcattaaaatcactttcagaaaaaaagaaaactatagtgctatatctacatttaagacaaaaaataaaaacttgtctactatgttttagtaagaagccagtctctctcttttgagagttttgctctgtctctctccttgagtgtgtctgttacgttttaaaagttctttcttgttttttctgttctgtgtttctatctgtcgtgtgtgcttcgtgtatctctgttgtggccaattctcttgtgactgatcatggcttcaagcagcagtaatgtggataacatagaggaaggttggaaaaatatccaacttgaagaggaagaagcagaggagactttttatgaagaaaatgaggaaagggatgaagaagatgatctggccattgactctagatggtgtcttgttgggcatatgcttacagggaaggtttcagacttccgtatttttcagaatctgatggctgatctatggaaacctggtaagggaatgtatgccaagcaacttgatcaaaatcggtttttgttccaattttaccatgagttagacatcaagcgggttatcgaaggcagtccatggacatatgatcgcaaacaattgattataactcgtctcaatgatggtgacaacccccgtactgtcaatctaaacactcttgatctatggttacaaatccatgatctgcaaaacggattcatgaccatgaaggtggcaaaagatgctgcgaactatgcggggacttttatcgaatcagacccgaacaactttactggagtatggcgagaatatcttcgggttcgggtaacactttcccttgatctccctctgaaacgaagaatgaagtttcgcaagcgagacggtgactcgttttatgctacttttcgttatgaaagtgtaccaactttctgttttatttgcggcctaatgggacactccgagaggctctgcccacgtacgtttgatacacctccccacctgatcgtgaaaccttatggaataggaatgaaagctcttccccgtcgacaccagaactttgcaccttcaccattcctacggtcaggcaaggttgcgactgcaacttcttctcctggtgtgaacacaaaccagccttgcgataattatgggatgccaaccgatcctgtgtttatgagaatatcctcccctgatatctctcaatcaaaaaccaaaaataaagggatcatgctttatgatagtaaaaatgctgatgtggaattgactcaagctgagttaaaaaggaaacgttttgccgctgaaaacaaaaacgggcctgctgttggttcgggccgtgatgaagaggcttcaaaaaacttgaatatggtgggttctggtgtccaggcccaccaatcgttatgagtacgttaagctggaattgccgtgggcttggga

SEQ ID NO: 60228 - DNA, 1938 bp, Cannabis sativa
gctcacataacgactgagaaaacaacaacagggcacactccgttctcgttggcatttgtcttggaggtaatgctgccagtagaagttaatattgcgacacacagataagatttctacaatcaagaagagaaccgagaactcctgaaattgtccttggatctacttgaagaaaaatgtactgagtcgcaaattactaatgcagcatatcaacatagaattacgagatatttcaataaaagagtgaagaaaaggctcatcaatgttggagatttagtgctaagatgagtattcgcaaacacgagagatgcatctgcatgagagtttaacctaaattgggaaggttcttatgttatggaggcagtagttggaaccagggtttataaattggctcgactcaacagctcgctaataaagaaccactggaatgttgaacatttgcgaccttattaacaataaacttagtgttgtattttctctttgtaatgtgaaatttttattatcaataaagttgaagtattattcaagtaattacaaagtttcttctttaaaattacaggaggggcatctatatgtatatgattaactagaatttatctagaaatacatgatatattggaaactcgcttcaccttaaaattttaataattgattaaagttttatatggacaatgtaaagtcaaaaatggaacctttctcatcagaaaggaaaatcaaagtagcagttgtaaatgagagttaactcataaaaacaacattaagctacatgcgaggctgaatacctatcggctcgcattttgtaggcatgtattataaatgaggtataaaaagttaaatttaacttaaatatttttcatataaacatatttttgatatagtataaaaatgtggatataatcttttatcctctcttgattgatgtgattcctcataatgtagccatcactagactcaacaattgttgtgtaatcgccgtaaaaaggggcttacgccatctgtcacatcttttatggaggttcaaatacgttttcccccatgcggcattaaatgcaaagtgactgttcgaacaatctctttccttcccggagatgccttgttgcaattctagcctctcggagagtaaaggcctgttttgtgctctcctctgggaggctcgctccatgagatgcacttcttttcccaagacataattgatcttcgtaagtggaaattctcttaggtctatgtgtcatcctcatccactgccacgtattttgggaaaaatctgaggtaacactttataattacttgtcgaaagaaatgattactttattcacaattgaagttcaaaatattacatcagtgatgtggtttacaatcattaatttaccgttgctttaatctcataagaactctcccaattcaattgcttattttatcaatcttctagaagcgtcttgttctgattaaacgggttttgatgcttagggtcaatccctaacatactcccacgattgtttcaatatccagggtcaatccgtgccatatccctaagttccaagtgaattgatcctggtttcaatcatttgtcttaactgtcgttgtttgacatccagcttttctgtgttgcagctctatatggcagccatcgcaagtcgatattcgattactttgtaattgttttaccagactaactgccctttgtcaaattttttttttgcaacatgttccctctcgagataaccgaggtatcctttcctcctacaaaggaaggttatggtccctggtcgcttgggttgctgggtggatcggactggtcatgagcattgtcctacccctttacatattcctgaaagtgtcatcgcgctatgaggccttctatctcatctttcaactgacgacattcttccgttgtatgcccaatatctccatggtattcaccgttggaatttattttaccag

SEQ ID NO: 60229 - DNA, 1419 bp, Cannabis sativa
tgcaaattttaagaaaaagggtaatgctggtggtggtttttatggcacgatgagggagagggagataggttaggtttttttttccttctaaattttaacatatatatgataactttaaattttaataataataataataaaattttattaataaaagttatttaccatttcttagtcattaagaaatctctaatcctagaaaattaggtcaaatctcaagtacttctaataaccccaatacttacaccatcaacttattataatattcctgtcaaatttaataattaaacctgttatgatatgtttagcccccgatcgagtctccaaggtcgccaaacttgaaaaatatttttattctacaaatagctcatattatattcacacatgctatataaatctccataatttacaaattacgcttatttacccacttgtggaaaatttaaaatttatgttgaattagattagtaggatcataattctacttattacttgattaacctataatataaatgtaaactctaattatttaccgttaggcttatcaagatattataaagatagagtacaggtggaacacagccttgccaattgcaagacagagtctccttacaaggtatggcaaaaccgtcaagtagtaagcgaaaggagttaagcaagccgtcaaggagttgtaccaacatgtatggccagccaagggaagtctattggtcggccaggatgaacttgtatggttggccatgatctgggcacaagctggccagttaaaaggtgactttcaaaccaagggagcttctgttcaaccaagggaacctggcctctgcaaggaaaaggtgtacaaagttgaccaccacttgccaaaggctagcctccatctcataattaaggttggcctcttcttggcaaagctggcaggaacatgacctgcaggatgctgtcaagcacatggccagccagaccctagcaggcacatggtcggccagaccctgagaggagcatgaccggctagacctcaacctgtagaccttgcatggccggccagacctcatcctgcaagtatatggccagccagacctcatcctgcaagtgtatggccgaccagcttctcccatgtaggacaatgatgtgcagccttcatccgtgacagcaagccaagttgcgagttgggccttgatagcccattaagatgctatgaaaatatctagtttcaaggggcaacttagtcatttgtatttattaatttaatatgtaaatatctatgattttatatgctaattaaggtttatgctctcctatataaagggccttaactcaacccaagaaagctaagtctcatttaggccataaagctctaagtctgaaatcctagttctttctctcttttacaccccaaagggccttctctctctctctctctct

SEQ ID NO: 60230 - DNA, 1624 bp, Cannabis sativa
actcatcctgaatcttctgtctaacacctttgtcgaccggtgcacaaaccctgcccttataccgtaataacttgtctgaaaaaattaaaaagtcctttattgacccagcttctagcttttctttgtacccttgtagctcagaatcattctgctgagctgtcttgattctatctaacaaatcagactgcaacgtgatattagcaagttttccaaccgtaaattctatcctcgctctaggcatgtcctcagccagctttggtgaaatccacttcaattcatagacttgctttggaccttttcgacttagagcatccactaccatgtttgctttttcagggtggtagagaatctcacagtcataatctatgaccagttctaaccatcttcattgcctcatatttaaatccttctgggtgaaaaacaatttgaggcttttgtgattggtatagatttcgcacttttttccatacaaataatagcaccaaactttcaatgcaaaaacgactgctgccagctcaatgtcgtgagtaggatatcactgctcatactccttcaattgcctagacaataggcaattacttttccagactgcattagaacacaacctaacccctgataggatgcatcacaataaatcacgaacttctgattactgaccagcaaagttaacacaggagcgataattaatctttgtttaaactcttggaaactattttcacacttattagtccaaacaaacttacagtttttttgagtcaattctttgaggggcgtagaaatcttagaaaaccctcagtaaatcttttgtaagatcccgctaatcccaaaaaacttctaacctcgattgcacacttaagttgaggccaatcccaaactacttcaattttcaccggatccaccaagataccgtctttattcaccacatgccctaaaaaacttacatgggacaaccagaattcacatttcttgaacttaacatataacttatgctccctgagacgttgcaacaccattcgaagatgtttctcgtgtgtcacttttgaattagaataaattaaaatatcatcaatgaagacgataacaaaagcatctataaagtccttgaacactcggttcatcaagtccatgaatgttggtagggcatttgttaatccgaaggacattactagaaattcatagtgtccataccgggtacaaaaggctgtcttgggaatatcctcttccagaatcctcaactgttgataaccagatcaaagattgatcttggagaagactgtcttttcctgtaattgatcaaacatatcatctatccttgggagaggatactcgttctttactctcaatttgtttaactctcggtagtcaatacacatctgtaaagttctgtccttcttcttcacgaataaaactggtgcaccccaaggtgaggtactcagtctagttaattttaaatccaacatcccttgtagctgaacttttagctcttttagttctacaggtgccattcgataaggagccctagatacaggcttcggtcccgatatcaaatcaatttcaaaatcaatttcctgctacggtggtaacccaggtaactcttctagaaaaacatccagaaattctcgaa

SEQ ID NO: 60231 - DNA, 644 bp, Cannabis sativa
gaccgatgaagggagatgaccggctataactttaggtcggacagatatagaggtgatggcttgaggaagatgacgaggcggagtgatacgagagaaattgggtttttactgggtttaatattttttttaataaaataataaaaaaaagttaagatatggtattattggttttgtttacaaaaatatggcatataaaagcccataaatatgtaaacaaagtaaaaaaatccataccctattgccattatttaattatgccataaaaaagtaaaaattaaaaaaaaaaaaatcccataattgatgtaatttttacttatttttttcagctgatggaacaactccagcacatataatgtaaaaatgagaaatttatttaattaaatagaaaattaatcataaaaactcaaaattttctaatattacccattcatgagtaatacctattaaaagtgtacccatatatatatatatatttatatatatattaaacttatcaggataagttttataaaaataataatattaataatttaataataataatcatatacgtaataataatagggaaatttgaaaaaatatgcataaaataccctaattttttttttctaaatccataataccccatattttccatatatgac

SEQ ID NO: 60232 - DNA, 1037 bp, Cannabis sativa
aaaattattaaaaaaatataaaaacaaataaaattatctattaattattttgtaaagcgtaacttaaaataaatgttcaaattctaatgatatattttttaaattattgtctataaaatattgttttaaaattatataaatataattaaagttataaaaaatatatatagtttagtaattatttcattaattgtaaaaaaatgtgaaaaatgtaaagcataaactcgagcccatataagaaaatggactagcatgtttgagaaatacgagctatcctcagtaaagtacgatatgaaaatatcgagcctacggaacatgtcaggtatcctctttaaaaatgttagcacaacacacgacacacgacatgacacatttcatatttttttatggcaaagtatgacaagtcccaaatattgaaaagtatagaaaaatatagatcggcccaacgcattaggattgaacatcttagtcaggtttgactcagactcagtcaacctgctcaaactcgaccgatcaaaatcggttgtgtcaataaacttgttccccacaagcgggtcgagtccaacccgttcagctagggatgaaaatcggtcagttatggtcagtttttataattttataaccgaccggtcggttacagtttttattttacgaaaaccgtaactgaccgtttagaaattataaccgtataaaatcggtcgtacgatttctggcaatttttagcggtttttcagtttggcggttttggacggtttttggcaattttaggcagttttggacagtttattgcagtttttggcagttttttagtttaatcaattttttatttcaaaaaccaaaaccgactgtcatgtaaaaaaatcgtaatcaaaaccgaccgccaaattcggtgatgacgtggaactgaaaagtcggttacggtctggtcggtttaatggtcagctttgatttttcgatttttatgaacacccctatgttcagctttgtagagcgagtttgagtctaatttttgcacttacacaagttcgagttggatc

SEQ ID NO: 60233 - DNA, 890 bp, Cannabis sativa
aagaggagggtgtggagattgatgctctcgactcggaggagggggtgaattttgacgatcggttttgtttggtaggaaggtttttgaacgctagaacagtggacttcgacgccatgagacacactttggcagggttgtggaagcctggtaaaggactatttgtcaaggaattagggccaaatctttatctttttcaattctatcatgaaatagatatcaaacgggttatcaatggaagcccgtggactttcaatcgtctcctttttctgtttggaagagtgctgggcggtggagatacgaaattggttcctctgaataagttggatatgtgggtgcagattcatggtttaacttcgggattcatgacggagagagtggtgaaggaggcggcgaaagtaatcggagaatttgttgaatccgatcagaagaacaataacggactatggcgtgattttttgcgtgttcgggtgagaatcaatattgatcaaccgatcaagaggagaatgaaactaaaaaaggttggtggggacttgttttgggcgccgtttaaatacgagtttctttgtagcttttggtacatctgtggcattattggccacactgaaaatttcgatcataaactgtttgatacaccggacgaggccattgtcaagcaatatggggaatggttgagggctcaaactcgtcggaaaaactatctgcttcattctcaatatttgcgtactggtacggaggcggatgagcaaacctttgggccaagagaactggctgctgcgttcaaccccgacgaccaacctgtgccagctactggtgtgactaacagaggcaaagagaagttgccttttttagttgatggagggaatcacggtcatacaaaatctcaaccattt

SEQ ID NO: 60234 - DNA, 845 bp, Cannabis sativa
tgatgtcacggtccctgtttctagaaaaaatgtatcatcttgaactgatccaattgtgtgcgcagatagttgttgcttggaagttgttgccaggttgtttgcaggttgctgcacatctgcttgtgctgagttgttgtcatacgatgccatcatcatattgttgcacatcattgtttggttaggtggtgctgtgttgctaattatgttcacacacaatgggtaccttgtgaaatcaacctctttggttaatagctttatgtagaacagctgacttttgtaatccttgatttgtagtggttggcctccttccttcagttggtatctcagttgtatttgtgttgtttcagggttgcattggagttcttccatcattattctcagtagttcatcaaaagtgcatttggtggaaattaattctccacttgattcatattcaacatagtttttgttgtcatcccaatactcattgctctgtaccaaaattttaatggttctgtatcttgaaagaatgtaaattatttatttgtttcagtttcagtagttgcaaacaactatttaaatatggcaaaacaactaataaacaactctttccagcaacagcttttgcaaataacattcgatctggacgactatttaaatatgtcaaatcaactattaaacaactattttgaagcattcagtaattaataagaatagattcatcttttctcgtttgtagatcccaaacaactattatttactgaaaaacaacttatgaacaactgtttacagaataaaactctgtagcatctatttatatgcattaatattttttttcatgcaaaccgttgttgtttttttgttca

SEQ ID NO: 60235 - DNA, 604 bp, Cannabis sativa
ttattaaacaagtacataacatataaatcttgaattccattaaatcattggaatggttctccttgaaagaagaagtttttaaaaaaattaacatgatgacaatcgtatacgactgactatccaagttaggtgaccaaccaagataattaaaaaaaaatgttaaaagttatcattagtgtcgagtaatttttaaatctaatattattaatgaaattaaataccatatcttatataatttaatgtaacaacttttaaggctctacctctaagttgtgctatgcgatactgatatctagtaagaatgtttataattaaattaccaaatcagtttggttttacttttttagctttaaaattgagggaaaaatgttgtagacccccttgaattggtgtttcaatggacctaaattttttttggtattcagctaagtttatttttattctatttgtttatcgaaatttttagaaacaaaataaaaataataagaattgaagaataaaataatgaatagagaaagtgtatatagaatgagacaaaaaaaatttaatgtggttagggcgttaattagtcttagtccatgtttcagtattattcaataagctt

SEQ ID NO: 60236 - DNA, 1380 bp, Cannabis sativa
  modified_base (1162)..(1166): a, c, t, g, unknown or other
atttcgaaattctctggtttttttcctaataaggttacattgattagtgaagtttgtagctttattttgaagttgtttatatatgttcaaaatgttcatcacttgaatttcttattagaaaatagtaaacttcatttcttcatgtatgtatgtatagaccatttcttactgtctaaattttctttaattttgatttttaattgatttattgaggtatttaagctcttcatatgtgcttgtttagttgggttttgtattttttttagcttttatgttgaagaaaaaacatgtttgaaaggcatggaatagaatactagtatgctaattatatataaaatttagtatttttaagaactgatttttctttgtttttttaattataagtttataattgattttttgaataattgtgtgttattggaatcagttgtattttaatttatgtctcaactaatttttatttaagtcattttagaaaaatagtttttgaattatttatttcaaaaattgatttaaggaactaatttttaatttagttattttaagaacgatttttgatttagttaataaaagaaatcggttttgattaatttaagctctgttcggcaaccattttgttttttgtttttttaaatttcacttaacaaaatcttgttgtttgttcacggtttttgattaattaatcaaaaaattgatttttattcttatcgaacaataccttatttaatctaactagtttttgtgtgtaacttgttatcttgttgctctataaactagtttctttgtctcaaatttttaactagttgataaatataaccggcttctttattatatattttaagttattgtgtgttatttattttgttacggaatcagtttagtttaaatttatgtattagtatttttggaattgatctctattgttttataattataaccggtttatgaggtattatatgttattcgtctttactcaatttgttgtggaattaatttttttgaatttatattttagtattttaggaactagtttcttttttattttttttaattataactggtttgagttattcagtgtaatttgtttgtattcattatattataaaaccggttctattttaattataatcggtttgagttatttcgtgttatttatttttannnnntataacactgttatagaaccaattttatttttgttataactggtttgagttattttgtgttatttatttttattcttcgtgttatagaatcgattttactttaattataactggtttcagttattctgtgttatttacttttactcatgagaaatgtaagtaaatggtcctatttctaactttatagatagttaatgtccattttttaaaataa

SEQ ID NO: 60237 - DNA, 883 bp, Cannabis sativa
agaaaaagtagagagagatactttgaccttgtgggaatttagaagaatgtgaaaaatatgagctagaggaactttccttttataggaaaggagatcttattaaaataataaaaaatacaaaaaaaaaatatgaaaaattattttgggttggtcttgaccattgattattattcatgataatccaatggtgaagatcgactcttggtgaaaatcgtcgattttcagactttgaatcccatctgtcgaattgtttttgtgttatttactagaaaaatcataattttgttgaggacgaattttggatccgaaatctttagaattgtgatgtaggtgtgagacatgacttggtagatcgttgaaatatcttcaaaactcaagttgaatatcgaatcaatattgagtgagttattgtcattttactgaaggctatgcagcaccctacgaccaagttgacaacctagcgctgagatgacatcaacctggacactgggtgggtgccaaaacatcccagaattgtattttttgatgctcaagttatgtgttgacaccacttagtcagattcaatgctctggtgaagttgttcacccgttctcagagatgtcgctattttgtaaaattagaaaaactagatactccccgatcttatcgatatcccaccttgctgaaagaatgaaatatcaaaatgtgaatttgacctgtcacaatttgtagctctcgtttactacaaagaacatagttgaatgctcgaaacaaaatcgaattctgataagtagaacccagcaaaggaacccagttgtcaacctaggcgttgggtgcttccgggactccttcctgaagcttgttttgatacttttatggcattcaagattgcgaacaaggtat

SEQ ID NO: 60238 - DNA, 1094 bp, Cannabis sativa
tcaaaacacaaatcttcttccaattctttttctggcagccgctattccaatggattttcatttttttcggcgtcctcaacagtccaagtcagccacacttagcactcaccaaggtactatctcattatttgattcaatttcttcaaaattttaaaagtttgagattctatttgtgaagtgttgatgagattgctctagttcgaattgggtgtggttcttggttgcttagaatttcttgttatagattttataagtgattttaagtttgggaatagattagagaagatttgagtgtgatttggaaggtaactaagtgcgggcaccaagtgtgcggtaaaatgccaaagtgaagaaaagttgtgattttatgaagttttgggtgatatctcactttggtttgattgataggtgtcgtatcaataattagtgggtgttttagaatatatttggagagttcattatttagatttggtgatatgactccaacattaaaagagaaagaatctccaagtcactattgatcatacttttgtcattaccggggcacaagcaaagtttgaggaatggaccgctagtaataagagtttgattgttgaatcttattttcgtccaagtgcggaagatggtgttttactagatatggttattgctcgacaatggcaataattgtgtgaaccagttataggagcaaacactagtgtggtgagagagttttatgctaatgcttatggtgggcatcctggagtcaagtgttagtaagaggaaagctagttcagttctcaccttcagtaattaatgagtattttgggcttccagattttgaagacggtgtgtaccatcgtgatctagagagcaaggattatgataaaatcctcagagagatatgactaagccaggtacacagtatacaatggggaaggatatgattactctgaggcatattagaaatatcagtttaagttatctgggcaaaatgtggaacagatttgtgattaaaaacttgcttccttcttcacaacaaggagagatcaatattgagaggttgtatctgctgcactgtatttgttcaagaaaaagtatcaatgttggtaaac

SEQ ID NO: 60239 - DNA, 1066 bp, Cannabis sativa
agttacattttgcatcaggttaatttcccttcctcctttctcacttttcctcattttatcagttttactatttttaatttgcttccttctcgaaggcatctcttttctcctttgccacacatcataggtcatcttagtaggctacaatgctcgagactgagctttgccagaccagggaacatagggacactttagccaaaaagtggaatgattttgaggccgaggtttctcacgcaaaggaagaggaagaaaagaaacaccaggttgactagaagaggatcaaggagctcgaggattcccttaaatctctccaagctgaccatgacaaaagactcaaagagattgaggctgaaaccgaagatagggtcaacagcatcgccaggagaaccatttatcagacctggtcggcaaaccctgatatggactttagctttttgggtgaaggagtcgaggccatgcgtgccctatctgagaaaacaaggagagaagaacttggcgaggatgaagaggttgaggaggaacaagaagatatgtccaagtctcctacaatgtaggcttggtttttaatttgcatttttttatatataggaaaatagccatatggccaagataatggtttgccccttgtggcatttttttattgcaaagacaaatttgcattattggatgaccaactttactttcattttatcttatttattgcctcacatctttacatttgaacttaatatattcgcttgtttgtatttttattcacaacttaaacaattatactttgatcaaacttaagatattctatgtaggtatttctattgatcttgtttttccttcgatatctcttaagtagttaataatctaaaatgcatgcgagcatttattgtctgccatgttttctattcatgagcagtttattagttctacttcgcgtaaacagttataatctactttatgcaaacttaaacatacttgaaataaataatttatcttgtgaattactttgtacatttttgattgcttatatgaatagttaggtcttctattcatatcttaggttaagtattatctt

SEQ ID NO: 60240 - DNA, 1501 bp, Cannabis sativa
  modified_base (30)..(57): a, c, t, g, unknown or other
accattcaacataaaatgttatttctgatnnnnnnnnnnnnnnnnnnnnnnnnnnnntgaaataagttttatttagggcacaaaacccaacaaaagtaagagtgctctgtttcaatcgattaaagacaacatctggaataaactttttggctggaagtagttgaagctcttttcttttgagggtcgtgaagttctattaaaattagttattcaagccatccctacatatgtcattagtttgttccgtctgccaattggtattgtgtcaatgagatccatcgaatgtgtgctactttctggtggagtggggatgatgacaaaaagaagatgcattgatgtacgtggtctcagttatgttggcacaaaaatgatggtggtatgggtttcttagacatgtttttttttaatctgtctcttcttgctaagaaagcgacacagttatataatgctcctgattctttggctgctaaggttatgaaggggttctattatagtaatagctctttgctggatgtcgaggagacaaagcgagcttttttcctttggaagaacattttatagggtcgtgatctttggaagaaagggttttgttggcttgttggtttaggggattctataaaaaattgagaggatgcttggattccaaaggaccatgtaggtcaaacttattcattctcgtgtggctctcatcttcaagtggttagtgatctcaagcgggatcatggatgttggaactcctctttaattctagagtcttttgataaggtcaaagttagtgctattttgtctatttcttgttatctgtttgatcgacgtgataggcttatttggcatttttcagacaataaaatttactcgatgaagcgtggttattggagcgcaactttgagtttgggttagggacaagctttaggttcatagggatgtctcgttggtggaagcttctttggcaaattaaccttccaccaaagattaaaaactttgtttggaaggccagtctaaattttctaccgtcctatgccaatttgacttgccatggtatggaagagtctaaggtttgtcctatttgtttccagaataatgagactactattcatgctcttttgctttgtcattcgcttaattctatctgttattggatcctaaaagagcttgactctttaaaggatgcctcttgcttttatgaattgttgttgggttgtgtggatattttgagtaaacaaaaactggaggattccattacccttagctggcgcatttgacataggcgtaatacttttgttcatgatcataaatttttacccggtaatatggtcaattcttgggcaatcaattatctgcggagatatcaagatgctaacattggtaggtcctcgacaaatggtaggcctcctactccgggaccgattgaattgcctgctactaacacaaatttggttttaggtaaggtcaacttgtttgtggatgctgggatttgtgatgaagactgtaaaatgttggg

SEQ ID NO: 60241 - DNA, 749 bp, Cannabis sativa
caaccacaccgcaaaaaatttcaaaccgcatcttttttgcagtgcggtatggtgcgagtggtttaagcggtttgataaacaaccctatcatttagtaaggaagaaaggagagaataggacaatataaatgggtggaagtagtggccattctttttattcattggcctttaatttctaccaaaaataagttggtgtggggccatgataattcacgtatctataatgtcaagagtggttactagttcgttctccaaaatgaggggcttgatagagctttctctgctacgggccgggtattcgagttggtggaataaatttttgaatcttaacattccttgcaaagtaaaaatatttgtttggcgaattttttctaattggattcctactaacgagaatttcattcaacatggtcttctgagtgacggaatttaatatgtttatgatgattgaatggagaccaccaccatatgtctgcatgataaaaataaaattaactttaaaagccatttagttggctaaattgtatcaaaaataaggccataggccgagtacaaaaaataaaagatagagaaattttttatatgattatgggggtcgatgggttcagatcttgggcggctaagatgttgtattcctattttagatgggattttggggttaatagcttcatgggtagcattgctctctagatgctcggcctgctcctcggatttctcccaagcagctttagcttcgcaaaaggccaatag

SEQ ID NO: 60242 - DNA, 798 bp, Cannabis sativa
  modified_base (747)..(758): a, c, t, g, unknown or other
atatatacatatatacccaaaaatatacatacataatatagtcgatcgagttcacgtattaggggttgatgccggccaccaccatgcaccgcggccgacggctctaacagccaccatggtcgacggtgatcatggaggccacagaaaggagcatgcaccacacagggcagagtgagacaagcagcaggcggtttgactgagatttggaccctcacgggtcgtgcttgaatggttcacgggtgttggacgtcctgcatgcatgcatgctgtcaacgttggagaagaaaggaccgaaggtccttgtaatgttacagtcacggtaatggtggtcgaaccaccttgctcctcaagggactcatgtcccactcgcatgcattgcattcatggatttgtgggcacggtactcgaagccactcgggtggctatggatggcatgggaaaaattctcgagcttgcatgcatgtgattttgacgtgcatgatcggatttcaaagtttagaaatcgagctcacatgcaatgaacatcatattgtataatttttacataaacaataattacataaaaattcatataccctataatggcttacattattttctaagaaaaaataaaaaacgaaacctacactcaattataccatataattgacaatttatcacctctcaaaatattcacaataatataaccattcattcacatacatatcacatatatatatgaatgtataaatgtaaagcccgcttagnnnnnnnnnnnnttagcagttgtttatgtttaatcaggaaattatttatagc

SEQ ID NO: 60243 - DNA, 1091 bp, Cannabis sativa
  modified_base (662)..(665): a, c, t, g, unknown or other
cctagccttgcatgccacaaatctattgtttcgttcttccgagtcttatctacataagcggactctactgacattgcatagacagactctaagcgtcatcctttcatcatcggtgttccaaggatttcaagatcttggtagatcttgacatcttgagggccaaatacgacatggtgacctgtcaccgtaagttgtgccactgatagtaagttttcatcatcctaggtacatggtagacatcttggatggagtgaagcttcttttgggttgaatctcggcgtgattgttgttttactgatgtgtgcgatcggtaatcttgagttgttggttgtaaccacttcgcgaccacctttatattctgtcatgtcctgcagcttctcttcatctcctgacatatgatttgagcagccagagttgactatccaatcattattgtagtcgatctttcttggaacaaaagctgtcaaagctatttcttcttcctccattgcgaatgatgcttctgcatccaattcttcattgcttgccttttttgcatttgatgtggatgcattaccttcttcagttttcttcttgaacgggaaacctttagctatgtggccatactttccacagttgtagcatttttaatcaaatttattgttattctttgattgaccacnnnntttgtctttattttaagctcctctagtttgggagctcccatgatgactatccttatcatcatattttctaaaatttctactagcatttggtcggggtggtcctttttctatctttactaaagagtgtttcttcatcactctttaatgagactccaaacatttgcttagctaacgcttcttggtcagctagtaagttttctaactcaacaagagaaggttggcttggccaaccttgtattggagcaataaagttctaaattctggccttaatctatgaataataattcttctaattctagcatcagatatgccagcactagagtctaatgtcgaaattttgcgacaaagagattttaccttggtgaagtattggttgatcgtcatgtcgcgctgcctgattgagagaagctcattctccagaagctg

SEQ ID NO: 60244 - DNA, 1917 bp, Cannabis sativa
caagagagttcctaaaaaaaacaatcagaaatgtgaataatattgactcgtggactatggaaaattttaactgcaaaaccacgtaaaaaactctgtgttcatatctttatttttatagcttttattttttctatgtgagatcaatattgtgaggctcaaatttagttaacgaaaatttgcgttaacagtttggtgctttcattgagagcctctgtcaaaaagctttgaaaaaaaccctcccttcttttgaagaaaaaccatctccttcatggctaaaaattcagaaaatgttaacaccccacatgaggaaaccaatcatcgttctggaaaagaacccataggttccagaagatctacccacccatagtctagaaggaccacccgttccaggagggctcaacctgagggtggccccagtgcgcggaccacacgttcccagagaactccactcgacgttggtcctagtacccggacaacacgctcaaggagaattcaacgtgggaatggtcagaaccccagaacgagggatgaagaactcaatcgtggaggtgcccaatctgtgggagaaggagcctatgaaacagaaaatcgtcaccggggatgtcgtctggaagaggcgtagcgtgaaaaagctatgttagaatgtgatgcagcctcggccaggacggcacaggggacaaatgctcaaaatcaacctgaacctggagtgagaagaccatgaggcagacctcgtggctcatgaaccaggagacaggaaaaggcccggtaagaacaacctggggaaaatgagacaccccctaaaaatcaggatgaacggccagatgggagacaaccagaaactgataaacgagacatcgctcatgagaatgaggaatatcttgggactcaatcgggagaacaaaggtcacctgctagaaatcacagcattcttcccaaatccatagagcgaggactcgtacggaccctgatgggggaaatacgacaaactgctcttgggaggaaagaacagagcgtgaagaagcaagcatgacttcgaggcgttcgagaacccatagtcgatcaactcgaagaggagaaagtactgaacgagctaatgatcgagaaagtatgggaaccagtaaatccgtgagccactcaatgacaaagtctatgagtaggacacgatctacgagtaagacaaggtctgccagtaattactctcatctggatctacgagagcacttgaatcggaagaaacctgaccttcgccaacagcttggtccaaagcaagaggatccattccaattgcggataaacgaggtggaggataagttcatgagatatcaagtgggggaattagggaaactatctggatacgactctaacgaggaacttgagccgtatcttccaaacataatgagaaccctttttcctttgggattcaaaaacttgcatgtctcgtcatacgactgaaccactgatctggtctcgcatttgaataactttaatacaataatgcgagcgagtaacgtaacgaataattcacgctgtattttgttccccacatgcttgttggagcagcaagtagctggtttaacaagtttactcttcattcaataacttcctgggagcaattatcaagggatttcaagaaacaatttcaggctgctagggatagacgacctgaagcggcctcgctaaccaatataaagcagtagcccagcaaaacacttaaggcatactgaagctattttagcacggctgcggctagggttagaaatttagatgacaacatgcaacttacaaccctttaggtggggatatctactgatccattaaccgcagggggcgagttgtgggatgacttagaaggacgtccggtgagaagcatcaatgagttcaacgaaagggctcaagtgttcgttcagaaggaagaag

SEQ ID NO: 60245 - DNA, 1091 bp, Cannabis sativa
tttgcggtgtggtgcggtgcgggcggtttgagcggtttgagcggtttgatgtacacccctaatgaaaacaataaacttagagattattactgttaatttttgaagttaaagatttatttacatcaaaataaaaattttgggaacttacacagtaattttttcaaattaaaatactcttaatttattaaatagagatatggatgcatagcctattcaacaaaactatgtattgaagaaatatttctctattataactatgagaactctctacatggacaaccctagctaatgtggagcatatgcatgcctttaattttttattttatgaagtcaaaactaagataagataagaatatatcatatatagagtagtagactgtagaagagatgtggatccgatttcgaagtgataacagtattaataatttattgatatacgagcagtttgcaggttgctgctattaaggctaggaaattccttcctgtgccactgtacatggaaatggaattgggtaattcttttattaatttaaactaaactaaaagagtaaaaagagatagaaaagaagaagaatgagagttaaaaagacaaaaaccaagataccaacaactaactaaacaacaaatcacgcatggcatggcatggcatggtggccgtgtccttttactgtctggattttattttaatttcttctcttggcattgggaccagggaatttcttttcttttaaatactatagactatactatacaaaccaaaagtcagactgactcaaaagagaccgaataaacgcactagcacaaaaccctatctcccttcctcctttatatttttcagtcttctcaaataaataatttttttagatgttccggtttctttttttaccaaatgcaatggtgtgaatatcaatatatattaccctagttttttgtggtattatttgctttaggccattcttgtaattgcctcatatatgtgttgctttagggtcaatatgtaaaatggtcttaaatctaacaattaagttaataaatgttcttttttagaaaaattaacaaaatgtccattcaattaaaaatttgatgataaa

SEQ ID NO: 60246 - DNA, 911 bp, Cannabis sativa
atttatttaatctctttgttggtccttgtattgtattacaatagagttgtaatattttgattttcttccattgtaataatatctctaacaaaaacaataataatttaaatctaaacacagctgctttttatctatttttctattttttttttcaaattctcaatctttcttatacactcgtaaatgtatttgtcgatgataacattattgtgtacaataatatactgagatgcataaaaaaattatatggtactactctctatattacttattatatttagatttttatttttctcacactcttaaacatatttcttgatgattttatttatatgtacattaatattagtgcaattctttctctatataattaaaagttcactatccatataccttttataaatatgttacctatatttaccattatcttactactatataaacgataaaaaataagcatacttacacactattcttaatttatatggtgtaactgttttgctttatattatttttacaacagattattaagttatgtattattatatattttttagaaaatcataaattaatctcttatttctattattctatgatattttatgataagtttcttcaagatttttttttttttgtgagttccttagtaactttttaatttttactcaaaaaaatccttctaatactttttttgtatactcctattaaaaatatctaatattaatttcttttttacaaaaatcaataatattaagcataatttaaattcaaaactattattatctatatatataaaaatctatctatatatatctatatatctatataaacgagagatataaggcggtgacatttatctttttaataagcattatttgttctctgttataaatattaataattatgtggat

SEQ ID NO: 60247 - DNA, 1267 bp, Cannabis sativa
tatgaacaagattatgtgattactctactcagaatggcgagtattcaaactatggacactcagacgtactggaaatataaataacacaaagagaatatagtggttcggttacatcacggtctgcttagtccactgttgcaaggattttctgtcttctgttcattccattttggatcactcctttatatacaaaaagcaagtgtcctttgagattacacagagattgatttaattatcaatccgtttgtacattgaatataaacatttaaactatttaaaacgtaaatacaataaatgaagaatattttcggcccaatttactaactacatctcaacgtatgtgactttcatgtggtgtatgagttgtctgttcatattctcgtataagctcgtaggctcaagatgcgtacaggacttatcgagtctaggatgtctgcgtcctattcgagtcgcatatacggacatcttgtaataggtcgataacttaggacatgcgagtccttatcgggttatcgagaatgttgggtcatctggaccagctcattgagtagagaatcgatctttactactgcgcaggaagacctttatagttctcgcatatacctcggtatatgcgagttttaaacttgatcttcgatcctccttcgtgcgagtcataagaatgcaactagactctgtcaaggtcacatcatcccgctgagtttggttaaggtgaagtttacactcaagaggtctccttctgacatctcagctctcctcgaggaaagtgagtccttgtgtcattttacgggagcctggtctcgagtttttaggtggaaaattctcattataacaaatacaagtcacaacctcatgtatggataatttttttttgatatttatatgtaaattatttaatattatatattaataaggaattattacatgaaaaatataaattaacactttatttacaaaaatacctccataaggtatggacaacatttataccttttatgtttatgtgcttttaattacaaaaacatctcttacactatcacttacacaatcaaatgatagttgcatggttgttgctaggtggttggccgaaggttgcataagacaaaggtttcgatcagacgaaggtcgctaggtggttggccgaaggtttcaatcagatgaatgttgctggatggttggccaaaggtttgcatcagacgaaggtttcaatcatacgaaataactgttagcaaaatacttatgaaactgtaatgcaattgttatgaaa

SEQ ID NO: 60248 - DNA, 586 bp, Cannabis sativa
agaccatcctcaagcaacaagcaatctagttgggaatgttagaaaaaataaatacataaatccaaatcgaaattaccctctaaatgaaattgttgatgatatgataaatgactctagtgtctccatttcatatcaaaaatcatggagagttcaagagaaagctaaggagtatattagaagttgtccacaagagtcatatggagacatacctacaattttgtacatgatgcagcaaaaaatccaggtatttgatatttttatgtacatcttaaaacttcaataatagctaaatacaattaagcttcctttgaaatattaagcatacttactcaaataaaatactgaactaaatagtagttgcaaaccttgtattgtcactaataataccaggaactgttagttacaattataagttttattatcactttttgtggtattatatataaaaatatattaattgtataatatttacatcccaggaactgttacaaacttagtgacagatgaacaaggaagattcaagtacttattctttgctataagagcttcaataagtggatgaaatcattgtactccaataattgta

SEQ ID NO: 60249 - DNA, 781 bp, Cannabis sativa
agataaatcgatgcccgccgtgtctgttgcaatgtgggtttggtccgcacggatgttgctccatttctaggtgtgaaggaagctcttagttgaaactgattgctcaaatattgttttatgccattcatagtttagttgtgttgttttcttcttttggcattgttatgatcatgattagagatttacattcttctttaaggaatgttttcatttgttatgttaaacggtctgttaacactcttgttcattggctttctcgtgtgtcgtgttcattctctgttgccttttggttgatgattgttctcattaatgaagttcaatctttcttttttgtttttctttaaaaaaaactagtgatggagggtttgtactctgtgtttttgtgtatttgttcgataggccatattgtaggttgataacaattcttgtaataatttattaatggtttgttttaaaaaaaaattgtgtttttccatataccatttttttaaaaaaaaaactgtaattaaaatgtgactataacaacttgcaataacagattttttttttgaaaaaatcttagttcattgattaaagaagtaacatgggattcacaggggacaatccctccccttgccaaatagtcagatccgcatccaatcctagccttgttggccagatcatccacaactacaaagttacaaacttcacacaagttatatcaacctcttaatggtaaagagtgttaattccatttttggcatatttaattgataaaaatattttattatttattgtatat

SEQ ID NO: 60250 - DNA, 962 bp, Cannabis sativa
taataataataataataatacccacaagttattaatgaattataggaataggcatcaataattaagaattatttgagacttttgttttcctgtagttatttatttatttgctttaattggtccttacatctttattctagagttgagttgaattataatttgtaaattcatttttactaatttcacttcttccatgatgtaagagagctagatcctagaggggctggaaatcaactaaggtataatattattaactacaacgcagcaggttcagtgaaagcatatgattttaataatctttcatttatcatctaataatcacagtatgaacattgtcttacatagaataaatattagagaattgaatcatatataagaacataaattactccactcattatcaattaattttgagatggagtcccataattctcaacacacagcaatgcagaaatagaacatatttattgttactttttttatttgtgattttgatatcactcggactgaacaaaaaatcaaacaaatttcaccaagtaaatgaacaaatctaaatctgaataataaaacagagagataattgaaactagaaacacacaatattgaagagaacatccttcctttattgattacaaatcaatgatcgatacaagagaaattacaatcaaaactaagggcagaattacaaaagtctctcaccctccatttctctattttctttctcttaattgctagttcgatcatctctcccacttagacatgtgacacttatatacatagctagtgagctataagggcaaatccaatgcaagctaccttttagctatggaccctattttttattttttaactataatacttttaaactaaccaatcaaaatagataagaaaaaaaaaataccgcatcgctgctactatccagcagttctcaaatgtttatatttgaaaagtcaatttttttt

SEQ ID NO: 60251 - DNA, 1371 bp, Cannabis sativa
atggaatatccacgggtttctaccagtagcattggcctacggttaaaagagatgtgttcaacatggccacacactttttcaaaaattttgagcttccacaattcataaacaacacgatcattgtgttaataccaaagaaggagtgcccaagcggtgtcaatgattacagaccaatcgcactatgtaatgttgcctacaaatgcatctccaaaatattagcgctagatgatgactctaataaagattttgttgaaccaacaaacgaaacccatcatggttctttgaagaaaaaattacaaaggaaagagttagattcctgaagttaagatggggaagaagcatgtggatcaaattcctaaggtttggtttcaatttcttttcggtttttccctaattttgaaatgttgtctttgttttatttagtgttttttcttataattttggttatagggttttatatattttatttattttgttgttttcttagtgataggttttatgatttagaatattgttagatttaggttatttttagttttttttggcataaatagttgtttattgatgtatttatttctattcaatttagaatattgttagatttaggttatttttatatttttttagtattctttggccgattgtttaccatattttgggttttggtatggttttatttttaaacagtttgctaaatgttgtattgtagtttgtttacactgtgttcactttttgctttcattttgacctttttttgtttgattttagggatggaaatgcacgtagcctgattctgatcactatagatcgaaagtggcctccacttggagtaacaatatcatttagaaacttaattctaatttttcgagaaatgttaagaatttgttccgtgcaacccaattttataaatttttagaatattcctctgttcaaattgtttcctcaagctgttcatggtattctcttaaaagagatatagcattccaattcgaatgaattttggaaaaacattgctggtccatgcgttcattttagcgttgaagagttcaccttgattatgggtttggatatattgtatagttttgtatgttgttttcatgcttatatttacatgtttctgaattatgtcaatatatataatatttaattcaatgatgaaataaattttatgcaacctatctaattagtaaaccaaggaatatagttacaaaaattatttgaatctttgaattattgtattatgtataacacatttttacaactatcaatcaacgattggacaacttttaaagattcaacaaaatagtctgtgtaataagaaaagttttagaacttcatacattaatattttaagggatattggcggctaaa

SEQ ID NO: 60252 - DNA, 519 bp, Cannabis sativa
acaaaatcataaatcttttgtctattagtctaacaatgtatatgaagatgagaaaatgggtagaataaaattattccaaatttattgatcgacagaattatctcatagtaaaagttttttgagattctacttatcccctccaattacataactaaatcacaaaagaaaaatcagcctatctaatactacttcagaaatatgacctaagaagtttaatgaaatactcaaacataggtcaaacgaacagtatatcctctaaaataaccaacacaaagaaatcaaacttaccggggtgatgacagtgctgtaacgtgaccagacaattccagtgcaagcaaccgctagaaaacaaagaaagtgaaaacttactctgttacaccattgtagcatcatatgaagatttgcaaacttaaattagtaaatggaaatcagtattctcggccacccacatatgtgtctgccaaagctttatctgcatcggattgaaacaatctttaagcaactgagtaagaacatacc

SEQ ID NO: 60253 - DNA, 803 bp, Cannabis sativa
taagaaaaagagttatttgtggcgaaacccccttatctttttttggtggtaaaaccttcttatgtttatttttctttgcaaatttgaggtgctagttggatatcatcgttaaatagcaacgtgattattactgtatatggttcgaagttttactttcacgtatacacaagtggttattcaggttgtatttaatggtgatatttaactgacgcttcaaatttgtaaagaaaagtaaatttaagggtgttttgtataaaaaaaataagagagttaaatgtataaaaattaaaatgtaaaagagttttaacaaaaagttgtaagtcataaataaaacatgaaaatttaaatgaaattgacaaaaataataattgttaaattattgtttgaagatattttcatgtacattatcataattgggtagggaatccattattggtagggttttatgacacattattagaaactcaataggattaccgttccatgtatgagggaatttgtaatttcccttcattgtttgattcaatgaacttatttgttaaactacaggtttatagatataagtagtaagtagagtacttaaatatataattgtcaaaagattaatggatataaaataagacatagaactttagttcaggagatttgttctgtctcgatgactatttactatgtattttctttgggagacagaaaaaatcccttaaaataaatttcatatccattaatctctaaaaaatgatatatttataagttctacatactacttacaaattaggaagagcatcaatgtcaataggttt

SEQ ID NO: 60254 - DNA, 698 bp, Cannabis sativa
tggaattcattatctttttgtataattaaagaaaaatattaaaaaactgagtcttggattaattaccgaactatttgttttcaatcttatttaattaatttataaaacttgcaaaacgtacgatatttacaaaattttaaccatatatatatatttattttttcattttaaactctagatgaaatacacatacaattttttttttttttttgaaaaaattacatggtatactcactttatttatttgttttaatttacttttatttccaatttaattacttttataaaatgatattttcattatactccttaagttaatgtactcacttataaatcatgtactatatttaagtggaggacaagaatatatttagtaacccacttataaaaatagattttaataaaatataatatgaaagtattttttattaatagataaaaaaagtgctattgatcaacttatcctatttttttacgtactaaatttattttgtcccgatacatttcaaggctaaattaatgttaagtcaaaattttgatcagtttttggtattaaattttaagtaagcacaaagtgtggtatttaccaataaattattatgtttggtaaattttttacagttttatttttatagatttttcttttacatatttatgctgttcttacaataaacaatacaaaaataataaaaaaaatt

SEQ ID NO: 60255 - DNA, 918 bp, Cannabis sativa
aaaattattttaaaaaaaagttacccatgaatttctcataaaacaagaattcatttatataggcacactttatatagaatagataccatcagtaataatatattaaaatccattttgtactcctattcataattgttgttttggtggatattttttttacaaaatagactaaaattttgaaaaaaattacaaaaatatatcaataaattttattatttttacttcttgaatttttttatttacaaaaatacatcttcaatacaaacaataaattgttttttttttgttattttatagtttatttttagttgtattatagttgtcaagatgtttttctaattgtttttggttgtttatagttgatttataattatcatgagcttgattttttgttgtttttatattttttctataaaaaaatgtattttttttattaaatatatatttttttataattttaaaattttaaaagactatttttgtatataaaaagtttaggttgtaaaattgtaaataaaacttagaaaaaatatttttaaaattctcttttttttgtgtgtatttcgtctaaataaactatcatgagcttaaatttaatcacaaactagtgattaataatttagtttaattaaatctataaaaaaaaaaatatatttttgagagaacataaggtattattttaaacagattttcaaagaacatggtactcaatacaataatcaccatatataagaacaccatacgaaattaaactatatatactttttgttttattcataaaatacttaatttaatctgcacaattcaattatatttgcacttatgtatatgaaatattaattgatatataaaagtaactaatctaattcaatctacacttatttatatactagcaaaaaactacgtgcgaggcacgta

SEQ ID NO: 60256 - DNA, 594 bp, Cannabis sativa
cgtaaagggaaagactactgggtaagattgtgcaataccaccacatcgcctggagaaggtcaagtgtaatgatataagtttgtgtgtgtatatgattacatagttgaaaataacttaaatggataaatgggtactgccaatatcaacaagatgcatcttctttttagtagcccatcacttaagaactccaaattttagcatgtttgatctgaagaaatcttaggataggtgacctatattgggatgttttcttaggaagtgtgcgagtgagagcaaagtacaggaatagcttatgttggtttgtaaggtcagacgttattccaggaagcaaccagtcacacacctgtgtttgagagccataagtctgtggggtggatgcccaatgagacttaaagcgggaacattacaacatagtcattcagaaaacaacacaaaagagctgaattatttcattaaaatgatgaaaaaagttttttctcttaaagtcttgggagctttgaattttttccttgggatagaggtgtttcaagtgcaactggaatgcacttgtcacaaaaaaaaaaaattgattgaattgctcaaatgactggaaat

SEQ ID NO: 60257 - DNA, 2694 bp, Cannabis sativa
  modified_base (2385)..(2386): a, c, t, g, unknown or other
cggttctaatggtcccctagaaccagtaaactggttctctgctgggaagccgaaaatcaacctccttgattcaaatcaactccaaactttgtaaaaacttttagtatacctgcttatacgccaaataacacatatcaagcatcaaaccacaacaaacaactcaatttatgaaaacaccattagaaacccaacttaggttctcttaactttaacttgaacaattctcaacataaacctcaatctcaactcaaaatagcatgtataattaactcctaactccagaattaaacaacatattaacccaatacatacaaccatctacaatcataatctcacatcaaaaatctaacctaaattacaaaaactctagaaggaaggaagtagaaaggattaccttgaccaaaactctatattatcactaaaattccttgatttaactccaattacaccaaccccagctgttgccctagagaattgaaagagagagaaagagttgaagaaagggtaacatgctttttctctaagttttctttgattccttctaacctaaataaatgaatttctttaaatcaataaacttatattcagcactagaaacaaacctaaataagacaaataaagtcttttcctaaagacccttttgcccttctaactaacataaatggttacaaactccaagggtaaattagtcattttcaaaccccaaaaattccaacaccttcaatactgaacaatgatatcccgctaataatattctaaaacatataaaatgcgactctctaaaggcccaatgtcgctttccatagcttctgaacacaaccacaaaaattgagaaatttacataaatagcataataaatagatatagataacttaaataaatttccacaatatgcattttataaataataattaaatctcatacataaaccctaattatttaataatccaaagatttaaccatatacggtcataacaggttttaaactctaaattagtcctagatgaaaagctatataaggggagtgaagtcacttgtaaagggacacaaatttttattctcatgaaatcactctcttgagctcccattctctcattctaaactcacttgagcagggaactcttggagaactctcctcaagcattgagatcaataacactttaagtggaatggcctattaccactaaaagggcttaaccactatataaccctcatgttcatctttgtcgaatttcctttcacaaactcgtttactttgattaactagtatttgtgttcatcttgctcatttatgatctttgtagatacgttgatgaaataccgcgtcaatagaaaaaaaaaacaaaggagatagaaaaatatgagaaaaataataataaaaaaaacactacaaaaaacagttacttttagtgacaattttttagtcacaacatatattttttgtgactaaatgtgacttttggtcacaacaaaaaactacttgtaactaaaacatagtatttagacagaggttgtaactaatttatttttagtcacaacaagtattgtgactaaaacatcatttagttacaacaaattataatttttgtgattaatacctttagccacagactttttagtcactacataagaataataataattaataattaatcacaacttttttacttttagtcacaagtttcgttgtgactaaaagtaagattttttgtagtgaaaaaattgatgaaaggaaaaaatataaaaataaaacaaaattgattataaaaaataaaataaaaaaggaaagaaaaaaaagatattagaaaataaagatgaaaaaattaaataaaaaatagaaggaaaatttatgggaaaacaattgcttgtaagagacaaaaattttatttttctctcaataaaaattcattacatagcaacttctaaattaaaaaactataaaaaaaaaatgaacatctatatttttgtatacgttgagtataagaaccatatttttattaaatatattatatataattattttatttttttagcctgtaataagtttatatatgaaagatcatattttttttttgggaatataaattatttatggattagacatgaagtatattattattattatttttgaaaaaaaaaaaaaaaccaaattgtattatttattttaatagtttaatatttttaaaatttatatttataagtaatacttattaaaaagtgttttctatatatatggattatgatttaatttttatttctttctatatatattcgtcattttaaatagtagaaattatactatatatgggaaaactttaagagtttacttttgcatggcataaataaataaagttcagaggttatgagtttttttttatttttttnnacatttatatgggtttttttatgccatatttttgtaacaaaagatgaaaatctcatatttgtaaacagttataagttttgccgaaaaagtcaccggcgctagagaagtcgccgaaaaaatcaccgttgtcagaaaagtcactggaaaagtcatcgtcgttggaaaaagtaccggaaaagtcacccaccggaaaaagttactgaaaaagtcatcagaagtagatgtctcaaatataaacaaaaatagaaccggttataattgaaatataacctgttctgtaacacagaataaaaacaaataaaataaaa

SEQ ID NO: 60258 - DNA, 1645 bp, Cannabis sativa
  modified_base (734)..(738): a, c, t, g, unknown or other
tgagatagcttcatcttgacattctcatcatgaagaaaatagtcgcccttaccgaacaatataggttcaaaggcagccattatcttgaaagaaatttcaggatgattttgatcagacgataaaacttccccaggattcatttgtctcatcaatccacaagtttcatagcttctcatcccaggagacatgatgtattcaagatcctggaaaattgtttttttaaaagtaagtgagatttcatgtggctgattaaaacaatgtagtgataatcaatgcagaacagttcatttcaatgtttattttaaactaccatgactgggatgtctgcatcaacttcgggtccatgtagaaaggaacgcaacaacttccatgctgatggagatctttgccatctaccgagtcaaaagagctaccttgatctgatcggtccagttttctagtataataagaggcgatggaaaataattttaccatcgacgattccaatgataaagcattcaattgatggggttaatgatggggttcgtttccatgaagatagttttggatggactggtggttagagtttttctaggagagattttaggggtttcaaaggaagatgggatctgatgggtaattttgtttattaaatatgtttatttattattttatggataggtaactgacgttaactttaacagaatcaaaaaaccaaaaaatgttaaactaagaattgccgttagataggcacnnnnnatatataaagatatatatagattattatattttttttaaaaaaaaaagccaaaaaggttaacgtatatatattgattgatattttatgtacgtacataaatgaaatttataattaattatatttgatttaagttttaatattttgtttgaaatttattttttattttctaactttttaaaaatattaattgatttaagttttaatattttgtttggaatttattttttattttataactttttaaaaatatttatatttttatagaaaaaaaatgaaaataataataaaatatcaatttgtagacttatactttttttataaaaaattattaaaataatagtaaaatatcattttgtagatttatgctttagtaaatattaaaattgagacaattaaggagagaagagaaaaatagttttggagtgattttagagcgccacatcaccgcctcatatttctcctctatatatatagatagattagttggttttacatcgtattttgtttacaatccctgtggagacgatcttacttatcactttattacttgtgtgactgcgtacacttgcgtatataatttttcacaataagttaagatattatgttatattatcttattagttatttaattaatttaaattatttaaataaattggatatttgaaaattagtgggatatttaaatttcaaatttgaatttaagatattttaaggtttgttagattttaaatatttttcaaatattttctaacaacataaatttagattcaagttaagatattttttaaaaatttattttaaaatagaaatatattcacctactttccagaaattgttacatgtttgattgtttattcaaaaactatttttttttttacaaacttattatttatttgatttaaattg

SEQ ID NO: 60259 - DNA, 1027 bp, Cannabis sativa
tgtttataaattatagcaacagctacagctaagctaagcatatttccaaagaagtaaaaacaagtatgtatgtagaaattgaatagttgtaaatattatgtagatatattgctgatgtgttcttccatatgtattaattaaatcataattaccatacataattattccttattgatttatataatatatatagtaacgatacatatataaaaggaattttagctattcatatttataaagaaataaatccaattggttttatataatattgcatggtatatcatatattgcatgtagatagtttcttctctaccatatacctaaattggatataatataaaaactgaatattcattttcttaaaataaaaaatgaaaattatagaaagataaaaagtaactataatactataacttaaagattgataaaaatgagctgtgtcaaatcacaagctctttgatcttttatatatgaagaataagtaatacaagtaacagaatttagttaagagatgagttgtgtaagagtgacacgtctttcctaaacgcacaactctgtaactaactttataatagaaaactaacctactaactactttcactaatactcccctcaagctatacttagaatgttctaaacaaagcttgttacatagaaattgaaatcaagaagaaggcaaaggtattgtgaacagatcgacagtttgatcctgagtaggtatatcgcagacttataacttgttctgagaaatctaatctctaatgtaatggacatcaagctcaatgtgcttcattcttgtgtgaaaaactgaattcaatgcaagcgattgagcactttgattatcacactaaaaataggggtgttttgtggagagttatgccaagttcagtcatgagagaactaatccatacaagctcagttgcagcagaagcaagagctctatattcaaattctgttgatgattgagctacaactttttgttttctagaactccagttaatgatattgcctctaagaaagatgcaga

SEQ ID NO: 60260 - DNA, 739 bp, Cannabis sativa
aatggaaggactgcttgaggtctgccttactccttgggatactttccccttttgatcttttcaagcgaagtctaagcttgaattttgatgcaacttaagccttccctcacagaaattgaagcttgattcataaaaattcaataggtatctcacgtgcacgttgtttttcatgcaagaaagatcactagggttatggcacgtcttcaaccctctttcccggaatggaaggactacttgaagtctgccttactccctatgatgctttccccttttgatcttttcaagcaaagtctaagcttaaatttttatgcaacttcagccttccctcgtggaagccaaagcttgcttcataaaaattcaataggattcatacgtgcaagttgtttttcgtgcaagaaagaccactgggggtatggcacgtcttcaaccctcctataagaattgaaggactgcttgaagtctactttaatccctgtgatgctttccccttttaatcttttcaagcgaagtttaagcatgaattttatgcaacttcagccttccttcacaaaagccaaagcctagttcataaaaattcaacaagactctctcgtgcacattattttttgtgtaagaaatatcactgggggtatggcacgtcttcaaccctccttcccagaatgaaatgactgcttgaagtctaccttactcctcgtgacgctttccccttttgatctttcaagcgaattctaagcttgaa

SEQ ID NO: 60261 - DNA, 993 bp, Cannabis sativa
ccaatttaaaaaaaaaaaaatctacaagccgactaacggtttggtcgggttaacccgcccaaatcggccatttttttttgtttcaaagtcacacaaccttggacctattcatattgagaataaccatagcattttaatctactgcttaaaagaagaaaggaagattaacaagcaccaaaacatcaaagtgtaaaaaaaaaatcaagagatattggacattcatatttataaaaacaaaaattgagcaagtgagaatagggtaggtcggaaacctctttggcaattgaatatgcactgcatattacatagaaatataattatgtaatgtacacataaataactagcgattatggacagatgactaaattctatggattgaaaaacaatgccaaacatatttttatccaaactaaacaaaacaagcatgaatatcaatcacgaacaaggagctagaaacccatttaagaattgtaagtacaattcaatagcagatgaattttttttagcaattcccgaacaactaacagacgcaaaaccatagccatatgaaagaagttacaattgaagtggttcttacagaaaaaaaaaaacaaataagagagagagattaccagttgcgagagaggatgagaatgagagacagagacgagtgagactgagtgagtcttagatttaggggtttttttttttaaacttttatttttaataaaaaactgataaatatttttaataaacacctagtagttttttttaataagaaaataaataatattttaaaaaatataaattaaaaattaatagtgttatttgggttagagtaatttgcggctaaaccctcccaactatcatttcacttgcacttaaccatctaatcacaaattttggtggtaaaaccctccaaactgctaaactgttatcaaatttaaggtgtcatccatttatttcagttaactgctgatatggactgcctatatgtacatcatgtacacgtgg

SEQ ID NO: 60262 - DNA, 937 bp, Cannabis sativa
gcactcctggcatccctggtccccacgaaccccccggtacccctggcactccaggtgtttctggcactcctggcatccctggtccccccgacccccccggtatccctggcactccaggtgtttctggcactcctggcatccctggtccccctggcattccaggcactcctggcactcccggcgtttctggcattcctggcattcccggcgcccccggcattcctggcactcctggcgtttcaggtgtccacgacattccaaagatattatgatatatatttgttgtattattattgaatgatatgagaggttgttataaaacacaacctatatttatagacgtagctaggtacttaattaattgtattagtgcctctctttcttactaaatttattgggtaagttttgttagagcatgtttttttatgtgaaagtgagaatgttttttggttttgcatcaaatgcatgcatgtgaagtgtagttggtattagttaattaattaattatccaatgtaactccattaattttattaatatcatcaccatataatcgtgttggaattatttatttatttatttatttttaaaaacaatatatgatagatagcactttataattattacccctttaagtgctatataaaatatttttgaatacgataggtactaggtagataaacaatcaacaaaaggcaaaagactaatgaaattaaaattatctatatatacgtgtgttaatttgatttatttttattatttttttatgttctgatgaatattattttaaattatatattttacaaaaattacagattagaaaaaagagtcaatacaataaacacactaataattctttaactaatctaaggacaaagcatatattctattctatataaaatgtggctatataatcaaattcttggtttatgaaaaatt

SEQ ID NO: 60263 - DNA, 709 bp, Cannabis sativa
atttctttaattgataactgataacccttgtagagaaggtgataggcaagtgcaataattcctataccacaaataacattatattcaatttaattatttgtatatatataatatatataaaacactttaatgaaaaatgggatacacatggagaaaaatcacagaaacaaacaaatattattgaacataacaaagaaaaaaaaacacagaagaagaaatatatgtgccattgaggctacaatattatttttgcttagagaacaaacaacaacagcaaaacaacataaaatttacaaacatgaagtaccttgaggaaattaaggttacgacatttatatatatttaaaagaaaaaaaagctctcgattccaaagttggatgatgctgctgctgcatatcatatgtaattttattaactggttagtgtggttggtgaaattttgcaatcgagattccaaacttcaaaatttcccttgacgaaatcatagtgtgctcctttgatagatacagcattatttgtcaaggcatctttcacaaatggatatgtcaataaatttgacaatgaaacattcacagcttcctgcacaacattatttccacacccaaaaaaagttaatcttaattaggagacagaataagaagatcacacacaatcttatcaaaatggttataaaaaaatgtaataatttaccttttcacagttgctgcat

SEQ ID NO: 60264 - DNA, 849 bp, Cannabis sativa
ggcaaagcaatatgctcaggagcccttgaatcctaaagatgaggctgaggaagagcaggtgactccattcaagaggaggaagaaacttatggccccgcccaggcctcttgaacatgcaattcgcataagggagcccatctcacctgcttggtcgtcccctcccgtgttcggaaaagggaaagctgttatgtctaaaataagagcgatgtcaggtgatgatagactttcacttcttgtttgggcagtcgccttgcatactactttgtcttgtttttgagcttcttgactgttatgccttatgtttctgatgtctattttctctaaccatgttttttcgttccgtacagacatgtctcggcagatgcttgacgctttgaggaagagaatgggcggaagctctagcacctcccctccggccaagaagtctaaaggcagtgaggggtcctcttctaaggaaaagatatctgttggggaggtcattgatctttccgaggagctaacggctgcaaacccctctaccccaaaagctgctaagtccaaggagtctcggggaggaagctcggacaggtctgaaccaccgaagggtgggtttgagctggtcagaagtggacctgaacaagtgcgggcccctactccacctttgtcggtgcttccagaggccaagaagggcaaagagatgcttgcccactatatgaaccagctagttcctgaggttagtgagcaactggctggtgctgacaatgattcttctttggagctgctaatggggggagttttgaaggaattcaccagggtaagtctttcttgacacttccctttaatcttctgtacttagctcaaatgctaaag

SEQ ID NO: 60265 - DNA, 1512 bp, Cannabis sativa
caatgtcattggagagctcatcaagacaaaatttacgacaatcaaaagagtgcaatactaaatagaatttttttaaaaaaatagtgaatcccaacagtttatatctgttgagaatactaagtatttcccacagtttataattgttggaaatactacgtatttcccacagttataaaatgttgagtatagttaatattctcaacagttattaaacattaggaaagattctttttagcatgtaaagagtaaagatttattattattattatgtctctctcccacttatatattttattttaattattcttattatataaaataaaaaaccctacaaatctctttctccctctctccatcttattcacattttattttctaaccctaacaaataacctgttgcctccctctcttctcatttctcaaagactatattatgaaggatggagctacaaaggattttatggtgggcttttgagggcgttgaaccccgtcattatatgtggctctattatcgaaaggcggaggaagccactaaacaaggctcatctagtatgagtcgagagaaaaagagacgatgagagaaggagaaaggagagacatgaacacattttggccattgcttgttcgagattggaaggcatgagaaagaggcgagtctctttttggcttggacgacacgagaggggaaggagagccatgatggaaatactcatttttttaggagttcgagattggaaggcacaagaaagaggcgagactcgtttttggcttggatggccagaggaaggccatcgctgggcctggcgagggttgccatcaaggggagtgaagtcggggcttgtatttggcttggacgactggaggaaggccatccccaggcctggtgagggtttccgtcaaggggagtgaagtcggggctcgtttttggcctagacaactgaaggaaggccatcgccaggcctggtgagggttgccattaaggggaggcttgtttttgacttgaaagctgaaaataaatttcacttaggttgtaatatttatatttattatttatttttcatatacaatttattaaatttgaatattttttttttctgaattgtatatcatgtatgtatattgtgaagtatgaaaatatattaattttaattaatatcatttatttttgataaaaaattaatattattatatatatttaatgttttaaaaaatatacatcaagtaattcaatttaatgtatataatacttttgtcaatagttataaatagtcatctaaagtgactttttccaatatttgtaaaccattatttaaaatgactttgtccaatagttataaaccatcttttaaagttccgtatttttatgatacccacatagccaacggttttaagaactgttgagaaattgtattaaagacagtatacacagataggaaaagtcacctttataatagtgtcttttgcaacctttctcagaaccttatctccaagattcaaaatgatcacactatg

SEQ ID NO: 60266 - DNA, 1856 bp, Cannabis sativa
tgaatcgacgatcagggaataatatagcagccttcgcaaagtgatgggccactacattagcagatcgtttcacaaaagaaacagaaacattaccaatagagttaatcaaattcttacaatcataaataactaatccaaacaaagaaagcatttttaaagagctacgaatagcttggatagcaccaaggcagtcggattccaataaaacattttgccattgcctttccttaatccaactgagcgcttccttcagacctatggcttctgcaagggggggatcaaccaagccgtgagagaagacagtgcgggcttccacgagaaagccatttcggtctcgagccaccattcctataccatacttgtgtccaccatcaaacaaagccgcatctacattaaccttgaaactactaccggttggaggtgtccaatgctcattaccgtcgccgaactgaacctcagaccgagacgtatccaaattggagtttcgagcattcttccattgttcaaggtactttgttgcaaacgcgaccacgtttataggattaaaggcttttttctgccacacaagattatttcgggctccccagattgcccaacagaccgctgccaccgtgcaacgttgatctccactcagaacttgaaaaatactgctgcaccattgcagaaaagagattgctggtgtagtcgtggtaccaattcccacacgattccaacattcctgaaccaccgtgcaagtcacaaggccgtgcattgtggtttcttcttcggcctggcacagtggacagaggacgctgcttaccaccctcttaatccgaagctgaacaagggtgggaagacattcagtacaggcacgccacagcaggttcgatatcttcggagggactttcaaactccacaatttattccagaaatttgaagttagatcatcataccagtaacctttctccttttgcaaaaagttatacgcactcttcacagagtaaatcccagaggtctccaaagtccagcaaagatggtccaaagccgtgggagcttgaagaggaatactctttattagttgctggtccctgacatcgaaaagatcttcaataatttcatcatcccatcccccattctccattgacataaggttcgccacagtggcattagcaagggacgggtgagttgaaaccacatgggggttagatgtatctggtaaccaaggctctcccaacacaggtatagcgtgaccattacccacacaccatctcgtgccactccgaaccaagtcttgagcctccaaaatgcttcgccatacgaagcttgggtttgagccgagctgggcagtgaggaaagaaccaccattataatatctagctttaaacactcttgaagctagagagtcgggtctagacactaatctccatccttgttttcctaacattgccaaattaaaatctcgcaaatcccgaaaaccaagaccgccccctttcttgttcttagttaacttgtcccaagccatccaatgaatacctttatgtgaacttttcgatgtttgccaccagaacttggtcatcattcgctctatttctctgcttacctccaaaggaagaagaaagacactcatggcataggtgggtaaagattgcagtacagttttaacaaggatttcttttcccgctctagacaaaaacttgccttcccaaccttgtatccgctttcgcaccttgtcttttaggaatcctagaacaattgtcttattacgagacaaagtactaggtagacccaaatagaaactaccttctgccgcctcagtgacatttaaaaaactacagacttgacttctcagcaaaggtgctgtattagcactaaagaaa

SEQ ID NO: 60267 - DNA, 2303 bp, Cannabis sativa
attacgacagcgggacccgctccgggtaagtcaaagcttattttgtaactctcttaggggtcaaatttggagttgataactttagaattccgattgaagagcgatacatgacttgatagagaaatcaactagctttgaaatccaggttgaattgcgtcaatcagattaatattgattgagttatgatcgttttactaaatgttgttcatgacccagtgcctaagttgacatcgagcgtccaggttgacatcccagcacccagattgacatatgacttcaacctggacactgggtaagtaataaaacgtcaaggaaatatactttatgatgcctaagttatattttaacatcacttagtctatttttgtgttctggcaaagttggtcaccagttcttgaagatgttgttgttctacgtaaatgagagactcaaaacttttcattttcgagtgttcttcccatgttggacatgagaaatgagaagttgtgaattttacctctctgacttcatggatcttaattattgtgaaaaactagacagaccgtcgagacgaaatcataatcggataagcagaacccagtgcactaggccatttgtcaacttgggcattgagtgcttatctttgagttttgtggatgtcgttttgatacttcctaggttctagaacttgaggacaaggtctcctaccccattttgagcattccaaattgaatggttgaatcaaatttgtcatttgaataattcaaaccagcgcaccagattgattgtcaacttgggcgccaggccgagcaccaagtcaacctgggcgttgggctctgattctaggggctcgggtttgtagtttctctctaatttttcttgaatcttcattattttagatgacaaaaaaaattcttggaacacttttttgagaatttgattggaaacagcccaggttgacaatatgttaacctgggggcttaccctagtgccaagtgtcaacctagcagttgggtcccctttatggcccttcagaatcttcgttggtccctagaaatagttgaatcttaatccttgctgcaaacggagaacatgcttggaagatttctcataaaacataattagaatcggtccaagttgacaaaatgttaacttgggcgctaggccttgcttctgacacccaggaagtattgtttcttccccaaaagtacatatttttctatttttgatgaagacaaagaagttgcaaaagttatatcatcgatctgatacttggaaggagcctagattgacaaattaacctgggagctgggtgtctgggcaccgagtgctctgggtgcttaaaaatgaactttctccgagtttgattctaatgcttgaaatatttctatggtatgtatagttcatgtccccatgcaatgtttgacccattttcactaagatggttctaaaagctgaaaccctagttgaggatgtcaacctgggagctgggtttaaccctaagtgcccaagttgacttctaaggtgtaggttcatgtatttttagctcccgaggcttggatttggttactccatgtcttcatgtacaaaatattaaaagactgtgagttggaaacgagctattgaagtctaaaattccattctggagttctcaaagtcaacctgggcgtagggctagggacccctcccaggtcgacttgctatgactcaggactactcaactccaagatgtcatatttcttgtcacatgtcaaacattgatgtccacatcatcaaggctacttttggtgtaaacaaaaagtattttctttgatttcacacaattttcatgggttcgacctcgttcttcacaatctctacactgcaataaaagagtcatgtgcttgctagttgataaatttaaaacgtaccatttttggtgcaacatatttttagtgtcgtttccggggaactgtaagaaaaaaaatcccctttaatccaagttaggacaattattctactaattataccatatagtataattattatatacatagttatttatattacttatatattatatatatacataacttagtgtaatttgtatttctggatgaagacacgtgtaataccaaaagtaatacaacttagttacttcaagcctaacaacagacccaaccaatataatggactagatccattagtaagtcatgtcttctggatgttggacagatatctcatcctagtaagtcatccctcatatacaacatgtatatgcaagacctcagttagagcatctaaagaagtgatcaacgagcgtccagacatccaactcataatca

SEQ ID NO: 60268 - DNA, 866 bp, Cannabis sativa
  modified_base (755)..(763): a, c, t, g, unknown or other
  modified_base (794)..(805): a, c, t, g, unknown or other
atatgatatatgtaatttatatattacaagccaactaggatatgaaaaaaatgatatatccaatctagaactcaaatcagcataataaattgggttttcagtattgtagaatgtgacagcattaaagttgtatatttttgccgaacacctgtgataaaaataatattattttaatttttatacaaagcactaatttatggtggaataaacctaacttgggtcaagctctcgtgtcacaatatctatcttttccagtgcattgaacatttcgtcaatgacaatctgggcataagtctattttttttttatcaataatatatattttttatgtttaatttataagaataatattactattattattaatgtgtcaggttaaataaatttgacgaatctgatattttttgttttttttatttttaaattttaaaagtagcttttagaatagttatagagttatgaaaaattaatgagttatgtttatatataaaaaaaattgtttttatatcatataatttgagatatattttaattactttaaaaattaaataattaattagtatttttaatttatactatgatagtttataatttaaaatatatttaataactttaaatattattttctagattaataaaatgccatgtaatataacaaattactagttttatatattaattattttatgtatttttttgttattttaaaagctcattaattattgtataatatagttgtaaagcccgcttagttnnnnnnnnnattagcagttgtttatgtttaattatgaaannnnnnnnnnnnatttaaataatttattattctgttatttatgttattccgtatcttgcatattttgcatttc

SEQ ID NO: 60269 - DNA, 902 bp, Cannabis sativa
  modified_base (841)..(848): a, c, t, g, unknown or other
taacacttaaccacaaaaattgaatttttggcggctaaactacctaaaccctgattccgtttttctctgcatacctccgtccaaaaatcacagtttacgtggaaattttttagtggtccacataatattattagttttaaaaaagaattataaatatttaaaaaaattaaaaaatcagaatttttttttcttttttacttttttaatttaaaaaaaataaaaaattattttttttactttttttttctttttctttttcttcttcttctttctttcttcttcttcttctgtagaccctcagctcgactctgccgaccctcatctccccaccatcaaaatccaccaccttgaccgctaccgaaaaacgatgtaaccaaaacctagtcatgggtcgtccctagactgccctgaaaagatttggctataccagaattggggtcggagggtccaattcgagacaaggtcagctggagaatgaagaatgtggacccaatcaatatacccacaaggataaagagaagcctctgttctttgaagaggtaattaatcgatctgggtagcaagctggggtgttttagggttttaggcgagtatggagatgtcgaccctgttgtcaccatctcttcatcccgtttgtgattcacgctcgattgcttatgtaactgcttcattcttagatttctagcttctgagtacaacgaatttgagctctcctaacactccaagctctgtggagagagactcactcatgcaatgtctatattttcaaatgttataatactccgtcgtcgaatcggcgttgcaaacgtggaagagaattatgttgggctttgtgccctannnnnnnntctatttcaatgtaatcttctctattcaaatatcaataaggaaacaaatttaat

SEQ ID NO: 60270 - DNA, 886 bp, Cannabis sativa
gatttcattaaacaacactaccgattacaaggaaatggcaagtcacgctcaattacgtgacgagcacaagggggagaaaccccgatccacatagcactaattttgtttctcaaagattaattggctaatacatgaactaccacattagcttcccgaaatacaaaccgcaaaccacttacagaacgataacaaaaatacggaaaatataattcaataattaataacaaccaccaaaacttcatcattaaaagaaaccaaaaataacaaaaatttattcccataataaattcaattctctcttttttctttatgaaaatgaaattttattagccattaaaatcccataccaaacaaaatttattcccataataaattcaaatctcttcaaatcaacataaatttaaacttctttctcatcatcatcaatggatgtaattgatcatatgtcatataaaaacttctcaaatgctttcatgtgttcatgttggagaccaatagccactaacaaactcccatcctcatcataagatggactagatagcaaataagttaaaccatcaaagagaattgtagaaggtcccacaaaaattggtctaccccacccaaaatcaagatcatagaagggtaatctaatccaacttattatcccaagattagggcttctaaatgtatgtgaccctctactaagagctgataaattaggctgaagttctagataatccaacgctgatctcaaataacagtcatctattcgctttaaagtactatgaatttggttcacagcataccatatattttcattcgattcgagtaattctcctgctttaactattggtgtggctgagaaaatcgtgttaccaaaaaaacccgggggaagtggtggttg

SEQ ID NO: 60271 - DNA, 759 bp, Cannabis sativa
agtaggtcattacccgctaaacaaagggaccaaacctctataaattgatgtgtcaatttctttatttgcttatattatctacacgtggtgattgtcaatcataaataaggctctgctgtcagttgaccaaaattgaggtcaatattttggtgctttcacttagagcattatttatcaacctgatcaatcatcatggttgtaattacgagaaccagtacgtccacttcctcaggtcttcctcaagaccccatgattattgatcccaaagtctgagttcctcccaccacgacaggcctcactaatcaaacacataccgtcaatccagtaaatctggaagatccacccaatacaattaatctcgttgatcctcctaacacaatgaatcctagttatccacctatactgctcaaaatagaccaaccaacaacacctcgaatagaaggccctattaacataaaacaacctttgtggagtgggaccaggacagttctcgggtattatgtaagggaaatagggccaggaattggcaaatcagctattgatgagcctcatgtggacctaggagaggacatcaaactggccagactcaaagaagttgtgggccaggtcacctaaactgaagaaccatgcgatgttggttgtgatgctttttcctagcaaagacgtgaattcctgaggtagatagatgactaggaggccatcctccaggcccattaggtagagttggactgctgcaatgaggaggtcagtaacatgata

SEQ ID NO: 60272 - DNA, 1091 bp, Cannabis sativa
tctctctctctcctctaacactctttatctcagttctctctttctcaatctctctgctccttatctcttgatctattttggtagacggtcggacctcatcatcgaaaaaaatcatacacattcatctcaataatgggtaggtgttgtccaacaaatttcttaaacatttagattagtatgtagtttattttcgataaatctgtgtgattattgtttgcattggtgttattttgttagtttttttcattgaaatgatgagatctggttttctcgctaaattggatttttaacaaattatcgatgttttttcgattatatattgatatcttctcgataattaggataagaagataaaaaatgacaatttttcgataatttttcatggtatatcgataatattttaacttaggacaaaatataggaaaaaataacaaaatttaacacacaaggcagaatcatcagcaaaccattgatatactatcaaaaacctatcgataattaattaaaataccaagtaaaaaatgatgtcagcgtgccatcgataaaccattgataaactatcgataatgatatactatcgacaaaccattgataattaattatcgataatatcgatagtttgtcgatagtatatcgatggtttatcgatggcaggctgacatattctttgcttggtattttaattgattatcgatggtttgtcgataattttaccttgtgtgattaattttactatattgtgccctggaatcgaaataatatcgatataccatcgaaaaagtgtcaaaaaatttcatctcttaccttcttaccctaattatcgagaagatatcgatatataatcaaaaaaagcatcgataatcaattaaaattctagtttggcgagaaaaccatatctcgctatttttatgaaagaaattagcaaaacaacaccaatgcaaacatcaaccacacagatctatcaaaaataaactacatactaatcaaaatatttaagaaattctttggacaacacctacccattattgaggtgaatgtgtatgatttttttttaggataaggtccggtcgttcactaagataggatgagag

SEQ ID NO: 60273 - DNA, 608 bp, Cannabis sativa
  modified_base (148)..(149): a, c, t, g, unknown or other
gattttatgtttttctttgattccctagacttcaaaaataagtcaatatgggagtgtataatcaaagatgaagatataaattttaacagagaaaaaaagaattgttatgctgataattttttattgatgatttttatatttctctttnnttccctagacttcagaaaataaatcaatatgaagttcataattaaagaagaagttaaaaatcttaaataatgaaatagtgatgctgtcaaaattctcaaattagcataatcaaagaaaaataaaattgtctgtgtatctcatacctcattcaaatacactaacacagaatggtataaaaaactgttatcaagatacttgactaaaccaattccggtgaagttgaaaaaagtcaatctgtgagagaataaatatatgaaggaaataaaaagctaattgaatttgggactttttgaaatcaaagctttatatatatacatggtttatatatgtgcatagcaaaatcattccaaatcaaattggaggaaactctgactttgtttatggtatatatatatgggaatgcttttaatggttattatctatgaatgaatattctattattagccattagatcaaat

SEQ ID NO: 60274 - DNA, 850 bp, Cannabis sativa
  modified_base (809)..(819): a, c, t, g, unknown or other
caatccaggaagcggccatggtggcgtactcatgtataagagtcattcattccgtgcgtgtaaaggtccaatggaggcttgaagcgaggacgttacaggaacactcagtcttcctgaaaggttagttcatcccggaagtaaggaccttctcagagggtcggaccatctaggaccatctttcattagagaactcgaccaggattgaatggtctaggatcaacctatacttgattcatttagacttggatttgtggtttgtgggaaggttccaagtttgtcggcaccttcttgtagatccctccaatctcgtactacatcacttgtggacctgtctccttagtggcaacatgtgtcttgctaatttggcagacaacaatttgagtattcgaaaaaaagacagaaatagaaagtgagtgagtgagagaagattatggttcttaccattattctattttttgcttggtattaatttttggatgttttagggtgcagtctaaaaatgaatgtaccaatttattgcatattttagaacatcttttaaacttttaataaattcacaataatttacaatacataaagtagggttcaaataatatatttcatactcgtaatagaagaggtatgtgtgcaatagattatttgaatcttgttttcgatacgttaaattatttttaattttttaaaaagatttcaggatatcttaaataactaccttgtacactgtcatataaaaattaagattaaaatggtatagggtgcttctacaatacaccccattaaaataggtgtactgatgcaacccctaactnnnnnnnnnnntataagaattttttagtctaaattttttcat

SEQ ID NO: 60275 - DNA, 1164 bp, Cannabis sativa
gcccttcttgcgggactgtgttatcgttttttttttttttgacgacatcttggtttacagcaacttggaggaggcccatgtgtcgcatcttcggcaaatcctacttctattgcggcagaaccatttctttgccaaggctagtaagtgtcaaatttttcaatcaaaaattgaatttctgggtcatttggtttctgcacagggtgttcaggcagacctgcccaagattacagcgatgatgcagtggcctctaccaaaaacattgaagcaactctgcggatttctaggtctgacggggtattaccaccgttttatgagccactatgcgactgtggcagcaccattaactgatatgcggaaacatgataagttcaagtggacaccagcagcgactatgacatttgatcttttaaaaaaattaatgacagagacaccagttttaaagctgccagattttactaagcagtttgtgattgagaccgacgcctctaatgtgggtattggcggagtgttgatgcaagatggacaccccctcgcatatttcagtaaaaagttgggcgctcgtttccttgaagcctctgcttatagccgtgagatgcgagccattattgaagctgtgtcaaaatggcggcaatatctcttgggtcgacactttattatccgaaccgacctcaagagtctccgtgagttactttcacaggttatacaaaccccagagcaacaacaattcatcggcaagcttgttggttttcagtttaccattgaatataaagttggtcgcacaaattcagtagccgatgcactctctcgctagccaaaaattgcagaatactcccaccatttagctttgacaacctgccgttttgattttctggacgaacttcgccaagaaaataccaattgccctgatgttcgattgctccttgatcaatttcgactgggccagctcaataataatgagtattccgtcagagatggcctcctttactttcggaataggctctttatcagtcaacattctgcactcaaacaaccattgattacagaatttcactcaacccctaccggggtcacgcaggggctgatagaacattcatcagattggcagcaaattttttttgggttggaatgcgcaaagaggtgcgccagttcgtttctgcttgcttg

SEQ ID NO: 60276 - DNA, 1650 bp, Cannabis sativa
cctgtgatggctataaaatgcagtaaaaaagtttatgattcatggaccatgtggaaagctcaatacaaagtctccatgtatgatgaaagacaagtgcacgaaacattttccaaaaaaattcaatgataaaactacaatcgacacagatggctttccaatctacaaaagaagagatacaggtacttaaatattataattacaaaatttataacaatatacttaatttcatcaatttattaaaaaaaacaagttttttttacaggtattcgtgttgagaaaaagaatatcttattagataatcgttatgttgtcccttaccatagaaatctaatagtcaaattcgatgcacatattaatgttgagctttgcaattactcaagatccataaaatatctttttaagtatgtccataaagggtctgatagaacaactgcaacagtggaatcaatcgacaacaccgaagggataagaccgagatttaaaacatatcttgattgcagatataatcttcagcaactgaagcttgctggagaatcttccaattcgacattacgaaagccatcagttgaaagattgccattccatttacctggagagcatacagtgatattcggagaagataagtgccctgaaaatgttcttggcacacctggagtagacaaaacaaagtttactgaatggttagagacaaacaagaataacgaggatgctcgggagctaacttattctgatttccctacatgttgggtttggaattcgaaagataaaatatggacaagaagaaaacaaggtattgcaattggaagaatatactttgcacacccttcaacaggagaacgcttctacatgagaatgatgctaaattttgtgaaaggatgcacttcttacgaaagtatcagaacagtgaacggagtcacatattctactttcaaaggtgcatgttatgctctcggattattagatgatgataaagaatggatcgtcgactgcttgactgaagctgcactttgggccactggaaatgaattaaggcatctttttgtaacaatcctcattaattgtcaggtttctgatgtcacaaaactttggaaatcaaactacaccacattgtcagaagacattactgcattacaaaggaaaagattcaagatggaggatcttcagctaaatgatcaacaagttgaagcatacacattgtttgaaattgaatgtatcatgcaaaaaatgggaaaaagtctgaaagacatagatggaatgccccagcctaattcatctttgatgagagaaacaggtaatagattggtcaatgaagaattggattatgacacaaaacaattgaaaatcctccatgacaaatcatttgctcttctaaatccttcacaaaaaatagcttatgaagcaatactgaattctgtagagaatgaagaaggaaaattatttttcatcagtggacatggtggtacaggaaaaacatttttatggaatacagtaattgcaaagctcagatcagaatcaaagatagtcttgtctgttgcaacttcaggcataacagccttattattgcctaatggcaggaccgctcattcacggtttcatattcccttggaggttacaactgagtcaacatgtgaaattcgacatggcacccta

SEQ ID NO: 60277 - DNA, 1485 bp, Cannabis sativa
  modified_base (1296)..(1306): a, c, t, g, unknown or other
agaaaaataaacagaggatactttgaaaaataacccctatacagttccatgaaatacgatttgttactaattatgattattactaattacatttaaaataatgtattttattcttggatgaaagcagagcttctgaacatggatcctcattcatctgaagctcaagtgttctatcagttggaaggcaagaactctactaaaactgccaatggtcctgctccaagtcctactggtactatgcatgcactttgctttcaaaattctactgatatggaaactgtgtttaaactgagtcacttctatttttattatattgattatagttatagttgaccatctattaattttttataaatttttagataatttatcgtatctaaattgtgattttaaaaaattgtatatcaatttaatcacaatatagtatcggaattttttcaaatttcgcaaggatatattataactacaataaacattttcataaaaaagatgaaaaaacaatacttaaatctagagatattctatggcgccaagacatttattgatagcccagtaaaagttgtataaatatataaatttatatatcatatatgtatatatatacacacactaatgacttactaaagatgacttttgattcctggtatagctggtggttccataaacgagcaaggcaaaggattacattcaagcactggtcaagagaagtgtgcatggaaagccatttttggaggggttgtggtaatggccttgcattggatcatgtaggcagtcgatcgaaatttactgttacattacaatctttatcatcccttgttgtgataagtgatgaattttactttattacttactttgtttctagaaaatatgttttacactttaaacgagaatcaaaacggggttttgttggaaaaatggatgatatatggattgatacaaagatataataatttaaactctcattcttcacaaaactgtcatacaggttacagttacaccaaagtatagaatagacaatcaactggggaaacatttcttctacatgcacaccaacatccactattacacatatgacacacctatccaaatgggaccaaatttgggtgaaaaaaaagtgggataagttgaggaatattttttttgttgtattcattaatcaaaaatatcttcatattatattttattaaaatacacatacttttaggagtaagtaatatacagttactttttacttaagtgtagcaaataatttacattaacttaagggttctaatggggatatcatctataaaagtnnnnnnnnnnnaaagaatatgaaaatgaaggtaaaaattaaaacagattaagtaggtatacaatgtaatttcctcaaaaaagtcgctaaaaattagaaggaggattgagttgggctaaggccggttacgcacaggcttagggcccacacaatttaggggtccaaaaataatttcattttaaaaataagta

SEQ ID NO: 60278 - DNA, 846 bp, Cannabis sativa
agttatagggtcgacccaagttttagacagctgagaccattgcacaaggccttctatttttaaaggcttatttttttttgaaagaaaatactttttttattattattattatataagaaaatttataattaaaagtttagaaacatatctttaaaaaaagaaaagaaactaaaaactagtaatggaattatagtcttaatgtaaatgaaactttttttttttaataaaaaatataattttaatcttttgcacaagaaagccaaaaaacttagatcagcgctgagtagttatatattcatttgttagtggcccccttatagtcaaattaaaatcaaagcattgatggtaaaaaaaaaatagaattatcataacattaaaacaaaagttatagaatcctcaatgcagtattattggaagaataaaatactcagatgcgggatatatatatatattatgtatcggtttttttttattattattatttccacctcaaagaatagtgagagaatagtgagcatgaacaaatgtcaaaaatctagatgttaaataaaaaattaaggtattcataaaaaaaaagtagtatatttataaaaaataacataccatgcatttatgtaataattaataaaaattagaaaataaaaattagaaaatgatagattttttacttgtgtatgtagtagcaactcttacttttacacttttagttttacagctaccacaaatttatttttacacttcacaacaagatataatataatttttttaagtaattgtttgctcactttagtgtataataaaaaaaaattgctaaaaaattaacatatatttacttatagatgactt

SEQ ID NO: 60279 - DNA, 1113 bp, Cannabis sativa
aatataaaattatttatgctaaataataacttaataactaatttaatacaaatattagttttttaaaatattgatataaattttctagtaatgtcaagagaatatatagttttattatcgcattgtttttttaaaattaatttaagtaattattgtttaatatcaaaaaaatattatcttaaattttaaaaaatttatgtatattaatttaaaattatacatttgtattaattttaatgaataatttttttgaataatttgtaataatattttcatttaaattcttagtaaataaaataaaaattaaaaaaataaaaaataaactattaaaaaatcttcctgtcttatcataattttagataaatgagattcgatagatcggtcatctacgactctctgaatgcttaaatatttgattagacaaatttatctgtgtaattcaatctaatttttagtaccaaacaggtcctaaaagaaaagaaaataaaagaagcaacgtacactaccaggacctcaaaaagttgattttcatcaaattgaccaacttggttactctattctagaaccatacaccatcccatagaaaatacaacaaagaaaaccaacaccgacttcaaagacttgctttgctgctcttattactttatttaattacttctgactcaaataccatttcacaaacttgaataataatatagtatttgtggtttggtaaaagtaataaatatgtaatttactgagattaattattaattgcatatgttaaaaaaaatgagaccgaaagggtgtatagccccaccaaatctaacaactgtcaaatttcatcatcggagggaatcaaaccgcgtctcccattttatctcaaaactactttattacttacttggcccaaccccaccactcaacacaactggttccaccccatctcatccacatcattaactattctatcaacatttgaagcttcctttttcctccttaccaaatactaaaacgtgtcacccaaacccaactataaatactactcaactcaactcaattcactcatcaaaatcaaatctttttcttctacaagtctctaaagaacacctcacttggaaagaacactatggc

SEQ ID NO: 60280 - DNA, 1381 bp, Cannabis sativa
aggcaagttatcaaccttcaattatcaccgcaacacacaaaatctcaaaacctacttctctatggatgaatatataagatattcaaactcttttattaaattatgagaaaaaatattatatcatagtaaaagtaccttaagctcatccacaagctcttgaggtgcaaccttggtgttcaggaactcatcaacttgttttagaatttcttcctatcctgtaaatccaagtttttagttctctgtccatttatttgtacacaaatatattatacatatgaattaataaaagagctagctttttcattgtaagtacctatgttcatagcaggtgctactacaaattgtaaaacaagaacaaaatggtacaatggttcctgttgcaccaactgcccccttaacaattgagcagcttcttctgatttcacagcttgatgaagattcctgcaaaattaacaaataaattacattatatcaattttacttggatgaggaaactgattttccatcaacttggagtgatacatagggacttgaaaccagagagtttcttgtttaaagatagcagtgaaacttctcaacttaaggcaattgattttggactctctgtattctttgattccggtaattatagtttagaaattgaacaaatatccaatttggcttcttacttccaattaattatcatttaattgatctatgtttgatgttataattaaaacaaacaacacatgtcacatgtaagacaatcatttaaaattgtggaccaaccagttaaagagaataagcacaaaagaaaaaagaccagaccaaacaaaacacaaataccttactgttaattaattttgctttttctattttatttatttattttggattagtagtaactataaatagagattcttagaaagacaatcaaagctttcaggttgtaaacaacaacataataaatgtttttttgttttttttgaagtcataacctgaaaaaaaatcataacagtaaataatgacccttgtattcaaacgttattaactaaagagatgaaggcatataggattagattttaatcataaaaacaaagattttgtaaatgaatcaacaaaccgaattatgggtactaaacaaagcaagtgaatatataaatataacatatattccaagttccaaccttgtgaatgaaagagaggaatataataggactcttaaatgaaaacacaacatatacatatataattaaataaatacataaagataagttcgaattgaataaatcaaaatgaaaaataaaagttataatgacgtacagaaccaataatacccagatgttgaattgaaaaccaaatcaaaaaaataactgaggagggaagagtggagattcatacc

SEQ ID NO: 60281 - DNA, 1091 bp, Cannabis sativa
caactcaagaaagtcactaatcaagatggtcgcaacatgttctacaagtgttgacagatagactccagcaactggccaagcaactaggggcaccccagttgatagagttggaaccgagatccttttgtgccccaggcaccaagagtaggccttggaactagctccttaagttttcctccaaggccaccaccaacagctcctgggactagcaccaataaccagatcccaccttgggagccacatgtggagatagaaggccctgatgagacaatcctcaggtagctcaacttagctaaattgtggctgacatgcaacaacagctgtgagactctctcgataagcaacgcgaaagatttcaacactagttcatggaaaacaagaagagcattgaaagtcaatgcgttgagcaggaacaatggagagctaacctatctcaacggattagagaaacttatcagtctaatcgcgaaactaattttagaagaggtttttttgagttggtgagagagacacccccgtcaactagttggtcacatgggaactagtgctcaaggaaaaaccctgaatgctcagaacaccactactacacttggtaatcgagcaagcactagacaaacaccgggcctggagacctctcaaagggaaattactttcgatcaagagcccaagaggactcaagctcgagggttccaaccaatgggtcctccacctgatgttgaacgaccttgtaacaacgagagaactaatagctctaccaaatccttctcaacgttctcaaaagccaagcctcgcgaccctgcaagggaaaagggacctactgctcaacttgaaggaagtagtaggggatgctacttcaaaacaagaggctacgagatccagcggataaggaccaatgagccgcttcttactcggaagcactttcgagatgaaatgggtgaatttttcattacttttcctatggccccaaaggccaatagtacgagtacttcccttaagttcacggagaggagttaaacctgagcaaccaattcaattctctccacacttgtgatcctgttaaagactattttgagggaagtagccattacaat

SEQ ID NO: 60282 - DNA, 620 bp, Cannabis sativa
ctactatctgggacagtagtagattcaaaatttaattatagaaatcttcttgggggtgctaccaggtcatgtacgcatgtggaactgaataagaataactttaagaagttaatcttgttaacaagtggtttagccatacaattggtcttgcgtgtaacaaaagcttaaaacttaatgtccgcttttaaaatcacgttttggctacccttacctgagatgttaggcagagcccatcgctgaagagcgatgggaggctatgctgaaaagcgatgggtgctagctcttttatatttggcaacctctatagggtttatcgtgcaaaggtcatcactgaagactgatgggaggccatcggtgaagagtgatgggtactagctattttgtgaagtcctacatggtgaaacattagaggaaccactatacaagttggttagagagataacttaccaagatgttctttattctaatattttggtagaagagtcaactccaagctctcgttgtaatcgccatgctcgtatatgcaccttttcttgttatcttgtaacttggtgctgaccttttcagtttggtccaaacatgtttgctgcagaatctttgttgtcaaggaatgtacttca

SEQ ID NO: 60283 - DNA, 950 bp, Cannabis sativa
tttcccttttgttcagctgtacttgctaaaattctcacatgagaatatgaggttatcaaattcattcattttatgatcagccaaaagctagaattaatataaagtcacttagagaccatatatatcatcaactaagacacgtgtaatattggttgtcactggagaataatataaagaatattcattttaggacagataaatttttattattaattttggttttgtaatcatatggggtttcttcgaaaaaacgaaaagcaaagaatctttaagaaagatagcaagaaggatagttttgaatgggtagcaattaatatattttcctcattaggtgtcatcatagttgctccttgtgccacttaacagtttattatgctgtcctaataaaaatattctctacgcctctctgttaagtcattgtgctatggataatattgcctcaaatatatataatataataaagagaaacctaccttttatttcctgcaagtgttttgttgataaatttgtgtttcttttgatgtaacatttaaaatatgataagataagaataatccatttgatgtaacaatttaacattatatttttgtaatatgtaacaacgtacatgaatgaataaagggtcaacagtaaagctttttttgatgcttaattaagttttaccatttttaatagccgattaagtaaaccttctttttcttttccctttcttttggaatattatcatgattttaagggacacatgaaaatattcaatattggtaaaaagaaaagtaaaacgatcgacgactctttcaaaagtagacacttgaataattttcaatctaaaatggtaattttggtagatttaggtgtaaatgtgtgatccaattcaaagcacaggaaaggaaaggaaggagaagtgaaagtgagagtgggagtgacaactgtgaaaaggactgagagagaga

SEQ ID NO: 60284 - DNA, 809 bp, Cannabis sativa
aatagtatgacttcgtaatgatgttaatcttgcactgaattagtcatacacagtgatctgctttggaatccatgttatgcaaataattgagtcctggagagcctctaatccaagagcttatcacctcttggatgcccgaagtaatatgtggaccatttttcttgagatgggggacttgctcccggacgtgccttacaattagcgagtccgagtgcaaaatttttcacaaggagcgttaatctccccacgagtggggccgtttaaccaagattgattaaaaagatgttacaacaactatatatatatatataatgtggagaagtagagattacacaatactatacaacacatatatatatcacaagagaagaatatacatatacactcactcagaaccttgagcgtagattagtggggattactatgacttgaacaggatattattacctttgtccaaaagcttattttcccatctctttaagcactaaggaaattttttagaaaatagatttgcgaattataagtcttaggattttctaacaaagtgctttttttgataaaaaatttggtcttctcaagatgagctccttagacctctttatattgtatttatgataccaccatttgaaattggaactctcataacctcccatggatgttatggacttaatattgagtgtaaatatgagtaaaagatatataactcatgcacacaccatagctcatatattattaaaaattcaaattaagatgtataatatttttttacacacttaatatagataataattctggaggttacacatagt

SEQ ID NO: 60285 - DNA, 986 bp, Cannabis sativa
gattattataatttatcaaacccacaatttttctgtacccaactataaatatatacttaatattttcttgccagtctgcatcaaaatctatgaataattttacgatgttagaaaggagaaaaagaaaagctttggtcactttaatagtggtttttggtttgttccaactttgcttttcggaccttaaccgagcaagttttccaaaggattttgtttttggaacggcttcctctgcttttcaggtttgtacttttattgaaataataataataacaacgtattcatcttcacatcagtaaatattgacattgtggtgtaataaaataatttaggagatgcttaacaactaacaaaatataactttttttttttattggaattgttatttgtttagtatctatcccaatggtttgtcaaaccaaaaacgaattatatttgggaaagtggatttaattaaataggaatataacaattgtactcttatcaaaataatgaattaattagagaagtttctgaagagtgtgtgtggtggacaatttttgttgtatatatattatatgcttagtgagagagatatgtttcacattttttatttcttagttttgttaattgtgattgtggctttgctcatccaaagttgatattactactggtgtaaaatatatagttttctcaattcgccttgaacaaaatatgattggtctaaatggttaatttttatttcagtatgaaggagcagtgaaagaagagggaaggggcctttctatatgggacactttttcacacactcctggttacattttattttatacttgctccaattttaaatattagcatacagagacaacaagaacttatgcacatagaacattaattctgcaataattaaaagagaaatgttatttggatactaataatgttcaatatcatcataagatatatgcacccctaaaaaagtgttcactgatgtatcctttattgttttg

SEQ ID NO: 60286 - DNA, 584 bp, Cannabis sativa
aaaatttggtcgtaataattaatacaatacattgttttatccaaatatagtgttatttattatttaatacaatacgacccttataaggcgtaccaaacgagtccttaaagaattattttagtatattttctatttgttttgccatctaaattttttttttattttttttttcataatcgcatacgttgtatctatttaggactacttataaatttttttttaaaaaaaatccaaataatttacactaccaaaaataaaatttaaataattacttaccatgcgtatataaaagaacaatcgtacttaaaacaaaatatataaatctatttttgtcattatagactatttgatatttttttgaaaatttacaagtgatcctaaacaactataaataattataaaaagaaaatggactaaaaaattttttggggtgacgaaacagataaagagtctaccgaaacacttatttgagggagtctatagtaaacttatccaatattatttattcaatttttaatagaaaactatttaaaaaaaatattcaaagaaggacaaaactgcaattttggttttttttttttttt

SEQ ID NO: 60287 - DNA, 874 bp, Cannabis sativa
aactgttatgtcaaaaaaagtaagggtataaagtttttattcgatctttttctagttttcatattttttatatttgctaatcgcaatttttcattatcgattgtatagtgtggctcattatctttgtttatggattaaagtcatttattttacataaagccattatttttatgtttattttgttgagtctttaattttataaaatgcaactttaattctttgtgatgagttaattatcaagttaaaagtaatataaattaatatttcttctaaggaatgttttaagtaattttggtttaccatcctttttgtcattgatttttctatgattttgctcttttcatttcagtgagcattaaagaattttatgattttaaaagtagtagatagaattttattgtttatttgaataaattattaaatattatattttacttttttttattattaatgttggaaatgtctgcaggtatgaatagatatatgcaatatagattggctgaacaagatgaagattgtgtgtagatttatttacagatttgttgacaaataataataataaaaagaatgctagaggtccaacacaaatgcgtgacatttgaggtaatcatgatggtaaaaagatgcaaatcacatgtaataaatttaggcagccacattataaaaatataagtaagcttacaaattttattgggacattagtacgagatagaaaaaaatcctccaattaactacaaaagttggcataaggtacctgacaaatgcaaagatagcatgtggaaaatcatacaggtaaaaaaattattgtttttttaaaattaatttagcattttagatctgtagttgaagaaattttgaaatttctatttagtat

SEQ ID NO: 60288 - DNA, 804 bp, Cannabis sativa
tggccatgtctctcctgaggtagctgaagcttgtggtatcaaaaaaagcccttagttggttaaaaggcaaaacttggcaaattgtgttgattgaaaccgactgtttagtgacagtacaaggcatcaatagtaatgtgcaaatgccgtctgcatttgggatgattgtatgggactgtaaacaactcattgctcagttggaaaatatttttttaaaatttgttaagcattctgttaataaggttgcgcactttcttgcacgtagtgcttgttattcatgcaagttcgtattttttatcatcataattctcctttaaaattattagacattgtaatagctgattttttttatatttccactaaaaaaaattacatataaatataaattaataactatatagaaaaaataacattaactatatagaaaaaataacattaattatctaaaactacacccaattctcggttggaaattgtgattgtgatccttcaattaacttcatttacaaattacatgattagtgcataattatctaattaaataaatatgtcaaatcttataattactccaaactacatttaatttttatcatacaatgactttttacaggaaccttcaatatttttatttttatgattttaaaggtataagtttgtaaatatataaccttttctttaaaaaaaatattttataagatttttttttttgaaacaaagttaaaaaaatatagaaaaaaacactataaggtaactgcctaactggttatccatatggttattctaaaagtacttggttactttaatcta

SEQ ID NO: 60289 - DNA, 920 bp, Cannabis sativa
tttaaaattttatgatattaaaagaattaagaaaaataaaataaaattaacatacgtgattttacacgtaatatctatctaaaatctagtaagtatatatgtacctaactatcatttacttatactataaatatatatacagtgggatccaaaaataaacttaaggagccgtaatttttatttttctaaaataatatggtatagaaaaaattatcaaaaatgtttagttggaatttaaaccctaatgtctactagctagcttgttaaagtaagcttggtcatcaaagtaaaactatgcttttgataagatattatttagttttactcacatatatacactatatataatgtataattaacaaaaaaaaaatattttttttttctataatatacttataaaatttatataccaaagaattaattattaagttagttaacttgctagagccttaagctaaatatattgctagtgttttattttggtctttaattatattattatacatgtttttattataaaaaatattatttttattcacaacaaaatttataattaaatataaaaaaattgtgattaattataaataataattcttatagtgactaaaatgcttatatggctaaaggtatatatcaaaattacaatttgttgtgactagatgtgttttaagttataaaattcttgttgtgactaaaaataaataagtgacaatttatatttaaatactatattttagtttcaagtaacttttaatttgttgtgattaaaaatcacatttaatcacaaaaaatttatatagtcactaaaaatagttgtttttttttttttttttttttgaaaatttgaaaatttgttattcaagtccttacaatttttaacattttcctattattaataccactactacaaaaatttgcga

SEQ ID NO: 60290 - DNA, 927 bp, Cannabis sativa
tacatactcgttacagactctcaggatttggatataaattttaaatctcaatctgaaataattacttccagagcatcatagggttgaactattttcttgacaaatagattagcacactaatctgccataaatatattccactatgataaagatactgtattgatcttatatatcttagttactcccgagtataaagagtatggtgtagtataaaattcattaaacctcctatttaatatccttatctgactgatacaccaaccttgtctttatatcataaaattcctttaaacgaaactaaaaagtcatttaccaatccggttccaagcctttccttgtacttctaaagttcagagtcactctgctgggccactttatttctttccaacaattaactcaatgtaatattaacaagttctcctattatgaactcaatccctattctggttacatttctagcaacctttggtgagatcttttcgtttccaaacttatcctagacctctttggtttaaagtatccacaactaattttcttcccaaaaaggtagggaatcacactgttataatcttcaatcagctttaaccatcgtcaatgcctcctaattaaatctttccaaatgataaaatattgaggctcttatgattcgtataaacttcgtgcttttgccaaacaggtaaaagcgccaaattcccaaggcagaagccactgctatcaatttaatatcataattggaatactattattcacatttcttcaatcgtttagaagcacatgcaataactctcctggactgtgtcaaaatacaatttaatccttgtttagaagtgtcacatcgaatcataatttctccttactgactggcaatgttaacattagtgtaatggttaacctccatttcaattccttcgatttaattctactaag

SEQ ID NO: 60291 - DNA, 1087 bp, Cannabis sativa
atattggattagattgtgttaacctggaaaattaccctagtgacatagacatcaatatttgacacgtggcaagaaagaaaacatctcagagctgagtagtcctgagttataacattcgacctaggaagggtccctagccctatgcccaggttaacttcggaactctagaatgggtgtttggatcccaccaagttgttttcaactcactaacttttagtattctgtaccataatgatatgaagcatccaagtccaaggcttgggagttgaaaatacacgaaacaacaccatggaaatgaacctgagcgcctagggtttcacctagtgcgcaatttgacaacccaactagggttttaattccaagactgtcttagtgcaaataggtcaaactttgtactaggacatgaattagacatgtcacgaacatatttaaggcatcagaatcagatttagaacacttttgttttttacacccgaagcactaggtgccctaggcacccagtgcccaagttgacattttgtcaacctgtggcacttccaagcatcaaattgaagaactatcacatgcattttcttcctcttcatcaaaaatgaggaaaacaagtactttcagggaagaaacagaccaacctggaggccagaaatggagctcaacgcccagaacctggggccgattccaaggagttttttcaagaagtattatgggaatattttttgttttcgtcatatattaagataaaagtatttttaagaatcaaacggaatcatctagtggcctaaaactagtcgcagaacccaggttgacgcttgatgtcgggcccaacaccaggttgacgcttggtgctaggcctaacacctaggttgatattttgtcaacatgggctgtttctaatcatgtttcccaaaaagtatttcaggaatttttttcatcataaaaaataacgaaggtacaagtaaacttggggagacgacgagaatcttgaggggcaaaaaactgagcccaacccctaagttgacttggtgctgggcccatcacccaaggataaaataaacttagtgcattggtttcgatcatctaaatgcaaatt

SEQ ID NO: 60292 - DNA, 1007 bp, Cannabis sativa
aacaaacatcatctctatccctctcactcgccactctttctatactctccatccatcctactctttctccttcctatcaaaaatagcctaaattattattcccatagttttatttttattatttatttttttaaaaaaaactttcttgttaagtataaaatatgtaattaccactattttatattctaactcaatcatagtgggagggtgaggcttcgacgatatggctactacagacaagggccgaagttcacgatgtggactaataaatctttgacacgtgatattcttgtaagcacttaatagaattgttaaattaagtactaacgtatttacaaaagaaatgtaactagtactattattgttatttttgaagactgaaaactaatctatatcaaagtgatatttttaagattttttgccgcaaatttctttcgtttttttttacaagtgatggatcacaataagatagatcataaatgtagatttatatccaaaaaacttatttattcaaaaatagacataataaaatgcatataaaaatttaagagtaatttacggtatgaatacttaagtttaattttgagttgcagttacatatctctcatttttttagcgataaaaataccttcgattaggctcctataacttccataagtgcctaactgaacgctgtgattgatccaggtgaatttatttattttttttattttaaacaatcatttaaagattaaaaataaaaagaaaatgttttttacttaaaaaaattaaaaataataataataataaaaaaaacactaattctatatcctttcattattccgatgattcccaacaatcttcttcttcactttatatatgtcgtcagattcaacagaagaaataatgaacaacattttagatttgagaaaaagaacctacaaataattgtatttattgtcccaacaaatttttgtttcacaaaatcttttacaaggttgaaataattttctgcaaataattttatt

SEQ ID NO: 60293 - DNA, 1026 bp, Cannabis sativa
agtttaaactaaatattttttaaggaaatttgtggtataaatacataaataaaagagtaaatagcattataagtacctaaagttttatgtttgtaagcggcataagctcaatatttaattttaacggcataagtacccaatatttgtaaaactgtaatttttctctcattttgtcaatacagactctatttatatttaactataatagagtttgtactgacaaaatagaagaaaattacagttttacaaatattggatacttatactgctaaaaataaacattgtatttatgtcgctattaactcttgttaagtttgttgttgtttatcgagattttcagaaactagatatttaggagctaaagaaataataatttgcaaaaattaagaaaggtagattttttacgtggttcaggtattgataaattttagtccacgagtcagtctattagcctctaatggcaatattaatgtgtttacagtattttataggaaactctagctctttacccttagtttcttttcgaagaagaagaagatcaagggtaatctcagcaaagttttagctatgtactttcggcttgacccctttgcatgagaataaaagggtaagtataggatatatggcgggtctggacagacccatgacccgcctaagatttttgcttaaatcctactgcttgggtaaattacatgcaatgtagagctgactagatagtcccgtgggtggcattatgctcgtgtgtgtagcagctagataatggggactattttataccacttggtcacgtgttacgcaaaggtttaacctttaaaagtaagggacacgtgtcactcaaagcttgttcctttacaagtagaagtctgtaatgtctgtctggtacaagaatggtggtggagtgtgcactaccatggtcggatgtaggggacaagatctgattctgttaggaaaatcataaccgtcactttggtggcgtggcgtatggaaaaggtcaatatttgtgatacccagtgagggtcgacatcc

SEQ ID NO: 60294 - DNA, 708 bp, Cannabis sativa
ttatatgtattaaagggtatatatatttttgtggagatatgctcttccagggatgctataaattgggggttcaaaatatggtggccccttgtaattggatatatatctacaaattatttttcacggattgagaatttacttggttgtttgtgattagatttaaatttattttgttatttaggtttcaattgtacaaggagctttttgtttaattgaaaatggttacttttacctttgagtaattattcttaataaagttagattatcaagatttcttcaagcgtcatacagatttattaaattaaaatcactaatatgttgcattcaatatttacttttaatgaaagtacctagcataaaacgaagtatacgtgtctcacacataactttcttctagtatatatataaatgtatttacattttaagagatttttttttcaccatgttttcttcttacttacatctttgaaaaacaacactgttttcacattggatcaatatagtataacgtaatagcaacgtaaaaataacattattttgaaatcaatataaacacacccatccatatttttgtataaaaaacatttaaactcataaaaatgttagaaaaatgtaggtgcttattattttttagatttttttgttatcatatttgggtatttatgcttattataatccctcatcaaaaattagggattatttcacaaa

SEQ ID NO: 60295 - DNA, 849 bp, Cannabis sativa
ataataatgatattgaagaaattaataaaatgatgtaacaaattgtgtaattttttgttaaaacaaaatgagtattataatattggagattaatgggacttaatacatgattaagactattctaagcaaaggcatgtgacactagttggtctcatctaataattacagttttactaatatttagtagttgagaattgttaaaacatattattggtatttagtaccattttcgatatcatactattattggtataattaagtatcaagtcttatataacttaataaaatagttttttgagaatatcactaaccaattgtaggacgctacttatagaaagtcctaaacactactgatatttaataacaatactcttagtactttagccactacaaaaatcattaggtctaataattgaacaaccaactttcttagtaggaaaaaaatattagaaaaaatgtacaatttattttataaggataaaaaagaaaatttgtgacgaaaaaattcaaaatataaaaattataaggataaaaatacaattatgtaaggactaaagtaaaaaaaaaaaatataaagacaaagttaaaaataatcaaaattttgtatgtaaaatataatttatataaaattgagtgggtcagccccacatgactaacttaaaattttaaatacttaaattgctatttattaaaatgaaaaatacttaaagacattagtagtgtctagcactttttaatgtgtaatattgttattagtataattaagtattaaatttcatataatttaatgttataatttttacagagtatcactgaccaaaaataaaacattacctctagatattacta

SEQ ID NO: 60296 - DNA, 547 bp, Cannabis sativa
tagctataaataattttcataattcatcataattaactgctaatttccaaattaaactaagcgggctttccataaataacgcatgtcaaatctgtttcaaagatggaggccagtgcaagaaggacctcaggaagtaggctcgagtacagatcctagtaggtcaagatcaaggacccataggcagagaaaattgactagaacccacgcacatgaaaggctaacacaagatggggagggttcacgtcgctattatcgagatgatcaagagaccataagtaattctcaaagttatcaatctaagagttattctgcaacaaggttagtaagcagttacgactagaaaaatgagaggcgacgcgaccttgatctaaccgagcatttgaaccgtagacaactagacttgcgtgagaacttgaactgcaatgttccaaatctttgagatcgattgaatcagaacgcaggtcaccaataacaagtcaagcaacaatccatggccaatttaattaagggtaatacaattagtagacaagtttagatggtaccaaga

SEQ ID NO: 60297 - DNA, 1231 bp, Cannabis sativa
tctaaacaatgtatgttatgaaatatgatcttattattttttggtttatttttatgataaaaaataaaataaaataataataataataaaagttactattttgctaatagattaaatttttttaattttagcttttgtattttactgaagtcattataaattatttattttagattgtattgttatttgttttttttttaagaaaaagaaaatatatttgaaaatattaagtgtatatcttgaatattaagtgtgcaattatattatcatattttcttgaagcgtcaattatattaaattattagaactaacatattgtattaattattattttaaagttacaacaccatcatttaaattatttaaatatacataaaaattactgcacacaaattaaaaaaaaaaaaaattcttgaataaatcactttattaaaaaaattaaattaaactataataataaattaaattatatgattatttattgaatcatttttaattatattataaacacctaacataaaactaagtatacgtgccttgcacctaactttcacatagtacaatagatatatttcaaaatatctgtatattaactaattaattaattttattagttctttcttattttttttataaaatatatatggtatataattttattttatttaaaaaagagctaaactaataataatatattattagataatctaatttcaaaaattttataaattaaaattatcattattaaattaatttgtattaataatattcttttattatactaaagttttttttctcaaaataatataataaaaataataataaaagggaataaatatttaaaattgccgcagggaagctaagtcgtctagttatgaaaaaagaaaaggtgtcattagtatcttacattacatattacccattaagataagtggccagtggccacctgggcgtggtttgttttccttaagaatgtcatttttacttttttgtgcttaaaatggttggagcccaccaaagaaaggacgaccaaattcaaaaactggtaaaacgacatgcttccaaactcgaaggagacccaaccccaaaacccctctaattctttgggacacgtcaaagtcagtttgacttgacccatggactcatctaatgacatgagatcccattcaattatgccatttgtttgactcataacaactcatgctttatcaaataattataaagtagttaa

SEQ ID NO: 60298 - DNA, 869 bp, Cannabis sativa
attttgtattacacataatgcattatgccatatttgtatgtatatatactatactgggcatgtaagtatatacacacatgcaacagcccctatgttacattcataataaggattttttaatttttgataaatgagtaagcttcaatattgcatatcagtaaacaatacaactcagaacagctgcagctcagaaacagttcagctaattgtgatcataataaggatattaacaaacttaattaatatatatatatgtatatatttcctctaatatccttaatttctccagttataaattattaaaaccaatggacacagacaccagtactgtgccctaccctttatgactcacaaagaaagagatctcaaattctaaacaatgtcaaaaacaaaaaaacaaaataaaagtgaaccacctaaaaattaacaaaagtcttcatacaatttcaacaaccataataaaatataaatcacaagatacttttactctaaaaaaatgataaaaatatatggatgcaaatatgtacttgaaggtaagaattagtcaatcaaacaattaaaaaaaaaaagaaacaaacaatttaaagccaaaatattttagctaaataattccgaaatgatgaaatgatactctctattgaaactgtaagtttttcttacaagtaattttcccatctcccttcaatcttccaaatgagctataatacttattgaagctctaaaatatatgtggttcctgaggcgtgtcgtttcccacaacaaatttattaatttttatttttatattactaattatttaatgataaatacaggtcgatcccataaggactattatcatacaaaaaatagctacttttagtgacaatttt

SEQ ID NO: 60299 - DNA, 557 bp, Cannabis sativa
aaacttgggcatcaagacaacttgtggacaaagacattccaaagcttctttaagaagacttttcaaaacttggcaaccaagacttttgttttcccataattaataattacccaaaaagaaattacaactttacaaatatagataaataaataaaaaaataaataatttgagtcaaactacaacaattaagaaagaatgatgagaatgaaattatatattgagggttatagggcttcaaataggaacaaagatgggttgttgtgctatatatacatatagattttatatattttaattaaaaaaaagggcaaaaacgtgatgtgtatgtgaggtttgatgttattatttttaaaaaataaaaaataaaaagaatgagaaaattagggataaaataaatagagttatatattttatatcaattaatatttatgaaactaataaagaatttaaatgagaaaattaaagagagaatagatagaagtaattagaaaaattttagagtatcacgtcaccgcttcataattctcttcataatatatagatatagatagtactat

SEQ ID NO: 60300 - DNA, 1106 bp, Cannabis sativa
atgcgagatatggctctctatctcgttttttaactgatgacattcatccgttgtatgcacaatgtccttgtgaaatctacagaattttgttgcatcccgtttgtgcctcgcatgtctcatgggctcaagctttagaaatgcgaccctgtggtcatgtccgagaaagatattttcccgagtttcattaagctcagtataaatagtataaattggcacgtacttatcgtgctttttctgttatatcttcggataattccttggagtcatcttttctctttgtactaaagcctcctagattgtcagccttctttgagacgatgcttgccgagacagtgctgggtttatttcctgagccagtctttctcaatttcattcgttcctttcttcctcttttcgtacaaacacttgagctctttcattgaactcactaatgttttttacagggcgaccctgtaagtcatcccacaactcacctccagctgttgagagatcagtagtgatccctatttgaagagcagtatgctgtatactgtcgttcaagattctaactctggcagtggctgtactaaatcgactcaagtatgctttgagtgactcgcttggctactactttacattattgagggaagacgcttcaggtcacctatccattgctgcctgaaactgtttcttgaaatctttagacagctattcccaagagataattgagtgatggttgaatttattaaacaagctgctcgctgccccagtcagcgaggaggggaataaaatacaatgtaacttattcgtgacattactggcttgcgttattgtattaaagttgttgaggtgaacgaccagattcgtagtcccatcgtatgacaagacgtgagggtttttaaattctcactgctcataatatttggatggaaaggttcgatctcctcatctgagtcgtaatcaggctatttcccatcttggtatttcttaaaattattttccaaattgctgattcgcaattggattagatcctcttgcttttggttggaattgagttgtttgcgtcaatcaggcttcttctaattcaattgctcataaagatctgaccttcttcgatcatagttact

SEQ ID NO: 60301 - DNA, 1241 bp, Cannabis sativa
gccaaaatacatagagtagattaatttataatcaatatacatcaagcaaaatttatagtttattgaaagagcattgatattgcctattaatgacactttgtaattggttagtaatattgtctaaaattatttaatccatttatatgagacttgatatttaattgcactaataatagtataacatttaggagggtgctagacaccattaatacattttaacattgatcttattgaaaagtagttgagtttagaggattaactactactcataggcactttatagttgtaaaaaccatgaacttttatattttagtatttttttatatgaataatatatattataattatagagaatccctcataatttttcaaaattttaaatgattgaaaaggttaaaaataataatttaaactctttaccaagattttcgaaaagcgatttaaaagaaagattcgagctaaagaaagactaaaacgaaataaatacaaattttttacgtggttaaggaattaacgagccttaattcacgagtaaatagtattgaacttacaataattgagcttttacaatatttttgtagagtgtttcctcttgtaaaacctaatgttcgaaccccttttatggtggtgatgatgagatcctatttattggctgccatggacttagggtcgggatgatttgagcccaaaatcgtgtttctgaagtagaagactactattacgattcattgtactgtcgatgttgacaagcagtgcatgaactgttgtttatattttagaaaaaggcatgtctgggtctgggtagtacattttagttgtgatcctttctgtgcattagtagaggggaaaaacccctagatattgtagaatttgtgtcaaaaatatgctacatatataggtggtacccaaaacaatagactcttcgagatgaccctccctagatattcccagtgaggttatctatatgggacaaggtgccatggtgaaccttgaatagagtgtaagaagtcaattattaggactttctcgtgggaggtttatcgcatatcgagtaatcatattttcttccatggttgtcctcatccaagtagatgagggattaatagatctgggcagaggtttggatctggcttgggcttcttcactgaagccacatgtagactcttttgggctgtcctgtgaatgccacatgtcactcgggtaaaaacatagacaacataaactatttatttcacatgcat

SEQ ID NO: 60302 - DNA, 1885 bp, Cannabis sativa
acatatgtcaacttaacaatctaggattctaattttcctttttttctaatttttttgactttattttattatactctattaaaaattctatatttacattataaaactgaaaatcttttttaatttatttacataatatgcattagtaacttacatttaagctttcttatgcatgcacgcattagtaacttacattacactagatataaattaaaaaaacgttttcacaacgtaaactatttcattaaaagacttcaatttttttatttgattttatttttttactctaaaaattctatttacattgtaaagactaaaagtcactctctattttacttacataattcatgcattactaacttacattacactatagatttcattaaatataaattaaaaaacttttttcacaactttcctttctatttcattaaaagattcaattttttatttacaataaagaaaatatatgtatacatttcaaatttgtaattattttatattcataataaaatataattaatgataattaacattttataaattcatgcgttaccaacctttctatctatccataacccccttgagtatttcatatttagttacaactatataaatacatgtatttttctcttttgtgaatcatgctttgattattacttgtgctctactataatattttcttattacgtaaattcgtatagtttttttttctttgttgtgctgtttttagagtgtgtatatataaatatatgcatctaaatacatgaatacatactgatcactcataattacatacactataagcaatctttaacttttatagatcgtctacgaatgattctctatatttgaagtcctttctttttcctcaccaataccattatgatcaccctactttcatgtaagttattatatcttacttttgttaaaattttaatgaaacatatatatgttgtttccattctcaccagtgagcacaattatttgagttttttattggctcaatagattgatatatagtatgtctttgtgtgtgttagagcatggtagcatgtagtatattatttttatggtataatatggtatctctcaatatatattgatcagtaaactaagaactttcatgatttaattaattctatatttgtgatttttttaagagtgaaatagtcttttcttttttattttattatttttcgaataataaatatatcataataaaatagaacgatattataatatgttatattttaaaacaaaaattatcatattcaattatatttattaatctttctcaaattaaactttttattttttatctccctagatgctaagattttaaataatattctcacaaaaaataaataaataatttaaaatacatttatttcatttctctttgtcaattgtatatatgaaataatagttagtagtttagactttttatttttatttttaattgtattaaatataatttttttaaattttatttatttttcctttttttttgttagttgatattcaccttaactcatagtgtattttcattgacatatatgcattaataataataataataataataataataatatcaatatatataaggaaaagaataagagagattatgtggcaacttataggaatatttttgcctattcttttttctctatttttctaatttacttaatattttcattaatttttatcactattaattagttacgtttaactatcataaaaaaaattaaaagtcatgtcattagatattatttgaggctcttcattatcattctatatctaagactactcacattcttaacatataccaataaatatatataaatataccctattcatattatttgtattcctatatagt

SEQ ID NO: 60303 - DNA, 592 bp, Cannabis sativa
  modified_base (225)..(225): a, c, t, g, unknown or other
tggaaagaggccccctccggatggttatcaacaagaaagccttagaagattttccttgacaaaggtcgggtgcaagaatcccacagatggtgacattacaaataagcgaagaaaaggaaacaagggtaaaaatcgagaaagacaaagtcctctctgaacccttgaaggtcattacgtaaagaaaagatgggaccttcaagaaatacgtagaataaaagtaactcnaacgccagaaaagaggaatctaacgtattacatagaaactcaagacggaaattcccataaaattcaaacatcaaacccagaaaaagtagatgaacagtaaagcacgcaatgagcgtaaaacaataaagtacgagatgcgaagaacttacataaagcttgagaactgggcgttgttattgatcgatggtaaaaagttgactgacaatggcgaaggaaagtcagtaagaaatctacggtgtttgaaggttttctggttcgagggtttctctctctctggaaaatttggaaaaatttgttgaaagtctgaaagtagccaaatgaagtggaaatggtggcttttataggccaaagtgcatgtggaacaggc

SEQ ID NO: 60304 - DNA, 1265 bp, Cannabis sativa
  modified_base (80)..(83): a, c, t, g, unknown or other
  modified_base (786)..(786): a, c, t, g, unknown or other
ttgtgaaccatgcaaaaaaaaaaaatgatttgtgatctttattaattagtaaatctgattattttgaaatgggttttatnnnnggcacaaaacccaacaacaacaacaacaaccaagactttctaccaccgatggtagatggatatctacaagtcatcattggaggcccacacatagctggagattcaggaaaagctcgggagaggtatgcccgaacattacagcacgagcaagaagaaataatcttggccgtagaagagaaaaagccgaaaatcccacgggcaggagagccctccataacattcaatggccaagatgctgtcaaaatcagatttttgcacaacgacccattggtcatggaggtccagatagccaacaagatggtggccagaacgatgatagataatggagccttttccaacatcttattcaagacaacatatgaaaagatggggctccaactcaaagatctaaccccctgtcttctgcccgtatatggtttctgcggccaaggagtcgcacctctagggcaaatttgcctacccctcattgttggggaagctccgaggagcataactataatggcacaatttctagtattggacgttccatcagcctttattgtcatgctaggccgacaagccttgtatcagttaaaggctgttacgtcaatattccattcatgcctaaaatttccaacaaagaatggggtagggtgtctaagtagaaactagcagatttctccgaaatgttataaccttgttgtggccaaggctaagaaggaantatcctccagccagagcacagacaagggaaaaaacatttcgaagtagggagcttcccaaggcggggatgaagatgtggatcctcgacttctggacccaagcagcaatgttggacctgtggaagaactagaagagatcaagatcgatcatgatatttcgaccagaaagctaaaaattggaaaaagtttgttgcttgaagtaaaattagcattcataaaatttttgagagcaaacctggacgtttttgcctggtcacatgaggatatggtcggagttgatcattctataattttgcacgtcctaaatattgatcctaacttctgaccagttcaacaaaagcgaaggctattggacaaagagcgagctagccctgaaggaggaggtagagaagctacgcaataataatttcataattgaagctttctacccagcttgggttgctaatcccgtactggcacccaagccggacaaaaaatggcg

SEQ ID NO: 60305 - DNA, 2683 bp, Cannabis sativa
  modified_base (792)..(792): a, c, t, g, unknown or other
atttgcccaaaggtaataaattcttaattgatatgtattttttctttattgttaacttcatgaaggtaaatcatgtgtgtgttatattctcaccccaaaggggagtatataatgatcacttgactctataatattttctaattgcttggctcatatagcttaatcaagtttaattttcggtctcctttccgagaacagcaataatatttctatccaaattctgaatgcctctaactttaaggtatggaaacgagatgtgaaaattactttaggcataataaatttggacttatgcttatgagaagaaaaatctactgatcttactaatatcaacattgttgcccagaaaactcttcatacacaatgagaaaattcaaatcatcttagtctcattgctatgaaaagttcaattcttgaacatatagagtggcttgccgacactacaaatggcaaagaaatttttaatattgtagaaaaactatatgataatggtgaaaacattgaagttggacatcttatagatgcaatgacaaccattcagtatgataaatcaaaggagtgcgagattttattttaaaaattgttaatgttcagtccaagttgaaagatcgtaatatttctcttcttgactcttaaattctaatcgtgctcttcatgcattttctgcctcttttagccttatcaagacaacctacaacacttataataaaaatagagtgtcagcgacctaatttcttagtgtgtagttgaggatagcaagctgaaaaaggagaagaatgaatcttctcactntatttctcaactcaagcccaacaaaggatggagaaaaattagaaaagaagcaagcacaaccagaggctaatggatctcagcaagctaagtgagagggagtcaaaacttaaagttgacacttatgttgaagttgacgttatctaagttgacacatttattcttgaatgacagtttattgttaagattatcttcaaatttttttatattcctacttttaaaagtaatttagtttcgcttttgcttttagttaaacaatgactttcttttcattttgccaatcatagtgttgacgttatgtttgactccgaataattggaaattatttttactctgatgatcttttcaaattatcattgacttccttagcttcctcttttaatgttgtgaatagtgtaggtaagaggtcttatattaaggtatcatccttattattatggcacaaaagattggatcaaatttttgaagcaaagtttgattgattaattagagctaaaattcttcctcctcttgctatttctagttgggatacttgtgctgattgcaattgtagaaaattgactgaaataagaaagaagactactaactgtagtcaatctttattagaaattatccacactgacatcactatgcaaaaataagtatttcataactttcatagataatttttctggcttcacctacttgatcaaagaaaaatttgatgctcttgataaaatcaaagaaatttcgaaatgtacttgagaaacaattacggtcgttattaagaatctgaacaacacatgcggccttttgctaaatatttacaagaaaattgtgtaatttttcatacactatgccaggttcacttgagccatatggcattgctaaaaggagaaaattcactctaatggacatggttagaaaaatgatgggtagatcaaatctgccagagttcttatagtgtgaaacacttatgactgctaattatattttgaatcatgttctaagtaaatctgttcttgaaattccttttaagttatggattgggagaaagtctagtttgaatcatcttcatgtatggacttgttccgctgaagtaaggatttatgatcctaatttgaaaaaattagatccaagaatagttcgttgttgtttcattggttatccaatgcactcaaaaggctattgtttttactgtcctactcgtggtacgcaaattgttgaatcttagattgctaaatttttggaatttaatgttgttgaaaacattccttcatcatctcttaaaacgggcgagtcatctaagtgaatttttattcatgtatcattttcaagagatgataataacaacagtcttattcctactccagttattgctcccattactgatgtatatattggtcttgatatcaaatatgacgaggatcctattattggtgaaaggcctattattgaagaaggttttgttgttgatgagggtcctgttattggtaaattctagttgtggaagatgccattcataataatgataaacaaatagaagttattcaagcacctcctttaagaagatctcaaagacaaaagaagttaacgaggtgtgatgataattttatttaccttggagaaggagaatgtcatatattggtcattttgtgaatcttctcacttatagttaagcacttaatagtcctcattcttcaaaatggataagagctatggatgataagatcaagttcatggagaaaaattatgtataggagctagttctattacctgatggttttaaaccaataggttgtaagtagattttaaggactaaaaaggataataagggacacattaaaatgtataaaataagtttagtggcaaagactttactcaaagagaaggtattgattacactgaaactttc

SEQ ID NO: 60306 - DNA, 2039 bp, Cannabis sativa
atatttcaatttggctagattaaaatcctgctactttaaccttttctcatgttgcagcaacgaacaagaagggttattagcaagattttcttgagccaagctaagattctctttggcctcttgaaacatagcaagaattttacccaaaaccttttgaaaagtatccttaagagcatgttttagcctgtataatttgtatataatgcctccaaaacctcttttatccataggtaagtaccatttctctaaaacgttggctttgtagttactgttaagcatccaccaattatacctaaagtttgacaccaacaataaaaacatcattatttttttataatgcagtaactgtgatcagaaatatcatcctacttgtaaatagcctttgtattgggaaaacgatcacaccagagctcattcataaaaactctgtctaaattagaatagatcctatttcccatttcatattttttggtccaggtgaagctaaaatcgaagcatttaagctcttccacttgaccttgagccaaccaattttaagcatctagaatgtcattagtcgtgatctgtctttccccaactctatcattatagttgaacatagcattgaaatttccaaaaacaagccaaggatgactcaaacagccaaaactagccaacttttcctagagcatattccttaccgtagcagaattagaaccatacacagcaataataaagagaatagagttatgcccaactactttaaccttacattgcaaaaattgaatatcttcacaaataacctgaacttggacaaagcatctctgctaaagaagtaaaattctactagagacaatagtactagagtagaaatcccaattagggaaattattcaaaactatatcagcaaccttttcatgacaaattttggtttcaaaaaaggtactaaaaccaatcttattcaatctatatatatcaaggatagttttttatttactacctttattttaaatcctggacattccacccgatcatgttacactactccatgacgtaaagccatagaagtagtgactaaattccctcaatcaggcacttgaagcgctgcataaacattactagttgtggcattagatggttgcgaaccaaactttttaactcctttccttctaggagtgatccaatcacccccaataccagtaactatttcaattggtacagaaacttttacagccatcgagtctttaacctgcacatcagaagcattagatataacttcattagaaattgaagttgttttttaggcttagaaactagtggtttatcctcaacggaattatctactcccatctctggtttatttagcacaacctgctttttcttgacctaaactaggccttgatctttcgagcaattggcaacagtatgtcccaacaattcacacgcagagcacttagagggcaaccattcatattctatagcttgatcgaccaattaatttttctcattaatgaacgaaagagtcttcgaaggattatctaaaatttctatatcaacaagaattctagcaaatttaaccatagatctttctttggtaaccttattaatcataataggcttaccatttgtgctcaccatagcactaaggttattgcgtccccagtattaaagaccgaggccatttaatctaatccaaatgagaactgatttcaccatttgaactgaatccatgtccaatgaccagggacgaagaaccactagcttcttgtcaaagtgcaccacacccatttccagaaccaaatcccttgtagtttcatctcaagcgctcacaagtgtgaaacccaagtgcatcctcactattttttcaatacccagattgccccatattcttttaacaaaaccttcaaacacacggaatgggggattagcacccagaactatgcatacaatagatgtcttccacattgaagcctcaacttcaatctcctcaatatcaagcttcgctaccagacgatcgcccactttcataggctctgtataatcaagttgagtagatggag

SEQ ID NO: 60307 - DNA, 1016 bp, Cannabis sativa
atatctcatgcatcaaaatcccatgacaaaaccaatattcagattgcataaaacaacacaaatcttgcttaaactaacaagatttcaagttcaagaacatgaactaatacccaacacaaccccatgaaaaaccagcagcataacaccacattaacatgaaattccaacctagaaatatcataaaatctctgcccaaacttaacaataaagcatacaacaacaacaaactcaatatcaacaaaattaacaccaatccacttagcatgcaattaagaacactcaaagcttaaaagagcttgctttccaattctaaattcagcaagaaaactcaattaaaaaaaaactgtaaaactacctcaatctcatgcacaatcaagcctcaagcttccaacactcttttccaacaaacaagcttcaaatcaagttagattctcacaaattcaaattgaaaattgagagggtttgagagagggagagagggtcggttgagagggcaaacaaatccagaaaattgatctattttcctaaaaaaaaatcaacttttattaagtgtaactcaaatatggccaaatgaccattttgcccctaaggcttaaatacacacatacaccctcacaagggtaatttaatcatttcatattcaatcattcccaaataaatttaagatttcataatataaaaaataatgccaattaattcaatccaatttacatttcgggcctgaacccagttcggcccgaaatgcccggttgtgactataccgcgccaacctgtcagaacacacctgaaaagacaataaaatatactatataataatatagttccattaagcacgtaattaaattaatttcatcaatttacccttctcgggtcacaattactaaaatacccatggctcaccaacggggtcttaacatctcatagttcatattaattcacatatattaaattatataataatataattcctcaattatacataattatctagctagggttttgctaatccatttctt

SEQ ID NO: 60308 - DNA, 1371 bp, Cannabis sativa
  modified_base (41)..(41): a, c, t, g, unknown or other
  modified_base (363)..(363): a, c, t, g, unknown or other
  modified_base (846)..(846): a, c, t, g, unknown or other
tcatcgttttagaaagttcatacttgtgagtagatctaagntcctggtaaaataatttcccacagttataaccttgccatatccaaggccaagaaggaagtatcctctagcaaaaccttggacaagggaaaaaatatctctaagtagggaacttccaaaggcggggatgaagatgtggatcctcgacttggcgacccaagcagcaatgttggacctatggaagaactagaaaagattgagattggcccagatatttcggccagaaaacttaaaattggaaaaggtttgttgctcgaagtaaaatcagcatggataaaatttctgagaacaaacctggaaatttttgcctggtcacatgagganatggtcggaattgatccttctgtaatttcgtacgtcctaaatatcgatcccaacttctgaccaattcaaccaaactgaaggctgttggacaaggagcgagccctagccctgaaggaagaggtggagaagctacgaaataacaacttcataattgaagctttctacccggcttgggttgctaatctcgtactggtacccaagccgaacaagaagcggcgagtgtgtattgatttcacaaacctcaacaaggcgtgccccaaagactattttttgcttccaagaatcgatcaacttgtggacgcaccagctggacatgaaatattaagcttcacggacgcctactcggggtacaatcaaatcaaaatgcatccaccagaccaagaacatacaagtttccgaacagatatgggtctgtatagctataaagtcatgtcgtttggtctcaaaaatgctggagccacataccaaagattggtaaacaanatgtttaaagaccagatcggacgaaacatggaagtatatctagatgacatgcttgtccaatccaggaaggctgggggccacatagatgacctggaagaatgcttcaaagtcctcaagaaatacaacatgaaactcaatcccttaaagtgcttctttggagtcagctcgggtaagtttctgggctttattttcaacgcccgaggaattgaatccaatctagagaagattcaagccctcctagatacaaaatcgccaacaagaaccaaggaagtacaaagtttgactagtccgatcgctgtactcaacagatttgtttcaaaatcaatagacaagtgtgttccactcttcaacatcctgggaggaaacaagaaatttgagtggacagaggaatgtggaaaagcttttcaagatctaaaaaatgcaacccgcaaagccttcggtactctcgaaacctctggacggagaagaacttgggatatacttggctgttacggagcatgctgtaagtgtcgtgctgatcagaga

SEQ ID NO: 60309 - DNA, 914 bp, Cannabis sativa
gcacgaattcttgactacactagtctggtcgaaactttgtcgaattatatttccaaaacacacttatagctcaaagatccctaatcaaggagagagaggaagagaaaactattgttgatcttattagaagaataatgtaataaagtagagttgttcatgtcgattgggataatcttagtgtaaggaattcatgctaaccaagcctaattgtttttctaaaaaataattttctatttttaaaaataaaaaataattttttaattatgatgccaaatatgcactaaatttttgtaaatgtacaagtttaggaaaaaatattggtaagtcatctattttaatgaatgtaaccttgtagtattataagttctgaaaacaaaaatactgttaagagaaaaaaagaaatataacttaactttatttcttctttgtaaggaagtatacagcttaattagttctaaaaaattatcaactattaaataatagaaaaataacttccaaaataaatatttaaggcaagctttaaagagtcctaactattcgggaagacaaatgatgagagaaatattaaaaggcacttattgcatctagtattttttagatgatactgctagtttttttttcagtttttctgagacatctatagtttatgtttgccaactcataaattagttatacatgcacttagggtagatgatgaattagtttggattgagaattatttactttttttcattgatgtatattaaactctaatttgttaataaaagtttaatttttttttaaaaaaattattagatcttatttattttttaataataattataaaaaatactaactatttataggacatgatgattgttgagtattctcaattatgtgctaatagcaatctctaaacgaagttgatcattaaa

SEQ ID NO: 60310 - DNA, 983 bp, Cannabis sativa
ggtagagccatttaaagctatgcttgtagccaaaggctacacacaataagaaggcatcgactatcaaaaaatgttctctcttgtggcaatgcttaaatccattcacattcttctttccatagttgccactaataattatgagacatggcaaatggacgtcaagactgcttttctaaaaggcaatcttgatgaaattatttgtgtggaacaaccagaggggtatgtgctactattagaagatcaaaatgtatgcaaatttcttaaatctaattatggattgaagcaagcctctagatcttggaatatcacctttaataagactataaaagtgtatggcttcgaacaaaatgaagacaaaacctgtgtataaaaatacattaaaggtaatgtagtggtcttcttggttctttacgttgatgatattctacctattagaaataatgtagaaaggttatcagatgtaaagaagtggttagctaaaaaatccaaatgaaggatttggaagaagaaaaatatgtttttggcattaaaatctatagtgatagaaagtaaagaacattagcactttctcaagcaacttatattaagaaggtgctcaaaaaaatttcaatggagaattccaagaaaaagcagttactatcaagacatggaatcaatctctacaaggatcaatgtccaaagactcctcaagagatggaggacatgaaaaagtacccttatgcatcagctgttggaagcttgatgtatgcaatgttgtgcacaaggcctaacatatgctatgatgtagggattgttagtcgttacccatctaatgcaagtttggaacattgtatagctataaagcacattctcaattatcttaagagaacaagagaattcatgcttgtatattttagttgagagttaaatctattggatatactcatttcaattttcaatcagacgaagatagttagaattcaaaatttatgtcagtgttcaca

SEQ ID NO: 60311 - DNA, 1180 bp, Cannabis sativa
  modified_base (353)..(371): a, c, t, g, unknown or other
  modified_base (399)..(417): a, c, t, g, unknown or other
  modified_base (444)..(462): a, c, t, g, unknown or other
tcatcatgactctcgcaggcacattttttctcgtgcaaggaagatcaccgggggtacaatatgtcttcagccctctttcccagattggaaggacagcttgaagtctatcctaccctctgtgatgctttccctttgatctttttaagcgaattctaagcttgaatttttatacaacttcagccttccttctcggaagccgaagcttgttacatcaaaattcaacatgactctcgcatgaacgttgtttttgtgcaagaaagatcattgggggtacgatacgtcttcaccccttcttccaaaattagaaggactgcttgaagtctatcctaccctttgtgatgctttccctttgnnnnnnnnnnnnnnnnnnnaccctttgtgatgctttccctttgatcnnnnnnnnnnnnnnnnnnnctttgtgatgctttccctttgatcttnnnnnnnnnnnnnnnnnnntgaatttttatacaacttcagccttccttctctaaagttgaagcttgttacattaaatttcaacatgactctcgcatgcacgttggttcttgtggaagaaagatcactaggggtacgatacgtctacaaccctccttcccggattagaaggagtgcttaaagtctatcctaccctccgtggtgccttccctttgatcttttcatgtaaagtctaagctttaatttttatacaacttcagcctacctccacagaaggcgaagcttgttacataaaaatgcgacttgcctcttgcatgtacaatgtttctcgtgcaagaaatatcactaggggtacgatacgtctttaaccctccttccaggattggaaggactgcttgaagtttatcttaccctctgtgatgccttccatttgatcttttcaagtgaagtctaagcttgaatttttatacaactttagccttcctccccgaaagctgaagcttgttacataaaaagtaaagatcacacttgcatgcacgttgtcttcgttcaagaaagaacactaagtgtatgatacgtcttcaaccatccttcttggattggaaggactgcttgaagtctatcctaccctccgtgatgcttcctcattgatcttttcaaggaagtctaaccttcaatttttacacaactttagccttccttcctggaagccgacgcttgttacataaaaattcaacat

SEQ ID NO: 60312 - DNA, 868 bp, Cannabis sativa
taagctcaaaagataaggattagtttataaggaatttgtgtatgattttgtaattataattggaacttattaattctattagtttttagctcatcctagctagtataactttgccccatgttcataacctattggtctactttgattcactcagattgctaacttggactacaactaattttattagttaggctcctttcacttttctgttaagtttgttatgccatgttggcaacctttgttttgtccatatgacaactcattaggtttgttgttaggcgttggttattaatttttgttttggtgagttgagagatagaggaaaagagtgaaagagtgaagagagaactctattatacatagattgtatttactccaagcttcacagagatcgagttaggattaagatcctaacagtggtatcagagagatcaggttagagcaacataattatcacaagggtgaagatcaagaataaagtacttttatcaagaatcgaagaacataattgaagaaagctttacgtagaatcgaagaacataattgaagaatcaagaaaatgacttctatcaaggtggacatagagaaatttagtgtggagagaaacataataatcattctctgtcttgaagattaagtgttgagaaatgtaggtagtgaaattgcacaactaaagatttttaagagttcttgattaaagtttttattggtatttatttattcaaatgttatccgaaacaactcatcacacttttatttattacaaatatatctttctagattggttcagtatattggtaatggattataatagaaataaatgagaataatattatgatgtatacaatggtgtattgacaaaaaattc

SEQ ID NO: 60313 - DNA, 701 bp, Cannabis sativa
gtttgaagatggcttatgcttattcccgagctaagtcggttgcctctaagaacgctgccatttccaacactatgcgggcggaagtggacttggcgaggaaggatgccgacaaagccagggttcgacttggagccatccaaatggaactgggagaagtcaacaagaaacttcttgctgccgagaagaaggtagccgagctgactaaagatctacaggcttctgatcaacttgaaacttccattgcctccttgtcgaaagaagtgaccagccttcatgaagaaagggaggttcttcgagctgtcttccgcaggttggaagaagagaagaatgggaaggaggaagagcttaatgctgtggttgagaagtacgaatcagaggccgagcaacagagagctgaagtggccagatcttctatgatttctggtctcgagatattctatgatttctggaaggctaatccccaggcaaattttgattacttgggcgattcaatctacatgttactcgagtattgcgcttctcaggtggcctacggcgaacccgaggcgaccacttccacctccggccagtatgttgacgtgccccccgctcagacaaatgatcctctaactccaactggcccagaagacccgtataaagagcctgtgactctagccacttgaatacttcctctttctatcttttttttatatctgtccggc

SEQ ID NO: 60314 - DNA, 964 bp, Cannabis sativa
  modified_base (120)..(126): a, c, t, g, unknown or other
  modified_base (777)..(783): a, c, t, g, unknown or other
actcgtttaatattttataatttatgtttatatttgttttagtatattagtatatttttatgaattttaagttgggttttagataataattactatattaaataataattaatgtgtaannnnnnnatttttatgtagtttaatatttaatatatttaattttttattaaaaaactttatttttatattaggggttttccgccccgtcctcgtctccattaggagatttcccgctccactcctgatgaaaaataagcaaggatagggattaaaatctttgacggcgatggagagcactccttgccagttccactccccgtgtgcatccctactttctagtagctagtgttcaatattgttatgaaatgacgtcttatagatgattaataattttctatattattattaaattaaaatatgtgagatccaatattcgattacataatgttagctagatatctgtgtcctttaatattttctatgaccatttccaatgcgtggagtaaaaaaataggttaaatttggtgcaaaaaattagtaaatgctatatttaatttatatattttacaatcgtgttccaatacattatagcaaattaagatacagattaacaaaaaaaagtaattattattaatgataatcaatatattaaatatatttttaaaaaattatggcaatattttttatttaaaaaaatatattgaagtaagtcattaatactaaatgagaataatgtaagtaaaaaagtatattaattatagggattatttcacaaannnnnnnaaataacaaaaaaattataaaaaaaatttttaaatgtaaaaatgtaattttttttttcaaaaaatagtgccttacgtaattatcccttaattatatgtgttaaattctgcacaatgttaaatcctatgttaagtttaatctaacttttagtgtgtgttaaatttgacacaaattttagcat

SEQ ID NO: 60315 - DNA, 1399 bp, Cannabis sativa
  modified_base (359)..(369): a, c, t, g, unknown or other
ttctacgaatccaacgggtgagattaatgggtgccagggcagttgaaaacatttgagtacctctcagacactcagattaaatgcgttgattttttaatggacggtaagcaaatcgttgcttgcaaaaggaaataaatattaatgatggccatcataaatgtagcccacgtgcctaaggcccgtgccgttataccaacatgccaatcggaggcatcaaacaagcctcacttaactttcactaactgaggcttgggggtaaatattgcctttgatttttccctaaatacgtggacacggataaaagtgacacttggatctggatgaatcatcactcatgaaaatcaactaagtcttagacnnnnnnnnnnnacctcagggaaggtgcctcccggaggagagcataagacacatctttactctctgagaggctagagttctgctaaggcagtttcaggaggtatagagattacttgaacaatcatttcgtatttaatgccgcatgggggaagacgtattgaaaaatccataaacgacatgatagatggcgtaagccccctttcacggagattacactataatcgatgagtctagtgacaactgcatcatgaggaatcacatcagtcaagaggggataaaagattatatccacctaattcctaagatacctacagtatagggcatgtatttcctattttgtatatgctggggatatgtgcccctatgaagctaacacaaaaagacaagtgatccattcttagggatcctgacagaaaaacactataaataaccccacaaacagattgaaaaggggtcgaacaatttggttttaaggaatccaagagagaaaagaggagagaaatccaccaaaaacattttctgtaataaatagtctcattaatacaaaagactcgtggactaaggctcgttaatgccccaaccacgtaaaaagcttttgcattaaactttctacagctcttcttacatattatttaactggttgtcgaaaacctcggtcaacaatatacattatatatattttgttactgtgcaaaaaaacaaaaaaaaatattgaaagatattatatttttttaataattatttcacttttatcattaatacacattatttttttttgtttttaaaaaaatgctaatcccaatataaaataaaaaaaagaaagagaaaatggaaaaaagagagagagagaaggaattaacatgtaaaagactataaaaaatggagaaagatatattttttttttttttgtaattaaagaactttttgaaagttaaaattgaaaaacagattttataaaataatttaaaaaaccaaacataaataaaaataaatgtaaaaagatgtcaaatttgacatcttactaggcggggaggaaacatat

SEQ ID NO: 60316 - DNA, 2748 bp, Cannabis sativa
attggtgtgcgcaggttaatatgaccaaactatcaaaattattagacgggttataataagaggtttgcaggctgaaggctgtttaaaatatactataacccgacgacgaatactcactcttaataactatgtctaaagcatagtaaatggtcattagatcacttctaagtgatctaatgacaaagcaaaatagagaaatccaatccattgttttatcagtagtaccttactagtgaaactgcctttcattttgtttcgctgtgcttcattgtcgatcttgtaaaccaagtcgtctgcatcataaatgacatccttgagatcatcaagccacttccttactcttgggtctttgatgagcttctcctcagcatccgtgagcagcagatcagcagaggacagcaaagttttcaactccttcaccagcttcagaatggcatcttttcctttgaagaattccttcacctcactagttaacttgttcaccaatggattaagcaaagcagagagaagcggtcttgcaactaattcagccatgagatcttcaaaaacttggaaatgattaaaggaaagattggttgatgaacacaaaataaactcaaaataaaggattaaggaaagtgattgagtgtagtagctcttgcactagcatagcatatgatatattgaaagtgaaagaatatcatggggccacattatattatgattattaattaatattaatattgtttgtcttacaatggtatttacttattattttttatagagttggtattaggtacaagtataatgaaaacaaaacaacaactcacaaaaaccaatttgtttctattataaaaatagaggtttagtattatcattacatgtgttaattgagactaaaaagctgaaaaccttgcaatcaaaaagagctttagtgcatatgtttgttcaaacaaaatatcagctaattaactatttaatatattagtggtggctatagttggtaaacctactgccttaattattatacaagataagtacaaagactttgatataatcatcattaatagaacgcaatatttttagttaatatttattagtgttgtattgttgcttttagtttatgaaaccaaatccattcacacaccacacactcaaacaatgcttctttcaactttctttaactatattcattcaagtagaaattaaccttcagatcaaaaggtaaaagtaagcactgtgtctcgttatggataccgcctttttccactcatcatcttctgttttctgctcacatgacaatgagaatcggaaatttaaggaaagaaaagtagttgcataattagaacatatgaactaggaaagaaaaggaaatgataaacatgaacacatatatagtgcaaactattgacatttattaatatagtaaagagcacctgtggtgcaccccgtataaaatgttatatcgctactggtgcaattaaatatcagatcttatatgaggtgttatatcgctacactgtctgataaggttgctaggtaccatggtgcctcgtagaaaaatgctccttctataaattatgaaaaagctaaagaaatgaagttaatgtgaggtcaatatggaaaagtagtagaaaataataaaaccccacagctcacatctttttttttcaaaaaaagagaaatagactacccctaccactatgtattaataatggttataagaagaatacaaaagaggaaaagataagatcacaaaacaaaacagaccaaaacatcaagtctttttacatcaacacactcccactccctacacaagtctagaaagggaaaattctcaaaatgttttgttctaaaggcccatgtgactgtccaaaatcgaactctctcccaaacgtcctacgctggaacattctgctatttctctctcaatccacacagcccattacatatgaaaacgagcagatcaaacttcaatgaatgccacccaactgatgcacccaaatcatgaacttcaaatggttgaatatgtgtcaatgcagagtctgtaacaataacatcatgcagttctgcaatggggaacataaacaaagcataaataaccacacaaagcaagattattttgggagtctattatgtactgccaccaactaataacatccattatataccaattagtcaatctgaattcccaggcagccactttagctaaggtttttgaaaccaaaccaaaggtgaaacaacaaaagtcatttaagttgttcttcagtatagaggatgaaactctgattacacatcaaaaattgattgtgtcaaacatgttaatcatctcacaaccataaaaaattctagcaaaatacaagcaaagaattacagcaaaacatcacaaaatataaagatgaacctttgggttaagccagaggtagaaactggtacaggtgatgatgcttccaatatatctactacataaaaatgaagaagaatatgttaggcctcaaaaatatgctttcatatccaggtgtataaataaggcattcaatttagttcctttaggaatgattgttttgttaattggttagttagttagaattcatatgttaaagaaggtgaaacgctttctggggagataccaaactgtctcaaaaagtttgaaactttgtaattctttcattgatatcaataaaatacctttattctagttctatcaagtattggattggatcaaaagtgtcatacctgggttttgtgcaatagattcaaccaacctcc

SEQ ID NO: 60317 - DNA, 988 bp, Cannabis sativa
aatttaaaataaaaaaaattaaaactaacaatttcatttaattctctctccctctgttttagatagagaatgacatgtgtcattttagaaataattaacaaaattgttaaaagatgaacctacatagaaaatggaaattggactttaagtatttttgctgcaaattttaagattcgggtatttattagcaacaagtaaaaaaaaatagatatttatgtaacaaatttcgtattttgtatgaagaaatttatatttaaaataagtatatatataatctcttttaaagagcatatcaatacaactgcaatagctaaaaaaatcatcaaagatcaaaatctcaaattttatttcaaatattaaaaaaaatacattacttaattaaaataaattaaacatatatgtatcacttaacatcacctaattaaaaaaaaaactaattattcgtacattgcttgcacgtaacatcaacctagttattgataaaatgtatctatatttattatactactttttttattattaaaatgcatggtgaagtttttatttgataaattttaggttattatgtatataactattataatattacatttttacttttaatgtaaaataaaatataattttattatatattaaattatttaatatttgaaatttatatagcaattaaattttcttaataaaaattaaataataatttctatataaaattaagcaaatacttgcatgttgctattatcatttatatagatactaataaaaataatttttttggttagaccattgaaaagtattgaatatatagataaataaataataataataaactctttcatttatatggatatttatgttatattaaatgtggtcatataacaaaaaaatattgttttactattatatcttttatcttatattaaatgtgtctacataaatataacattttttaatattataattcaaatttaagcttattgctatatatact

SEQ ID NO: 60318 - DNA, 764 bp, Cannabis sativa
aatttggtggggggaaacatgtgttcttaatgaatttgccaaaatgtcattttgtaagtgtaatttacagtgtgttcaagcgactataaagccagctcagagtgaaagatggtcatttgaacctatcaaaagatagcttcatgatcgttgtgatattagctgtgtgtgtgaccacaaatcttacttatgcaaacagtagtattttaagcttgtatattgctggtggatttcttcacaggtgtgggagctgtttcgatttggagtgtggcagtgggagttgcatgcatactcggttttgctggtgggtttgtacgcaggccttatacccttcctcatgtaagtttcttcttgcatttcaatgcaatgataattttctatttgcatactagcataacaatccccgggcaagcccttcttctggtttgcttttcttttcagatttagaatttgaggacagttgattttattattatggcttccgaagttttgatttttcttttttgttgctttgacattgtttgcaggatcattggatgagtctctttagtttctagcataaaatttagtatacgtgcctcgcacgtagctttttcctagtatatatatagatatatagaatatagatagattggttacatttttttaagtcatttcattactattaatggtttgattaatttagaaattaaataaaaataaataataaataccttgtaacttgataatttattttcttataaaactttaattaaaattaattatat

SEQ ID NO: 60319 - DNA, 729 bp, Cannabis sativa
atatatatatatcagcatcatcatcccacacgacacggaccagcacaagacttgtgctctctctaattaccctttaatttattttcatctctaaattaaataatctaataatacaagtataacaccatcaccaaccatgcatcacacactagctactcaaatatattatacatatatatataatttaattgtatatattaactatatacatataataaacaaacatgcatgttatatgtttgtttttgaattttcatttcggtattataaattatctaaactttcttacacaatttgtaaaaaatctcatataataaagtactatattattgtacataataaaacaacaacacaatttatttatatatatataattaatgattaatgatacaagtataatttaaggtaaataccattttagatttttgtaaaaaattatcgattggattttttattttgttaaataataatttaaatcttgtgttttttttaaaatggtacaaaatataccttaaactcaattttcgtcaatttatttttcaatataatcaacctcagttagtttctagcacaaacaagtgtaaataatgtaattagtttttttttttataatatcttcagattagattattataaagatttaatttaataaaaattaaatttaaaatctattttgtactattttaaaaaatacaaaatcataaattattattttacaaaaaaaaaaaa

SEQ ID NO: 60320 - DNA, 1116 bp, Cannabis sativa
  modified_base (181)..(181): a, c, t, g, unknown or other
  modified_base (657)..(662): a, c, t, g, unknown or other
acaataaaaatgtaaccattgaaacctcttccatatattttattttgagtgtagatatgattattctttttcattctacacagtattttagtttttcttatacgtatataatatatataaacactttttaataagtattattcattgatacgatatttaaataaatttaattataaatatnaattttaaaaatattaaacaattaaattatgatctaatgacaaataataaaaaaaatggaatttttatttttaatttagctatttaattaaaaataatataaaaaaatatctctgtttatactatacaaaaaatatatttttatacaaaatatttaagtcaaatttatctttttttaccaaaaaactttttttcaaccgccggaacaactagtccatataatgtaaaaatgagagatttttctaattagattaaaaaattaagcataaaaacatgaatttcctaatactacccttcatgagttccccattaagagtgcacccatatatatagatatagggtaaatggtggtaaaactccccgatactttcattttggtttcacttaacccccaaaacccaaatttgggcggttaacccccaatactcgtattctgttagcaatttaatattttcgtccattttaggtgttaagtgnnnnnntggactggacacagtgtacacgtggcacaattttaatttgaaattaaaaaaataattataaataaaaaataattttttttctttttccctttctttctttttctttttctttttttttcctttctttctttttctttgtccacgatgaaggttcgtatggcttcttccatgagagccctaaaccctgaatccttcccagtcaccacccaccatcattccattccttcccagccattgccaccatcttccttccttcccagccattgccatcgccaccatcttccttccttccttccttcccagccatcgccatcgccaccatccccaaaacagaaatgtccacggtgagaaggagagaaggaggtgtgattccttcgcccagcctgattccccgaccacccccaacctaaaccaccttcacctagcctgattcctttctctttctctctctctc

SEQ ID NO: 60321 - DNA, 1051 bp, Cannabis sativa
ggaatagaagaatggaagaagttggcggtgagcattttgatgatttactatctatgtcattttttgtaaattccacaacctggacaggtgcatcttgttttgtcatgcatgatcttattgttgatttggctagaactatttctggaaaatacagttgtttcttacagcaaaatgacgacattgataggcttgagaagaagacacgtcaccttggatgtgtcatggaactttatactgataacaagatatctaactatgattttgaagctacacgtctgcgaacctttttaacattactaggttcaagatattcaaaaatcagtatttctaaggaagtagtgcataatcttctaccgatgttgaaaagtttgagacttctatctttttgtaatactcatatgactgagttatctcattcaattggagaacttaaacatcttcgctatttagatctctctggcactaaaattgtgatgctgcccgaatctataagtgtgttgtacaacttacagacactgaagttagaatcttgtcataaacttgaagctttgcctaaagatatacatcatctcattaatttgaggcatcttcttattagtggatatagcctagttgagatgccaagacaaataagtaaattgacaaatttgcaactgttgacaacttttgttgttgggaaggatagtggcgctaaaatagaagaattgttagaacttcaaagtctacatggagagctttccattgagaagttggaaaatgtagtgaatattacagaagcatcagatcaagtgcatgtactggatacgattcaacttgaggaattgactttgaaatggagtttgaataacgttgttgtcgatccaaaacatggagagggtgtacttgaaatgcttacacccaacacaatgttaaagttgctccaaattcttcattatccaagcacgaaattccccaattgggttgggaatgattcgtttagcaacatttctaaggtgaggcttgatggttgcgagcattgctccagcttaccaccctttgggcaacttccttt

SEQ ID NO: 60322 - DNA, 966 bp, Cannabis sativa
tcttagtttatttaattaattttttctattttcatatgaattttcatttgtggatttccatgtttatgattcaactttcaatgtgttatgtgattaaaatttaatttattcataataggtctataaaactttgggatgtttggataatcaccagctatatgtggaggaacttggtgtagctcttttattgagatttgaacttaatttaatttataccaacctcaatatattctgtatacattattagtaaaaaagacatatgtctaactcgacgatgataacgaaatactagatgttgtgatgtacaatcagttcaccatttaaattgttgagttgacatttttcctaaataatatttcttttaaactttacaaaatacatatattgatccttttaatttttctaaaacaaaaaataaatattaaagtcatatgttgttatgatttatcacaaattattttatcacattaagaataattattatatgagtatatatatatagagattaacatactatttaatattaataacaatgtgcatatcataactatatacataattatggttcacttgcaccaagtttacttttataaaacaaatcgttcaaataataatataaaattagttaccaaaatctaaaaaaaaatactaaaacttaaataaaactaacatttatgtggctcaccatgtaacataacattttcttcagttggattacgcgaaatagtgactaacatccaaatttcagatttgatgaaaaatctgcaacagaatgaggtaaaaactatactacaatgtttattttataaaacttttgtgtgacaagtttatacaatcgcaaggaaaaaatcgtatgtgacaagccaaacatgcagacaggaaggattttctacaccacggtatattacaaaacatatgatgttattaaaattaagttaaaattaaaaaagatactaacaatcttat

SEQ ID NO: 60323 - DNA, 876 bp, Cannabis sativa
  modified_base (191)..(201): a, c, t, g, unknown or other
cttcctatggcttatataattctttaccatgtataacaacacatgtgactataacaaaaaaaaatagttgtgactaattataaattatcattcctatattgtgactaaaatgttcgtggctaaaggtattagttacaaaaattacaattttgttgtaactagatatgattttagtcacaatacttgttgtnnnnnnnnnnnaattagtgacaacttttagtgctttttgttgtgactaaaaattatttttagttacaaaaactttttattatgactaaaaaattattactaaaaatagatgttttttttatagtgaaaataaaattttcaaaatgtttattatgtgttatgtagttattaattggtatgatgagtatgtgattaattaagattcatcaataaaattgacaaaacaatattcctagcgatcatattatatattaagcttacaataaggattgttttataataatctcaattaatattataaataatagattcatgacctctcattatatataaacaactagttcaacaattaattgtactttgaataatgtgtgaatgatcttcttgtttttcttcaactacttcctctcatctttgacattaaaataaaaataaatacataaaaaataataattattaagaggttagtacaaatggaagagtgcgcgttcggttgggataatgaaatcgaattgaaatgaattaattttcattatgtttctatctatatatagttgcattttaaaatattaaaatattatcattgaaattttttacttttaatcacaaattttatcgtacttaaagtgaaattttgtagtgtttgtagttttaattattgcagttaactaaaaaaattaagtagca

SEQ ID NO: 60324 - DNA, 816 bp, Cannabis sativa
agctctcaagtcccgagctccaattgtttagtctaatcttgaatattactctcacctataccattaaatcgttcaataattatcatcatcccattctacattcaaaagcgagtctaacgacatataatacgactatatttaaaatttggggttctaaagcctcacctaagcggtgcacattaacaattggtggcggtaaaaattggtgtatcggaaacgtcgctgaaaataggagtagtgtatattaaaatgaccacctccacgagtagatcacacccatgccaaccgtttgtcaaaacggtacacgatatcaccggaaagttgccagaaagggccagagctataaaaatatcatcggaaaaagtagcgagctgggcaaaatggtttagtgtaggttgttctcctcaaatgagatgagtttaatggtgaagacgtctcgtcaaacgaacaccggaggtgaccaaaaaattcgttcaaagtttgaacccccaaactttgacttgcgatcccgagctaacgggggcgaaagaagcggcaccgcttggggggtgaggtcgccagcaccaggggttcaagtggtccagtgcgtggggctggtcggtggccgaaggttggtcgttggagtccaccggtgatggagctttgtggcttcctttttgtgttttaaagagagagaaaagaaagagatagatagatagagagagagagagggacgataagggggggtatgctatttttttgtttattttttttttatatatataagtatatatattattatgataatttaattattattatatatatatgtttgac

SEQ ID NO: 60325 - DNA, 1037 bp, Cannabis sativa
catacattaatattactatctttctcaatgatgtttttaataataggatcaaaatatattatcggttgcaagactttttactacgagtaaaattttcatttacttaaaagcaaaagcggatgaatatagtggcggaagtcaaaccaaatacaacgttatctcactaattgaaagtgatgctgagtcgagcacctcaaataataagcatcttatataggaccccttatatatgtaattaaaatgctcaattttaattagcttgtaatttttattgtataacataatatatattttacaatttttactttatttaaaaatattaaatctcaattttatattttttattttatcataattaattataaaataaaaattaaaacaaaaattcaaatgatgagttaaattgcacgtgtaaactcgcctagtatctttatatgtaaaatgtgggtacataatggaattcttgatttaaccgttagtttttttttttttttattaacttaacagaatatactattatttaatataatattctaaattaattttataatattattattctcacagaaatttagacaacaccaaaatacgtgtaaataataaacaagtcaatcaaaaaagtatgaacactcacttagaatagcgagtattcaacaataagctaccgaagacaaaagaacaactggaaatgataaaaacacaagaaaatatatagtagttcagtcagatctcggtctgtttagtccactattgcaactaatttatgcttagtttatatgatttggatcactattttatatagaaagcaagtgtccttttaattttttacgtgactgatcagttttggaatcgttttaacaataaatggtagtattaaatcaagataaacgtaaaagaataaatgaagaacagtttaatctgttcttgtattaagtacatcaacgtatgcaacttgttgagcatgagttgcctgttcatattcctgcacaagctcacaggctttaggtgctgtctatatttgttaaatggctaatggg

SEQ ID NO: 60326 - DNA, 684 bp, Cannabis sativa
tttcacatttacataatttattaagtttaatactcttttatataaatctctttacatcctctttaaaagtatagaaatattctatcactaatatttttatataaatttcttattttttaattttaaaaatatataatgttgtgatgtctttttttacagttttcgtactaaattcacttttgagagatgacatttcaccgacaccacaaaataaaatgtaaaaacttttataatattagataaattatttcttgttattaaagaaaaaaaaatctaaataatcttttaaaaataactatatcatcaatcacgattttattttattaaattcaaaaaggttattcttttattattattattattattttattaggaaaacatatataatttcttttctagttcaacaatttttaatatttgacacaaaatcgacatctttttatatatcttaaaaattaaaaattatagggaaattctataatgcaccctcttaaaagagatacaccgatacatctctatctgttttagtattcgaaataattttttagtcaaattttttctcatggtcgtgtaaattatacttattaaagaaatcctgcaaaatttttaaaaatttggaaaagtttaacatgccaaaaattacgtttaagcagtgtgttgcacgagtgactattttattttata

SEQ ID NO: 60327 - DNA, 1633 bp, Cannabis sativa
gtttaaagggtacgacacagtattaccaacactagtacgggacgagtacgtagtgcatgtggtactcagtggtattcggggtatggttcagccctactaatactaatgcaggacaagtacttagtgcatgtggtacagggatcgtacttttattaagaacattcttgatgcatctgaagccttataaataggtatatgggcacctagatacaagtcagtattatgttatatgttttgtgtttttcttactgagtttgttgactcacagatattgtttgtggaagaccatatactcaaaatctcctcttgaatctaatatcatgaaatatccctaaatggtattgtgaacaaagaatcgcgccctagcaccagtttgagggcattggggcactctttggaaagtgaaattagttaatctgtaaaggcactagtggtgtaccgctaccaaggggcggtagggcaccccgaagagatgaaaaatactttttttagactgctctgatgcgctgtagcaattactagtaaggatgcaattatgtgaagaaagcttaattctagacactaatataattaaatctcttttttacaaacaaatttaagatttgcaatctcaagtaagatcgatttagaattatgtgatctttttttattaaataagaaggattgttgtacaaaatgcataatctaagtaattgttccttaaattctatatctatttagatgaagaagaaatcatataataaaataaagaattcttatgatgagaactctttcaaaaataagacagattttagtattaataataattaagttgaatggagtatattatattataaccattatcaataataaaaagaaattaataaataagtcatattagtgatttataaatttatgaacttgatttatttttccaatgcttcaaataaaattgcatgtgaagctttgagataagtatactaatactccattctataaatatatctatatatattcatctattacatttatatgaattgttcaatgtattcatcaataattttgagatgtggatcattcaagacacattagcacaacttatttttattaagatatttttagttaataaagctcaaccataaaaccttaaataaatatcacacatatacatatattatagggtaaatagtagtataagtacttaaataagtttcaagtttataagtggcataatcttaatatttatttttagcggcataaatactcaatgtttgtaaaactataatttttttctaattttgtcagtataaactttattattttcttaaataggctatatataaagtccaaattctagatcattgggtctaaattagtatcagttactttcaaatgttcctttaataaaattaaaacggagtctgcactgattactgacaaaattggagaaaaattaaagttttacaaacattaagtacttatgccgctaaaaataaatattaaacttataccacttacaaacttaaaactttgggtacttttacaccgctatttaccctttattatataatatatattcatacattgcttgtagtatataagaaggaggaagtgagaacaaaaacagatgggatagatatacagatcatatgtg

SEQ ID NO: 60328 - DNA, 1235 bp, Cannabis sativa
aatacttacgatgcaacaattaatcttgtcgacgaggacgatgaatgggtgcttccaaaacacatgcagaacatgagagtcggcgtaccagtggagaagaaacccataggtcgtccaagaaagagcaatgcaggaagaacacggactaaccgatttccatctaacggtcaaaaagtgaagtaacctcgcaaatgttcaaactgtggcgcattgggacacaacaaagctacatgcaaggtcagggtttgagcatcattttcgtattttaattgcatgcattattagtatggttatgaaatttattttgtagtttgttgtgtctgtgtatgttttaatgataattttcgacatttttcgatatatatggatgactttattgacatgcccataacaagagtaacaaagcactctatgtgtttgtttaacgacatcttttgatatatatcgatgactttatcgacatgaaaacaacaagagtaacaaatttgtctatgtgtttgtttaacgatatttctcgatatatgtcgaccactttatcgacatggcaacaacaagaataataattgtctttgtctatgtttaacgacatttgcatgatatatatcgatgatcttgtcgacatggcaagaacaagaataactattttttagatttttataatggtaatagttcacgacaattcgcgatatgttgcgatgtaaaatgcgacatggatggaacattattttttcttgaaaaatatcgatatattgcaacatttcgcgattacagtaaaaaaattaagcaaaagtaaagacaaaaaaaaaaaaaaattgaccactaaacaatcataacataaaaaattaaaattctttgccttttgggtgagacttgcaatacttgcataaagatccagttttcaccagtttaccattaaaataacctaatttgcaacgacggcacctttcgggaaccctggtggtggagccggccatacatttgttttgtgaaattctttttcaagttgtaggtacctccactcgttcgccagccgttctttttcaaaacgtttatagtcgtctagaactttttgtatttgaggcgtaatttcgccacaatcatgctccttcttgatctcttcaggagttagaattgggtatttgcccttgttctttctagtagacatttataacttaatagagaattaccttctagggttaaataataagaaaaatatgtaacttatgaagtagaaa

SEQ ID NO: 60329 - DNA, 1343 bp, Cannabis sativa
  modified_base (35)..(70): a, c, t, g, unknown or other
atgcaacataaaatgtgatttctgatctttattannnnnnnnnnnnnnnnnnnnnnnnnnnnnnnnnnnntagggcacaaaatccaacaataacgtactccatgtttctatgctacaaaaatacgtttcagaccctgctcatgtattgagttatgaaaatcttgagctgcaactagacttatcatacctagacagaaaggataaggtccttcggaacaagaccatagctttggtcaaagtactctggagaaatagcaaggtggaggaagccacctgggagttagattctgacatgaaggctcaatatccagagttgttcaggttagatttcggggatgaaatccttttaaggagggggataattgtaaagatcgcttaattttaatttgaaaattagcagataattagggtttaattattaaacttgcatattagttatgagttattaatttacgaacatttatttgaattcagagtgtattttatatgtcatatatggaatttcataattttgcatgttttgtgcccgacaacattggaaggcagtgtttggctattagaatcacatcctagtattttttttagtatagcggggcaatatggttagacattggaaatgtcggaaatagttgagattttagaattgaatacaatacccctaagtgaccttttatgacttttagtggcaaaatggtcattttgcttttatgtgttttctcttttagtgaaggttaattaacttaaataatctgatttttatttatgttttaagatgataaattaattaattaaaacctatctaattttatttcaatttgcaaaaaaaaaaaaaaaaatacaaaaattgaaaaagtaagaaactctctctctcgaaatccctagaactagcaagggttctagggttctattttttgttcatcaaattcctgtgatttccagcagctctaagtaaatccaagtcaaggtaaagcctctagcaacttccttcttagtttcttaagttttaagttatgagtttttgcgtgatttgaattttaaggtactgtggttgttgttattgtttattattgttttctgagatagaattatgtttagatatgttgaattaagcttattttgagggctattttgttggttgagcaagctttgagttttagaactcaagcttgactctttaatggtgatttttgattctgagcttagttatttgttttgttgtttggaatatgtctactggggtataatattcaggcctggaaggtttcgcaaggtctggagtcaaattcgttaggttttcgaaatttttaggttaccttgtgtaaaaccggttaactggattagaa

SEQ ID NO: 60330 - DNA, 791 bp, Cannabis sativa
agcaggaacacatctttattagaatagagcttgatatgatttcttcggacaaatggataatgtatagttcaataaaaattaaaaaacactaaaaattaccttaacagatgaggattctgatcgggtcattgattatgccacgtggtaactttctgatcatgcacttgatctcactgttaagtcattattagaaacacgttgggaaattgtgttgacaatattaaagtaatgagattctaagctccacaaataaaagaagctttaaattactttgtacaaagcaatgaagatgccaaaataaaaagtgatgctgagactttagcaacatataatttttaaaattttgagttcttagtgagcatggttatttggtatgatttgttgtttgctgttaatacaactagcaagatcctgcaaagtgaagttatgcaaattgatgttgcgatcaaagaggtaaagattttactttcatttcttcaaaagtacagagaaactgattttgaggaggctttgactaaagctaccgaggtatcaagtatgatggaagttgaatctttgtttattgaaaaataaaaagtttacaagaaaaagcagtttgatgaaagagtcaatgaggagctgacacaatcagtattagcgtcttttaaaattgactattttttttacataatcaattaagctatttcaccatttaaaaccacatatgcatactttcatggtgatttttttaaaattatgtttcactattcctactgttgcctgaaatttttcccaaaatacgtggcagttca

SEQ ID NO: 60331 - DNA, 1489 bp, Cannabis sativa
attaattttactccactaaaaatatggaattgaagtaattatagaactttatttagtgatttttattgtagtatccattaatataatcaattctagtgattagtcctccatgtgttggttcgtaattagttttgatcaaattaccattttactctactgattacttctttaacatttagtaccattaattatattggtccttgtcatatataatatatattatacacagcacattcactttgatgtcatgctatattcgtaatccgactaaagattacttgcaccaaagaatgggcatcagtgagccgtactagcaaccatcgattaaagattctatatctttaatatgttgatgattataatcatagttaagtggtcttagttctatgtacagctacaagctacaacctcatatataaataaggaattttaagatatttaatataaattattcaataatgaatataaataatttcacattcaagcatatatcaatatattcaactctttattaataattagaaatatctttacaagatttttagagcataaaccctaacaacctttcacttgccctaaaatcaaactaagcatctccattaatcacacattagtaacatgacccataaaagatttccctagtaacatttttgtagatggatctaccaaattatgtttcgatgtgatcttcaagaccatcacatcacctctctctactatatttcttattagattgtacatcctctcaatgtgcttgcctctattgttggcctcttggttccttggagttggccaccgctccactattgtcacaatagagcactactggtttttctacttctagaactacttctagagtagtgtagaatttcttcaactaaattgcttccttagctgcttcacaagctactatatattcgactttgcttaatgtttctccagactacttctccttcaccaagagtaaatactgaccctgatgtcaatttttgactatctttgtctgattgaaaatcataatcagtatatctagtaggattcaactctccactgtaatatataagcatgagatctctcgttcttcgaagatacttgagaatgtattttacaacaatctagtgttccaaacatatattagattgataacaactaacaatccctacaatgtagtatatgtcaggtcatgtacacaatattgcatacatcaagctccaaattgttgatgcataaggatactttctcattccctcttcctcttgatgagtctttggacattgatccttacatagaataattccatgtctagacgttgtcctttcttagaattctccattaagaatcttttgagcaccttatcaaaataagttgcgtggaaaagttctaatattctccgctttgtatctctatagattttgatcctgagaacatagctttcttctcccaaacccttcatttagaatgtatcgactaaccacttctttatgtctga

SEQ ID NO: 60332 - DNA, 897 bp, Cannabis sativa
ttccataaccccactgcagtttctacacttgacacttccctgagtacttcatcacctaaactaagtagaatggcactgtgccttgttctgaatttccttgaacttcttcatgtcatctccaagagcagcaaactcttctcgatcaatggcttctaaaattccttaatgcactaggaaagctttcattttgatcctccatagaccaaaaatcaattgtgccattgaacttatcaacttgaaatcattgcaaattagttcttgttcctctctttatgttcttgattcaattctttgatgaagcccctcgattgagctctgataccatttgatgtgatcaatgcttgatcatgtacctcatacacaaaccaaaacaaggaatcgatcaagaaccataccaacagaattatgaacaacttgaaattaatcaaaccagaaaacaaataaaggataaaccaacaatttgatcagatttgaacaaatgaataatgaacaatgaacaaatttagacaagaatatagggagaaaaagaatcaaacacaaccaatcacgaggttcgaacaaatgatgctgaatcacatccttactccacagccagaacaaccccaatggctcgaatctttattgagctagaagagagaattacaatgttgattattaatgtgttcttgacacaatcactcaagaagcatagcttcatttacaatcaacgtcgcacaaaagacactatgattaatcacttcataggcctatacaacaaattcaaatctctatctctcttgcacactaaactagctcttgtaacttgacattttctcccaaaaactgtgttgcaaagcaatagcaattggctatatgaaaacgatcctaatagtgataactgacagttaggtaaaaccg

SEQ ID NO: 60333 - DNA, 1430 bp, Cannabis sativa
tctcagcattgtacatgctcttcagggcatcattaagaacactaattctcaccatggtagcttctgcatatagtagaaaaatgtatgagaccccttcacaataaaatagaaaacaaaaatatatgtggtgcacaactggcggattgggcagtttgtgcaggtttttatggatcatacacagtagatctattgtatttaaacaaaaatattcattacaaaaaaaaaacaaaataataataaacaagtcctaattattataagtttaaaaaactccaaactctcaaatacttgaaacgttcaccacaaaataaaaaatgttcaaaacaaagttaaggagccatgaaggaaagtaatcaaaagatcaacaatatacattacaaatcacaagtcaagctatgaatacattatacacagtactaatagtaaattataaacaaaccaaaaacgcaattaatccatgagcttctgattgttcatgaatttccagcaatacaaataattagcacaaacaaacaaaaaaatacatgtttatatctacatgtttaaaaagttaattaatatcatatagctttgatggcaaaaggagatatcagcacatagaaataaaagcaacaaacgtaattcagcatagataattctaatgcccagatcgctgtcatatatctttatatacatagcaagaaaaaacctaaaagagtaaacataataatcagtaaaccacaaataatggttgtgtagtctctatatctgaccttgtgaaggagagagaaattgagttagtgagtggtgaagccgttattagcgaatagcgagagagacagagagcacttgcggtgtgagtctgagaggaagaccgtcacaagggtcgagtcgactgtgagtgtgagaagggagcggcagcttaagctaaaatgagaaagagagggaacgagagagacaggaatgtagcgctacttcagttttttagggtttcgatttgttgggcttggccttcgtcctgggtttaggccctgtatctaacaactaaaaggaataaagattatttcacaaaatacatacaaacaaccacaaaaaaagttacaaagataccgtttttttttatattatattcttaagaatttattgttaaatttttattatttattttttattattattttgatattatttaaatattatttttataataactttatgtaattttcttgtcgtttctataaaaaatcgtaaaaataaaaaaaaaatcctttaaatataagtataattttttttttacaaaaaatagtgtcttgtgtaattaatactccattttcaggaaggaaacgaattattttatgttgaccgaggttttcggcaactaataaaatatgaatataataatgagctgtaagaaagcgagatgaagactttttacgtggttggggggttaa

SEQ ID NO: 60334 - DNA, 831 bp, Cannabis sativa
agtaagcccctaataacaaaggatttaaaacatttgttggagctcaattttaagcttttaggtattttttttttttagcttttagttattattgtgagtgctctaaggattagatgtaatcatatgaaattgtacactgggatatttttaattagctaaatagtacggtgtcacaaggactgaaaaaaaaaaaaagagaaatgctaaagggcaccagtggtgcctagcactttcttatgtgtcaatactcaatattgatattggtttaactaagtatcaggtctcatataatttaaaataatagcttttagagagtatcgttaaccaatcgcaacgcaacatgtcgcaaaagtgttaggcaccactggtgcctaatacaaatgctaaagaaaaactaattattctttaaaaaaaaccaatcttatcataataagaatatggagaagtgtggagtccgacctgggccatgatttatcaataccataatgggctaatgataaaagagatgatccaatgaatatttatgttatgattaccaacactctttttagagaaatttacgtgagacgacgtgaatttcatattaattgtaaggatgtggttccaaattttattactctaattaccgctatgttattgaattattttgtgaacggcataatcaattgaaacattataatcaattccaatcgctttgtgtcaataagtttattttcttttgctttttttcttttgcttcatattttattttattagatatatagcgtgaaaattaatgattttcttatataaaaaatgctttctctctctctctcttagctagtagttaaa

SEQ ID NO: 60335 - DNA, 678 bp, Cannabis sativa
agatatttacatatagcattttcagcatatattgcaattaaataatttttaccaatatgcaatattatcaataacaattaattcttatgcctaaatcctaattatttaataatccaaggtattaatcttaagcggtctttacagtcctaacaggcaagactgaaagataacatcagtttaatagagtagtcagctcatctaaaatggacattattttaacaaccttttatttgatcaaaatgagaatccaacgttgtttcggttggcgagaatcaagtttttattcttattatatgtatgagctagcttttactattgttttatatttatatattttaattctgagtagtcacgatagggatgagtctactaaaaaaatttataaagtacttatctttcgagatcttacggtgttaaaggttcaatggataatcatccattagggggataaaatctagcgcctcgaggtcctattaaaaataataaccatgtaagacaaacaatggagatcgaatgtcttatattgaagctcattatttgaaaaaaaaaaaaaaatattgtatttttaatttattatttattttaattaattagtaataaaaattacttaatttaagttgatttaaaattaattttcagctttaattaaattgataaataaatttccaaattctaata

SEQ ID NO: 60336 - DNA, 1420 bp, Cannabis sativa
  modified_base (41)..(42): a, c, t, g, unknown or other
ttctcatcatctgggacactaaaaaagtaagaaaccagagnnattatcttgcataatcatgcgagctaccttatgacgttgagctgtagtaagtgtagtggtcctacacttatgagatccactgaataattcttcatcatatcacataaaagaaaataaaaaaatacgcacacatacaacaaactagaaatgcccttttagtactaaagtcagagagcaagactcagatgcaaaatccttctggtttagcagatgacactggggcatgattagaaagaatttctcgctattatccactaaaagaatcaattggtcatactgaaattgaggtcattgctggtgctttacttggcttcttggcaagccttgctgtagacacccttattttttttttgaaaaagacgtttatatcatagagtcataaatagttagacctcgcagtcattacaaaaaaaggtttccaggacagagtcaaccgagatagacccaaaaatctgatgggagaaagcccacctagccacattatgtgcggcaaagttacaagacctattaataaatgaaaaacaacaactactaaaagagtgggatgacttagtacaaaatgagatatagttatctattgcccaacgatactccttcccattgatgttaaatacactcttcttatatatcattttaattctatagagtacattgaatacaacaacagcatgcatagcatttaattttgtagctaggttctgcttctgcagcataaagaggtgaatgaataaatagtgtaataaaatcaatacattataacaaatataaaattctctctcaaactttattctcattaccattattatttatcaaatattatagtgaatatgcattaaagatgagattaaaaatctataacatctcacaacacaatatcagaaaagtttttagtaaaacttatacaaagaactggaagcaaaaacaaataagaaatgaatcaaataatgatacaatttcatttcccaaatcctatatgcatcaaaagatatgtggatctcattagacatgtagtgttgtttcaatattcaaaatagtacaattgaggagcaaatcacaaaggaaaacaaaggaattggatcacatcaaacacagagaaactcaaactctgttaaaacaaagaataattaaaccacataacaaactcctcctgggtctttgaaaatacagtggctagaagatgaacaaggagctgacaaaacaataaaactaatggtaaatgccaacaaaactagtgctcttttatcttcaacaaacctcgacattaccattattattcctctacttcttagttcaaatataatgcacaaactgtgctcttttatcactctgcttcacaattataacgttaaactctactatctctttttttttttttttt

SEQ ID NO: 60337 - DNA, 881 bp, Cannabis sativa
aacatggataatatttaccccctatgtttccaggactcttcgagatttgggagcctgcagtcttctttcttctcttggagataagtcttcgacacatggtgattgttgggatcacagatgtacccttgagctatcatcgattaaaggactaaaaaccgaaagtaccatgggtgtggcacacatacaacatccttaatgcattcattaaaaatacgctcgtgtaggggtgcatctcttgagaaaaattgtgatgatgaaaaatcgattgaaatgactcctcttaaatgcgtacaatacacaaggtgggcaatgataaataataaatgccatgatcaagttttaaatgtcatcttttcaacttcccatccattggatcaaatcgtgcttttgaagaaaggatctggactatccattttcaattgtaaggattttaatgaagtataaataggttcacaaaacctatttttcctattttcaccatcttagactttccaattttttcgcctttaaataccaaattagaatcccatttctataaaattttcaaacttacaatcatcctcagtagtgaatgcaaaaagttgattcagtattttctaaaccttcgttcagcctgctttccagaccagagtcgttagaccttgaactgatccaccccaaaactgacgagaacttcgacgcatgccagctacaatcacgtgatcgactaggttcaacactcttgggcgaatttccacgacaatctttcattacccacttatattccaagtaagtatcccaaccctttgttgaatatttactattttgtatctaggatagaaatgcttagttcaagctgttggaaattattttaccaggatcttagatctacttacaagtat

SEQ ID NO: 60338 - DNA, 876 bp, Cannabis sativa
taactcacttgtggtggcagccaaagcgcgatattcagcctcggcagagcttttggagacagtgggttgtttcttggttttccatgatatgagacagtcacctaggaatatgcaaaaaccggttgtcgaccgtcttgttataggacaagtagcccaatccgagtctgaaaagcctcgaaggtgaagagaagatgaagaagaatacaatattccttggcctggtgtgcctttcaagtagcgcaataaatgatgaagagctgtgaggtgagttgttcgggggcaagacatgaattggctaagagtgttcacggcaaaagtgatgtcgggccgtgaaagagtcaaatataataatctgccaattaattgtctgtagtgagatggattgttcaagacatctccttcttggtcagtcaatcggattttgggatccataggtgcctttgcaggtttgctactagtgtatcctgtatcagcaagtaattgcaaagtgtatttgcgttgagaaaggaagaggccatactgagcacgggctatttcaaatccaaggaagtacttgaggggcccgagtgtctttaacttgaacttggcctgaagggatgtttgtaattgttgaagaatgttgatatttggaccagcgaggattatatcatcaacatatacaagaagagcaacaaaggttgtgtgggagccttttgtaaacagtgtgtaatcggcatgggattgagtgaatccttcttggataagagcattggtgagttttttgtaccattgtcgtgaggattgacgaagaccgtaaatagatttgtttagtttgcacaccaaattagagcccgtgacattagagggaaccgtgtaaccttggggaagttgcatata

SEQ ID NO: 60339 - DNA, 1300 bp, Cannabis sativa
gaagcaagggcagcattgcaccctgcttagtgtgagcacccgaccaaccgcagtacccttctcttggactggtttcccggttatttggagagggaaggaagaattcgacttccgccaagtaaccgtgctcctgcaaattcttcatttttccctgggtcactatgaatggaggagaaacccaccgagctcctgttgcactttgtcttctctgaggaacagcctcggtgtattccttagtaacatagtcttcaccggccttagacacaggttctccattttcattaaacccaccaaagggtaagctccgagccgcaccttcttcctcaacttcagaaagagtgtcaggacaaaccttgccctgatcctccatctcttggacttcaccgtccccttcaacgtcttcctcctcaacagcaggccaagcctgctctgcactcggcattgtggaaagccgagctacgtgtgggtcagtcaaagaagacttttgcactatttgtttagtgcgtgccatcatcctattcctagatagagcctaagtggtatgtctagcaatagttacggcgaaagtagcgatgggtgtacctacatcagtaggatttggtaggcctacgggtaaagtgtcaactatatctggtcggacaatatatgtccagttggatggtaaatattgcctccacccctttctaagctgccaaatgaatcgtctgtagccttggccttcgatttggctggggtaaaaatggtgttgcacttcgagttctagagaaggcgtaggttcgctacttacctcccaatattcaaagcttgaatttgatagaccatcactagatgaggacggactagcacaaagacgaggatgatcctcgtacagaagttggagaaggtcttggtcgatacaatgttcgcttccccaaaactcactagagttcatctacaaaaggtcggatgcaagatgagtatttggccgaaataaagaacataagcagattggttacaccgatcaagtccgatcaaggaataaaaaatataaaatttacatgatattaaggtttacaatcaagaatttcaaaactttaaattaagggttattttcactgagccccgaatgggcaagtgaaagttaatatcgtggaatcaaaatcaaaatgcagttataatcaagcaacattgttaagcatagtcaagatttcacattcttgaacctaaattttctatggttttcctagaacaagttcaagaactatcaaatttttcgcagtggaaacccaaaaaatcaaatattcaagcataaaagaggaaa

SEQ ID NO: 60340 - DNA, 889 bp, Cannabis sativa
taaatattcaagtaattatcttaaaaaatagttaattataattaatttgatactaaaaaagaaatttttacttattgataacctactattataagtaaaaaaaaaggtaaccaatggttacaataatataattcttttctttttcttgtcaatttggtagttatattgttctttagccttagaatcttctttagatgtttaaccttatattcttttttgtatggacttgttgtggtatgctaaacaaatttttttttttgccttgttgaaggtattactttcgttgcaacgctagtgtatggacaagaagaagaagaaggaaaaaacaaagagaaaaaaaagaaggctacaactataacgaatataaaagaaacttctatcaacacaaaagcaatcctcactacttatatgacattaatagttatattgttctactaaaaccttaaattatcaaaacaaattgaaaaaattctcatatgaaccccatttgaatacacatatctcccaacagaatatactccaacacaacatttactttaaagctagtcacattatattttcatcaattaaaactaaataaaaatgttagctttaaaaacaaaataaataaatagaaataattcagaaacatacgtgtacacatatttgaccatttgtgtaagcatctctataagttgtatcacatatataccacaatcataatctacacattgcttcttatgaaatggcttttgcataataataaacttctcaaacttgaaactcctaccaagatgtatgctaatggtaaaaaagaaatcagtattcttgattatttaaaatttaattgaattatagataggatcatttgaatctaatattcccgtctattctccataaaaattatgat

SEQ ID NO: 60341 - DNA, 1089 bp, Cannabis sativa
atatttgttttggaaaaccgtcgtatatagtataagacacgatttaaaattattgtttatactctgttataggcaacggttttaaaccgtcaaaaaatctatatttgcgacgatttttaattgtcgtttattttactaattttgtgacaatcgtagagacaacaatgataaaaattgatataaatactttaaacgactgcttaaaattgttaggagaaactatttttgtagtagtatgtatttgactactaggatcacatatggaggtttcttgatccctattgaatattccctaaaatgaagtgatccaccgagttcatcagaagaaaagaagcacaacatgggcttggtgtccaaaatatttcaatcaaccttatcccacttcaccaatacatatttgctgccattatagtaatatttagccaattaacacttacatgtttggtaggaggagaagcatgagacagtggcggactcaaaaaaattttgtcagcgggagcaaaaggtttaagaaaaatatataatacattcttttaaaatgatattaggtatacttgctatgtgtttcggcatttaaaaaaaaaattattctattttttttttcatggtcgtgtagactatatatatatataaaatcacttataagttttcaaaaattgtgaattattttcagtagcaaaaaataaggttcaaccaattttttactacgcatataagaaaaatagtcatgtgtacaacaatatatatatattttttattttgggcattgtaaaatactcaacttttttttaaattttacaaataatgttaaataactgttatatacacattcacgaaaaaaatagatttaaaaaacttcttttgaatatcgaaatagataaatattctatcaaaatgtgcacttaaagaggtttacgatagatttacccgaaatttaaaatttatcatataacttattttaatgcatgcatgaaaccatggtcaatgttcaaattttttacacttgaatcttttttagaaaaagaatccaaataaatatgtgaaataatatatattaaaattcttaatatcttaaagataaaaaaaaaa

SEQ ID NO: 60342 - DNA, 1069 bp, Cannabis sativa
atggaaaaacaaaatatatgatgttttactattctgttccaagaaatagaataatgtattttgtatagaacaaaatgctaatcattatacatggacaatttaaccaaatatatggtaagtaaatgaatttttattggtggtttctagatattggatattctacaccataaaataaatgggtacataaaagttgtttttatatcttttcaaaaaaaaaataataataataaaataaaatagacattacaaaaaaataaaataggcatcacagtgttttttccctctttggaccttaggcctatgtttaatcagtagacaatctcttaaatatatacacattagcaaaataataataataataataataacatacaaaatctatttattttttgttggttttgtattttcttgctttgtatgtagtatcctaaataatactgtaatttgttgtttgagagagaataaaattttggacagagcacatggatctttaaaaccaaacactttaaggccttttctttcctagacttatgcagggattggagtgctttgatgtaaaacttaggaattctttctttttgtatgtttggtcactcaatgtgcaaactcattgtattgttataattttatgtaccaagatttttctccgccaaaaatgaggctttaataatatcggaggagccttgccaagtgagctccttctctttttcaaaaaaaaaaaaaacattgtaatttgttgtgattacacagattacaaatctatctagaaagatttgaaggcatattacctattatttgttgcaatagtatcttattttgcattttgtaatattattggaggatatttttatgcataaatacttaaataaatctttagatattataaaatgttataatttagagaaagaaaatggaaaaaatatgagatttttttttaaaattgtagtctaatgggtgatttcttatttatatacataagagaattaaatattaagaaactaagaaaaagaaaaactaaaaaaaaaaaaaaaattgattacaattaatggtaataaataaaagatttaga

SEQ ID NO: 60343 - DNA, 1103 bp, Cannabis sativa
aatagaagaatggaagaagttgccggtgagtactttgatgaattagtatctatgtcattttttgtaaaatccaaggactggataggcagatcttattttgtgatgcatgatcttcttgtggatttggctaaaattgtttctggaaagtatagctctttattagagcacaatgatgacattgttaagtttgagaagaagacacgtcgccttggatgtgacatggaaatttatactgataacaaaatatcaagttgtgattttgaacctactcatctgcgaacctttttaacattgggttcaagatattctgaaatcagtatatctaaggaagtaatgcagaatctgctatcgaaattgaaatctttgagagctctatcttttcgtggtcttcaaatgactaagttttctgattcaattggtgagctgcaacatcttcgctatttagatctttccgagactaagattgtgatgctgcccgaatttgttactaaattgtataatttgcaaacattgaaattaaataattgttatcatcttcaaactctgcctaatgatatgcatcatctcattaatttgagacatcttattattagtgaaaatagactggttgagatgccaagtcaaataggcaaattgacgaatctccaaattttgacaacttttgttgtggggagggatagtggcgccaaaatagaagagttggcagaacttcaaagtctacagggagagctttggattaagaagttagaaaatgtgaccaatattacaaaagcaccggatcaaattgtactggagaggaatcaacttgagaaattgcagttgggatggagtgttaatgatgttgttgttgatccaaaacatggagagggtgtgcttgaaatgctttcaccaaacacaatgttgaaggagctcaagattagtttctatccaggcaaaatatttccaaattgggttgggaatgattcgtttagcaacattgctgaagtaactctctatgagtgtaagcgttgctcctatttgccaccctttgggcaacttcctttgctaaaagatctttccatctcaggatgcaattcggtagtgacggtgggtgctgagtttta

SEQ ID NO: 60344 - DNA, 978 bp, Cannabis sativa
aataatttagtctctcttcaactttcatcaggagatctttctagggttttaggaggttaattaatggtcacaatgttatttgattttctttttgtcttagttcctaattaatggtactgttagtttgtcatagtgattttgagtattaataatattattatttagtgcataatttttctttgttgattttgtcttcattaattggtggaatgataatcaatcaatagtactactgttcgatcaggaaattgaaaatccaactcaggtcttttgtcataatatgaatcgagcttgaaaacaacattaaggtttaaaacgaaaccattttaatttatccactcttccatttttattgacttaaaccccaatgcctatcttcaatggtaaaaactaagaagtttcaacaaaccttggaaattgatacaaaataaataaataaacccaataaatacataataagttaagatctaattctaccctaatcggtttgtttaaacatatgatagaataaaaatttattattattattattttattgctgaataaaaatttatttatttaattatataataagataacataaaaattgtttaatttatcattatattataaattgatataaatatacatatattagagtgaaaagttcatacattaattagttgtatagaaaattacaaaaatacaaatttataatttttttcaatttttgtacagattttaactatttttgtagtttttacgaattgctttcacaataatattatactatgttattttcattttcatgctactttatatttgtattatattgattacatattgctttcatgagattgcataaaaatgtaattagacaaattcataaaagtaagacatggttggtaaaaatgttaaagaaaaaaaattataattttaagtatcttttgatagaaattattaatgtcacaattgtatatataaaaatgtgtattaggt

SEQ ID NO: 60345 - DNA, 659 bp, Cannabis sativa
cccctaaccgcttgaaagaggccccctccggatgtctggcagaaataaatccagggattttcctaggcaaacatcgagtgcaaatatcccaaaggcaacaaaagcagaatgaaaagaaaagaaaaaagatagagggacgtaagtatgaaaactgtgtcatgttctcaacagtccctaagaaaaaaagttgtttgcaaagtgaaaaagaaaggaagcagaagagaacatataaaaattcaagcttagacttcgcttgaaaagttcaatgtgtgaaagagtcattgagagtaaagtagacttcaagcagtccttcccttctaggaaagagagttgaagatgtgcagtttactcaatgatatttcacgtccaaaaaatgcttgcgcaaatgttctttgagctccgagaagctttaggaggtgcatgtttacgccctcaggatatcctaggcactctaacccctccggcaaaatgcatggtatcgggttctttacttgtgatgtaactccagggttgcaactacaccaggcgacaagaacgacattgagcgaactctgccaaaaatagcctcctccaacaacccgtactataaccatgcctcactggtggctcagtagacattggcagtactgatggtctcctctaagcggccgccatcgcag

SEQ ID NO: 60346 - DNA, 809 bp, Cannabis sativa
gacacctgaatcccacaactccctcaattcatcaatcaatggtctcatgaaaatatccatgtcttttccaggggcagtgcgccctggcaccaaaagatataacatcaacgactaaggcttcatgcacttccacgggggaagttgtacgggactaaaatagcaagccacacactgtaagcgttactcatgttaccaaagggattgaacccgtcggtggccaatcccaatctcacatttctagtctcaagtgcaaaggatgtatgacctctgtcaaactacttccactcttgtacatctgcagggcgtctaagcacgctatcctctttaggtctcttagagtagtgccaccgcatgtcttctgtcgagtgtcttaaactatataacctcttcagtctcggaattaaaggaaagtatcgcaaaacttttctagtaactttttttccgtctccctttctctttttccaacgtctccctccacaaataggacatacttcttttttttttttttcattttcgttccaaaataaggcacaattatacttgcatatatcaatggttttataacccaaaccaaggttacgcaatttcatcttcgactcgtaatgggacttggataattttgtaccctctagaaataactcaatcaatatggcgagtaacatatcaaaagaatggttactccacttattgagaactttgcagtgcatcagtttcaccaaagcgttgagtgctgattttttgcaacccgagtacaattcagttttcatatccttgaacaaatcgtcgtacttaccaccaccattcacagg

SEQ ID NO: 60347 - DNA, 826 bp, Cannabis sativa
tcaaattataataataataaaaaaaagaattacgtaatctaataataatttattattataggtctcgccttcgatgtgtaattaaacttccaaactgacgaacgtcaaattgtgataagagaagagaagaaaagagatcttgcagttgaaagctttagttttaagataaataccctttttcttttcttttcttctctttagcaacctcctttcctccattgtttctccttggtctttacattttagattcgatctccgaattttcacaagtacaattgtcttgtgtatttatatatctctttcttttgtttttatacataaaaatcatggcaaagagtcaacttggcggagcctttggattctggttccgtcttttcacgattttgatctatgtgaggatttccatctctctaaggtccaataaagagatcaaagagaggttctatggaaatttgttaaactccacctcaccagaatcgaacgacaccatagccaaaatgttcgatcgagttctcgagaaagagtcatttaattgaagatattagctcaattagtctattttaattgattttgtaaatattatgtgcatgtaatggactgtggaatttttatttaccttttaaaaaagtttaagaatatttaattgtgggatattggcggctaaatcacctgaactttacgttttgtaacacttaaccacaaaaacaaaaattttgggggcaaaacctactaagtccattctgtttgctctgtacccctccgtccaaaaatcacagttaagtgccacggtggactgtccacatgtatacacttgtacacgtggaaa

SEQ ID NO: 60348 - DNA, 722 bp, Cannabis sativa
taggtgtgatatttgatttcaaaggttagattactattttccctgatcgatgaagatagtggttatttggggttcccatagcggttcgcggttcatcgaggttcatggctgtttggggttgatgacggttactttttgatggcgattagtggtcgacggtgctgcttggactcgtggttgctattgaagaggctgaaaaatatttgggattaattttcttttctgatttttgttgttttggtcatgctcatttatgggtttgtattcttttttttttttggctattttgttcatgcttatctttgaatttgtagtcaaatctgttaagattttatgtttttattttattttgaaatgcttgtgttgtgtggtataagattattatttctatattgagtccactttttctcatgaccacaattcctgcacaatatgagaaagtcaatgcttcttgtttaatatcttttcaaatattttagttaattctttgtttgtgtgttcattttagttcattctcaatatatattaatgcctaagattatataaatagaataatgacctactattaccccaaagcattacgtatttgtacagattcttcgtcttagaaaaatatacaattacaattttattttagaaaaatatacaattacaatcaaaacataatagggttaatttcacagatgcacaaaaataacaaaaaaaacaacaaaaatacggtt

SEQ ID NO: 60349 - DNA, 581 bp, Cannabis sativa
atattagttaatttgtttaaaacttaaattatttagttttcaagtacaagtattacgaagacctcaaagaacgtcacaaacaaggtataattaaaaatttaaattcttgtgccttaccattttgttaagcatgtgttttagggaaacaacataaagtttactctagcaaggcacacaactaagaaatacttgtacatgtgcatgctgacctttgggggccatacaaggtgcctactcactccagtaagcaatattttctttcaatagttgatgactgtagtaggtgtgattggacctatttgctagcaactaaggatgagtgcctggaacagtttaaaatttggaaaactaaagtggaaaacaaaacagattttaaaattaagaaccttaggatagataatgggttagagtttattaactatgaatttgacaagttgtgtcgagaatttggaatcactaggtataaaaccgtagtgaagaccccgaagggaaatggtgttactgaaagtaagaaccgaaccttgttcaacaaagttatatgtttactgctcagttccagattagaaaaactattttggggg

SEQ ID NO: 60350 - DNA, 1168 bp, Cannabis sativa
gaacttgctacaacaatttctactattgtatcttctgagggctgaataaaatagaatataaatgtttttaatgttataattgtgatgttgtaatttctttcattagattttattttagtttgtgtgtcaaatgattttgaaattaagtagttgattatttattttgtttttctaattttaatcttgatgtgtctttaacgggaagatatcccaattaaattccaagcttttattttaattgactatcatcaataaaatttcattatttattaaagaaaaaaagtttggagcactttcttaatttgggagacctgatgaagaaaataagagaactgatggaatttaaaggaaaaaggttgatcagcagttgtaatacctatttcagtggtgctaaattatatttgatcatattatattgtgtctaacaaagtgggtcagttgtgattttcatgaacccacctttgtctgccactgctgttatttaaatatatgtaaagtgtaaacacacccttcacctatatataaatatattaatatatttatatatatatattatgatataatatatttttataatatggtaatgttttacaagaggcattaaaaataattttatgtagttaattttttaatatttgttattattttattttatttatattttttaatattatttttttacataattagttgtaaaaaatactattattcttctcgttatttctttttttttcttcttctccctctctaaaagttctcaaattaagacccaaaaatatatcaaaactaaggattttgatttttttttaaaagaaaaatagaagttgagacttagaaattgtacatctatctcctctcaatgacgaaaccaacgacgaaaccaatgacgaaaccaacgaataatgcaaaaggaagtttttgtacatctatctcttctcagatcatatccactaaaaaaaattgtattgttctttgccttcgacattggagaattttcgagtctcaaccaatatatatatatatttttttttttttttaaaaaaaaaagaaaatatcaaaattcttagtttgtgtgataattttagattgttgaggaacacttttaaaaacttttgaaaaagagggcagaaaaaaaatattacttttgacaaatacttatatatatata

SEQ ID NO: 60351 - DNA, 1343 bp, Cannabis sativa
  modified_base (64)..(69): a, c, t, g, unknown or other
gggttgggtttctggcatgagaagaagaagaagacgaagaacgaagaagaaaagaaagaaaaannnnnnaaaaaaaaagaaagaaagaaattatttttgaattatttatttttatttctttaaattaaaataataatttagaccaatgatatttcgacacgtggcaattttaaaaaagtaaacgactcagttaaaattagcactaacggacaaataaaaaacatgatcttgaggattgaccccgctatttttggagattggggacttatctgtatcaaactgaactttttgaggacttttgccgcaaatttccctattaattaaaatacatgtttatattttttattattttttagcagagcaattgcgtactctaattttcgtagggatccgttcgtgggtagcacaagtttttacctagtatctataaaaaattgagacataaagtggtgatgtagtattctaaaattattccaattttctctatttatttcctcaatttttctaatttttaaaataatcattttattaaaataataaattatctacacaaataataatttatattatttttatattattattatttgatttattttatgtacatacaaaatttactaggaattattaatgatgattataagtgagatacataacattaattttaaatgtaatgttgactacaagttaaatacagtaatgacagttgttttgaagatcttcttgcttgtttttttttttttatataagaaattgtatgatttctttgaagtttttttttattaagaagaaaaaagaacttcattaattaacactccaatacaatcaaataaacttctcaaagagaagcacaaccacaaatcaatctttgtagtaaattcttctccactctagaacctttcctatctttgatcaacaagagcttatatttcacatcacttttgattttgttcactatacatatgatagagttagaataaaaagagaataagcaagtgtttcgattgctccataagtggtaaaccacgtctgccaataaaagaattctcacattatccacgatgttcggccttgtattgcccaaccaaaccgtccagctatcaaagtttcttgaccaaccatcaaaccccagccaattaaagagcatagacagcacctgttggaaaaagatgcaaccatcaaagtttcgatttctttgaagttatctatacagatttattaattttttcaataaataaatattttttaaattatacataaaaagtaaaaatttgattaaaattatttgatataattttattgtttacttaatatttataaatatagtttaaaaaatttataaa

SEQ ID NO: 60352 - DNA, 1051 bp, Cannabis sativa
atttctagttgtcattttccttctttcttttattctcaactaatcttgttcatattaggtaagaataagactaattctatattctatggcatagtactaggagttgggagaccaatacttacctgctcacatcaaaatatccattcacggattacttttgatagtttataggttccctagctagttggacagaatcacgagaagatacaagaaacttcattttctacctcattccatgtaacacaaattgctgcctaggaaatctgagtctgaaaatagacataataaccgaaccactaaacgaagtgatatgacttttgcagaaaaacgatgaacagagaaacagaacaaccaaccatgccacatctgatacaatgaaatctaagattgttcaagttcaaccccacaaagaaacagagtatgtacatattgtaaaagaattcatggctgaacctgtcaaacaagatggtggagttgctcctactactaactcagaaggtggtctttttaaccaagctcgccaaaggcttaggcgattcaaaccactcagttagaatttgtaacacacaaatacttgtacaaaaaccaaccaaaaacaaataggataattgggttcaaaagttcttactcattcaaatgtagaaattcatttctttctttctttcttttatttatttttttttattcctgtaatatatgctgatttccattttataaaagcaaaaaaaaaaaaaaaaaagatggcttctttttactagtgattttcattacaatttctcacccaagcaaagaaaaaacagagcatgaaaacgtaattagaaattataatcaccgttatctggccgaacggactcgaagggcaatgagaatccgatcaacggctctgatcaaagtaggaactacgactcgtctgaagaagccgagacaagacgtgacggggttgtgaacggcggcgagcctgacccagatacggccgaggaagtgtgagccgttggagctgggagaagaagacatgggctggaggtaagcccaagcggcctgcttcacgagc

SEQ ID NO: 60353 - DNA, 1825 bp, Cannabis sativa
gacctaagaacgtacacgcacacatacctgcagacccgtccattcgagattggagacgtcaatggcataggtaagtgtattcttctttttctcgtctcttttattttttttttcttttcttaaactattctttgtagaactgtcccccttctgtctctaattgaatgaatcgctcctccatctttataaaaacctcagccgcgaaaccgatatcaatagctcactcgctccttctcgtcttgtattgatatcatctctttgactttatcttcttctttccttactggtaatgttcaattcttataaaaccttcatttttatttgttttattataagcttgtctttgtatcactcttttcctaagcagccatgtcagatgttgctaattatttttttattatttatttatattgaatcaggtattgtaatttttaaattcagattgtgttgtgttttagtttatgctatcttttttatatttacttttgctagttaaattagaatatcctattgtttctttatttatttgttatgaaatttattttaatattctctcttttagttacaacaattaattgatttagacaaatggattaattctcaaatatgagtctgttgtactgattttatattatgatgttgatactttttaagaacttatttacttgaatgagcatttagaaagaaatttatttttgtaatttgtttcacgattaaaaataatataatacttgaatctaatgtattttttttattttattttataataaagaacaacatcatattagaatgcaatttttatggtttgttttatgataaaaatgttatcatatttgaatgcagtgttactgagtaactctgtctcttttttttttttttttttaaaaaaaatgtaggcaacaattcaaaggctcaagcataagaaaagatgaatattgatattattaattgatgtcaaagaaatatatatttttttgttaagtatgtaatcactgtctaatagcttggactttggatagttgtaatattatattttgatgtatttgcttaatagcttagattttggatagtagtaatattatatttttgatgtatttgccttagtctgaattattaatgtctttgcctcaagtgaatttttttagcttatatgtttgaactctaaatttttaatggtaaaaataagggttgtaacccaccccgatccaatccaacccatattttgttgggttgggttggtttgggttataaaaaaaattaatatgaatgggttagaattttataggccgatcttaatgggttgatctattaaaatagcttcaacccgactaactcaacccatgctcagcctactctcttttgtgtagtttggtattaggagtaaatgtgagaggatgggaagcaaattattgattaaaattactatagtatccttattagtatagatatttataatattttttaatgataattttggtatttggtgtgtatatcttttttctccaatccttcttaaaatggagagattgtttaaaatttagaggaagaaagtctccctccacctctcctctcctttcctttctccctcttactaaacaagggcttcttcctctccttttaagctcgttgtaatacggcgtaccaaacgaacctttcaactctctccttccacccatccatcctttctaccaaacatagtgtaaaagttcatgcaataatacaaagaggaaattacactctataccctttttatattgttatcttttatttttaccctcttttttaaagtatcatttttacctcttttttaaatattgtaccaatt

SEQ ID NO: 60354 - DNA, 851 bp, Cannabis sativa
gctaaaagcgaggtcaacagtaagatattgagagatattaaaatactgaaagttattattgtaaataatttaaaaaatttagtccctcattgtaatttttgctaaatttaatgataaagtcattatttttaaaaaaaaaaaaattcaaaaatactctttatttatgctttatttacaattttatagtctaaagtttttaattacaaaagtactcttataaagttttaaaattataaaaatacactttgctcagcaaaaagttaaacaaaaactaaaaaacaatgagaaatcaacctcaggataactataaagcaactataaaataatcttcctcagtcaatgagactctcattgtccagattcctaagaaattcaatgcctcttctctgaaagactttcaacctatcagtctatgctcaacgatctataagatcatctcaaaaatgctttcaaaccgccttaagagtgtcctgggaagccttatttcccctttccaaagtgcttttttgtctgagcggattatctttgataatatatttattgctcaggaagttgtccatgctataaatcatcgtaaacatggtaagtttggctaggtgggcctcaaacttgatatggagaaagcatttgatcgcgtggaatgggactttcttttggccattcttgataaatttaagtttcccataaaattcatcagtttaatccatcaatgcatctcctctaccacaattcgcttcagtattaatggtcatattacaagttccattcatccttctcgtggtattcgtcaagggaatcccttatcgccatacattttcctcctttgttcagaaggccttactgctgctctt

SEQ ID NO: 60355 - DNA, 693 bp, Cannabis sativa
tggtttggattgtcttctttgtttatgttgagttagttgataacctccaagatctggttgctcatgatgctacttcttatttaggatcaggttccacctaagttggatggtctctttgttccacctgaacagtgtgatctaactcccttgtattttattcatgctccaccttaacattagattagttttggttctcctgtcctgcttctaaactaatttctttccctttgctacctgcattctagttagtaatacaaggaaaatctatttcattgaatatcacttccctactgattattatcttgatccattcctagatctatcccgtagtatgtagctctccaccccaagtggatatcctagaaaaatatacttgtttgatctaggttcaagcttacttatgttttgatgcacataagcagtgcatctaaaagttctgagatgagatagatttggaattttacgtcaccacatttcctcaggtgtcttaaagttgattgcaccagagggacttctatttatcaaatatgcagctgtcatcacaacctctccccagaatccctttggcaatcttaaactcatcatcatacaccttttttaagagtgtcatgttcatcattttagcaatcccattctattaagggtcgctcttaactgttctatgccagctaataccttaatctgcataaaact

SEQ ID NO: 60356 - DNA, 1129 bp, Cannabis sativa
tcatcagaagatcccatttcctaaagccaagatctctttcccagcctcaggaaattcctcgatactagaaaggggttggcacaaagatcttctggcccaggtttaggtcttgggttggttgggttctctaatagaaaccatgccaacctccttcttggatttatctaaaaccacgccaacttccctctggaattctttatcagcctaaggagaaccttttaaatttcccacaagatctatgatcacttgtgaggatcgcccatggtgggctacggggttcccctagtttggattggtcggaagctcctcagccttagagtccatctttccggctctgattgcggtttgaagtccttgggaacaaatggaaattggttggtgcgtctgggtattatgagttttggaggatgaacttctgaaattaaaagggacattttggcaagtaagagatgatccattctaaaagtggatctcactaaagagccaaaggtttatgaaaaattacaagcttgagccgcccttttatacacaaagtccagtgacaagaaagctaagtattgagaaatccaacagttgggagaagggcagaatatgaacagacgattcataatgaccctcgaagccgtacaaccgcgagaatcaaaggatgcattttttccaagaagagatcttgacgaaaatgcacgctgtaattattaaaaagctctttttactaaaaaagaaccttttaaggggcaattgttataccttaaatttggctagaggacacaagtcaagataaagagaatgtgaatcgatgcaattgcttcttatggaataactcattaattacgtaagtatcagaatacatttgtaacccgctaactgtaaggtcttaggcgaggaatcaatgtacaaactagcacttagtatattagcgagaaactatatgtcgctaaatgcgaatagtgaggcaccaaagaaactgacacgtatcaatcgtgaatgtccttagtgtagaatgaacaaactaagtgcaaaagtcaaatcggctcaagaacaactaagccaggtgaccgtctcgttatgggaagacttcatataacttcatcccaatagcgtcagcgaggcttacaatcctagcaagcca

SEQ ID NO: 60357 - DNA, 755 bp, Cannabis sativa
ttttttaaaaaaaaaaattatactcattttactattttacatatcactaagatcacatattacttgttataaattgaaatatttttcctctctgtatcatttaaattttcttcaatagaaacctaccaaccagtttgaaattaaaacataagaaagccaagccaatgaataaaatgttgtcatcttaaacaaaaaaagccaaacaaaaaataaaactatattacaaaaattaattaagctactcaaatttatgttaagaatactttttcttttctcatctatggccaattttcgtgtaatttaattatttaataataaagtataactcaatattcaaactttttttttttaacaaaatgtgtgtggtaataagatttgacctttatacatagttagttgtacgaaaatcaatgtgttaatagaaatcaaccagacttcttcaataacttaaaaagatatataaaaaaaatatatatatgttttagtcacacttatatttggttgtgttggaatatatttaaaattcgtttatttgaaatatatttttgcactgtgaggggaaagagaaattgagcatacattataaatatatgtaatttatgcaaaataaaaatagtaaaacatgaaatatttatataattttggggtacacatataatttcactaaaaaatatcatatctctaaaaatgaacaaattactaaattaataaaatagaaaaataatttaattaaaatgacaaatatataataaagt

SEQ ID NO: 60358 - DNA, 1590 bp, Cannabis sativa
  modified_base (356)..(357): a, c, t, g, unknown or other
tgtgttggcctttgaaatgatccttcttgtagtgatctctacccctgttgttgtctcttcctctggccagataagcttcatccttgatattgtctttttctttggccatttcctgttctttggatttcaaggctccaagaacatcatcaagggtgagagtattccttccgtatttgatcacagccttgaattactggtatgcagctggcagtgatctgaggagaatgacagcttggctttcttcatcaatagtgtacttgaagttagccaatcctataataatttgattggaagcatcaaggttatcatctagagataagtgagaagccattttaaaaccatataaagattctaanngattgatcttattagttagagagggtttcatgtaaatctcttcaagcttgctccacaattctcgagctgtcttcatttcttaaccttccttcttatagtatttgacaagtacattatgatagtgtagtatgtcaattcctccatgtcttcaagttcttctttcatcaacttgtcagtcagttcttccttgggttttaaggctttggcaactttttaatgaacaagtattccatttaagctttctctcctcaggccaaaatcccctgtcccattgaacttctcaagttcgaaccttgttgctcctgtcatgattggttgcaggtgagtttattggtcgaatcttgattctttatttcctccttattggatcttgaacctgaagttctgattttgttgtaaattcagcaacaacaacaacaagattcaatactcacacctgcactaaatcaattaacaagaacagaaacaacacacaaacacagtacaataaaatataattgaatcaagagagaaggcaacaagatttattctggttctggtccaagagattaagttgattcttggccatactccagctgagaaacaccatctttgctttcattaatatggagaataggagagtaaatacaatcactaatatctgagtaaccaagctcttcgttcactcgagatacacaccaaagaaacagtcttagtttctcaatcaacacctaagtacaccctcagttcttgaccccttcaagaacatgatctcagagcttagaaaactaagcactcaacctctaaaattctttccctattctctaacccataagtgaaaagaaaagcctatatataggtacaacttacagctagaaactaagtgcaaaaccaacaccaactaaccaatcaacataactgaaagttagctaggttagttaagagtgggtaagttagttataggttggtttagaggatcaaatgccacaatttcaaattcaaattttaaattatgatattgactatttttattattatacgtagggtagtttaataaaataggtatatagaattttttttaattaattaattaaaaaatatttaaaatttaataaaaattaaaaaaaaaatgagagaattaagagtgaatagataaaggtatttaaagtcatttaagagtgacatgtcaccgccgtataccataactttatatatatatactaggtgaatgtacgtgccgagccacgtattgct

SEQ ID NO: 60359 - DNA, 1078 bp, Cannabis sativa
gtgcatcagtgcaccaattttagaagggtgcattttaaaatttttctaattaaaattgctaagaactaccaataatttggcttagttggtcagtataaaaatgaataaaaaaaaatcatcagtttttcaaaaaaaaaaaaaaaagttcatcataaacaaaaaaacatgaaataatcacatagaggtgctcaaataaaatttgtctacaatcaattatctttaatttttaattcgcccaatttccttccttatagcatgaggtaaaaattgcatccctactagaatttccatatatatattcaaaaactctggatcccgcctatcactaaccgtactcgtgtttcaattcaatccactctcagccgtgtgattctcattttaatgtcatatgttttgatagccatagcaacacttaattttctttttcttttttaaggtcgcttccacttactttgagattttttttttctttgaattagtgaaaatatagatatgtggtggtatgtcttgagtattagtttattgtggttgcaaattgctttggatggaaccaaaacaataaactaactgtcagcatcaacatcaatttattgttgatcaacttatttcttgctttactttctcaccataaaataatatataaataaataataaaacaaacagaatgtaacttactatcttgccagaccatttacttttctttttttatggaacttaaacaatattttattgaaatttttacaaaatacgaaattttaagtaaaaatttacaatttcactatcacatagaattcttttttacaaaaatactatttttttataaaacaactgtaaaacaacaaaatagaataactaaaacacaaccgtaaaacaactgtaaaaacttaacacagtatacaatataaaacttacacagtatttttaaaaaaaaattcgccttacagtataaaagtaaaaaaacttaaaatttcagtatatgatgtaaaaattcccattttattcacctaatataggtaggacacaaaagagacactgctagatcacaactcttaacattttgttacaaaaataaaaatag

SEQ ID NO: 60360 - DNA, 1321 bp, Cannabis sativa
  modified_base (242)..(243): a, c, t, g, unknown or other
tttttttttttttaatataaaatatatatatctacagtgtgttaaatttttggagtgccgttataaatatgtatatattttttttttcacttaatgaattaaaaaatactatataatataaatttattcttaatttttcttttatatcttctcaatttttcttcatgtatctattctatataaagtgtgcctatataacagaattctttgtttatgagaaattcatgagtgactttttattnntattaaaaataaaatggtttatggaaaattcatggtcactttttatttatatacaataaaataaatctcattaagtaaatgctgaataaatccaaagattttgtcaatacgttgcaagatctctcttttttttttttcaaactatctatctatataaatatatatatatatatataaagcagaaatatgaggcggtaactatcactctaaaatcactctaataaatacttctaataattctatctttaattctctcactttttaatttttgattaaagtaaaatcatttaaaatacatctattgattttatctttaattttctaattttttaataaatttttaacgtttaagtatataaataaaactatatttgtagatttttacttttttttttctaataattattcaaataaatattattaaaatacaaaatactaaatatattttttaagaaaacacagggtattaaataagtatattccctacaaaaattgataaatcgatgaaactcgaaaagattggacttctacattcttgaagtaaaaatgtctttttggttaaaaacaaaaaaaattaattagataaaattctatctattttttcatttttaattagtagattttatttggtatattttatttaaaaaaaaaattacaacttaaattatgtatataagtaagtggtttaacatgttatttgatttattttatatactaaataaatctattaaaaattatattaataagtacaagaaagatacagtaataaaatcggatttgaaatcatatgattagttttatttataaatttatcaatggttatatatatatttcttaatttaaatttaatttattcaaatgacatatatgatttaattattactaaataaaatacaaccgcatgcgaagtacaatttattttttagttgctttataaaatattaaaatttttaaaatttacaaaatattttaaataattataatgaacatgactattataataaaatgactaataataaaataaagtgaaaaaaaatcttaatgctaacaaaataggtgcatgttaaaagtgtgaatg

SEQ ID NO: 60361 - DNA, 552 bp, Cannabis sativa
attccatgtcagttgaagaggcccacgcccgtagtatctcttactcgggttgcatggatactctcctactttctcttggtcacagtacacttttgcttggttatcactttcttctataaaacataacgctgcacaattattaaattaaaatatgtgagactttagacattacatgtgctcttagcaattttctttacgaaagcattcaatcgaaatgtttgaaaatagaaacatatagtattcttctttttaattacactaataataattgagcattgttattaactataaggtgctcgatcgatacaaatatagcacgttaagtagttagtaattttttatattatttattaaataaaaatgtgtgagacttgatatatattgaattaaaccaattaataacagtatatcatctacggtaggcattataaagaagctcttagtatttttggtaaggataaatttaaacatggtgtttaagtatagtttatgaaatctctttatcttcaaaagtgatgagcaaaaaatataacaaacaagttagaatgagaa

SEQ ID NO: 60362 - DNA, 1199 bp, Cannabis sativa
  modified_base (608)..(620): a, c, t, g, unknown or other
gtcaatatcacttagctgatcttagatcaaaagatcttaatcttgaaatggttagctttgatctcaactatgttatttatgttctgagagttatttgttaaagatgaccaattggattgatccaatacttacattttgggaatatgattgtacaattcagtgggagcggtaatcataaatacgaaatttatagcttctatcttgacatagaagtgaaatgatgatttcttcatgcatggcttaatagagataaatggaagagcttttatttcagtaattacattagtttactgaaatatatcatttataggaagctaagggttttaaggataaaatacattgaggggtagaacgataattttgttcttatctatagaggatctttgattatttggattataacaatgaataattaatatcgtatctatatcttagaacatatagagaattctatataattaagagtacaattctgaatctataatggagtcaggaggaattaataagttagagaatttttacttggtaaattctagaattgcttattggaagcttacttatataggccaatagtccctacactagttgagataatactgcttgtagannnnnnnnnnnnnttttaattaatcaattatatataattctaaattaaactgtcttatttgtgaatttacactaagatttgtgaagaaaagatgttttagggtttatttactaattgagagactttgtatggtttaattaataaataagttaaatgccatttttatttgataattaattttaattattaaataaagagatttgacaattaaaacagttttaaagttaaaatatggcaattgtgaaaagaaaagatgaattataaaataaaatggtaaaattaatactggtgggatccacaatagtgactggccacttaaggtattttttaaccatttattatcttttttttaatctatataatttaaacctatagatgtactatataaggaataagatggctttcattctcatcaatctcccataacttagttttcattctttgttagacaactagaaattgagagcttccttctatagcaatttcgaatccccctctccttcttcttcattattttcaaaccctagtgaagagtacatgcccactcatataaagtcaagtactcaatcatagtgtggaagattgtgaagaa

SEQ ID NO: 60363 - DNA, 1168 bp, Cannabis sativa
ttctctaattttcttacagctctataaacttataatattttattagttgccgaaaacctcggtcaacaccaattttgtttaaaaataggttgatcccatgtggatacatttgtaaagttccactgcaagaacaacaaatggcgcgacgagcacacacaaaaactgcatgtaagtatctttatatttttaataaattagttttataatttaaatttctttcactctaataatttcattatgaacttttttgcaagccaaattggtcgagattcgtgacactcaaccaacgccagctaatgcctcccaccaatacaatgtcgaccccacacaatttcctgtatatttacgcatgttatgacacatgtattaggtgagcggtcacgccacttgagaggactgggccagttgccaagatttaagacgggggcaaaaagagcaactcccaggccaggtgcatccgggcaacccactgtcactcaagaggaatatgaggtactgaagcggaaggtggaagagcaagaagcacgaaacgagtggcaacaacagatgatgatgactcagaatcagatcatgagtgcgttccaacaacaaatgatctaattggccaacgttgttccaggatttaacatgtcggatctacctccgattccaccatttcagccttctggccatgcagttggttcctcctcacagactgcccctcccggtgacgacgacgatgatgttgttgatttgtagtttttttagtttacagtgtagataatattactctttaagaactcataatatttttacttagtttatgacgtttaatatagttttgtaataacagtataaatttcgattttataatatatttgatattatatttaatactatttcgattttaaatttaaatttaatttaaaaataaatttatatatttacattttttttaaaaaaaaacttttgccggcgcgtaacatgcgccgttaaaagcattatttttatttttttaatttttttatgttcttttgtcggcgacatataatttttaattttatatttttttgaaaaaacttttgtcggcgcattgcctgctggcaaaacttttttctgtaatttttttttttaatttagttttaccggcgcctaaactcgccgacaaaagataggcgccaaaataccc

SEQ ID NO: 60364 - DNA, 1684 bp, Cannabis sativa
ggagtttcttgtcatttgagatatttatatataattttcttattgatgcaatgaactacttgatttattttgtaggccaattattttttgattattggatgttgatgctttcgattatgctttggtatattctcgagaatgattgaattgaaagcatgtagttgatatcttgttgtcattattgtcttttaagtttatttgcttaataataatgatattttgtaggcttaattttcttttaagcatgtttagtgacactgaattatttattaagtagtgtatgattattaatttcactggcctatttattaaacctcacggtatcagtgaaattaaagattgaaaaggatattatgttattttaaaatgatcacatattgaacataattccttaccacatactagacttattgaccatgtcgatttaatactttggtatttgtgattatgattgtcttttgttgatttaaaaacaatataattgtcatagttcaatatcaaaggataacttggaccaatatgttgagatgctatcaaagaactatctttttttttaagtggccacaaatatattaaaatcaatgtagcccaagtttgagaatgttagacttttttatttcggtttacatcaacttttattagttttattgaaatttgagttattttggatagttgtttgctgtgttagcccatactgttattgatcaatagttgatgggcttagcatctctgtgtgtaaagtctaggtgaagtagaagtgtgggctttcccagttaactagaggctttgatgagtaggcccagtccaactagggttatctagataagcctcctccctaattttgtaaatattgtctcatcacaattgtatacttttgataatcagatagaaattaaaacttcttctgatttagagacctagggaggaagacttagttgatagtattggactatcaaattatggtaatttctttggatcaatgaggtaagctgtaacaccctaactattttaggcatgttaacgtgatttttaacttaattgtgtagctcgttgataatcaacgagtttattgaaaaccgtgatttattaaaattttaccttgttaacagtagacattaaaatattatacttataataaaccaggatcctattttacaaaatatctacaaaagtttcattgtgaatattacaaaaatttgtcccatagcgactacacaaaataagccctgatgtcccaaagactgtacgctccaagcttaaccgccttgacatgtacaatctctatatgctcttactcacggctgctcagccttagcctggcccttacctcagatcaaaatagcaactatgagtcaacatactcagtaagaaaagcataaataataacataccaataagtcgcattataatcaggcgcccatacaccccaccataaccctgtcgctgtgtcccacacagtgctgaggctagagcgttcataagacaatactattgaccataatatcaacctatactcaatatgctagtgatactctagtcatgttgatgtgatagcatcgataagtatttgacccaaacatacatctaccagtaccaagtataactctatgtatactgatagtgctatcaatgtactctaacagacataaataacatgtaaacacatatgcataacattatacta

SEQ ID NO: 60365 - DNA, 865 bp, Cannabis sativa
  modified_base (490)..(497): a, c, t, g, unknown or other
cctttcggctgctacggtgggccagaattcgggccctttgtctacatctcctgctcggagttctctctctcttcttggagctccgtcgtcttctcaacttgcccttgctcctattttagcaaatccctcaacttttcctcccggccgaggctccccacctttgtccacccatcccccacgggcccaaactgaatgggatgaaatccctgcttttaggatttagaaagatgtctcgtttgaggagtcagtcgagaactacttcaagtctctcctggatgccgtcagaaaacctgatgataatttctatatttcccaaggacgtgactcaatcttgaaggatactgctatctcgggaataaaggtaattcatccccttttctttttttttttgctgagtgtgtgcccctttttctttatgtgtgtcagacggccttgaggtgtgtccatgctatgaaatttgctccgcagactgataaggagaaggaaagtnnnnnnnngggctattctcgttataagaaaaactacgaggcagccgctgccgcaaaggtggctgctcttactagagtcaatacattggaagttgatatcgagctcttgaagagtaaggccgacggtcttgagtcggagaagaggggttgggatcttactcattcggctttggagtctaagaaacaggctctgagtgacaaggttgcttccttggagactagtttgtccagggtgaatctggaaaaggctgccttgtcccaagagcgcgataccttccgttcagaggtcgaggcagcgaaggaaaaactctcttccctaagtggcaaattgtccgaggctgaaaaggcagcagcacaggcccaaaaggctttggccg

SEQ ID NO: 60366 - DNA, 995 bp, Cannabis sativa
  modified_base (937)..(947): a, c, t, g, unknown or other
ttctctaaaaattgtattttttttttgggggggattgatggtttgagaataaatttgtattagtttagatttgtataggtgaatatgaggaataagtatttaatggttgttatggtaattgaagtagtgatgttgatgagtagttgttaatttagtatatgagaatggttttggcttagaagagatgattgtatgagaaggtagtaagctttattgatagtttggatgttggttgttgggtgttggttacaatttggaacccttgatgggtatttatagttgctccccccttacacttcatggttagaattatttcttctagatccttcttttactagaaggaattatatccaaacaaatctaaatatttctagagttcaacataactagtatattctagacttaatctaatttagaaatctcttaggttcttaaataattttttctacaagtgtatagaaatttctagactaaaatgtgtagaaatatgtagcaaattctaatactcctgcttggaacacatttcggtaactccgatcatgtctcgtagtagatatgtctgctacctgctctttagtcttgcagtacttgagctcgatttgtttgtttgcttctgttttcctgatgaaataatacttgatgcttatatgcttagttctattctgaaatactgaattttttgccattgctatagttgatttgctatcgcaataatctttgtagcctccttctgtgattctcccatgtcttttagtattcttttaagccatatagcttagcttgtagtcattgctacaacaatgtactctgcttcagctgatgattgtgcaacagttgcttgcttctttgatgcctaagaaaatattcctgatccaagtgtgaaggcatatcttgacgtgcttttcacgtcgtctatggatcctgcccagtcactatnnnnnnnnnnnacaagttttgagtcacttgtaattccgtaccatattctgtagaatttt

SEQ ID NO: 60367 - DNA, 2379 bp, Cannabis sativa
tatattttgtagctaatagataaaaagccatatccaaaagctatgattgatgagatgagagaagagtgggcgacggatatgcttccacacttgcagagtcatcgcattatgggtcattagctaatttttttaaaaaaaaattattcatgacaaatatttagttacaatatcagttaaatatatatatattttttcatacaatatttgttaattttgttatgtatatatctttatcaaatattgtaaactttgtgatatctatgatagtttaaaatttgtaatttttttatatctacacttttttatgtgtattaactgaggtaagttaattataaataatttgttggaaaaaaaatatattatataatacaaataattatttataatataatataaaaataaagaaataaaattaattttgcagcaattaatttagaaaaaaaaaacaaaaaaaatctaatttcaagtccaacttagctagactagaaaggggttcatagtgtgagattgcttttcaagttcaacattgttggactagaaatatttttctagtccaacaattatgtttcatgttgtgcgaccgctttttaagtccagtaatgttggagtagaaatatttttctagtctaacaatgttggactacaaatgtttttctagtccaacattattggactagaaatgtttttctagtctaataattttggactagaaaaataccccttttatgtcccaggctattatgtccaacacaaaagggactcgaaaaatttatctagtccaatattgatggacttaaaaggggttttttctagtagtgggccttttgaacaacttggaaggtgttctattgatgaggtaagtagcagtttgcactagaaagggccaatataccagaggtaaattggattggaaacctaaagctcgagttacatttaaaatgtgttggtattttctttcaacaaccgaattttgttttggtcttttcacacatgaatggtaatgtatgatgcctttggaggcataaaaggttttttaggttcaactctttagcattatctaatcgaattgccttaatgttggttgagaattgggtgcaaactatgttaaaaaaattaggtataacagtttgaacatcaaacttgtttttgagcatatatatccaagtaaaacaagatttgtcatccactatagtgagaaagtacttgtaatcttctacacttgtgatgtggaaaggacctcaaatgtccatgtgcactaagtcaaatatcttattggcaaagttatggttagaaagaaagggtaatcatttttgttaagccaattgacaaatgtgacactgctgattggtaaaatagagagaatgatcactctttttattaaagaaattggaaatgtacatagatggatgaccaaggcgattgtgccaatggtctacatgtttattatcaaactgaaagaaaattgcattagttgttggtgtatcttgttgcagcaagtatagctttccatatttttcagctatctcaatcaccacattccgggtaaaatcctgaataacacaagtgttttgatgaaaagttacgaaattagaattgttatgaacaaattcagaaatggaaatgagattgatcttgaaacttggtacatataacacattatgaagggttatgtgaggattaatgtgtattgtaccagacttgtgaaccagaattttatgtccatttggaagaatgacatgctaaggaaaatgatgattggaaaaagaagtaaagcatgttatgttggaacacatgtggtgagtagcaccactatctaaaatccacgtgaattaattgaggtgagaatcaatttttacccacaagatttgaaggagcaggggccatggcagcaagatcaacatgaggtgtattgttgttgagctgctggctgagtagggaaatcaagtgctgacattaggttgaaagatcagagggaatcgattggccattgacatcagtcttcccagtgctgacaatatttgctttagcttttcctttttcttgtctctttttatcttcatagccaggaggaaaaccgtgtaggaagtagcacttgtcaaccaagtgacctggtttgccacaattggagcaagagggacgaggttccttggctcttggaggattagtaggcatggagcttgtagcagcagccaagggaattgtttcagcagagccaagagatcattgacgctcttcttgaatgatcatggcaataacacacgggacaggttggggattggttcattgagcaagatttgagctcgaaccgatgtaaaagattcatttagaccaatcaagaattgaagcacttgattatgattgtagtaatctaaaaagatt

SEQ ID NO: 60368 - DNA, 986 bp, Cannabis sativa
tcaaggtctagggtcgggtattgggtcccggtcctagtttcgctgcccaagtccctatcctgattttaggtcaaggtcccagtttttatccggtttttggtcccaatctaggtgcaggtttgggtcctagacacgattggggtttgggtctcggtctacgtttttaattaggtttgggctcgggtttgggtctttgtcctggttctggtcctagtccttgtccggttctagttctagttgcgattctgagttcgagtttgggttagagtttgggtcgtggttcgagttcgggtcggcgttcgagtgctggtccgagtttgggttcaggtccaaatcggtctacggctgtgggttagggtccaagttcgggtccgagtcccaggtttcgatctagatctaagtcagggtttagtttcgggtctaggtcctgggttccgatcccggtctgggttcgagtataggtcttggtgcaggtctaggtttgggtctaattttcggtttgggtctgtgttcgagtcccaagttcgggtttgattttgtgttcaggtctaggttcgggttcaatccttgtatggattcgtgtccaggttcttgtcatgatttgggtccagggcaggttttttttctgggtttgggtttgggtccggggctcagtttcgggtccaagtccctcatctagctctggatccttaatacaagtctgggtcgaggttccggtctggggcccaggtcccccatctaggttcggatccttggtctcggtctaggtccaaattcagattcgggtttggatctcgagttttggtgcgagtctaggtcctagtacgagttcgggtttgagtctgggtccgggtgttggtcgaagtccaggtccctattcgggtacgagtcggggtcccaatccgggtcctagtcaaggtctagatccaagaccaggttttggtctgggtttgggtccgggttcaggtcctgagtttgggtctagg

SEQ ID NO: 60369 - DNA, 4109 bp, Cannabis sativa
cacaaaagtgcgagtcactaaataatgtcactaaaagtccaaattgtagtagtggttagttgttgttttggttagctttgtttgagtgttgattctgatgttatattgaagttttcatgatgttgagtggttggctttgtactatggtggtgtttgagctaggttggagcttttaagctcaaacttacattttaattgtagattttgatttagttgtttgatgatgcatttttcacttggattatgtttgttataacacaactaggtgctttagagctttttgtaatgtttggaatcagatttgttgagttttgaggtttgggtttttttttgctgtaaaaacggcaggccgtttctgggaaaatgaccttcgttttttttaggcaaaaaaactcaaaaaaatggcctaccgtttttacaatggggacctgcaatttttttgggtacttttttccaaaaccctatttttcaacattctctcgatatttagattttagtcatggtatttatcgataagaaaacttttagtttcacgtttaagtccctagaaagtggtttagtgtatcgcttatcagttttgcgtatgttgtgacttaggggcctgtaaactgtcgagctgcagttctattcacattaaccatcacaccttaatttggaatcgaggtaagcttaatataatgatatgtatatgtgattacatgtttagcgtgcatgtttttgaatgtctgttcgattacattgaaatagaggtattggcatacatagagttataatggatacagatgaatgtatgctagcatacttatcgattaacatctgaaatattttggaatgcagatggatctgcaaggggtacgaggtgatgtctgatgctaaatattccaagcaaccctaatagaagctgcccaacaatggtacttcaagctgcctcaagggaggttcaattcgtggaatgctttctccgtgaaattccatgcgcagttttccttttgccatcaacttccctcgcatctagaagatctggtccaggtaaaacacatgccaggggaaaccctcagagtttatataagtagatatgtgacagaggctagcaaggttaaggggtggaccgaagaacgaaggctggccgttatactagggggcgttgagccacttagagaactatggaaggatattaagaggctgactgtgggatcaatggctaaatttttagaccgagcagatggatgtattaagctcaaaaaagtttttccatgtgtggacaccgtcggacaaaagaagagccagccacgtagcaactcggtacgagcgtccgctcagagtccacagtaacctggcaattcgaactcgaatgggaagaggtctaataacgatagcaggcagggaaacggaaagaaaggcaagtttgtaggaaatgtcgaacaacaccttagggacaatgcctcaaagtttactgcttattctgtcctaataaaaaacttagagacaatatatgcaacaactcaatctattgtcccatacaagaaattctctcccatgaagaaggacgtgagtaaaagagacacatccaagttctgccattttaacgtagattaaggccattacaccaacgaatgcaacaacctgaagcaagaaatgcaataacctgaagcaagaaatgcaataacctgaagcaagaaattgaacttttgatcaagaagaataacccgcacttacaaaattatgtcaaggctgaccagaactcgaaggcctcccacaaacaacaaccaaaatcgattgatgcctccactagtggatgggcatttacaagttattattgagggtccacatcctgctggagacatagacaaagctcgagaaaagtatgcccgagccttgcagtacaaacgaaacagttttggccatagaagaaagagagccaaaaatacctcgggtaggggaacgcataataactttcactgaagcatctgctaatcacgtccacttctcacacaacgaccccctggtcatggaagtatagattgcgaatcaaatagtggcccgaactatgatagatgacgaagcctcctcagacatcctattcaagaacacctatgagaagatggcgctcaaccttaaagatctaatcccctgtacccagcctgtatatggtttctccggccagagtattgcacctctagggaaaatttgtctatccaacactgttggacaagctctgaggagcataactgtgatggcacaatttttgataattgatgtcccatcacctttcaatgtcatgttaggtcgactaaccttatatgacttgaaagctgccacgtcagttttccatttgtgcgtcaagttcctaacaaagaatggggaagggtgccttggagggaaccaaagaatagcacgggaatgctataaccttgccctaactaaattcaaaaagcaaagtacctccagccagagttcgggcaagggaaaaagtattgaccaataggaagtcgcccaaggcaaggacaaggacatagatccccaacttgggaaatttaacacaaatgtagggccgatggaagaactagaagaggtcgaaatcaacctaaatatcccgaccctgaaactcaaaattggttagggtttgttgctcgaaataaaattaccattaataaaatttttaagagcaaatgtagatgtttttgcctggtcacatgaggatatggtcggtattgacccttctataatgtctcacgccctaaaaactgactcaaacttttgtgtcgtctagtaaaagagaagactactggacaaagaacgggctgggtgcaagcaatgaaagaagaggtagaaagactgcacaaaaacgagttcatcatcgaagctttcaacccaacttgggtatctaacctcgtactggtacccaagcctaataaaaaatggtgagtttgtattgattttactgacctcaacaaggtgtgccccaaggactattttaccgacctcaggatacaacagccgagcacaaaatcctaaatttcatggatgcctattcgaggtataatcaaatcaaaatgcatccacgaggccaagaggttacaagttttcgaacagatataggtctttactattacaaagttaagtcgttcggtcttaagaatgcttgagctacctaccagaggctggtaaataaaatgtttgaagactagatcggacgaaatatggatgtatatgtggatgatatgctcgtccaatctaggaaggttgggggcgcatagaggatctagacgaatgcttcaaaattctcataatatacaacatgaaacttaatcccttaaagtgctcccttagagtcagttgtggtcagtttcttggtttcattgttaatgcttagggtatagaagccaatctagcgaaaatacaagcccttggatatgaaatcaccaacaaaaagtaaggaagtccaaaacttaacttgtcaggttgccgcactcagtagatttgtttcaaagtcaatggaaaaatgtgttcctttcttcaacatccttcgagataacaaaaagtttaaatggacagaggaatgcgagaacgctttcccggaattaaaatgaaaacttgcaaaacctcccgtactctcaaaaccttgggatggagaagagttaggaaaatacttagctgtcatagaatatgttgtgagcactctgctgataagagaatagaacaacatccaacatcttgtctattatataagcaaacggctctttgaacctgaaaaatggtatcttttaatagagaagctcacttactgcctaatcttagcaacaaggaagttaaggccttatttccaggctcaccatgtttgggcatacgttggccaaccattacgccaagtattgcaaaaacccgacacctctagatgttactaaaatgggcaatagagttgggtcagtatgaaataatcttccaaacccaaatagtagtaaagagacagaccttagaagactttatagtcgagtgcataggcaaagacgaaagtaacataagggacaacccggagccagtacaaaaacccctgccagatagtaggaaagatagacctacctggaaattgcacatagacaggtcggcta

SEQ ID NO: 60370 - DNA, 764 bp, Cannabis sativa
cttataatttattaaaaactgtgaggataatataaacttgactaaaatgtaacactaaaaatggacattataactgcactgagcatcccttttataaaagatttatccaaatgactacatacaacaataattcaaaatacagcagacactgccggtctaaaacaactcctggaaactgaacaagcaagctggtggggccaatatgtacattgctggagaagatcaccatctcatggttgctctaactctgccttgcccttacttgcaccacaaagaactcgtgagtcacatagactcaacaagaaaagtgataaagaatgatacattaaatagctagttacatacatttcattatcacaaaatgattaaactataacattcaacagtaggtaatataaccagtcatatgcatagaaatagatatgctcatatatttgcattgcctaattaggcaagcccgtgtcataatgtaatatcatatataatatcactccaccccctaataaggtgagcgtgtgccacaacttggcactaatatatcgcatcgtctaatcagacgatcccgtacctacgcgcagtactatcccatgtcactgacgcccgtactaacgcgacataagtcaccaagaagaaagccaattatggtttcaatctatgtcataaacaggcaatttcatatcactgacacccgtacctacgcttgatacgtcgccaggaatattgtatcacctaatcaagtgagcctgtgttgggttttatgccct

SEQ ID NO: 60371 - DNA, 986 bp, Cannabis sativa
gacgaaagtccttaaatcaaacaacttcaataattctggagaatttttaaagacttgagaaattctaaaggcacaatttgatgtatgttaaagttcagaagacaaaaatcttaattggacttaagaaaaatttagaaccttgtaaatttttgaaaaaatcaaaaaatttaacgcgctaaaaataaggttcgaacattcaattgaatgcatgtctattttattttatatgtatgtaaaacttgttgaatattgctttatatattgtaacaattatcccaaatttctaaaaaatttgcaagataataactatattatacaaaatcatgtttaaaaataaaaataaaattataattattcaaatattaaaaatacgaaaaatatgtatcggtgcgcacctaaaactgtagaagcgcctatatatacagaaaaattcatatctatataaaagtataaaaaatttatataattttttttatataaataaaaatgagggtagttagtgtgccctccataatttatgtgggtctgccagtatttacgatgtttggtaaaatttagtatgctaatatactcaatcgaatcaagtaatattataaaaataaaaattattttcacgaaaattaatttaccaattaccaaaaaataatcattatttctattagttaacaataaactgtttaaaaaattgcagacaaacaaaaaaaaaaattacaatctaaaagtaaataacaaaattaacaaataatttaatgaataaaaagcgtttaatttcatctttatccattctatctttgcaataatacgattcctactattcttcttcataatataatagcattaccaaagaaatctatatcaattcgtactaagatataaaaatttcaatctatatgtaatttttttatatatccgtgataattaaatttaagcatatatataccattcaacataaaaatcttaaatgcaacacaaatcataatattttt

SEQ ID NO: 60372 - DNA, 882 bp, Cannabis sativa
actcttcttgctcaagcaagcatgccctaaaaatattagtgggatgcttttcaaacaacagtttatcttattaataggttgccaactcctattcttaacaatgtttcaccctttgagatgattcattcaaagaagccagattataattttctaaaaaccttcggtacaacatattaccctgcctcagaccatatcaaacacacaagttccaatatcactccactaaatgtgttaatctaggatacagtgatactcacaaaggctataagtgtcttagtagcactggaaggatttacatattaagaaatgtgatattcaatgagtttgaatttcctttaagaatggttttctcaacgcccacaggtctaaaacatcaatccaagttgaggttccattctggtctgctactcttaatccatttatcactgactcccgtagcaaatctcagttgattgatactgataaaactcatcctctgactacccacgaggtacatcttgatcataactcacctaacattagtaataatcatgctaaaaataacttatttgatgatgttaatattgaaattactaatgctagttctccacctcaagaaaatgcgcagcaacaagtgactaatgatgttgtggaagaaatgatagcaaatgataatgttgtaacaagtcttgctcctattcaccctatgataactcgagcacgagctggaatatttaaacctaaagtgtatgttgggcaagcaaagtggaatcacatcaatgaagagccaagttcagtcagtgaagcattggtccatgaaggatggagagatgctatggatgaagaaaatacagccttggtgaaaaataaaacttgggttttggtccccaaaacaccccatat

SEQ ID NO: 60373 - DNA, 1106 bp, Cannabis sativa
aaacaagtttcaaacaagcgtgaaaagacggctatgaacttactaaccctcttgttcattctttttcgtgcttctaaatggctcgccggatgttaatgttgttcacttcccttggctattggagggttctcattttgcttctcgggaacctttactgatgaattaaccggtgatggatttgtttcggaaaaccccttctctttatgtccctcttgttgagattgatgatcttctgttttatccaacgattgttcttctacgttttctacttgttgtaccatctcatcattgtttgtttctttaggcatttcggctgcagcatcgccattgttactccttcgattatctggcatgctgtcatctacagaattcgattgaatatctcttacaccaattttaatcggttggtcaaaaaacaacaccatttcgcctccattttcttttgcagtgttgttgtcatcattattaccattgttgcctccttcttcttcttctactacttcatgaactcctttgtctttattcgatatcggggttttcctcctattgtgatgaatttcaaacctactttcaccactttttaactcagattcgatatcatacaaggcattaacaacattcgtgagcttttttcccatctcaacccgatcaacatcaaggctagtaagtttgtaatttatctcaccaatttcttccttgagggaaatcataacttctctcatttcatctctgaaagacgaaaattcctgctttatgtcctagataaacaaagcagcaagtcataatctgatcatcacttttcttatcaattattcagtaattcagtcactcaaaatacttacaaattgatcagccgaacttcctcgttgagggcgatactctatacggttctcatactcagaacgaggaactacagctttaacatgagaggctgttgttaggtaacctttatctggtgttcttatcgtaactgctttaccgattttcatgtaatcagcctttttttcaagctttgtgggattcaaaacaacaacttctacctgaaaacaaatcatttttatgaaagaataatgtcagatattgaaattttgtgcctagtaaagatg

SEQ ID NO: 60374 - DNA, 699 bp, Cannabis sativa
  modified_base (48)..(55): a, c, t, g, unknown or other
  modified_base (546)..(549): a, c, t, g, unknown or other
aaagttcatatttagggtgttatacaacatacttgtgagtaaatctannnnnnnngtaaaataaattccaacatttagatcctggtaaaatattcccaacaaaagcttctaatttacttagggtattttggtcaattctaaaacctcgactattctcaacattcccaatgtctaattatattgctccgctattacaaaaatactaagatgtgattccactggccaaacgtcacgttccaatgttgctggacaaaaatatgcaaaaatataaaatttcatatatggcatatataatgcattatgagttcaagtaaatctccataaaatgttaaatcgtaagtattctagtttcataattaattcctaattatctgctaatttccaaattaaagttaagcggtctttacaattatctacccgttaaaaggatttcatcctcaaaatctaacctgaataactctagatactgagccctcatgtcgaactctaactcctaggtggcttcctccattttactatttctctagagtaccttgaccaaagctnnnntcttgttccgaagaaccttatcttttatgtctaagatctgaactggttgctcttcgtatgataggtccggttgtagctcaagattctcataactcagcacatgagtagggtctgaaacgtactttcgtaacatggaaacatggaacacat

SEQ ID NO: 60375 - DNA, 744 bp, Cannabis sativa
taacttcaggagcaaaagagccaccacggtaggtagctttggcttcaataagagcacctaaatattacctaaatattttatatttaagtattaatgacaagttcaaacaatatttatgctattttgtagtaattttttctccaagttattaatttggtagtagtagtatatgacattattttatttgtatagtaaaccaattagaaaaaagagattgtcccatttatatttatacatcaagtggaataatacaaactaagtatggttgataacatatatttaatgcttgatttttttttttattagtggtgattgtaattggacagttgattcgataaatatatgttattataaaataaattatattaataaaaaaaaaataaaaaataacaaaaaaaagaaattattttaacatgtattatatattatgtggtgttaagtacttctcaatgccaatgattttcaaaagaaaaatttaaattaatacacatttagtaaataaattccaaaaatttaaataattaaatagagtttgaaaaaattttaacttacttatttttacgggtttcaatttatttgttaatttcttaaaatatagtgtaaagtaattgttgccttataaaaagaaagagattaagagacaataaaagggagagaaaggaaaaatgaaaattaaacttagccttaatagtaaagttggtaattaaagttattttttttaaaataaatacttgtataaaaaaa

SEQ ID NO: 60376 - DNA, 788 bp, Cannabis sativa
aatatgaacattaatctaaacaatatatgcaatactgaataattaataaaagatatggaatttttaacgttgttttatagttaattttacatactccattagtctattttattttttttgagaatcatttgaataaaaatacaagattggcaatatttcttttagtaagaaatttggtcatcttttttacattgtgattaaggctcaaattgatacattttaagtcttttatttatttttttataaataaactagattgattttataaccaatcggccaataaaatgacccttaacccattgggaacaggttccacaatggaaagacgatcatgatttaaacatgaatagcgagccaaccaatgagccaccttgttcccatatcgtttaacaaaagaaataacaatagtagggagagtttgaagcaaatgtttacaatttgaaattattaaaccaaaaggagaaaataaagcaaccgaattagacaaggattgcacaaggacaagacagtccgattcaacatagatagtcgccgtcttgtagatagaatgggaagtctcgtcttcaatttttctcttaaaccagctgagaacttccttgaggccaattgcttctaccctgtgagggtcgacacgaccagttttgcaccgtgttgcaggcttgcagcttccaacaaacaattgttgtgatctcacaccagcaagccaaagccgaaccacttatcagtagcaaacaaggcagcatcacaattaatcttgaatataatataattttaatggtaaatttatt

SEQ ID NO: 60377 - DNA, 1153 bp, Cannabis sativa
aagtgaagtctatataaagaaagtgatgagaagagagaattaacctaagttttcattgttagactactctcttctcttttttctttgtatatattgaaaatcactaagtttctctctcacaaatattgttccaaaggtatttgagtatcaagccacactattcaaggtgatactcaggcctttgtggaagaatatgatgaacacaatcgatggaggagaagattcaggttcagatatatcttgataatgttctactacacataggaatcaattgttagagatctaaacggaaagaatcatatatattatttcgctgccatcaatgtaaggatttcttaattcttaatgtgtttatttattatttttagaaattttatatttatgatgttaggttatagaattatactcaacatacatgatgttatttttttgttgttgttttgatgttatttatatgttattttcttgttactttatatgttgttttcatgttgtttctatagaaaatcgtaaaaatttaaaaagaaattctgtaaacgtaaaaatgtaatttttttttttaacaaaaaatggtactttatgtagttatccatttcctttttaatccctttttattacaatggggaattttaaaaaatacttttggtttatgttttattacaattttatggtctaaaacttttaattacaaatataagtttgtaaaaatttaaaattataaaaatacaccgtcttcaacaaaaagtaaaaaatataaataaaaaacaacaataaatcatccttacaataactataaatcaactatataaataattatagcataacaaaaaataattaaaaaacaattttataacaactataaataaactataaaacaactaaaaacagtttattttttaaactaaaaatgtatttttgtaaataaaaaaatttaaagagtaaaatatttttacttgtagacgtatttttgtaatttttttattaaaaatttttatgtaaatttttcttttacaattgtgtttattgtatagactttttggttccaaaagcctatattgttttcccaaattttgtatacacaaccatttacaatagcaatataaattgctcttccaaattttgaatgcttacaatgtttgatccagtttaaagc

SEQ ID NO: 60378 - DNA, 1541 bp, Cannabis sativa
attataccaaatcttattttatgtatatggatatcacttttatttataaatatatgttgtaactaactaaaatacatatataattttttttcgatttttttctgcagggtgggcgactgccccacctcgcctctatgtgggttctcccctacgtatagtcaatataaatgtatgcagttattaattaattatatgcaattataattagttacaacctacaattcattaattttttacgaaatttagcatcggaatttggaagataattgtaaattacaatataaaaatgttaaatactattttagatcctttattttgtaaaaattattaattagatcttttgttttgttaaatgacaaaatggatcctgtatttttcaaaatgataaaaataggatcctgagcttaatttttgataatttttttaatataaccaacttgaagacaattcttaacacgaacagatacataaaatgtaaacagttttgtcataacacctttagatcagattattatcaaattttattttaataaaaaatcagtcaagggtcttatttgtaccattttagaaaatacatgatttattttgtcatttaacaaaacataaggtccaatcggtaatttttgcaaaacatagggtccaaaatgatatttacccatataaaaattagattaattaggatttttgttttttgaatattgatatgtactaaatcattatttttaaaattttctgaccgttgaaaattcttctattgtccatgtactaaatcatgctattcggactttgatatctactatatcatacttcttgaactttgatgtgtcaaattatgcccactgaactttcgtccatgctagatttttcttattaaaattagacaaaaatttttaaattcaacaatctcaatagtttaagaaaattttttaacagtcttcataatttaaaaagcataatttagttcatcttaaaatttattagggaaaaatactaattaacttaaaaactaataatgatgacgattctaaaaaaacagttgacttcatcacgagtcatgactatatatatataaacaaaaaaactttaattaatataagaactaatacacttgaaaataatgtactttaaaagaccacacggcacacggtctattattgcaagaatttgaagtcaaattaaaagaaaagttatagttcactcctaaaaaatttattcttatatactcttttaattgttttaatattcttaagaattttgcagtatactacttttatagtacttaattgtggttatttaggatcttaaacaactatttactgttcgtataagaaaacataaacgtacgtgtagtaaaatatttaaactttattttttaatatattgtaaattatttaatttttttattttaaaaatttataaataattttatataattacaatgtatataattataaaagtattagactaaaattttttttacatgtggaaataaatataaagtgacatccatttaagagggtatatgtatactataaacttac

SEQ ID NO: 60379 - DNA, 1160 bp, Cannabis sativa
tactgactgtcacaatatgaatttttatttttatagcttttaattttcaaagaagaaattcaatgggaatatttataaagaataaaaaataaaaaatatagaagcaaattaattgtatatggtggtaatgaaacttataaacccgaacttgaatgatctgcttatacaataataaggtctggcatactatatttaatggattaggtgaggactttataaaatttatatcttcatgtgagtctgctaaagatgcttggaatattctacaaatccagtttgaaggaatttctgacgttaaaagtttcaagtttattatgcttcaaattaaatttgatgatcttaaaatgtttgaaactaaaactctatctgaattttatgaaatattgtcagatatagctaatgaatattttactcttgatgaaaaacttgatgaatctattcttgttaaaaaattgttagagttcttcgagacatgtttgacactaaactcttaactatggcagaagctaagtattttagtaaaatgaaagtggaatagttaataagttctttgcgcacttttgaattaaattagcaaataaaacataaaaacaaacagcacgatcgtgatattggttcttattttaattgactctataaaaaaatgctacttttagtcacaatatttttgttacaacataattttttatgactaaatgtgacttttagtcacaataaaaaattactttgtgacaaaatcataatatttagatacaagttgtcaccaatttaattttacttattgtgactaaaaatacacttagtcacaacaaattgtgatgtttgtaactaataccttcacctatagacattttagtcacaacatagaaataatgatttataatagtcacaatattttcacttttagtcacaaattttattgtgactaaaaattgttagacttttatttgggcttacattaacttttattagtttaattaaaatttaggttgattggatagttttttgctgtgttagcccatattattgtttaaacttaaaattttaggggttttattccttgttaaattctctttatattgatataatacatgcttaaaattattgagtaaattaggagaattttatgattaaactgtgttttaattatgaaatccaat

SEQ ID NO: 60380 - DNA, 1087 bp, Cannabis sativa
gtccatatgttcgagcttcatcttcaaataaatgatttcaacaaagttgaggatcgtattacccatcaaggtcttagaatattctccacgtgtcactcaatagagtgtcatgtcaccttctctagaaattagaatgacaaataacaaaatatataaaacattaggcgtcggttattatgtacaaaaccaacgctataaacacatacatagttgattatttgataataaagatgccataggcaacatttatgaaaaataggcatcccctatgccgtcagtgattggggtgtatgccttcggtttattcacccccctttagcgacttttggaataacatcggtcgtgaattttgtcaaaattgacgttgtatgccccaaataaccatttttaaagcccagttttcaagtagtggctctagtggtgcctagtaccttctagacatgttaccttgagaattgttagtgatacttgctataaactattacattaagttatttgagatctgataattaattacaccaacagcgatattgacacgtagaagggtactaggcgccactggtgtgtgtttttgcttttttctttttttttttttaccttatttcagttaattaagggcattgctattgggtccagtggtgcctaccacaatctagaggtgacgcccaatgattggttaccaatattctcttaaagttattaccttaaattatactgtacccaatacttaattgaataaatatcaatataacaccgatgaaggtcgccacagtatttctctttgagttaattctcgatatcaaatacctatatggctatatgttggaagatatacctgtatttttcttttttggtaggggaggggagaggaattatttctgcactttggtgtgctatttaaatttgatgaaactgcctattaaaaactatcttggtggtacatctatattgacctccaagagtactatagctgtgggatatataaagcttcataccctataaattcaaatttgtttgtccagtcaaaaagtcaagtaggcgagattaaatcaaataaaggttctccctagtgatcatataacacagc

SEQ ID NO: 60381 - DNA, 1189 bp, Cannabis sativa
  modified_base (664)..(667): a, c, t, g, unknown or other
tgcttaatctcattatgcttctgctggccattaatcccccttacattccaacataagaatctatccatttgaggttgagggatctccctcccctcctgtgttaaacttgattgtctcttcaacctctagattagcaaacatgttcttcacaatagtctcctctgtttcattgctcatcatcactttcttacccttatttactctttgaaacccctcctcatgaacttgctgctctttttctggtttcttcttttttggcatccaaacttgctttccttgctcttgtttctcctctttcctcctgcaatcttttgtactgtgcccaataccagaacaattataacacacaagtggaatccattcgtacttcacttccaattcaacttcatgattaaactcatctataaaatcgattttctcaggaaagttttgagccaaactaacctgaattaaaactctagggtattgcagctgatccctgttcttggttacactatccacttgcaatggctctcccaactaactcacgatcttgaacaaagatgattcaccccagtatttgatgtccagccccttcaattatattcaggttggaacatttgtgacttcctctttagtgaaatcatcgattgggttccaaggtttcatcaccattggtttcctnnnnaagaaaacatatccctgctgcataatcttatctctttgctccatactttggaatcggatgatgaaaattcccttagcaagtaagccaactttaaccacctcttctttccacaacctgcgcacaaaaccttccagaatgcttataggaggatttgctccaattacatagcaaactaaggaaggttgccagtagtttacttcctctgctatatccttaaaatctatcttaatcttcttctttaaaccaggacactctgcctctttatcagagtgttcatacgagttttctaggttatgaacaatattagatttgagaataggaggatgtacctttttcccagtgctaatatcctgtgcagtgcgattagccatcgacatccattcagaaaactcatttggtactccactttgtcgctgaacgcctaaatccaaatctgcaggtgaaagacatctctcagcacagagttcttcatcacaacactgttccattgaaacaacatcttcctcaatcgccaattcctga

SEQ ID NO: 60382 - DNA, 1308 bp, Cannabis sativa
gtatttcgatccttattcatagtgtatatatgtttgattaattccgcacttaatacttaaacatatacatttcagtttatatatataaatgtctaatagttatttcttaagaagaaggaagatatggttatggtggagctgtttgggatcatatgggatgttttgctcatggttaaaatattatgtgctgtttggtttggtgtaatggaatggtattggtaatagtaatgtaatggaataggattagtaataaaaattgattataatgcttagtttatagttagaatgaacattgtaataaaaaattattgtatttagtttgatatgagaatgtaatataataaaatttgtattgactaaaataatcctattacttttattttataattatataatatttaaaaaaatagacttttgactttttttattaaatttttattaatttttttttgtaatagagattagagtgtaattgtaatgggaattacattaagtttggtatgtaattatcattacaatactcaatataataattattacattgtaatagattacaaaagctaaaatggaaaaacaaacaatataataaacctattcattattattacggtagaccaaacatcacctaattatatttttttggactctaatgttccaggtaatgttttggcttcaaaataaaaaaataggtataatcatcctttttctttttaccaatgtagctattctaagatgtttgaaaaaaaaaactaatcaatccagatattataagaatggtgatttcctttcagcaaaaaaaggaatattaccttcactcacttggcaaagtatttgtgatggtaaagagcttttgttaaaaggtttgagataaaaaattaggaatggccagaatgttagatgtgctacagacccatggctgtcgggtaacactattttcaccccttatcactatgacagggatcctctctttactgtggctcattacatatcgactgatagaaaatgggacataaggattttgaaagatcactttggaaatgtggacattgaacgtattctttctattcctcttgctcctattcctagggaggatatgctcatttggcatcactcggacacaggtttatacactgtgaaatctcgttaccatttagcggagagtttgaaatctatgaatgttgattcttcctcaacctctaaccgtcaatggtggaatcggttctggtctttaaagatacctaaaaaaagtcaaaaattttgcgcttcattaacgatgcccttcccactactgtaaacttggcgcaccgc

SEQ ID NO: 60383 - DNA, 6546 bp, Cannabis sativa
tgatttgctttaatgaaagttcaatttttgttttaaaaaaaaaatagtagtagggagtgatatcattatataataatattatatatattattatatatttatttgaaggtgaaggtgaggaaaacaaaacaaaatccatgtggatgtggattatatctgcgacatcgtaacccctctcctctgactatatctgtgttactttccgctgttctctctgacaacataacatctctctttaatggcttaatcagatctcacatcacgccacgctccatccaacataaacgacaactctcaactcaaactcacccttctactctcctttctctaactcatgcctatggccgcatcgctcacaccttcctcactttccctcggtactcactatttgccaccacttttccttccaacttttcacgccatctttttacatccactggatcataactcttttgggcttttctcatagattttcgaatttgattgattcattcattaattcattggatgaggttgtagaatagaggaaatgaaatgattttgagctcaatttgattgctttatttatttgttaagttggtttcttgtggggtgactctcattgttactgtatttttcagctcattgacatactaattcgtgctatgcagaagggttttatggttatacttcttgtgggatttcaagcaaattcaagaaacctcctttagatggtcgaacgctttcagggtgttccggcagcataaggttggtattctagtttgtaaaattaacaacactatcgttttattctaaatcttccttcttattctttctttcctgtttttaatggcgattcaaagagaaattataaccattatttagcattgcatttaccttcagttcccatgttcacctttgtttcgggaaaaagggaaaaaaaaaatgtttcgtaatgaatttgagtcctattttctgaatggcgaagattcattttcatatgttggttaaaatcttagatgcaggaatccgtttttggggtcaaccccatttcaatggttgtctattggacacgacctttccctcttgaaagtttcagttgctgctgattactcagattctgttccggattcctcgaattacatgactaatagtggttatcatcctctcgaagacttgaaagtgtccaataaggtctgggagactaaactcacttctgctgaaactgcgaggacaacggttgaggtatgttgcattcactgtgtttttgcagtttattacttacgaaagttttataagatactttgggtttcatcgtgtatggttaaatgttttgttttgttctttcttgattttcttctttcaggccaacggcagtgctttgctgatatttcctgggacagtacattcagaaccacatgaacaaatatcatgggccgagtttcaatatgttgttgatgattatggaggtctagcacaacatcaatgtgcattagtatagtgtttctatgcattttgatgtgcattatgattcaaattattttcttttttttctttatttgtagacatctattttgaaatatttgatgatgcaaacatcttggaagaccctgcagctagtaaccccgtggtaaggttgagctattttttaattatcagttcttcattttttacttgaatggaaatttgtaaatgacttttgtggcaaataaactatcttactggggattgaaattatgtccattttatctaactgttaagatagagaagctgatttcagttgtatcataataaagcagaattggtttttttttttttttatttattttgttggcgtgatctttaggccttccattttcaacgtttcgtgatccaaatctattgaaactcaatttaacatagtccgggagtgtctttatttttagttctgtttttgttttgttttacttctctataactagttgcatttcttcttatatatttttaaactgaacatttatcctccagaatgctttgattgggatggctatgccaatatacgagaacaaaaggataattggtgaatacaacattttcgacagtgatattgatgaactgctctttgatgatgactattttgaggtgacacatgaagtactcttgacttttagaatcaatatatagtccttcagatgtattcaattactattacatagtcctatgccatttacagtcttatctattcacatatacctatatcttgaagcttgaccatttttagcaaaaacagttgcaaattttcacttctgtattttagttttcaaggtggaaattttcttttggttataggtggtagattcggaagtttctgaagttccagtagattgggaggctccacatgcttctagtccaattcatcctatttactttgccaagtgcttgacaaaagtatgcaaaacatatcttaagtattacataaattcatgatgtggagatttaggtaagattctgttgcttgctaatgtagctgcagtgttaacacaaccattcatctaaaatttaaaacaattttaagttttgttctgaagcacttattgcatgaatttctctatagttacaagactacatttaaattcagtggtacatttatcaaagaaggttcttttagtgtctcaggtagtttaatctcatttctaaactttacttgtgtgcgtgtgtgtatgtatcgaggtacatatatttttgttttcctgatatcttctagacttttccttgtacattgaaatttactctggctcacttttctatgtgcgtctgtgtgcatatcaggtctattcaagcttccaacaacgatgacattttaatctaataaaatttttaaaaatatattgtgtataatgtttattttctactttaaaggttaccattgtttcatgttttaattatttaatgatattattacttgttatcttcttagtaattccacaatttattctttgtatgctcattgaaattatttactttcaatgtattttcttctaggttgttaatatggaatatgatagggaaatggatcatccatcaaatggtgtttctatattgggatgtctcagaccaacttttgcagatgaagaatcatatataagaagattatttcgccacgtagacggtgatgaatacttatctgattggtcaggtattgtagagtgtgatacttaaagtaataatgaaatgaaaaagtggatttcactcacaagatactgagaggtttgttattgtgatggctagatggtgaaattttaagtttggactcaaaaggtgatcgaagcaacaatggatcaaccctatacaggttggagatattgagaatagagcttttctctgtatacggctttcaggcatgtatattttaccttttatagaacattttttcaatcgctttattcaagtagcctggaaagaaaatagaattctttagacgtaattattataatgggaattatgattaatttaccatttcagttacttttttattagataattcccacattgtcttcaggcactgcaattatgtattcctagtaactttaatttttcatagtatactattctcattttttaaaaaggatggataattataccttgcattttgacattttgttcagtataatcatgtattttaaatgaaatcaacattaacctttattgctttagaaaaaaaaaacattaacctttattgtatgaaagtcttactcaactatcaatttgaacaattagttaccaaaataccatttgtagaattttaactcatataaatatatattttaaataattgaaactaaatccaatatatgctttccctctctttgatcactttttcttcaacttattttgtcttcatgtttatttaccaaccaccagcttaggcctatgaacaaaactattttcaattcgaacaatattttcctctcctctttctgagttttttctcagggtctactttcagtcaagaattgagaattaggcattccagaattttgtggcctatgatgatgattatgttgagggacctagaggtggcaatggaagtaggattttttattttgtatgtgtgttaccatttttattttaatgaatggtttactgatagattattaccaaggctgtttttggtctcagttccagaaacagaaagaggaacaagtcaatattggaggaaatagaggggaggaatgtgtacagttttttaagatggattttaaatatcttatcaatttaatttatttttaaattagacttttaactttgaacatatatatattgaaatttgaaaatggtattttggtaataaattggtcaaaatagatgcacaaaatgcaaggttttagttatataaatttcaattcccttgaaaatgttggactaaagctcatcatttttgttttgcatattgcagtctgcaattagtttgcaagactttcaagatgcagagcctgattttcttgtgcattctacttcagcaattgtagagcgcttcattgaaagaggcattaggtgtgatgttgctcttaaagcgctttgcaaaaagaaaggtctactggttgaggtaaaacactgtgctggtcgttcttgtatgatagaggtgcactgccagttgttttattatgcttgattttcatacaggtcatttatacgctacaggttttcctgttatctttttgttttgaccttattactgtatatgtgataaagttgaccactcagctgccagcctatttccctatactttaattaaggtttgcggctgtttgtgttaaaatctgagatatttagcaaagcaaagctagatttttatatcataggattattgagaagcaagacgagtagagttcaaaataatgatggtgtttatactcttagtagaggacctaaactgccagacttggattatttgatctatgccctcaaacttttcaagatggatctgttgaagaagtataatttcatccagaagttgttttatatggtttggtttggtcatttccttttaaagaataaaatggattcacacttgtagtaaaagtaggattgtagtggatgaaataattaatgttgatttaggcctcttatagcttgaacaagttctaaatatataagctacaaaaatgggaacatgtgtgatgtgttcatgaattaaacatgcaatatgtgctaaccttagaattgtgctgcattttgataagttagtcttgaactacaatttgcatgtatctgaagtaaatcattcacaaacttgactgaacatcttaggaaatcaaagagacaatggaggaagaaaattggaaacagttaaatgtaaagaaagctcaaaaaatgccccatctgtatccttagaatatttcaattagacaactttggaaagaactttttcttctctattaggtttctgtaaatgaactgaaaaaattggtcaacatcgactacttagcgtaacacttttgatactgaacaagcaatctaatcttgtagggagctggtttgattggcgttgacagtcttggaatggatgttagagtttctattgggcgggaagtacagactcatcgttttcccttcaaagttcgggtaagtactttccagtagtctttagaggagctttgcaatttgtttctcagagttcctgtactgtttcctaagcataaaacatatgcccattttagataggaacaaagtgttaatagatttgtgtgaatgaacaaacaactacaggccacttctgaagttgcagcagaaaagcagattcaacaacttttgtttccgcggtctcgtcgtaagaaattaaaaagtcacgcgactagttttagagaccctgctttttaacttaattccatcttttgtattgttagaatggagaataaatcttcagaaaaatctcccgaggcatgaaaccatttatctcttttttttttcttttacaaataccttttaggggagggggttgaaatcctcttttgtacattggtattgatattgtatagcttttaattttccagcaaataaagaagaaaggtaccggttttcatctgccatgtttatcagaaaaaatagttttgtattttgtatttattttttaatataataactaattttattgttgagagtcaaataatacattagttattaaataaggaaaaatatcttccaactaagaaattttgttttccatctttagtgcatatcatacttattatcatttcacattatatgttgaagacatacattccgaaagaccgataacaagaacctaaagatcttacaacaattctactcagagacattctcagaaaaaagaatggatagatttcataacaacttcaaaatcactctttataaaagaaacaaaaacctagtaacgaacaactctgggtggtaggggatcgtctaagcaacatgaaggtgaggagcttgtgttcatgaaaattgactccttcgaagagaaatttttttaattgcaaataaataaaatatacattagtgagggagaaaaataagaaataaaaaataggggtgttcactaagtatccgatc

SEQ ID NO: 60384 - DNA, 1567 bp, Cannabis sativa
tccttaagctttactcaatttggcgggttgatagtataagtgttattcctcttgtctcgagtgatctaaaaaaaacaaatgagtgagcaataataaaaaacaatgtatatttcatgaacactaataaataaatatgaatgatataaataaaaaagcaataagaagatattcacccaaagaaccttgaagccatatcaaattaaaaaaaaatgatactaagaaaggttaagaaagagaggaatgagtagcacagaaatacaataaaatagctctctaaataagcctccttgctatttactttcaaaattgcagcaaggttttcttttatggtaattatcgtactgcatgttatttttatatataatgtaaaaatatatgtattaattattatagaatactgaatttaatgaaaagatttgtatcaagcatgacgtatatacataattatatgtctatatacactatttgtttataatttaagataattatagaaggatatgtatcaattaatatattaaaatggataataattactatatatttttaaatctgatgcattttgaaatatcaataataaagtgtaattatattaatagttattgatatatattacattaaattatttctatattgagtaaaatatatatataataaattcatttttatgtaatagaatgtattaatatatcatttattatgataacgtgagaaatttttggaaataaaaactaataaaatacatattaattattattaggttattagataaattatagatattttattattattacataagaaaaattagagaaattataaatttagaaagttagaatcctaaaagattagactgccacaatatcattgtgcttaaccacagattcttaaaatttaataaaaacatatttgattgatttattaaaaaaaatcgatgaatgattttaccaatttttaagttatgatgttaatttatctaataattcatttttaatttctataatttaaatagtaaaatatacttatatttaatattctattataatttctgtcaaaaaaattaaaataaaaaagatatatatatatatatgctaaaattttaaaacaattacataaatattcaaattgcataggacaaataacacacttaaacgatatataattaaagtatttcatcaaatcacacttaaacagtacataaataagaaaataacaaaactctcatcacaccacaaatactatatcaaaataaaataaaatttaaaacaaaggactccacaagatggattgcaataatactaattacactattttctcaatcgcttttgattcatattttcatcatcactatcatcttcaataattatgttttttctattttttttggtaagagaactgctatgatgataatcttcatcagaatcttctaaatcttttgcagcagttatgtctttaaaatgtaactcctttcgatttttattctcattttcttcattagtattattatttttttcctgcaaaagaaaacccataatagattcattggtttcatattttgcacacaaattaa

SEQ ID NO: 60385 - DNA, 1738 bp, Cannabis sativa
  modified_base (1443)..(1445): a, c, t, g, unknown or other
acataatcatgaaataaatcatgcgaaccatgaaacatagaacgctttctgatcttttatcaattagtaaatctgattaaattgaaatggattttatttaaggcacaaaacccaacaataccctatttgactcccactaggagcaggagtttggaaaccttgtgagtaccccatgttgaaccctgaaccttgtggcctaaactgatgttgaaactgagattggtggcctgattggggtgtgaaaccgtaggatgaggaatgagactcgttggtccagggctgtccatgaaaaggagtagactttacatagctccctatgggtcttccctgagatgcttgaaatctttattgtcattgtgggcaatctttcttctcgtgaccttgttgaccacaactgaaacacctgtacgtccactacgagtctttccaaatgaaccactactagtgctaccccaactaaattattgtccttgggactatttccattgattcttcttggtcatctttcggttatttccttttcctctgcttctgttcttcttctcattcccttctacatgagcctcaatttgcaaggctgctgtcacacacccagtcaggttgttaacagttaaaggggctattggaaaacgtatcataggcctcaaactacgcatgaactgttcaatcaccaagggttggtcaacaacaccaggatatgcataagaggatagctttacaaacttcatgtaaaactcattcacaatcatatgcccttgtcttaaaccatcaaatactctaatcagagccctcctgtgagatggactaaaatatttctccataaaaactctctcaaagtctcgccaagtcatcccaacagtttccattatcctagacaaggtcccccaccaatatgctgcaccaccctctaacttggacataacaaaagtaacttggaattcctcacgtgttcctattgtgttgaaatttttctttatctgcctcaaccacctttcggatcttgtccacccttaaactcaagcacttagattcgatgatagatctaaaactgatgactctgtcgagtggcaggatccatctgttgagtgggaactactcttaaggctttgagaagagtgttcatagggaattcaaattgtggaggttggacatcaacttgaggggcatcttctccaactgttctccttgtcttctttccttttagaagcattttcttaggtctgagaactacaggctaattagttagtgagaattggatgctaattataaatatgtcttatacatataagtatcaaggtacttattaccattattatttaaataattctaaacaatttggtgacacgcaccgaggtaattaaactcggttctttgatactatttttctgtcacgactcgaggtctaggccgtggcaaatatataatatccataacttgggtggnnnaaggtcacactttgacccttgtaagaagataacgcttataaatgatcatttaatctatatcacaaattacttatttaaaaataatggactaactcctatattgataaaaaaaatagtaacaaaatcaggaccaatcattaatataaaagaataataatattctcacagtcatgtagtcaccgaatagatagatttaattagtcaataaaatactaaaataatatctagcatccatcatttctcatttctcactagtacatagctaatgtaagtcatccaggtcatctactcca

SEQ ID NO: 60386 - DNA, 859 bp, Cannabis sativa
gccacactctatgaaaactttctcgtatgactaaagttgtactatataaaagtgtttgataaacagttaaaaattattaatgaatatagttttaaaaaaattacaactaaaatttcaatttaatatagatagccaatttatacaaaaatttgtttgattaaaaattatacccgatcttaggctaagacaggtcaagcctgcgcctaagactcactcagccggaccccaaaaaaaatattttcctttaaaataattacttttttttaagaaaaaccacatacacattcttagatatgacctcaataattaacattttaggaccagccctgatttgtaagagaaagtgacataaataagaaaaagaaaataatgtaattaatacacttagataatgtatcttagtagatttaaatatgtaagaggtatttgtttaattttttcttattaatctatatttgtatgtttgctttaattcatgagattgacgttgatgattttttcaaacaattttttttttagaattattccatatatcattttttatttttattttttaaattaacggtttgggttgctccagtggttgctctggtgatttctatgtagattgctatgtgaattttggtcacgatttaagttactccatttactgtatgtggattgttatgtgaatttctttaaagtgtaaaaatgaaaaagatcaatttttttcttataagaagttccaacaattggttggggccgaatacaagcacaattcagtaactatcttgtaaaacttatatatatatttttagccatataaatgagtttggtaactataatatttaactttatatgtaattaacagactaagtaa

SEQ ID NO: 60387 - DNA, 1575 bp, Cannabis sativa
  modified_base (1499)..(1530): a, c, t, g, unknown or other
cctgtgccgccctggttgcggctacctcccattctaactcagtgttttatcggtttgtcgcctcgagaagtcgccgtagttgagctaatattttatattgagcaaaataagtgatctaattaaatgagcccaataaacatcttatttagtatcagcttcgtaatgtgtaataaccaatagtaaacttaattaagatttatagaattctaattagtttgctacataaacacaagattggtcctcaagtctaatcccaaccactcttttcttccattcccattaattgagtgagaatccatagagaagattagtgtatggaacaccatatacccacactctcatctcgtatccaataccatgggatcatctatgtcttctatcttattgattcataaagtaattttaataatttaatgtcactttaacatccatatatattttagatctaatttctaatatattctaatcttgaattccaatgagatcttatgtaattcttgttataggcgtaatggcctcaatggcctcatcttttcaatacaacccgtgtatggctatataaggtaatgtagatcatcagctacatttgagtgatgatttcacatttcaattttgttattttcttgagtttactattatttatctagtcaacaacttaattacatacgacatatcacaaccattttttggtgataaacgacaacactttaatattattggtattatataatcaacaaacaagcacgtgcatgcccatctcaacattttctaaaattaaatattttaattattacactaatttctcactaaaaaactcatcagataaattggattaaaaatactatataggagtggaaatatatagtgttagaaacactcattttttgtctcaaaaaaaatgatgtgaaactatttttaactacccacaacaagagtgcttaacattactcatgttaatattaatagttaatagtggatagtaattaaaaaatgttggcaataaaaaaatatgtataaggataatatgcttattatattccaatcgtgtacatggggttttcctaaaggttagtttggtcctttgctagcatagaaaaactcacatttctatatttgattcaagaagaattttataatctttacaatataccccatttgctagtttaaattattatttattcatgggcttgttcttgaagaaactatgtaaaaataatgaaattggattagtttaatcttgttactattgccaggatcacaggaactgaagccatgccttttagatgaatgtgtagagtctctatgtgtattaatctatataaatatatatatatataaatagatatatgtgcctcaatccccaaaaatggactttctggctgttcctctttactactgcttcatagtgtgtctacttgttgcccaccataccctatagtttaagatattataaaaacttctcattacgtttatataaatatactagtaaaaagttacgnnnnnnnnnnnnnnnnnnnnnnnnnnnnnnnntattttttattatattaaaaggtaatacacttaaaaatgtttatc

SEQ ID NO: 60388 - DNA, 2840 bp, Cannabis sativa
taaactaagcggtctttacatgatacaagagaggagaaaagaaagcaaataacagaaaaacagaaaacagttaataactgttcaaacagaattacaactgaaaaaatctcctatcaaactgacccttgtatcctaatattccccctcaagatacactggtaagaccatgtgtaatcttgtccctcatatacacaaaggaagacattggcaggggctttgtgaagacatcgaccagctgattagaggtgtcgacatatcgtacttcaagctgattagcaataactttgtcccgaacaaagtgaagatccacttcgatatgtttggtgcgggcatgaaacactggattagtggccaaggatcctgcccctaagttgtcgcaccagagtattggaggttggggtatgtgaatatcaagttcagacagcagagattgtatccatacaacttcagtggtggctaaggcgagagcacgatattcagattcggtactagactgggcaacaacaatctgcttccattaaacctgaggttggatcgcaccaattacacgatatggaggtctctcgttttggcagccactcgtgcctatgatcttgatgggtatattctgggttcacgtcctccaccaccaaacacacttacaggtaacctccccaacccagaatttcaacaatggatgagatttgaccaatttttaatgcactggctaatgaattcaatctctgaaaacatgctgggacatgtgattcactgtcgcacttctgctgagatttggactaccttctctcaactctttgcaaccagatccagggctaggattctccaacttcgtgggttgctacagtcgacgaagaagggttctcagaacattgaagattacatcttaaagatgaaaacctttgcggatagtctcactgctgctggacaacccataaaagatgacgatttgattttatacattcttggaggactcggagctgagtatgagtcggttgtggtcaatctcacatctagatctgaagatctcactttacaagaagtgattcttgcttcaaaatcaagaaatacgattacaacaactctctgccgaatccgtagtcaatgttcaagccaatcttgctaatatgcaattcaacaatggaggcagaggttatccagctaatcgcggttaccgtggttcaaatcgagggggaagaggcaattacaggggcggtcgaactggtaacaatagcaacagacccatttgccaactatgtggcagagctgggcacacagtcataaagtgtttccatagatttgatattaacttcactggcagtcaatccaattctacgccttccccatccaatgatgaatcaccacaagccaatatcacccaaaccgattctacatcaaaccaacctcaagcttggttcttggacacaggggcaactcatcacatggccaatgacactcacaacttcagtcatgcctctgattataaagggaaagctaaggtggttgtaggtaatggttcctcacttcctatacaatccattggtcaaagttacattcattctttttcttcaacaaatccattagtgttacaagatatcttacatgtgccaagtttaaccaaaaatcttttaagcatttctcaattcaccaaaaataacaatgttattcttgaatttgacgatgtttgttgtctcattaaggacaagaaaacgaagcaagtacttcttcggggtgaccttttcgaaggtttgtacaagcttcaagtccatcccaccaaaacttcaaaccagcctgttcatagttctcaacccaatgcaaataatcacacaaccacaagcaatcctgtcctcaacaagtccagcatctctactatttggcatcatcgactcgggcaccctgctcctgtcattctaaatagagttcttgctttagttgttcccaattccacatgtaataaagtttctttttgtaatgcctgtcaaataggcaaattacaccagtttagctttaaaagcaccagcaataaaaccaaagtgccttttgaattagttctcaccgatgtttgggggccatctttttacagctccaatgatggctacaagtattatgtcagttttcttgatgatttcacacgttttacttggttgtttcccatgaaaaccaaaaccgaagtcaccaatatttttcagcaattcaatacctttgttgaaaggttttttaacaccaaaatcaaaagcatacaatcggatctaggaaaagagtatgaacccttaaataaagtctaccaagatcttggcattctaaaaagaaactcatgccctcatactcatcaacaacaaggccgcgttgagagaaaacaccgccatgttgttgatattggcctaactcttcttgcccaagctgaaatgcctctcactttttggtgggaagctttttcttctgctgcgtatttaatcaataggctaccaaaccagcttcttcaaaacaaatctccatatgaaactctttttcagcacccacccgattataacatgctaaaagtttttggttgttcttgctttccgttgctaagaccctatgaaactcacaaagtctcatttcggtctgccaaatgccttttcattggctatactatgtcctccaaaggatatcgatgcttacaccccagtggaaggatttatgttgctcgaaatgtgacctttaatgaagaagaatttccatttcagcaactttttcctactacagcttctactcaacataccagtgacaccattattaattctactcaactctttcccctccctcataccacatctcaaaaccaattggcaatgagtggagta

SEQ ID NO: 60389 - DNA, 604 bp, Cannabis sativa
aaactgaaaactgaaaacacagccaaacaagctctaactttcttgcttatttctctctttctctctaacactcttgagcttctcactctaacttgaggagaactcttgctccattgaagagtactctttctcttgtttgccttgtgttcgtgagggtatttatagatggtgaagatgaaaacttaagtcggtgcttgtaactgaaaaatagttaagtttgttacgccttgacgaactcctttaacagagatctccacgtcaacacttacaaagatactctccggatgtggaacacacttcctggactaagcgtggaaggatgagaagaagcttccttgaagcttacatttgggaacagctagtcttccaggactccctttcgtggagaacaactaactttcctgaagcctcccgagaaaagctagccttctaggactcccttttttggcaaatgactaacttccctgaagcctccatcctagaacagctagccttccaggactccctttcttggaagaagactagcttccctgaagcttccatccagagtagacaaattgaccttcctggaacttccttccaaatagcatccagcttccacgaa

SEQ ID NO: 60390 - DNA, 770 bp, Cannabis sativa
tttgtgatgaacctgaatattcctgggaggagtgaacaattttcctgaataaaaccttgatgaaaccataacactaaaagcattagcaataaaaataatgactgtaattcttataaggttgagattttcttctagaacaaagacaaagacaagacattatgaaccctaagtcaactcaaaaatcaaggatcatgataaaaacaaacagtaaacagtacaaattcctaaggatgtccttagagagataaaacggaccgagtcaagagctttagtaaaaatatctgatatttacttgctagtttcaacatattctaggacaagtgttttattttctacaagctctctaataaagtgatgacggatgtctatgtgctttgtgcgagagtgtttaacaagattttttgaaacatgtatagcactagtattatcaatggcagaatgacaagtagtataagtagtgagagtgtaacacttgtcactagatctgagcccttgcaaaacacaatttccaccttggtcacgcacataacaattattatgagaaaaatttactgtgaaaccttgaccacaaatttgacttatgctaattagattagctttcagtccttcaacaagcaaaacattttccaattttggtaatccaacaacattgagagtaccttttccaagaacagtaccgatcatacattaacaaaggttacaacaccacatttcaaagatttgaaactagtgagtaaactagcataacctgtcatatgctttgaacatcc

SEQ ID NO: 60391 - DNA, 809 bp, Cannabis sativa
agaccagcctacacaaagaaaaaaacattagagtttgagctaagtaaataaggattaaaggaaactgtcaagaaagactcacccttttaaattccctcaagactcctcccatcagtagttccaaggaagattcattgtcagcatcagtcagctgctcactcacctcaggaaccaaccggttcatgtaatgagcgagcatctccttgcctctcttagcctctagatgcactggtaaaggtggagtaggagcccgtgtctgctcagatccgctcttagctagctcgaatctgccctttgattgttcaggcctgtccaaagttcctcctcgggaatctttggacttagcggcttttggagtagaagggtctgcgacagttagctcctcaaaaagatcaataacctccctggacggtgccttttccttggatggggtcgcctcgccgcccctagatttcttggccggaggagatgagcttgaacttcctccaactctcttctgagcatcaagcatcttctgagacatgtctgtacggaataaagcaacatggttagaaaaaaggcatcaaaagtgtaaaagtatgataatcaagaagtttaaaaacaagacggagtatcctgcgaagcgattatccgagcaagactcgagagtccatcatcacctgataagccttttatctcagccatgacggcctttccttttcccagtacgggagagggtgaccgagaaggtaaactggcctccctaatgtgaatggcatgttcaacgggcctgggctgggctggaagtttcttctgttggaatttatttt

SEQ ID NO: 60392 - DNA, 600 bp, Cannabis sativa
ggaccatatctcccacaaaaaactaatgtgcctttacttgcttattgaagtaccgagccacattttgttgatgggccaccaactttaggtttgttacagctcgtttttcttcgattttgtcaagtgattctactaggagtgcatggttagattcttgattatatgtcaatcttctgtgggacgaaggttctaattgtacgggcagcatagcttcataaccataggccatagcgaatggagtttgtccggttgcaattttttcagttgtgcgatatgacaatagtacttctactagttcctccggccagttccccttagcatcgtcaaatcattttttcaaagtatctttaagtgtcttattgactgctttttgacttgaccttttgcttaggggtgtgccactgcaggaaaacattttacgattccatggttcgcacaaaaattggtgaacaattggttgtcaaactatgtgccattgtttgagactatcttgtacgccagtccaaatcatcatattatgtttttcaccacgaagtctagcacttccttagatgtaattgttgcaaatggctcagcttctgtccatttagtaaaataatc

SEQ ID NO: 60393 - DNA, 1059 bp, Cannabis sativa
ttggaagatgtacatggggaaagatgattcgttcatatcaagtagtttaagatataattggacttggagggagtaaaaggcgatgtaagatgtacaatttttttagctaccttggtagaggtcgcccaacagtgatacttcaagttagcaccaaggaaatttaatttatggaatccctttgccacaaagttctatgcacaatgctcttcttcgagacaactccctacccacttagaacatctggtagaagtaaagcaaataccaaggaagcctttgaaagattacatccatcaatttatgactgaggcaactaaagtaaagggatttatcaaataagggagattagtagatgtgctaggaggtatcgagccaaaaggtgaattgtggaaagacattaaaaggctcactgtaggttcaatgggagagttcttggacaaagcatgcagatttatcaagctcgaggaagcattccgacgagtggatatggttggtcaaaataagacccatccaagtcctacaactgcaaccaatacatccatccagaaaggtcaaactttccaacctcaagctggcaataattctgaccatggtggtaataggtcgaacaatgaaaaagaaccatgatagtgggaaaaatagaaagttcaataataacttcgatcaaaaacaccctcaaaagaaggtatgaaagttcactgccttcaccatattctctgatgctcaaaaatcattttatggcaactcaatcagttgttccatataagagacccccttcgataaaaaaaagatacgagcaagagggaaactgccaaatcctttcaattttacaaagattttggtcatgatactaacgagtgaaacaatctaaaggaggaaattgagttccttatcaaaaaaaaaaaatcaacatattcgtcggtatattaagactagcaagaaccaacaagctgcccaaccaaataacaatcagaatcatctgatgcccccactagcggacgggcatttacaagtgattattgggggtggacatatttcttgagattcgagcaaagccagaga

SEQ ID NO: 60394 - DNA, 1045 bp, Cannabis sativa
agattttagagttggcaaaaatacccctaggtggccttttatggtttttagtatgggaggggcaaaatggtcattttgccccattagtctcttgtcctatagtggactttattttagttaaaaatcagatttttgattaatgttaagctgagatttattttaataaaacaaagtattttcccattttctcaatatatcaaaaattagacataaacacatttttctctcaagttctctctctctccttcgaacccacctagaccaagtagggtttgggttgttctataacaattcaagctttttccagcaagtgttaggtgatctcaagctttaggtaagctcctagcaactgctctcttagttttctttagtttcaagtttggattttgcatgaattttgagtagttgagttctgtagttgttgtcattgtttggaatagttttttgaagttaagttatgtttcaatatgttgttttttgttggttttaggggttttagtgttgaatgagcaagcttcgagttttagaactcaagcttggctcattaatgtaaaattttgattctggttatattgggatgttttattgccttgtttatgttatttagggtatatttatcaggtcaggaatgtttggagagatttggagttgatttgaggttgtggtgaaattttgaaagtttcctgcagtgaaccggaattccggttggtccccaggaaaccccacagaaccggaattccggttgggaaccggtctaccggttggagcaattttgggaaccctagtttttcccatttttgtgatggttagggtattgccatgttgtttattgatagggaaacttttagtttcaagtttaagtcccgagaaagtgatttagcgtgtcacttacctatcttatgattgatgtgatttaggagcctataatacgccgaggagttgttccactcaggtcggccaccacacctaaattcgaaaatgaggtaagattagtataacggtatgcatatgtatatacatgtttagtgtgcatgttagttaagcc

SEQ ID NO: 60395 - DNA, 995 bp, Cannabis sativa
aattacacaagaacatcaagaaaaccacatacactaaatactataacacaatttcataccaagatcatgctcttgcttgaagtaactctttgccattccacctgaaatcactaacccaatttcattaattaccaatccacaaaaacctaactactttacttttcccaatttcatacacacccaactccaaatttcatcaactatcagagaaacagagtcaaatagagcacaatcgaagacaaacagagtgaaatgaaagtcctcaaacagtgcgatcatagaaaaacgataactttttctcagaacaatcaattttgggtaaaagcaatgaatctactcgatcgaatcataaactaaaaacaaatctgaaaattaataaaaccaaaccttacgaaagcgttttagtgttcgatcagtgagtccaaatctaagtcttgacgagagctctcacagttttcttgatgaagataacaatggcggcttttcttctctgattttattatattctcatttaaaaaaaaaataatatattcttggttctcagagagaaaagcaacaataaaaatatgttctaaatgcaatataaaaattaaatttattccttttttttttaacataactattaaaatcattcatgaatttgtgatatatatgtctgcaatcagcacaggattctcttcaaacccagaataatactcatcatatcgtgtaacagaataatactttcaaattatgagtttttaaattcttaacacgaatcacataagacaaaattactttcaaaaatttagacaataaaactatatcttcatacagctcacgcacattgaaatacacctcatattgttaatagtagtcaccagagctagccaatctggaaaaataaaaagagaattactacataaattattttttttttcaaatttacagttttttcagtaatttttatatggcttgttatacggatttcggttaaaatttagactgttgcgtta

SEQ ID NO: 60396 - DNA, 1690 bp, Cannabis sativa
attgttcccaaatattaaatgagattccgacgaaaatggaatataacactcttcatcttgacggggacttatttaatattttttcttgtatttatatataataattatatatgtatgttattacatcatttgcataatgcatttggttattaatcaatgtttaattaattaagaaactaataagaattaaaatgattttcctgttatatatatataatgtcagatcgttggattttagtgtggaattattacaaaagtactcaatattttgtgatgagaatatgaatcaaatagtggaggatgcttacaacattaccttgaagccatggcatggttggatttcctcaacagccgttaaagtaaatattacactattaattatattcacaaaataatcagttttgcatattattaagattaataattaaataataatatatataatttattgcaggtagcgttaaaattagtgcctggtcacaaaaccttcttaaaggcagtaatggaaattaatgatgaaaacccagaggactcccttagagtcacacaggaattggacactttcgtttctctacttaagccgcttttacaacacattcattctaccttggtaagtaataaatatatactagtccaattaatatatataaatgaaaataaagtaatttacgctataaatatttaattttaactctaattataatatttaaatttattagtttaaaaaaatattaaataaaaaaattagtttaagtatattaataaaaaaaatgacacgtcaatgatttaacatttaacggttatatatctatagagtttcaaaatataacttattaccgttaaaaattaaatttaaatacaattgagagtcaaatatttatacaataaattactcctatatatatatgttttaaataataataaatttacagttcttttcgatattatttagtttttacaatattgttacttattttttcagagagcgcatggagtggatcgactcaagtctacctagctaattaatgtatagcacaaagaaaaaaaaacaaaagttttttgttatatatacttatatataaagcatatatacatgcaccatgtatagaaattcaattgaaaagaagagagaatattattgtactcttttctctactgatcgaataaccaaaaattacatgttatccgtttatttattttggaagactacaatgtaaaattttaatcaataataaatttccttcatttcatgatatctaaagttaaaaataacatattttttctcattaactatgtaattaaataattataatttgatatttttaaaaagacctaaaatgtctaatcccatgttagggctagaggaatgggttgaagtaagaggagggtcatggagagcaatgagagcagcaaccaagccagcattgcttgaaatagtgggttgggtgaaccatggcttgtccctttggtctaagaactcgtcggtttggtctggtccggccaccattgccccgaccaaaatattagggttcgggtccttagagtttagccatttgtgtccatcctcacatgtgtaacggtgcccgtcccatggaatggaggcactcctatggtgaacttgtgttggatacttcccaccaaatcctaccatgtaactcatcttcattgggttatctcccagtatgtaatt

SEQ ID NO: 60397 - DNA, 1329 bp, Cannabis sativa
ctgtaggattttactcaagaatttctctaatgttactatcatggtttgtattcattatttttcttttttgttaattttttaaatgcctgtgttattattacaggatgttaacttatggaaactcatggtggagtttaatcttcattgaattatatgcttatataatgcaagaaaaacacccctctattatgcctgaataccttagtcaacgtttttttgtaggctataatgttttctatatattttaatactgacaaacaagggaataaaaagaaggatgctgatgaagaccaacaattcacggtaagttctattttatcttctttaactaatgtttttattagttatgttaaacggtctgctaacaaagtcgcgcactgcatgacacatggtgcttgttattagtcaggtcgtcattttactgagagcgatgttccccttatttttcagtccattgtattagcggatatttctgtctaataaagattattttcattcaaaaaaagttgatttttttaattaaataaattatgcacactatgtctaataatcttaaatgaaaatacatcactgtttgcaggaacactgccgctttgtcgacactgccatattcaatttatcaacgaaaaaatagacaatccagttatatgcggacctgactaaaatgaaaagtgcaaaatacaaaaattacactattgtctctatcgaaacaaatgaagattgaaatctaccaatgagtatcattattagttttcttatctacaatttttagacacatgctatcttcaattatcaataatttagagattgatttttaattttctttttatcttacactcatgtaagtaatgtttctttaagcattggaacatcaatttttagtttattttttaattaacttaagaacatatttaaattatcaagctttcttaaacactaatatattgcattcggtattcacttttaattgacaaaattataaactataatatttagatacacctaataactaataatattttatctttaatttttaattgtatcacttttaaataacaaagaaaaaaactagtataaaatttagtatacatgcctcgcatgtagctatgggtattacctatgaatggttaaaattaaaaaaatttgagtttttatacttaatttttctatctaattaaaaaaaaatctatcatttttatatcatttggaccgcgattgatccatcggtaaaaaaatattaaaaaaaaaagtttttagcaagaaattaaaaaaaaaaattgagtttgagttaaatattttagtatgaatatatttttgatatagtgtaaa

SEQ ID NO: 60398 - DNA, 627 bp, Cannabis sativa
acagttgaaaaagttaagcatctgtactcaatttcaagtttctttgaaacggggatgaaagagactacctgcgtgaaagcgagaaacagtgggatgctcaagtacaaagtcgcagaggtccacactcccaaatatataagctcctttcttgtatctgaatcaaaaatcaaaattcagctatgcaccattaatgaacaacagaaaagtccaattcttccacgaatgaaaagaaaaggacttacacatggacttgatttgtcatagaaccttcctttaagtataaattgtggccgggaggttcactccaagagggaatcgtgtacggaatgacatgttgatgggactcattgcaactctgcttgccaccgagttcaccagtttttgcaactaatgctactgtacatttagttcaaactaagtctatgagctattttacaaaagttttaaatgctactgtacatttagttcaaactattgttattgtatttcttacacaagtttcatcatattctgctctcataaaactcttttctaaggataatatagtataccatgcattagaatccagagagcaagggttatattagcagaattgggtaaagtagaaaatgcttggatgggagtgga

SEQ ID NO: 60399 - DNA, 810 bp, Cannabis sativa
tccaattttatcggatgtccccgaggggacgagcttggatgttgaagttggcgtatataaacatttgtgataactatgatgtgagcaatgtgggactgggacactagcaaaattcatagtgggccgaacctttgcaagaacattgttgtgacttgcaactcaacgccaatagcttgggctctggcccgcttcttcattatcggcccgactcctaacctaaagaaattctttttcttcccagcaaaaaaaaaaaaacacacacacacacaaatcatttttaccatttgaatttttttatttacaaaaatacatttttagtaaaaataataaatcattttttttttttttgggcaaataataaatcatttttagttgttttatagttgcataatatttgtcaatcaattatgtgcacggctacatcacggtaaaataaaacaaattatacctaaaagaccaaattactattaaatgttatatttcagaggatacattgaaaataaatgtttggttggatgaaataaaatggaaagaaaacaatctccattctattcttttgtttagttggatattaaagtgttgaaatattatcccaatggaatgaccttttcactatttagtagactgacaattccattttaaaatagaagggaaagactattccaatgcatgattagaaaaagattaattatttttttatcatttttttatgctttttaaattttattcaattccattcctgttctcattttcattcagatattttcgttcctcccaatcaaatgccacctaaatcttttaatccatgaa

SEQ ID NO: 60400 - DNA, 2128 bp, Cannabis sativa
tatatatatatatataaagattatgtaaacttttatgtgagctatgtaaatttttatgtaaatttttatgtgagctcacacagctttgaaacttttgttattaagattttttggattttttatgttatgcaaaaggtttaaatttatatatatatatatatatatatataaatttggagtttaaaaatgttgggtggtttcaataataaaaaattatatttttgaaaaataatatatcataatatagtaaatatgtatgtatatttatgtatatgacacttataactaaattggcaataaaataatttataatggttttatataataaaaatatttgaatagtaaaaattatttatgttaaataatcatttgatttaatataaatattatttttgtaaaataataatataaatacatttataatttaaatagaatataaaacaattttttttaatcatttatggagaatatatagttctaataatatattatttctcttagaattaatttgagtactattattcaattaaaatcattttaaactttaaaaatttatgtggggttgaatgtaacgttatatatttttaccaattttaattaataagtatttaataaaagaaatcgataaataaatttgtagtctttcatttaaattctttttaaatttgaaatatattttcaaaattaaaaatattcaaaaaataaaaaataaaaaaactcacgtacgtgggattatttattatacaattttttttatatatatatatatatatatatataaatcagccagtttattattaatctacaaatcttttacaatcaattacaataaaaatctttatgtcaaagacctcatgagcaactttttttacaatgattggaattttgggtcaaataattttgacagatgagattagctagattagttattcagacctctaacatgttaaaaaataggactagacaaattatacagtctaatctaatccaatctacgtgtcaaacagtcccttaagagaatatggagaatggagatacaaataagtaatggaaagctaaaatataactcacttaataataaatatgttgcactggtgtatcaaaaagtgatataaatttgacacataacaaatcttgtgtcaaatataacacactgttttctataatgcaaaatttacattaaaataaaagtagtactttgtttatttatatttgtgttatttgtattattttattagtatatttaattatagtattaaattattgagtatttacattattattttttattattttacataataaaattaacgacaaaattattatattaactaaatattaaatccacatcatgttttataattatatattaaagcataatattaaaatttaatgtaaatctaccacaaatttatttatttatttttttttgaaaatttaatgcaaatctaccacaaacttatttatttatttatttattttttttgtgaaaataccacaaggagatggtctaagccaaggacaataggacattaaaaagtaaagatcaaatgtatttatattggtgagcactgttactttaaaatggggatttattgttgtgaaattagggtttaatataacaagcaattaatgatgaacagtgttgtactttgagcatgcatttactttcctggccactactactacatttttttttgaaaatttcatattagaaggtagaccatatctgacactaaaagattactcggtccatttgtccaaatttggtttatgtgacgagacataaccataaaaccattttttttatttatttacggtcgtctatacatttggtaatatgtgttttatctaaatacaaattcaatactttgtgtttttaataatatttatttagtactttatattttaaaattatataaatttggtaccttaaattcaagtttttttgataaaatttatcaatacaattaaactgtctaaaattttataaattttaaattcaaatttaattatttaattacatataactaagattcgtttggttaaattgattaaattttactttaaaatactaaatatgtataatttaaaaatataagataacaattaaatatttttaaaaata

SEQ ID NO: 60401 - DNA, 923 bp, Cannabis sativa
cgccgacaattgagctaagtatttattttgctgacaaaccgagcattcagcaacgaagttttgaacatctttgtgcattcctcgccaataaaaatcagcagcaagacgctggaatgttttgaaaaccccaaaatggccccctattttgctgttgtggtactcttgcagtaagagttggatagatggggaggcggccagcaatactaatcgtccacagaaagtgagacaaccatgagtgacagaaaaacccccacaatcttgaccccgagcgatgtctgacatgatcttagcaagattgggatcagctgcaatagtagcttgtaaatcagtagtagaaaacacacccagaactgaaatagcagccaaggagacctcagatgaaacacgagacaatgcatctgcggtgcggttctccaaaccaggtttgtattggatatcaaagccataccctaagatcttagtgagccatttttgatattctagggagaccacacgttgttctagcaagtattttaagcttctttgatcagtgcgaacaagaaacttacggcccaataaatacgggagccatttttgaatggctaggacaatggccatcaattctctttcgtagacagacttggattgggccagaggggatagagtgcggttgaaataggtgatgggacacccatttttcttcagaaccgcgccaagccccatagcgaaagcatcaacctcaagtacaaacggaatggagaaattaggaagagctaaaaccgaaactgtgcacatggctaccttcaatcgttcaaaggccatttgagctgaggaggaccaggaaaaagcatcctttttaagctgatccgtgagaggacgggcaatgctaccatatccttgtacaaacttacggtaatagtcggtaagacctagaaaaccccgta

SEQ ID NO: 60402 - DNA, 895 bp, Cannabis sativa
cttcttccccgttgtagcatcactcttggaggaggagctagattctggagtcctcttgtcccctcccccacttttactcggccattgctttcctgacttcttactcgtagaatttttgatgttggtctggggattcgtcttcttcggctgtgaattctcaaaggtgtaatcagtcacccgctcggctgtagcttgagcagtggcgaggtctaacacccgctattgcagctcttgtttagcccacaggttgagtccttcgaggaagtagaaaagtctgtcaacttcattcatgtctttaatgtcgagcatcaatccggaaaacttcttcacataatcttgaactgtcccaacttgctttaactctctcagctgtcgtcgagccaagtaggcgacattttctagcaggaattgggcattcaattttttcttgaggtctttccatgtctcaatggtgcattttccactttgaatgtcctcgtactttgtcctccagcacaacttggaatccccagacaaatacatgtagctgttgctacctttgcttgttcagagtccgtccgcaacaccctaaagtattgctccatgtcaaatagaaagttttggagctctttcacatcccttcctcctccatagcatttaggcttaagtgctcttggtcgaccatactccatactccatacccccgtgccccccggtaatcgcacactctattgctatcatggtaagatttagcttagtttacattcctgctaactcttcccggatggctgtgatagatgcatgacaatcctctatcgtatcattgagggagtcttgtaatgcagcctgcccattttatagcacattgatagcagcctgcatttctattgtagcttgttctattgccctaatgcaa

SEQ ID NO: 60403 - DNA, 960 bp, Cannabis sativa
  modified_base (796)..(797): a, c, t, g, unknown or other
agacttgttacttagttaaagtggttgtatgtttttttttgtaaagactggatgtttgaatgaatgccactttgtattataagtttttagtttatggatgagtttttgttcttttttgaaattggtttctttttttctattaatttctttttggtttctttgaatatacagttaattgatttttgtttttgttttgttttgttttgttttgtaggtaataacagtggcagtttgtgatgatattttttcagtggtcattgtatgtgtttttatttattggtaaatgggaattattttttttcgtctagttttgtcaataactggtttgttgttatgtaaaatttattctttttcacgtacgtttttgaaataatctatgatattaagaaaaaatatttaaaacaatgattatttaaacagatgaaaactgaaaagtcttaaaatgttgtagtgtgtatcttattgaaaaaattatattctgttcaactttattcaatgctgagaaaccagtttttataaaactgtcaatcactatctatttatcttgtagctgatcaatcattcttctttgactcattgcttttgttattccgttttggaggtttgtaaagctgtggattgttgcacgttctgcggttgtgacctactttttcacaccttgtgcaattcaagacaacttttggttctccatttgatctgattcttttctttctaggcctccaagctggttttcttgattttggtggccacactatccgttccatgctctcaggtatagtccattctctttcatttnntagaggatgtacagttctttcataggttgccttcattgttgctgtttcgtagtactcagcaacatagtcatatgctcttaatcctcttttgcaaatacagctattgcatgtgagcatggtatctcatctagttggaaccttctgcagctgcatgttctttcca

SEQ ID NO: 60404 - DNA, 1090 bp, Cannabis sativa
ataagtacattattatatcaatttcttatagagaatacgtcaaaaaaatttaatttctagagaaacatggggatgacttttttttattaaaatagaaaataggttaaaaaaaacaaataaaaaagtgcaaatttattattaattcttactgacttaattatgaatttaagttttttttgtcaagattatgaatttaagtttaatgtaagaattgaaagtcgttattcttttaagcattaaatttttagaagttacaacagaaatggttgttatatatatatataattaagattcagttaggaggaataaaaatataaaaatgggaatatacataaaaataggaatggaataaaatttaaaatacataaaaaaattaataaaaaaatcattaaatcttttctcatgctatattagaatcatcttttattctattttaaaataaaatagtcattctactaaaattatagaaataacattctattagaatgatattctaatattttaaaatacaatcaaataaatgaatggaataaaattatttctttttcattttattttatttcattacctccaaaattacgcaaattaaaagatattattcatatcaaaaaacttaaggcttgcgtctctaatatagagaaaaaaactaagaatataaaaaccaatataaataaaagttacatccaagtaaaattagtacactaagtttgtagattaaaaagcaccaaaataactaatacacaaaaatcaaagtatccggtttttgtatattcttctattgatttctaggacacaaaagaatgtaagattcaaaagtttttatacaaccaagttttcttttttctctaattatacagccaagttaaaatacataattttgtcatacaaaaatctttcacgatgcttcccttcaaatattatgttgtttttctttctgttcatactacctaaaagacggtaagaataactattgttcacaactttgaactcctaaaacatttctctccaatttgcacactaataatatttggaaaacagaattttttttgaatttgatttgtacttaaaaatgatataataactaatacat

SEQ ID NO: 60405 - DNA, 1439 bp, Cannabis sativa
ttgcttggtgttcttgtccttaataagacaacacacatcatcaaattcaagggtaacattgttatctttggtaaattgagaaatgcttaagagatttttagaaacattgggaacatgaagaatgtcttgcaatattaaaggattaaaagactgtgtgtgaatggaatttgaacctatttttaagatagggatagtggaaccattaccaactataacctttgccttgcccttgtaatctgtggaggtggttaggttgtctgcattgttggtcatgtgatgagtggccccactgtcaatgtaccaatctgttgaaaattctggtgtagtattggcttgagttagatgagcttgtggagtttcggatggggtggaggagttggaagttccttgatcatgtgtaggacctgtgaaattaatgtcaaatctatggtagcactttattactgtgtgtccaactctcccacaaagttggcatgtaggtctgttggaacctctacccctgcctccatagtttgtgttgttggttctgcctccacgatttgaacccctgtagccacggccattgtagctttgattgtttcgattgttgttgttgtaggaggcattagcaagatttgcttgaacattagtgagggactcagtggtgtgttgatttatcctcatttcttggctttgtagcatgaattggacttcttggagggtgagtttttccgatcttgaagtaagattcacaacaacagcctcgtattcagcaccaagaccaccaagaacatacagtatgagatcctcatctgttaacgattgaccagctgcagcaagagagtcactgtattgcttcatttttaagatgtaatcatcaacagatagagaacctttcttggttgactggagtaatcctctaatttgaagtatcctagctcttgatcttgtggcaaatagttgctcaaagatgttccagatttcagatgaagtttgagcattgataacatgaccgagcatggcctcggttatggagttcatcaaccaatgcattagaaattggtcaaggcgtaaccaagaggaaaaggcagggttagggacattaccagttagaaaacgctgaggttgtggaagtgtccccagaatgtatccatcaaggttgtatgctcgagttgctgcaagaaccagtgacctccatagcgtgtagttgtttcgatcaagtcttagattgagtggtagaagattgttgttcgggaatgcagcttcttgatgttgagcagttgctggagtttgtgttgcagcaggatcttgattgccattgttggccatgaagctctgataccatgaaggagaatgaaaaagagcaaagaacagagaaaaacagggaagatgaactgaatggaatgaaagagatttgatactgctcaatgtaaatcttgaggcagtaggagtccttttta

SEQ ID NO: 60406 - DNA, 759 bp, Cannabis sativa
agtgatattcttcaagatccggttgtaaaacttgaagaagaaggaggagaagctcatacatgcacaagaaaccagaagagagttagttagtgagataaagagggattaaacacattgtatgtaataaactaagagattaccagtcaaaaatcatgcctgtgacttggaatctcagtcttgtatctctgaaacatcatttcatagtggaatcgagctctcagatctgaggaacagctcaacggagatagccaaatttttggtgaacttcgagaaaaatctctagcgttttctaaccctatctttactgtgtttgtgtttatttgaggatagatcagatcgatttagatctgatcttttgattgtgtgtgttctgtgatttctggggtgtttagggtttggcatcgagtttctctgagagagaaactctctgctagggtttcaaactcaaacctaaaacctaagtgatctgattgagaaggttctcgatctttggttttgtcttggacaaaacggagtcgttttgactctgctgactttgaaaagtcagggattgttaaaggtcgaaattgaccttggtttaatactgataattgaatgttggtgtagggtaatttgggaaaaacaataaattcctacaaaaattacctacaccaataatacataaatcaatattacccaaggtcaaaattgatcttatacctcttttgactttaataaagtcaatacccaaaacgataacattttggccctaaaacaaaa

SEQ ID NO: 60407 - DNA, 643 bp, Cannabis sativa
aagtagttttttgttgtaaccaaaagtcacatttaattataaaaaaaattatgttgttattaaaaaattgtcactaaaagtaactattttttgtaatgtccacctgtactttatttttggcttacaaatacgaacacgacgtgatttcttagcatgtcacacaacataatagggtaagtacttgtaataaacatgtcttaacacaaattcaaaattgacaagttcaacatgtgtgattatacatgttatgacctgataaaaataattatgtatataaacacacattacttataaaattcatagtttaaatctattttattttattttttaaaagaaaaatagaaaaaaaatgtatttataaagttttttaatagagtttttattttattttacatgatataaaaaaaacatatatatattatatatatattttgcatagatgtgttataatcgtgtcattgtaaattaaaacgtgttcatctcaaatgtatggacctaaatctaacatggaagttattgagtcaccaattttttttttattttatatagtttttcgagttatattattgtgtaatacataataaataataataaaaatttttgctaaaaaagaacatatataaatatgggtaaatactatttt

SEQ ID NO: 60408 - DNA, 1199 bp, Cannabis sativa
tcatatcatataacatcaatagaaaaatgcatcacatgactaaaaaaagagacttgtttttatttttatgattttttttatatattttttttcacaatctttttttatatatatatttttttttacaattttctttcacaatttcttttataataaagaaacttgtttttgttgaattttttttataatttattttaataattttttttcacaatttttttacaattattttgtgtagaaacttgtttttgttgaattgttttttataataattttttttcacaattattttacatttattttgtgtagagtttgtgtagagactgtgtagagacttgttagagacttgttttagacttgtttttgtcttgtttttgttgatttttttatatatatattttttattttgtaagagacttatttttgttgaatttttctattatatattttttttactaatttttttttttttttacaataaagagacttgtttttgttgattttttttataattttttttcacaattttcttttacaattattttgtaaagaggcttgtttttgttgaattttttatatatatattttttttattttgtaaagagacttgtttttgttgatttttttttatatattttttttcactaatttttttttttttgcaattgttttatatatttttttcacaatttttttaacaattttttttgtatatattttacaatttttttgtacaacaacttatgtgggttttttttttttttttactattttttgtggtacttgacaccaataacggtatgtcactatttatggtatttagcacatcttttaacattttcttatgaatgataatttttttacaacaacttttgtgagatttttttcttaatgatcttaattttttttgttttttttttcttatgaatgattttttatgtatcattttgtgtataatattttttctagtgaattattttttttattattaatagaacattattatttcatactttaaaatgtccaacattatacggatatgacacttaataattagttggcgccttagcggtttcctatattattcactaaatcaaaatttatgagaccggataatgatatagactaataacagtatgctactatttgaaatttcgtattttcatattcccagtttgattatttaattaaatgattaa

SEQ ID NO: 60409 - DNA, 1029 bp, Cannabis sativa
aattgttagaatttgaggataaaatgaatgaggtagcatccttaaaccaattggcaattgaaagagtaactgattcatcttatatactacaatttatttcatcacattacaatgtgggactaactctaatattatgaattaatatttctgctagagatttggtctagatattcaatttttccaaaccaaccactactacagttttcttaaaattcaaaacccaataatatgatcaaaccaaaccaaatcaaaccactcaaaaatatattggtttgtattttatagttgttctatttttttttttttacaataattgttcattttttcggtatttttttttttacttttaataagtttataatacataaataacaataaaaattattatcgtaataatataaattcaatatcaatattctacttaaagttgtttccaaatcaacattttgtctaaaaaaatatatattaagtatatataataattataagaattggtttggtttgaatcgctaccgagatttttaaaactgtagtcgaaccagagaatttaaaacggtttggattgatcaaatcattcacaccgaatttatttggtccgacctcaaataatttagtctggagtttgaaaccatagataacgaattatatgagcacccaatttcttaatttctactgcaaagttttcatttttcatgtttattaactaaagcaagaaattaagtaatattttacattaatttgttatatggtactactcttttctttttaatatatttatttcgggggttatagataataatagtgtcaaaaaatatacatcttagtattttttttaaaaaaagaacaaaactaaataaaaaattgatggcacgatgttgagcatagtgttaactagagaagttagttaaatagtggttatgttgtctgttagttagtttcgatggtaatttcaattagttaaagttagttacagccatttttaagctgtgtatatgacttagctaaatttttatatatatctattctata

SEQ ID NO: 60410 - DNA, 577 bp, Cannabis sativa
  modified_base (518)..(529): a, c, t, g, unknown or other
ttttttttttttttttatgttctaaaagttgtatatataaatataataagtaacatatttggtggagtttaaaacgttaaatattatttttttagtttttttgccatgtcctaaaagattgggtatataatatatattttacttagtttgaattttgttgtattataaattggagtgctcttgtttctaaataaaaaaaaaaaattggagtgttgttgaaactttaataacgttgtatatttttattgtgttagtgaaattataatatattgcttatttatttaacaatagtataaattgttcatgctttgtagttatgagatctgcagtgctcgcggtttgagtaattgtgaaaatggaatgtacaatttagcttaaaaaatagctaaaacttgcggacacccataatttaagctatatttgaagattctttttgatgaatgaaagcatgtttattaaaaaaaaagtgtcacttcaaaaaaaccttaatttgaaataggctaattagtaatttttcnnnnnnnnnnnngacatgtactaaatcgtgtcccctgaacttttttggccgtaaaaaatt

SEQ ID NO: 60411 - DNA, 989 bp, Cannabis sativa
gttaactttgtactccctttacctgtattggtgtcaagatttcagtacctaatcaacaaacttggagtgagagcctcaccccttcgtttgaggggtggtgtcaagaatttcatgtcttttttttttttttaataattgatatttattttcaagatacaatcacaatccagttttggtcttgtgagttttttttttttcttttaatattatcatgttttttttttctttgcaatgatgtgttgttgttagttcaaaaaaaaaaaaaacattaaatgaaaataacatctttgtagtttagataactagattggatttatcatatatactcattattgtagttgttgttggaattgtttttaccaatcctaattagcagcgcctactgttactactccatacaaagtctataaattgggagttaccatcctcattattgaagagattttttggatccaaagtaaatacagagaagcttatcgagggagatctggttttgcgttttattatttgtaattgctagacttagattagaactagaaggttgagaaatgataacataaattttctatatcgatctctcatgtatatacaatggaccatggtctagcagctttggattcattttcagagcttcaaatcgcagagtaatatattctagattgacttgattcagcaaatcaaatgagtcatctatcttaagtgtgtacgaatattaaagaaattgacaaaataaaccagaagagaaaagacagtgagagattaaatatggggaaagatttgacttgtacactaatagttataatggagttctaatctctttcttcaccattcctctaactttgtttcctaatcaaatcgttacctctcccacaatccaatcgttacctcttcaaatcccaatcattcaaggtctcattcattcgactgctggagctttcaatcttccatcgcttgaagccctaaacctcatcaaagttttggatctaatg

SEQ ID NO: 60412 - DNA, 896 bp, Cannabis sativa
ttgatctaagatcaactaagtaatatttacttagaaagatattacggtaagtttatgatatcttttctatgtgaatatcggtccagtccaatctataataatacatcaaatacaagcttactttaccaataccttagaaaatacatatcactatctaagtgtaagtaaacaacattgttgattatcatattaatagaaattctgtgtactgataaattataggataaatatttaatcacataatcttgattactttctactgtgtagacaacacaattattatgaataacaatatgataaggattttaaaaaatttataaatcaaacaaatgaccatgaaggaaaaatgtgaaccaagcattatatttaaacaagtaataaaataattctgttcatttattgataaataaaatttaagaaaacattgaaatacaattttagttagagcacaaaacccaaccgttcacgatgcagagcttgcaactagtttgttgttagaatctatatttctttcatactttttccacattagattttgaatggatatgaacttaggtgatgtttggttggaggtaatgaaatagaatgaaatggaaaggaatcaatctttattttattcctttgtttagttgcatactaaagtattggaatgtcattctaatagaataatctttctaccattttggtggaatgactattctattttaaaatggaaggaaaaaccattccaatgcatgatgagagaaaatttaataaattttttattaattttttttatgcattttaattttattctattcaattgttattcaaattcctattctcattcttattcttatattttcattcctcctaacgaaacaccaccttgataccaatgtaaaagtttattttga

SEQ ID NO: 60413 - DNA, 796 bp, Cannabis sativa
taatgaattactcaagtatatataaatgcctagattgaagtgtttttataggcatataatggccctacaataataatttcagtacgtaatattctcagcccactttagaccatatattattgatttgaacaatgaaaaatataaatatatatatatatatatataaatcacctgatgtatcaataataggggttcaaattattgttatgggttttagttaattagtctagctctttgtgtagattgtctatcatatatctatgatatgataatgttagtctttttgtcataattggtttatatcactaattactaatttagtagtttattcatgtgacaaaggttgaatatgagaaattgaagatattgcatgtatgtgtttgatcttttgggtaatgaggttttacctcttcatcactaataaatttccaaaaaaaaaaaaagattatatgtgtaattcattggcacttgtgtttcatatatgtatggtttaatgagcagtattatgattagttctataggttgatcaaatttgaggtatatatatcatagttattattatttttaggttttgttttgctatggttcaaatacttggacttccacttataattgaactttagcaggggctaaaaagaaaaaaaaataaaattaggaggggctgaaatataaattttaaagaaattaaggaaaaaaatttaaaaaaaaaagtaatttttttatattttttaaaaggcagttctatttgcaccccttaaacttataaatgcaccccattattaaaaaaaaatataaa

SEQ ID NO: 60414 - DNA, 992 bp, Cannabis sativa
atcaaatagtcatagtagtgacatcccatgacttacatgctttccaaagtcgcatgaagttctcgagtcaactgaatagcgacatgtgtgcaatgcaaggtgtaacctgcaaaaggttttcacctttttgtatcccactgtatggaagatgaacatatcatttttccaaacatagccagagtaatgatccagatggaagactgcaagcttctgccaatcttgagtccgaaagcttaggaggaaaatgttattcttgtttttgaaagaaaaacacgtggcataaagcgaaagataatcaccatactaatttgtatatatggagcataaaatgctatttttcaaaaagcttcctcttttaagtgtatatatgaaaatgaatttgggtcctaatttgaagccaactaccccaagccagcccatcaattcaaaccaaaacccataagatgtcgtttcccagaaccacggccaactctcagtgtctacaattttggagtaaactgtaatggaggtagaggagaggacgaaaccaatcgccatttttatggcgttcggtaccaaaggagatgtttatcctattgctgtaagttcctttgcttcctcctcatctagaatgtgaaaacactgtattaaagagaaaaaatggttgtcttgtatataattgctgggttcctctaacagaatttggaattttatttcattatatataatgaaattgtatgaatatatgtacataatatgtatgtgtgtcagtgtgtgtgtgttatatattagacaagtcgaattatctttgacttaattctgcagtgttcatacacttattattggtagtgatgacattagttattaatagtttaaattcaatgtcaagatattggaaatcattattaggagctgagttttagataatggccaaaaaggaagtagaaattttcttgagtctatctcaatgaaaatgatgtcccaaaatatattcttaaacttttgttgatata

SEQ ID NO: 60415 - DNA, 1075 bp, Cannabis sativa
atattttcttgcactttttttcaatattgaatatttacttgtatataagtaaaaatgtactatattgtatgtcaagaaatattacaaaaaattattacctttagtgataactttttagtcacaacataatttttttacgattaaatgtgaactttagtgacaattatattatttgtgactaaaacatagtatttaaatacaaattcactaatttaattttagccacaataattattatgactaaaaatatatttagtcacaacgtaatttttataactaatatttttaattagctacgaccttttagttacaacacaaaaatgataatttataattagtacttaacaatttttttacttttagtcacaagttttgttgtgattaaaaataagattttttttgtgttaggatgtaattttaagtataagtaaccattcatagtgatgaatatttgtattctccttccttaattgtattagtaaattaaaatcttcaattcatatacagtaaattaaattgatctataatatataatatgtgtaggccctaaagaattacaaacgtgcatggatataacaaatatataacgataaaagatgagagtagcctaactcatatcatatatgatataattaatttgacttagcaacaaacaaaatgatgataataatgatgatattgatgaccaagtcgatttttttttattacaattcaactaaagtttatatagtttctaaaatgaaattacattttcaatccaataaataaataataataataaatgaataagtaatttttgttgttttttttttctttggggaggagagcctgaaattgcatatacattctagttgtcttgtctgtggcgtttgctagagaaacaattttagaagccaatggttttcttcttctttaatttcttttaacgttttctttcatctttttcttttcttccaaccaattgtgtacccgtgctatatatattagagagtattaactaacgagtttgactttagtatattcacatgtgcataattactagtttcaaattttagatcattattgaaaaactaag

SEQ ID NO: 60416 - DNA, 764 bp, Cannabis sativa
atgttgggcttttagtgaattttttagtcataacatacaattttaagagttttttaatactatacctaaaatagactatttacaaaaatatcattcaaattgaatttccaaagtaattcctactaatagtatgaaaaaaaatatcttgcttcataaaattttctaaaaaattgcttttgagtccaataagataagatttggttaatttagacaactttattttaaaataattttaaatacaagtttcttattactaaaattactatttggatataagttctcacaaatatacaaatattagtaattatgtacttttagtcacaaattaaggtctttttggaataatttgatcacatggtttgttttttttttttttttgaaataaaaaatttgggacttgtcactagtatgtgattttatgaatcatttctactagtttatgagacacatgaattggattttgttaattcatatattatatctcttgttatattgaggattttacaaaaatattggattttgagtaaaaatttacaattttattgctacataaattttttttacaaaaatactgttttctataaaacaacttaaaataactgtaaaacaacaatatagaataattaaaaataatagtagaataactaaaaagcaactgtggaacaacaatgaaaacttaacatagtataaaatatgatatttatacagtatttttgaagaaaaacacaatatttttttttaaaaaaaatcaccccacagtaaaa

SEQ ID NO: 60417 - DNA, 2021 bp, Cannabis sativa
ctcataatctttctaccaacagggattttaatcagaatccagatcttgtttcttctaaaggaattaatttcatcatccattgcagacttccacgtttgactataattgcatctcatggcctcttcataagtcttggtttcaaagtccacctagttctgcaatgtgcaatgcatagtgcaccacatctgcaaagccatatctcagtggtggcttaaattccctcctcttacgatctctgacaaactcatagtccatgtggttgtcttcatcagtttcagattcactatctactacctcttgttctcccttatccacagtttcttctattgcaacatggatgatatgatctgttctttcaggtggcaccacctcaaactgaacaccctcaacattcttactttttgatttagcatgggattctaatgtatccttatacattttattttctttaaacacaacatctccactgacaaagtacttttggtggtcacctggttcaatgctccataatttgtatccttttacaccctttgcgtatccaattattatgcagttcttttctctaggctctagcttaccctgcctcatacatgagcataagccacacatccaaatattcttaggtgtccatagggtgcattttgtcctgtccatacctctatagggattttaaagtcaatagcagatgaaggacatctattgattaggtagctagctgttagtatagctttaccctaaaaaaattttggtagaccagaactaatgatcatgcatcttaccctctcaagtaaaaacctgttcattctttctcccaacccattctattatggtgttctcataactgagagatgtcttccaatcccttcttgcttgcaaaaacccttaaacatatctgtatagaacttcaggccattatcaatcttgagttttttaattccttttctagtttgattttcaagcagtgatttgaattacttaaacttaggaaaggcttcatcattagtttccaagacgtggctccacctctagaaactattctggatggcccccacaggtctgactgcatgtagtccacaatccccttagtattgtgttgaccaactccaaatttcatcctggtggactttccaagcacacaatgttcacaaaactccaactcttgaatcttatctttgccaaagaccccattctggtgcaagaccttaagcccttctaacttatgtgaccaagtctcatgttccaagccattgctacattcttaatgtccttgattttagcattgatttggttcttcatggtgtttcctttcataacataaattacactcattgatgatccctaaataactaccatggatcctttcattactttcataccatgctccatcttcactgaacagcctgaatgatccatcattgcaacagaaattaaatttcttttaatctcaagtacatgtctaacctatttcagatgcatctttaaacctccatctagaatttacttgactgtcccaatcctaggtatagagcatgatctgttatccccaagcttcacagaacctagtttaatctcttaataatcatggaattggcttctatctagaaatacatggaatgaacaacttgaatccaggatccatcccagatcaaattctccatttgaaataactaaaactcctgcactctcatagccatcattgtctagacaatcagatacaatatctgcattgccactcttgttttgattatagttctagattagacagtctcttcttagatgagatgtttgattacaaatggagcatcttcttttagccttctaattttcctttcccttatttgattctcctttcccactgttctccttcttgaaagttttccccaaaccaacaatcattctcttgaattgtcttctttcaattttgctctctttttgatctccttagatattagtgaattatgcacctcttccaatgccaaggaattcctaccatacatcatggtatccacgaaatgctcata

SEQ ID NO: 60418 - DNA, 877 bp, Cannabis sativa
ttggtttctcctcatcaagatctttaaggatctattggtcgatcctccatgcaccacttttgaccgagaactaccaccatagacggtggagccctagcgagacccttggccagctactgtatttaacattttgagcttgagcttcgagtatcattttgagcctcgtaatgggtttaaacacttgggtaccatttatctactattttctttaattatttgagttagattattggttgtcaattaagaatttattataatcttggtgtttgagatatttcaggttgtataaacaaatttgttacacttaggtataatttcatatttattattgacaaacgagatttatactagtttattatgttagtttataacatattttagagtcttttatgtcaatttagtttggttttacggttattttcttttgttgcaagaaaatatgataaaaatattttaaaaaatggagaaacaagctaaatttgtagaaaagtgggcttaaatggagttatttttcatcttggtgaggttagtgatgttcgggagcaagatggagcaaaaagataaaattggaaaaacttgtcagtctaggccattgctctgaaatctggagccatggctccagaaaagacaaaatagcataaatgacataggggctatacctcctgaagcaaaaatttgaaaaaataaaaataaaaagatcgcgaagaaaaaatgatgactttctcaagtggggttgcggctccggtaccccgagttgcggctcctaagcgtgttatttatcttttaaagttttaaatcttaatctttttagtatcttttggagaacttttttagtatatataaacaaattatcattcgtattttcagtacattttta

SEQ ID NO: 60419 - DNA, 536 bp, Cannabis sativa
gtttatacattaaagatgatgactagtggagtttctctgggcaaaactatgggagttggtagtggaaataattagtagctttaaaagatcaggttagtttgcttgttgatatacctcaatttatcttgattaagtatcacatttcaactggttataattttctttgtccttcccaaaccaaaatgcaataaagccatgaagtgtgggggagatttaacacactgaaacatatcttgtgacgccctaatctatagggacgccacgtgtgttattttataatctactttaatactaatagattaactaattattaaaaactatgaagatattaaaaatatgactaaaataaaacactaaaacaggcatcataacgacattaaaaatgtattccgaggatccctattataaaagatttacagaagactacatacgataacaattcaaaacacaaaatcaaaatgcacagcagatacagcccaaaacgactcctggaaactcaacacacatgacggtggggtcaatatatacattgctgg

SEQ ID NO: 60420 - DNA, 746 bp, Cannabis sativa
aataaagtagtttgatctttttttttttatatatatatataaacatgtatataaattatatataataaaaatatatatatataaactttcttaatcgggttagtttgggtagattgggcgggttgatattattttcaacccgcctaatataaagattgggacgggttatattttcgtcgggtttttcagtttgtatttttcatcgggttatctcggtttggtttgggcggattggacagtttacaaaaatttatgtacaaccctattaaatacattgttatgtaataaatattatcataatacatggaagataaatactctccataaagtgagtacttatcgttataattcacgtgtttattatataataagaatcgttggggttgagcgataatataaatgttgaccaagtaagagaatattagaatattttatataaaataagtcaaatgtatgatttgatttgatattgattatatttgacttaagaaaattctatttatggtcagatttaattactaaatattttagttacctcatttaatttttttaaattaattgtcaaaatattctaataattaatatgacacaaatacgtgtcagtctcaagctcgctactcattctgtgtaaaatagtaattccatctaagagagttagagagaggttggaagtccgaatatccacactaacatcagtattggttttcttttgttgatcctaagtttgtggagttgaaactcaaaga

SEQ ID NO: 60421 - DNA, 813 bp, Cannabis sativa
aaacaattagagatgtatcggtgtaatttatagcattcatagcatatttatacattatttaattttcatttcactaatatgtgtttgagtgtataattaaagtgtacacattagctaaagaaaaaaaatcatcactattggtatcaaatcttttaggaaagtgttcgaaaatagatttgtgaatgcttagtctcaaacggacaatatcatactaatgcgttctaaaaaaaaatataagaatattgtattattcatattatttcttcctaagtaggacccaattcactatcatggtatgaaaaagaatttaagaatatgttttttaaaaaaataaattatatgccctaattttgttagtattatattaagaatgtattttaaatagaagttgaaacctagtttaaagtttataatttttaagggtgatcctacagcacttctaattattttggtatctagaaaaacataatcttaactttatagtaatttaagatattttgtaaaattttaagaaatttaaaataatttaaaatataaaatctaattttcaaattaatagtctattttacacacataaaataaaagagtcacgtgtaccatagataatttaaactctgtcttgcatggcatgttaatttttttttaaatctctcaaaattttgtagaatgtcttaaataattataatgaacatgaccataataaagtagactaaaaaatctctcgaatgccaaaataaataagtgtgcatcggtacactctttttagtttggtaaattttaaaattttccaatttttaatttatcactgtaaat

SEQ ID NO: 60422 - DNA, 1462 bp, Cannabis sativa
aaatttaatgtaagcccaaataaaagtctaacagcaatttctaatagaagtacataaaaattgactgtcattttgttcgtaaaaatattcagcaagggtaactaaaattgttcatatatcgataaagaaataagttgcagacatcctaattaaggttctatttcaaacacagttcaaaactttaaagaacaagattggattgataagtctatatacactccatcaagaggagtattagacttaaacttaactttgttgtttagaatattagttaattagaaaccgttaagattagttacctcattttttatttctgttataattcagttaatttgttcaattataatcttgagctagtatatagctcccccttgtactttcgagtcattcttcttttctctcttcttttctgttttactccgtttctctattccgcactaataacaacttgtcaaatatttacgtaaaatttaaccaagctactgcagaaagatttaaggtgcagatatataaccgaattacgtaatgaaaactaaactggcctttggcaagctccaaaaattcatagatttcaagggtcggggactaatttgctacgttacacaacctatataataatatttattcattagaaacaaacaaataaaaactaaataatataatataatgaatgggtgatgcttagcttagcaaaccaaggcgccgcaattcatgaagatatatattcgcccatctctgaaaattatgtttcgtcaagccgtctcatgatgattcctcggccctagctcaaaaataaaatggggtcaatttaaccccaaccttcttcaattctaatattctattataattaattcatcatcttctttgtttaaattgcttaatatttatttattcaattagtttaaaattggtgacaaactatgtggaacttccgcccaccactaccactcattttctcctcatctatctatttctacaaattagtatttctaaacttcggttctaataagtaaaatagtattacatttcttaatcatgattgaattaattaatttgtaattcacaacaacccatatcatattatataaatatatatactaggtttttgtgttgataagataaacaatgttatatttatcatcattgctttggaattttggatatatatgagcaacttttgcggtcgatgtgtacattatatctgtctttacttatgccttttgttttatgctcgttaatgaagtgcattattatgcggcgtgacataccctgtttctttttctttatttctttattatttttatttaaaaatagattattatgaatttttactccaaattattagatgtgttatattatttttttttgaatatttcggctcgttatatatagttcttaaattatttatattattttaagttaggtggcgtttggtaatatttttttaatcagttttttgttt

SEQ ID NO: 60423 - DNA, 1182 bp, Cannabis sativa
aggaaactaatcatcgttctgggaaagagcccatgggctccagaaggtctaccaacccgcggtccagacggaccacccgttccaggaggactcaaccctagggtggccccatgtaaagaccgcttagctttgatttggaaattagcagataattagggtttaattatgaaacttacatattagttgtgaactattaatttacgatgatttatttgaattcaaaatgcattttatatgtcatatatagagttttataattttgtatgttttgtgcttgacaacattggaacgaggtgtttggctattagaatcacattctagtatttttagtatagcagggcagtatagttagaccttgggaatgtcgggaatagttaaaaattaagaagtgacaaaattcccctaagtgacctattatgacttttagtaatgggaagggcaaaatggtctttttgcctaagttatcttgtcttttagtgaacttagattaaatgattaatcagatttttaattatattttaagctgatattttattaaacaaaacctattcatttataaaaaaaaaaaaaatagaaaatacatgaaaaagcaagaacattctctctctttcaactctctctctctctctctctctctctctcttgaaattcctagggctgttagggttggtgttttcttcagtagttcttctaattctcagctagttgttagtgatctcaagccaaggtaaagtcttttaaactcctactcttattttctggaattttaagaaaatggttttttgcatgaattggagttttgtgctctatagtggttgttgttgtttgattttgttttctgtagttaagctatgatgtattgtgttgaattaaacttgttttgtgggctgttattaggtttgagcaagctttgagttttagaactcaagcttggctctttaatggtaatttttaattctgagcttaggtagttactttgttgcttggaatatgtttattggggaataatatgcaggtctggaaggtttgctaaggattggaattgatttgtttaggttttggattttttttgggttttctggtgtaacaccctaactagcataggcctattacgtgatttttaaacgtactgtccagctcgttgctaatcaacgaggtttatgaaaaatcgtgattaattaa

SEQ ID NO: 60424 - DNA, 1006 bp, Cannabis sativa
tcctggtaaaataatttcaacagtgggcgtatcagggtatttttataattttgactcgagaagagtaaaatcataattttatggtgtactatgcttatggactatattattatatagtatgtttctgtctttctacatgtgttttctgacaagttagtgcagtgtagtcataatcaggtcttttgggccgaattgggttcgaggctcaaaatactcttttcggatttaattatagcatttatgtgataaatggaaaaatattatttatgtgatttatgtgtgtgagtagaatgtcatgatttcaccttttatgtattgtgagtgccttaggggccaaatggtttttttaaccaattaatctattttcagtaaaaccccaaaccgacctctctctattgtatatttttacccaatttttaagaaaaagggcttgaaatctagtgtgaatttgtgtatttcttgcttggagcttgaggatttttaggtagctcttctaatctcttttgcatattgttaatttgtgaattttgagcttgtgtataatgtctgtggatgctcatggtgttcttgtcatttgtgttgcatgttgtggagattaagaggaaattatggtgattatagcatgattgagctattaggtttatgtaatgcatctagattgaattgggagattttagggttgaattatgatgtttaaattttgggaaatgctttgaatttctaggctaagctttgaagctttgagtttcaagcttttgcaattatgtgcaactaaggtgtttgtgtagtatgatgttgattttgattttgagctttgtgtggtgctcaattgaataccaatgttagattagtttgattttgatcaaaagtttagtttaagcatgattttgattaagttttggtatgtttttgggttaaaatcgagtgtatagaaaagttggaattttggggttctagggcctatcactgcagccacagtagggctcgccgtggcgaggctccaaca

SEQ ID NO: 60425 - DNA, 756 bp, Cannabis sativa
aatcatgaatctttattgataagagtagtcagtagtatacaatcaaatatgtccaagattacaactcaatacaattaacaattgcaaaatatatcacacggagggaaattacttcaggagtgatactcccattatatcccttcacacacatacatattgtaattttagataatctctctaaacttgattctgaattctgaagtatgagcatttaagatgcatgagaaagtaaagattgatatatttataagtattggtgagactctatttaagttagtgacaaaactaactgttatacctaatttacttgacaaaataattgctataactaacaacatctcctctattttagttaatttaatacttatttagttactaatgtttaaattaagttgctatataattatttattccttcatgataatgttatttttaaataataattgtattattataattgttagtagctatattttttttaaaaaaaataagtgtattcatgcattaaacaaggaaattgttagacctcacggtcattacaaagtaattctttcggtacagaggagatcaaaatgaaatcgtaccgaggagacctcacggtcattacaaagtagtttagaatataagtaaattaataactatttatccatagattactaaaataagtattaaaaactagaaatgtaagaaatagaaagagagatgaataaaaacaaattctgaagatggtgataaatgactcctttctttttcttt

SEQ ID NO: 60426 - DNA, 538 bp, Cannabis sativa
aattagactaaaaaattcttctgaatgccgaaacaaattaagggtgcatcagtacatcctttttaagggagtgcattgtagaatcatccaataaattataagataacaaaaaaaacaattttctttattggagaaatatttttgtaaataaaaaaattcaaacgtaaaaacaaaaaaaaattgtgttgatatatttttatctgttttttaaaagagaaaattcggtctagtatttaaaatttttttataccccttacttttgtttttcttccttttggccccatacacctatttttataagacatgaacatcaacttttgttatttaatgaccaatttctaatggaaatgacacatttattataaattattatgtgaaagagagcctgaaacggcaaagacaacacaaaaccctttcttacttacttcactacataactacccttttttgctcatcaaaaaaagattgctcctttatcaacttcatccatggctaacatgatcactcttcttcttcaaggtgttgaagttgaaccact

SEQ ID NO: 60427 - DNA, 1401 bp, Cannabis sativa
aggtgtgttttgacaggttggcgcggtatagtcacaaccgggtatttcaggccgaactgggttccgtactcggtatggacattatgaattccttgcgatgccttttggactcaccaatgccctggcggcattcatggatcttatgaatcgagtgttcaaggattacctggatatatgtgtgatcgtgtttatcaatgacatcttggtatattctgaatcaaaagaagagtatgagttgcatcttagagcggttttgcaacggttacaggatcacaagctatatgctaaattcaaaaagtgtgaattctagttatctcgtgtctccttattgggggacatagtagataaagatgggatcatggtggatccatccaaaatttaagttgttcgagattggccaacaccaaaatcagctactgaggttagaagcttcttgggattagctgggtattatcgtcggtacgttgagggtttttcaaagatttatgtacccttaacggagctgacccaaaagaattaaattttgtttggactgatcagtgtgagaaaagtttactggagttaaagcagcgcttgattaccgctccagtactaacccttcattcagataaggaaaagtttgtggtttattgtgatacctcgagacaaggtctcggctgtgtgcttatgcaagctggaaaggtaatagcctatgcttcttggtaattaaaggtgtacgaatagaggtaccctactcacgatctagaactcgcagcagtggtatttgccctaaagatttggcgacattacctatatggagtgaaatgtgagatatacactgatcataagagtctgaaatacttcttcacccagagagatctgaatatgagacagagacactagctagagttggtgaaggattatgattttgaaatcctttatcaccctggtaaagccaacgtggttgctgatgccttaagcagaaaggggcagagtcagataaatactatgaaacaaatctcccagcagttagcaaatgagattaaattggttgtagggaagttagctaatattactctgcaatctactcttttagagcgaattaaagaagtacaaatgcaatatctagagttggtaaaaacccaagatagggtttcagctgggaaggctagtgatttttcagtggatgaaataggaatgttgcgattcggaaatcgtgtttgtgtgcctatggatgagagtatcaaaagagagatcatggataagtctcacatgactccttattcatttcctccaaggtcaccgaagttgtatcagtatttaaaggctatgttgtggtggccaggcatgaagaatgacattgctgagtatgttgttaagtgtctaacttgtcagcaagtaaaggctgaacatcagaggcct

SEQ ID NO: 60428 - DNA, 1841 bp, Cannabis sativa
aaatacatatatacaaatttctcattagaaatattgatttgtacaccctacatgtcttacttcactttatgcgagtaaatttgtctggattgggtcataatattttagctaaaaataaaatatattttgataattctcaacaaatctaatactataatttctgctatctcatgttagtttattatatataaaaacatttaacatctattgtcaacaaaaatttaatttcctcccatattgacatagcatataaagatctctttaaattatatatatttttcaaatatgtatatcatttataggtacctatatagaaccacttaaagggttcaattatgatcaaatatgctatgtctaatttctttagggagtctcttttagaataccgtttttatcacagttattatttttaaattattaataatttataacattaagatatttcattgagtacctctagatttaacatcttcaaagaaaattaaataaaatatattaataatttctacatagttcatttacgcttcaggcgtttttggactcattctaactcaactttaaataatattaatttgcagttgcaatatattattttaaactatattattcttgtatactttgtgcaaggatcattttttaaaaatcttcatcaatcccaactgcatttttctcctccagattgagagaatttttaaaaattataaaatcaaataatattaatactcatgtaagaattcaatatatcacaataaatcaatatttatttaaactcatatatatatatatatattatatttattgaacttcgggttcaataaatatagttaagaatttattttatttataagaataagtcatatttgtataattagaaatacataaacttataaattttaaaaatctacgatcatatgatcttatcacatcaataagaagctatataataaacatctaataatggctgaagatttctaaagaaatataatccaaatattttcttcacaataatttaatatatattttttgtagaaaaataaataaattgacattatttaaataaattaaattagaaaaataattatcaataaaaatataattttgtcttacaaataagtataaaagataaactaaataaaattatatgtatattatttttaaaattaagaaaatattaaagtatacttttactttctatatgtgcaaaatatatgcacattctttttaaagccttataaattgaaaatgagaagaatcttctggttctttaacaaaatttagtcatatcatttgataaattattgtgtgggattgatcatgtcaaaataacttaatttatgaactttagcttcactataatttgtatttcaataaaacttttgtaggataatttgtaaaatcactgtaacatataactaaccattacaagtttatttttatatacacgaataaaataattatattattttccaaaatatatatatactctttaagagtcactattatgtttatcaaactttatatttcttcaggaatcactatcataaatttaataatatgtataatataaaaggtacaagaaaacttcatatgttattgtcattgtcaaaagatataatcataatataacatttaatttttctcgtacctttctaacaagtcgtctaatttattaatagactattcaacaatcttgttatcttaaattttgtccacctggcgtggtatgttcacataagccaagacaaagtacatgtgaaatacaaccttatcagtagcaagacaaagtctccatacaagatatggcaaaattttcaagcaacaaccgaaaggagtgaagcgag

SEQ ID NO: 60429 - DNA, 1305 bp, Cannabis sativa
aaaaaaaaaaaaaaaaactgaaggcaagcaatagtcatgctcatgtgaaaaaagtactattctactatttttatgactttttttctttatatttttctcttacaatattatattataagatatatattataccataacacacaaaacaaaactactattattacaataaaaaaaaaaattaaggtgattaaactctcttcctgcatttgctgtagcagaaatctcctattgacttttcatctatcacaacaagcaaaaagaaaatattagtataaatattctatttaattaagtgactttgcatgaatcatgaaattaaatcagaataatagaaaaatatataactaaaagaagaaaaaaaatgaaaaacatatatgtattataagctgttcccatgatttttcaaagtctctctcattaaacatctatataatctcttgtacttttaattttaagatggaaaaattcaaataaattatcttatgttatttttcttgattaaatgtgagaacccaaacaagaaaaacatgagatctaatagagtaattgaataaacaaaattaaatgtacataccaagtttgggagtgtgagtagctgtggtgatgatggaggtgacacaagcaagggcacatgaatagagataaggtgattttaagacagcatcattcatgcatttcaagccaagaacacccatacaaccatacatcacaggtggatatggtaaactcaaacaatcacagaagttattggctacacaaatcccaaaatcagcacttttcattaatgtaatcttcactgcttttgtagcatttacatggtcaagtattttgtccaccatttcttctttcacaaaatttgtacacttgagtcccttaaatatatttctaccaactgagaattttgatgaagaagaagaagaagaagaagctattggagaataattaggatccattctcattgatgatgatgatgtaatgggatttagtataagataaacaaacactactactaccactttcattgtcattatctctcaaaatattctcctctctatctctatagttgttatgtatattatgtatatatgactttgatttggttcttttgataatggttttatagtactagctagctagctagttttatatatggtctattaaaatgatttttttaatataaggttgttgttgttgtcactcatttcaaccaactaacaaagttcacatgttactaaaaagtaaaaacaaaataattaggccccacctctatacatagagcaagtactagttattttgtgaactata

SEQ ID NO: 60430 - DNA, 1451 bp, Cannabis sativa
tgatgtgttggcaaaagaggttggcaaatcaacgttggtattagaacttttgccaacacaaaatgaaaagcactggtaaaaataactttttcattacgcggtaaaagttagattttagccactgcaaatgtgcgctggtaaaactttgacctttttgccagcgcagtttgtgaaatacgctggtaaaagttacttttaccagcgcaataacaaactgtggtagtaaaagtgacattttcttgtagtgctcgtactccaaaagttgactctggagctcagctatgtgatcactatctttactcatattctttcttctagggcatggggtcttgaaagattgggtctggatgacgccacactccatccctttgacatgtccaacatactcatctatccccaaggttaacctgagtatgtaaatcatgtttctaaccatccacattattaaattttctaaataaaagttgtaaggctcatatcgataagactataacaaatgaatcaaataacctactaacatgaacaggattttaggaattctcaagatttagattgatctactaattgatcaacttttttatttgaattaggtccttatagtaaacagaaagtttgataaagacaagttagttcatatcagtcctatcatatataatctccattgtataaagtacatttaccaagatgtcaaactacatcagtaatccgaattaaaattgcttgcgccgaatgacgagcattagtaaattatactagcaactgttgattaaaaatttcatactttaatatgttgctgactattttatcatcatgcatgatcttaattctctctgttacaagagcataaactcatcaataaatgtggaatattctaatatttatatattctataaattattaataaaaaataatttaacaatcaaatataataaaattactttatttatttaaaaatcaaaatgtattttcataagatttctaatggaagtaactaagaagaaaataatcagtgaagacgcgctggtgatggaacttgttgcaagattgatagttaaaagcctgctgtgaaaatacttgaagagtcgtggagaccatgcaagaatttttaaaatgggcaaatgggttcatcaagctagaagaagttaagagaagagcagaaggatcaacagagggaaacaagaagacaaatgaatcctctgatgatgcaaacactcaaggatgatatgagaagaatgatgacacgaatggcaagcaaagttacaatgggccaaaagctggtggcaaaaatgggaacaagaaggctaagacaaaagacaagcctcctcgaggagttcttgcagtcacccatgaaatggtacctgttgggttttatgccctaaataaaactaatttcaatataatcaaatttacttattaataaagatcagaaatcatttttatgttgcatggtt

SEQ ID NO: 60431 - DNA, 1397 bp, Cannabis sativa
tgaataaaatagacgatggctgaaaaccgtcggggaaatagtatgggccacggtttaaaaccgtcacctatagtgttcactataggcgacagtttaaaactgtggcctatagtatacgtcacggtttaaaaccattgcctgtactataggccacggtttaaacggtgtcctataatactataggccacggttttaaactgtcacttatagtaaagtttttagtttaattttaaattttatatttttagcgacgatttttgcccgtcattgggttgtaaaaaaaagaaaaaaaaataaaaaaaaaatctgcttttttctcctgcattaatcaatttttactattttatatattgtcactaattaaagaggataaagtataaacataaattgaaaatgaacaaaaaattaaaatgcgtacacactatgtactcaaataacttaagcgttagttatatgaaagtaactagttatagtgtaaagtataaacaaaaacagaaaccgatcatcatcgtaatagctcttgtcgcactgcctgtgctcagacgtattcaatccactaatcacgcagaagatttatctcgtcatttgagtacgaattgctcttaccctgcaaaaaagaaaaaaattatatgctaattagtaaaagaccatgtactcttcaatcaacacaaaggactctatatctaaaagttaaattaaaaatatgcatcaattgttaattaacatgtttaattgagactaatcaattttctcaaattctttaacatatagcataacattatccaattaaataataatataccaagaatgaggagatcacttagagaaccaccgataaaagaggaaaactttgtcggaccaccgagaaaatcaatgaactcctaaaaaaataacattaacaatttaaaataaataataataataataataatagaaacctgaatttatgtatgggtcaatcaaagtatacaaaatataaaaaaagaattcaatgaaccaacaacaaaagtcaacatagaaactagaataaactgataaatatttcacaaatatgaaaacactaaaacaacactactagaatttatagtaagagaaccagacagcaaaaagaaattctacaatgaaacaaaagaaacttagaagcatagcatattattgaaaccatgtattgttgtcatgtattctgattcggtttgcgttttgaagtatgataaaataggatagtggaacaaaacaaacaagcagaactagaaattgttcttcaactcaaactctcttttttactattggtttactttgttgttttaatgatgaagatcataagtatgatgttgagccatccacatgttggtctccattctaattttattctgttttctttatcggattaataatac

SEQ ID NO: 60432 - DNA, 920 bp, Cannabis sativa
tattctataaatacattattttacattttacaactacaaacatataaattaattgttcaaaaactaattatcttattcttttaagtttaatattaataaaaaaaataacatattatttttatgtattattagtaactataatacatgcaaaaaaaaacttaataaattaatatatatataacggttggtttcgatttttttggtcggtttattacccaaaaaaaataaccgaccattcaatgaaggttttaaccattagcggtttttttttattttcggtttcgtcgatttcagttccaacggtgttcggttggtcggtttgaacgattttttcagttttctggattttatgctcactcctattaggggtattttcataattttgacttgagaatggtaaaatcataattttgatatttattgtgctaatggattatattattatatagtatgtttatactgtcttactgtaggtaatttttgacaagttagcacggtatagtcacaaacgggtattttggctcgaactgggtttggagtccaaacttatgaataatgtgatatggcattaatgtgtgatatatatgatggttttggaattatgtgtgattagagttgacttttatgcccttgaatgctaagtatgttgatttttggccttaaggcaagatggtcatttgaccttaacttagtaaagatgatatatttgacttatttctgaaatttaatgaaataaaccttattttttctagtttcatagactcccaccgcctctctactctctcttcttctccctttgaaaatttctttgattttgaggaagaattgttgcaaattgaagtagatcttagtgttagattcttgagcttagcttggaggggtaattgaagtactgatttcatttttatatagttgtaatt

SEQ ID NO: 60433 - DNA, 729 bp, Cannabis sativa
acataattatatataatttaatttcatttttcgtttaattaaatttttttttaatgtaaagtgattaattaattaaaaaaacaaattggagttattttgctttcacaaaaaaaaaaaatggatcagttatttttatttattcaatgtaagaaaataatagtaacacaattcaaaagtaaatattaaatgcactatattagtgataatgatttaaaagtaatagaaacaataaaatgaatgttataattataaagcaaagcttaaaattgtgaagtttattattgttattatttttttttaaaaaaaaaaagaaaaatttttaaaatgttgataattaaataaaactaataaaatcattgcataaattttgaagaagagaaaattaaaagtacacataattaaaggttcctattcttttgctttgtacattttttattttctctagctaggtctgtcctttttttcgttaataatttgtccttaatatttttgacaaagttgtagaaattagtggaaagtaagcaattaccaaaagacaaatataaaatgtattttattacttattagaatcatgcaaacttgattagatattatcatcaaacacaatatctattatgtacatccatataatcactatccactaaaaacttttcaacagattaggtggctggaaatgggtataaatttgcaagatgttattctatttttccttttcatcttagtgcccat

SEQ ID NO: 60434 - DNA, 1485 bp, Cannabis sativa
ctacttaaaagaagaggttaatttactaattataatagaaactggttttattaatactgtttattaatatttctttgattttttattataaccatttttataatatatttttcatgtttgttatttttatatttttgttgttaaaacttttattaaatgcagtgattgtggagtttttgtgattaagtttgctgatttgttcaccaatgggaagataaatgagattccacgaaatatggctgataagattgcgatttacagagacgatatgactgttagtttatttactcatgcttggaggaaacagattggtgggtatcagactgaagatgatgtttgagttagaaaggaaaagtcaacgaaactaaaggagaagggaaatgctaaaggcaaaggaaaagaagtttgagaagaggatgtggatcttctggagcagtctttttgtttattttttttttcttttagataactagttttattaatgaatatgatacttaactttaaatgtttttgtttcacttttgttattttagatgtgttatttcaaacacactatgttacagttattaatgaaaattgatgttatatcctaaaattagtttttatagagtagttttgtgttaaatttttcattttttaaaacctatttttgtaggtaatttattttttaggtaaaactagttttataatgttgtttattactttattagaaatttgtgaaagtagttttttttcactggttatgtattgtgggtattttttttgtttattaatttgattataactggttttttgttttgtttaatgttgtttgtaagatatggtgtgttttgcggggtactagtagacacatattattcaaatttcaaggtataaatattttgtaatttttaattatatgttcataaccagtttctttaattttattaatatttatagtaaatatgataattatatactatttatcttgatgaaatctaaaaattttattttttaaatgccttaatatcaaaacatctattttcctctattttcctctccaatcctctccaaaaaaaaaacaaataaaataaaataaaaaattcttttttcaaagtaattttttgaaatgtcataatagcaaagtaaccagtttgtagcttttgtaattgtaatttttgaaagctacttttttttttctattttaagtgcttgttctattacttattgttgctttgtgtccatcttctgtttcttctgattgatttgtttgcaaatttgtggattgttgcatgttcttcggttgtgttcaagctgtccacatcttgagcatttcattacaacttttggttctcctctagatctgattctttttttctaggtctccctgagatcttttttgtttttagtggcatcacaatcttctccaagctctcaggtagtctccattcactttcattaggtagaggatgtacggttgtatcatatgttgctctcatagttgat

SEQ ID NO: 60435 - DNA, 1888 bp, Cannabis sativa
caaattctaaccaacaacaaaaataaatttatacataaataaaagggcagccccattaacagtgtcagaaaaggaaataatcccagcaaagaattttccaccaccattttcatgaacaaaaacggaagagagaaacaaaagattgattttctttttttaattcaattttcgaaaactatctaccaatcagaatcagatattaatatcggccccacatgttttaaaatttcaaatttgaaaaatttgaaaatttaaaaatttgaatttcaaatttctaatcaatttttttttattattattattgaatcaaaatcatcaaattatgaaactttctttggcctgaagcattccgattagaacaaaatctcattacgattcattatttcaaatgataataatatatacacaatttctaaatcttagaaaacctaactattatcaaaaagaatacattttgttttcatatgcctgtcagaaaaactctatagtctatatacaacaaaacagggagagaatttcaaaatcaaaactcaaaaacctaagtacagtaaagtagactacctgttgtgagttgtgagtgaatgtaattggttatccagcaaccaatgagtgaaatggaattgctgctgctctccgatctccgatcaaaggaggttgaatgagttcgatctgtctccttaggtttgaatttgaaaaatcctttcttgacagaaccgaacagagattgattgtgcaatgattttggatgaaatccttatatatgtatttacttttgaccaatttttgtttcatattttaatttttaccttcatttttctactctttaaattatacccacttttataagttatattcccattatgtgcattaggaagtctaattttaataagttttgtgaggttatatttggtactttaatcataaaaaaggatatttatcgattaaaattattttagagttatatttagttaatgtgtaataaaaaatgatagttttcaacttatccctttactttttagttttgggtcttgggcttggtcttgggcttatataaatatccttctgttttggcctgctatcataattgggcttggtataccggataagttgagtaatacttcttttttctatgcattaattaaaaatacccttacattatatttcattaaaatctactcacttttatgagtgacttgtctaatatatccttatcttccacttaagtgtagcacatcatttacattaatataaggggtataataggaacatcatctgtaaaagtgagtatatcttaaaaaatatgataatgaagataaaaatcaaaacgaataaagtaaaaagggtatacaatgcaattttcacccttttgttttgggcctgatattaataaagaagaatttaagctttttgtgacttttacatggcaaatatgctacattagagaatctccaattagggatggaaatttggtgggtaataaacgggtaatgcacctcccaacctgtccctgtttgccatctatgctcccatccctgcccctgcctcgcttaatcctcgatgggttcgaggtagaggaatccctattaggcatgaggacctactcggtactcattaaaattaaaacaataataaaaaaaataatgtaaaacaaaaatgaaaaataagataatggctttaaaataaacaaacattctacctataagaaattgaaaatccaaaaaatcgttcaaaccgacctattgaacaccgttggagccgaaaccgacggaatgaaaacccaaaaaactgctaacggttgaaatcgccattgaacggtcggtttttttttgtaataaaccgaccaaaaaaatcgaaaccgaccattatacatatataataatttattaag

SEQ ID NO: 60436 - DNA, 2344 bp, Cannabis sativa
  modified_base (2308)..(2318): a, c, t, g, unknown or other
acaagttgtcactagtttagttttagtcacaataagtattgtgactaaaaatatatttggtcacaacaaaatgtgatttttgtgactataatacatttagtcacaacataagaatgatgattataattagtcacaactttttaatttttggtcacaaattgtgttgtgactaaaattaagatgttttgtggtgacaagaaaattacattaaagttcaagaaaataacattcaaacaacatcaaaaaatgacatacaaataacaaaaaaatcaacaataaattaacataagtacaacattaaaattcattaaaatactgtattttctgtaaataaaatcatacaaatcataaaaatgattaaaatttcttacaacccgtaattttgtaatttttttttgttatttttgtatatttgtaaaataatcccttactaattggattggattgaatgttgaggtctaattggatcggatcggacgatgattttttaaatccaataactaattagatttgatcgaatgaggagaaaaatattggattggatcgaatgcccaaccctaaaagtaccgagaaattttctctcttacaatcactttattagctaatattaaggagctactccccttattctcatatggttttaaggtgaaatattcttagacttataaagtgaactctctcttagtgatgggtgctgtaaggctcatatttaacaatatattatatattttagagctaggacaagaatatgtaaaaaatttatatgataatatttaatataattgacatgatttctgtaatattatttgccaaacattatacattatgaaatattttaatgactacaaggtttgacagagccaaatgacaatttctctttaacaacttaataatttaattataaatacgtgtatagtttgatactagctagttgagatcttatttataaatagaactacaaatgaagattacataaatcaactttaacaaagaatatatatatatatatattatattatatctaaccatgaatcgtgttgttgtgcttgtttctctcattattgcaagtattctaacgttgtcatcatcaaacgttaccaccaataataaacatagtcattttgtgttggttcatggggctggtcatggagcttggtgttggtacaaagtggctactctcttacaatccacaggtcacaaagtcacagcaatagatctcacagcctcaggaatcaaccctatccaagtcacccaagtcaacggttcattgcttgactatgctaagccgttgacggatttcatggcgtctctgccgtcagctgcggcggcggagaaggttgttttggtgggccacagtttgggtgggctcagcatatcccttgccatggagaggtttcctcataagatttcagctgcagtatttgtcactgctttgatgcctagtcctaatctcacctattctcaaatatttgaagaggtaattttttttttattaattattttaatattaaaaagaatatatttgctgtacaagagcaagtccaaagagacactataacatcaatatagtgtaaattctttctccaaggtaacaccaaatccttcaccaatttgttgtatatactacagtgcacggcatataccatctttttttttagaatctgaaagatttttttagtttaatttttttatagtcgtggacattacagttatttatgacatcctgtaaaattttgagaaattaaaaaaaaaatattaatacgccggaaacaagatttaaactctctgttgcacatatgactcttttatcttatacacatgtaaaatacattgtttgaatattgcattctatattatcaattattttaaatttctcaaaattttgcagaatgttttaaacagctataagatatacgactatgaaaagatgcttttaattgtagtgattttactaaattaatataatactaaaaataatattatattttatataaaaattaatataataataagaaatatttttttagtgtaaattttggtgttatcgttggagttgaaataatttttgacaccaaatttaatgatagtgtacaccaaatttggtgtatacgttagagatgctctaaatacttatactttgttgtacctaaatttttatataaatattttgatagccaaaattctaatattattcgttttgttgtactattaaatattatacatctatagagcaaattaaaaatcactagggctcgtttggaatgccgtattaggtcgtattgtattgtattgtattatatgaaattgnnnnnnnnnnnatatttttatataatactatgttaaa

SEQ ID NO: 60437 - DNA, 791 bp, Cannabis sativa
attctgatatttgtagtagtgtagaatctattgcccaagttaacctaggtgatgggcctagcgcccatattgacattttgtcaacctcctccatttccaatcaatttttctaagaaatcttctgggtatattctccgttttcacaaataagaaagatacaagtgttttcgggaatcaaacataaccatctagtggcaaaaagctagacccagtgcctaggttaacacttacattttgtcaacctgggctatttctagccattctgctcaaaaacatttctgggcatcttttttatttttagaaataacaaagatacaagtgttcttggggagccaaaatagggcactagcccccaaattgacatggacattaggccccgcgcctaggttgatgtgcaacttggtttgtatgtttttcgctccttaaacacaaattctactatgagcattcttcttattattgttagaaatgaggtaggagaccttgctttcaatctcaaatgtcgtagaagtatcaaaatgagcctcgagaagtcacccgagaagcacccagcgcctaggctgatagatagccttgtggattgggttctagttattagaatctaaatttgtcttgaccatccaactatttttttttgtataagacgagagctaatacttgtgataggaaaaattcatactttggtgtttcaccctttaacaaggtggaatatttgcaaaattggggagttttgagtatccccgattttaccaaaaagccacgtctccgagaactggtaaacaacttcacca

SEQ ID NO: 60438 - DNA, 1066 bp, Cannabis sativa
cttctatcatctacattacttgcccagtcagcatcagaaaagcccactagattcagtttgtcacagctactgagatgaagaccttgtgtgctagttcctttgagatatcttagaattctcttggcagcattccaatgtgaagttgtgggagctttgagaaattggcttagagaattcactgcatagctaatgtcaggccttgtgtgattcaaatactgtaatgctcctatgagacgtctgtagttagttgggttctccattggtttgccatctgtgagagataaggatttgccagttgctataggagtaggacaaggttttaagtgctgcatcttattcttttctaggagatcttcaatgtacttagtctgagtaaggtagagacctgtatcatctctagcaacttcaatgactaggaagaaatgcaatgccccaagatctttgagagtgaactgtttgttgagtttctcaatgaacctgttcaaattggggttattgttaccagtgacaataatgtcatcaacatagatcaacacaagaatgatgctttctttgctgatgtaaaagaacaaggatgtgtctgccttggagtttctgaaattccaggtcagcaatgtgtttttcagcttgtcaaaccaagctctaggagcttgtttgagcccatacagagatttcagaagtttgcaaacatgatcaggccttgtggaatcttcaaagccctcaggttgatacatataaacatcttcttcaagattcccattcagaaatgcattgtttatatctagttgcctgatgtcccaactctttgctgctgcaatacttagaacaattctaactgttgaagcttttacaacaggactaaatgtttctccatagtccaaaccagccctttgatggaaccccttagcaactagtcttgatttgtatctttgaaatgagccatctgcatttcttttgattccatgaacccacttacaaccaaccaaattgtttgcctctgacctgggaacaagtatccaagttttgtttcttttgagagctgtgatttcatcattcatagctccat

SEQ ID NO: 60439 - DNA, 644 bp, Cannabis sativa
  modified_base (55)..(66): a, c, t, g, unknown or other
ctgtagttgtttagtattttaaatgattattaaagtatgttaggaagcatattannnnnnnnnnnnttattttaagtgtgctgcctttaagtccataagagcggtataaattcttatgatcgctgtctaaccaacctggcttattggttcgcaggctaagtcctataaaatgagtgcccagtgaaatacaaaaagtcagggtaacatggttgagaccggaggcggtcagggaaatcaacatcctagaatccacgtggtcgcagccttggccgtggcagagctcagggtggtcgtcctgtaaatcctcctcaagctcctctgaattaggagcagaggtttgtggaaatgcaagatcgaatccgtcaacaagatgaataaattcagagattaaggcagcatggtcttcctgccgtgcctcctcaacaagctcaggccgttgcagctgcagtggtgctagctgtaaagaccgcttagtttagtttggaaattagcagttatttaagatttaatggtgataattatttatagatatttaaataattatttatgttgttatttttgaattctgaatgcatttttatgtcatatagtgaaatttcataattttgcattttcggtgtccggcaacatggaatgcggtgtat

SEQ ID NO: 60440 - DNA, 935 bp, Cannabis sativa
aatattgtaatgaaagctttttttaaaagttactttatgtttatctcttctctcgatttttaaaaatattgtaatgaaagcttttttttttaaataattattttaagatgtaatatattttattattgttgtcgaaataaaattactatttagttacttatagtacaaatgagatattaattggttaattttttttaaagaaattttattattgttaattaactcaaaatcatttttagaattggtttaattgatttatgttacttaagaacgtaatgttgtggtggatatttgattttaaagctgtttactcagaaattgactcttttgatgtggacatcaatatttgacatgtagcaagatgaaaatatttacggagttgagtagtcccgagtcatagcaatcaacctagaaggggtccctagccctgcgaccaggttgactcagggaactatggaatgagtatttgtatctcgtcaagttgtttccaactcactatccttcagtattttgaaccaagaagtcaagaaatgcaaagagtctaaacgatctcctggaagtcaacctgggtgcccaacgccaaggttgacatcctaactaggattttagttttctagtccatcttagtgcaaatgacacaaactttgtacttagacttcaataagacatgccacgaacatgttagcggtactagaataagatacaagtgctttcgggaaacaaacggagccatctacaagtcaaaatcgagacccagcacccaggttgacttggtgctaggtcttaatgcccaagttgacattttgtcagcttgggccagttccaagtatttattttttccaaaaagtgttttgggcacttttcttgttgttagaaataatgaagatacaagtgttcttagggagcaaatgagaatatctgagggctaaaatagg

SEQ ID NO: 60441 - DNA, 2014 bp, Cannabis sativa
aggtaagggcagggctaaagctgaggagccgtgagagcgagcaggtgaagattgtacatgtcagggcagttaggcctggagcgtacgatctttgtgacatcgaggcttttgctgtatagttcctgggcgaaaaacttttatttatgtaaatagtaaacttttaaaaagtattttataaacgggatcccaaaattttatatatgtaatactttaagtttctaactaaataagcaaattttaattattcatgattttcaataacctcgttgattagcaatgagctgcaaagtacgtttaaaatcacgctaacacgcctatgttagttagggtgttacataggtgttctattgattaagtaggttacagtagcaacacaatctccccaatgcactaaaggtatgtaagactgcaaaagtaaagccctagcaacattgagtaaatgctggtgctttctctcaagaacaaagttttgttgaggtcttcgcacacatgagtgataatgcataattccatgttcattcaagtctttgaactgtaattcttttgcattaccagacctcataccgttaatggtcttaccaaactgattttgaacaagcttgatgaactggggtatagcatattgagcatcaaacttttgtttgatgagtttgatccatgtgtatctggaacagtcatcaacaatagtgatgaaatatctatacccttcaattgtgctagtgttataaggaccccagatgtcaacatgaatgagataaaaatattttttggcaatattatgatttgaaatgaaaggaagttttctttgttttgcataataacaaaatggaacaacgaaatagggaattagaatcaacatgaaatttcaaagctttattcaaagggtgaatttttacacaaggtggatggcccattctatagtgccaaactgtttcattagaaatctttgagtgtgaaatagatagagaagtagaagcaaattttttattacagctttgatcacaacccaggtagtacaagttgtcaaactttctacccatcccaatcaccttggtcttggaagtgtcctggatgacaaaactttcatcagaaaataagaaggtgcaattagttgtggctgttaaagagttgacagacaacagattacacttaaaagtaggcacatataagacattctcaagagtaagttcaggatttaaaatgactgttcctatgcaggaaacttcagtatgtaaaccattaggcaaaagaacagtttttaaattggaattgacataaatatttttgaataaaaggaaatcatgacacacatgatatgttgctcctgggtcaattatccattgagaattatgaacaaaaaatttcttaccagagaagtgagagactacaggttgatcttcagaaacattcagttgttttcttagcaagaatggccataagcttctgacattgaaaacttgacaagctagagatgaggtctctctccattaaggactcctctggttttccttcatcagctcctgaaaaatttacacctgttggcttcccagtatttcctttagcatcacgattgggaaacttgccatggtatttatgtccaagaggatatccttttaacttgtaacatctctcaatccgaatgatcattcattccacaatgggtacaattgtaattagatctaaaaggttgaacaactccaacaaactgtccattatttcctgatgtgcctttcagtctcagtagaagtattacatccattagttaaactcctttgcctttcttcctgaaccacaacagcgtaagctttattcacacttggaaggggatcacgcatcaaaatctaaacctaaccaagctgtagaaatcatttaatccaaccaaaaattcgagtaatcgatcctcttcttgatactcttggatcaccttcattgcattacaagaacaaacaggttgtggtctatactcccttatttgatcccataatgctttcaattgagtatagtatgtagtaac

SEQ ID NO: 60442 - DNA, 1189 bp, Cannabis sativa
tttttttttttcttaatttagacaaaaacactttttataaataaagtgattaagtcacctctattttatagatatattttcattattattaaaactgaaaataacaaatataattaatttgtaatagtaattttacagtaataaattgaagaacattgcacatataaattaaaattttgatatcaaatatttgttacttgagttttagaaatatttttggtataattacttaaagttttgagtttgtaagtgacataaattcaataattttttatattgacataaataatcaatgttaataaaactataattttcgtccaattccgtcaataaaaactcgattaattagtgtcttaaattcgtaaccacacttagtttttcaatttgttgaaagagtggttggaagtaacttacactacacgttttcatcctgacacaatgatttcgaatctggaccttacatgtatccatttaaaacaccaacaaaattaataatgaaaaaattgaaaattggatgaaaattaaagttttattaatatcagtggtatttatgctgctaagaaaaaaatcattaaatatatgcaagttacaaacttgtaaatttagttattgatgtcgcatatacctctaaattttaatatattttggcccccttaacatttaaccctagctccgcccctagtgaggaccatagacctatataattaagctctcaataaattctctatcttattaattcttcttgactccactatagatttgcaatcgcactcctgattacatagaatgcactattcaccaagaatagatatgctataaattatctattgttttaatttaaataatcaaagatcttctatatatgatctacatcgagtaagaataaatttgctattttacccctcaatgtattttatccttaaaacacttagcttctaataaataatattatagtaaactaatataattactgaaataataactcttctatttacgcctgttaagccaagctctaagtaaattatcatttcactttgagatagttatagaagctatagactccatatctacgattagcgctccaactcaaatacattaccatgttctcaagatgtaagtattgggccgatccatttggtgagctttaacaaacaaatcaaagaacacatgtaatacatttaagccagaa

SEQ ID NO: 60443 - DNA, 1007 bp, Cannabis sativa
tacctacagaagttttagaattataacttagttattattaccgccaaaaattaaacttaggtatttatttgcaactgtgagttaaacttaagtatttatgctgcaaattactcaatgttaattcgaccaaaattaattatgaaccgaaacaactaaatttggaatcgtcgagcaactattccactcaggttggccggcacacctaaatttggaagtgaggtaagattagtattatggttgaacatatgtatacatgtttagcatacatgttagctaccgtcagaataggcaaatctatagccattagattagcatatcagggcattagtaaggtatacatagagtcgcaccgagatgccaacaggcatatgctaggctatcaaatagtatgaaaaactgctaccacatcaatacgactagagtactgagtataggctggattcgcagttattctacttttttggatgacgacctataggtgaatttagatgacaattacgtttataataagtaaggagagttgttaaagaggatatatgtgtttgatcacatctctctcaaatgagttaatttgtaaggtgcaagacaccattattagtgaggtgcaagacacacttattgatgagattaaactctatattatcctctgtattccaccattgtttaagatggaataaaactaggccgaagagcaattattttgggagattagtcaccacaaaaagagtgatgaactttgttatattttgtctctgtttcatttagcttattctgcatttattttctagtttatgtaattgtttgattcaactattatagtactttacttcttattttattgatgaaccttgttaaattttgtctctatttcattttagcttatttcgcatttataaactaatttatgtaattgtttgattcagttattatagtactttagttcttattttatttgatgcttaatagtaggggtgttcattggatcacatccaatggatttggaccca

SEQ ID NO: 60444 - DNA, 1218 bp, Cannabis sativa
ttggtcttttctttcaaatcggctgaagacttgaaccgtattttaaataaaagtccttggttccttaattatggaactctaattcttgaaagaatggtgaatctgccctgcgattgggaacaagaactgctccgatttccaattattgggagagttctccacctaccctcctgctcgattacaaaaggcaacttggtcagattagcaactatggctggtgaagttatagaggtccaatcccccgacatcccgaaaatcgcaactaaaggttatttcaaattcaaagtttggtgtgatataacgaaacctctgtttacagggctcttatttcctacagaaggcagaaagatatggcttcccttcaggtatgatcgcctcccctttatgtgctttaattgtggttttttggggcatatactcgggtttgtgcagagacgcccaagatgtttaacgatggccttggaaactggaaaccgagttatggaccatggttaaaggttgatgacaaacgtgatactaaaactcagaagaatgctgctatggatccccctataaagaccacatgtggtactggttcttttgttcaagagtcccccatacctacggtcttgtctcaagatcaaggtcagggaggttatcccattcactcttcgacttcaaagcatatgttagaactcagttcgggtttggcttgtactgatacaaataagactgctttgttcgagaaggaagtggaaggaatgaaggcaaaaatacagggtcatagtgagactatgaatgtcaacagtaagagaatgggcttatggggtgaagacagttcaaatcatcaaagagctacagctatggacatggaggttggactcaattctggtctgggaaaggaaagcacagaggcttatatgcataatcttaatttgatagatgtccctataacttatgcagataaattgggtaatgacactaaggtagaaggacctttaaaacgaaggaaggtgaccccaaaaagaatcaagaacaaaggaaaggagggcatgatcgagaaaaagttaaaggaggtggctaaagaagatgggggtaattcatcaaggggaatttctagttttgtggatttgaaccttgacactacaatggaaacggcaaacctagatgttctaggtcgccgagcgccatgattgccatgttttggaatgtccaaggccttgggaatccttggacatt

SEQ ID NO: 60445 - DNA, 935 bp, Cannabis sativa
ttaaaattcaaactaattttaaaaatatcaaggttttatttaaattactttatcaaattaaattaaatatctaataagataaatgatttaaaaataacaattagatatttttaatatcatgttctaatcttataatttaataaaattaaaataacaaaataaacaaattttaaaataaatatggttagacaattagtattttaagaataaaataataaacaaataataattatccaaattatatgtcaaaatatctcacattaagctttttttaaattcctacaaaaatatctaggttatttaaatatttataacataaatatcatttttctaacttatactttataaacaatttaatatttcaccaaataactaatttatgaatttgaaatgttatggttaggatgtatataaaattatctaggttaatttcaaatttattaattatttaattcatcttataagataattttaacataatatttcaaattaaaaggttaatgctatctttgaatttaaaatatacccaatattaaaatatctaactttgtaataaaataatatataaatattaaaaaattaataaaattttaaaatctgaccataattaaaaatatatataaaaaaaattaaatttaaacctcaaaatatcaaaaattaataataatctattaaataattaaatattattaatttaaaaattgacatttaagtttaaatgataaaaataatattttatattgatatttgttgtttgaaaagcaaaaaatttgaaattggtggaaaatatccccccaaaagttgaattttggtgcaaagcacctttgctgcccacaaccaggctgcaagcagccatgatgcgtgcgtgaagatggactttgcaaggtcctttgtgcagcaaaacacggagtgtgcagcctctgtgtgcacgagac

SEQ ID NO: 60446 - DNA, 1493 bp, Cannabis sativa
gtaatttttcttttatttccagaagctgtaatgtggctaaatgggcgtttgcaaacaattttaacggtatggtagaagtatctactatcccgattgatatcctttgtaatgaccatgaggtctgacttttattttaattataaaaacgcctttattcaaaaaaaaaaagttatcttctcttcctttgaattttgtgatttaaagtttaggtgttcatgcaattgttgaagataggtttttgtacgtttaaattgttgttgattctatttttagaggttatattgaggatagttgagctgctttgaggttggttaggagcttgttgtgatgtttggacaaagttgagcctaagagctcaaactttgttcttccatggtgattttagtttcaaaggctattacctagttttattgcatgatttaagttctttatcgattgtttaggtactctaaaaggtttggtacgaattgggattgtttggtgaggtgtgtgaagtttttagtggttcctgcactgaactggtcgaccggtttagatttgcacttggaaccggttgactggttcccctggtagcacgcttaaaaacaagttttccggttgggatctgatttaccggttatggcagtttagggcaccctagattttcctattgtagtgatatttagggtattgccatgttattcatcgatagggaaatttttagttttgatttgaagtccttgaaaagtgatttagcgtgtcactcatcagttttacgaatattgtgacttaggggcctgtaaatcgtcaagcagcagtttcactcaggttgaccggcacacctaaattcagaattgagataagattagtataattatatgcaatatgtgatttcatgtttagtatgtatttttatgaatgcctgttagattacattgaaatagtagtattagtatacatagagttatattggataccaatgaatgttgtttggcataagtactaattgacgctatcacaacggtacgactagagtaccaagtatatgctgatattatggtcaatgtatgaacgttctagactcagtatgcatgggacgcaagatagggttttgattgggtgtatgtgcacctaattgtaattcgatttatgttacttatgctgttcttactgagtctttcgactcacaattattgttttcatgtgtaggtaaggacaaagctaaggctgaacagcagtgagtgggagcagatgaagattgtttatgtcggggtggttagacctagagcgtacgatctttgggacagcatgttatattttgattagtcgctaggtgataacttttatatcaaacatttttgtattatagctgtaaatattttgagtacaggatcacaacttatataaaagttatttactttcaagttagagataattaagtaaagttttaattaatcacgatttttaactaatctgttgattagcaatgaattgcacagttaatataaaatcac

SEQ ID NO: 60447 - DNA, 1207 bp, Cannabis sativa
gagtgtggatatcgtgatctgatccaatgccatggtgaacacaagaagaactcctgttgcaccatctgcatctttaggtctccctcaagacccatagattgcaaatccaggcactcgggttccagtcacacttgtgatccccatgaatactgtggatatggtgaatctcgtcatcacaataggcgtaacaagtttggccaccacagctggccaacttgacgtgagcatcccggtggatccaagtggcaggcccatgcctccaactccttggcctgtctctctagcataaaatcggagttgagatccggttgttattctcgaggggtgcccctaaagattcttccttcagtgagaggcaactgaggaaggtccacccttagaggttaaggcctgccacttggatcctccgggatgcttgttttagtctggccactatagagtcctgccaaataatcctggccgtccatagacctataggggaggtctggatgcccaagctgtgcaggatctggcggctcaaggtgtgcaagatgtggccgcctaaggtgtgtaggatcttgtaggtgaaagcctgcaggacctggcaggacaaggattgcaagatgtggtagaccaaggtctgcaaaacttggtaggtcactatagctccaccaagaggaggccagactcatggtgcctgttgtggtgataggatttaccatatctgtatgttcatcgggattccagttgtgactggaatctgactatctagacctacaatctgtgggtcttgagggagacccaaagatgcagttggtaggagttcttctcgtgttaacaatggcgtttaatcagatacgatatccacactctcaatgaaagtaccaaactattgacctcaaaaaatgataaaccgatagcggagttgtatggatttgatgcttgccacgtgttacgcaaacaagaatgaaaattaataaacataaagatttgtatagggtaaataatactctagggagacttggctgtctcaaaaagttaggaaagagattttgtaactgtctttcattcatcaataataccaaactttattcttcttctctatggcttggctatttcatgatttgagcttatagggaggtgattgtgtgtgcatcaaaatcttagctctatcaaccccttacgagggtgaggccaatagctatgacaatgattgtggatggaagac

SEQ ID NO: 60448 - DNA, 1307 bp, Cannabis sativa
aaaaaaacatagtacaaaagatcattttaaaaaataatagaaaaaagaagatcattcataaaaagtaaaaactaataaaagaatagaaaaaaaatgatcattgttatcaatgacctaattaaagaatgctgaggtataagattcctatagctgtcacatggtctataagatggtccaaaaagcctgaagatgtaggaaagaatttgcattgcgtaatttttttagttctgcattaaaaaataaaaaaaaataacaaataaataaaaaaaaaattcaattaaatgaaaatataaaaaaaaagacaaaaaaaataaaataaaataaaaatatcacaatagtaaaaataaataaataattaaaaagaaaagaaatgacaaaggacaaaaacaagtctttttttatttttttgtgaacatctattcttctattgatgttatagatatatacatggaaaatgtatagttatttaaaaaaataataaaaatatatataatgattgttaggttgtttttagtattatttttaggtcaatttttagtgtgtttttaatttagctctactcttgtttggagcaattttattttttttatcatttatttttacagatttaaaataaaagaagattagaaaatatcaaaagaataagatggaaaaaaagataaaaaaaatctcacaaaaagatgatatataaaatagagaatattgtgcaagaaaataaaatttaaacttcaagcctaaatttgactatgttctgattagattttggaaaagtcaaaccctataaaaagttctagatatctcttttatcttttgagaacatcttgaatcgtccaattctgagcaatatcgagagatttattgctaaaatactatcagtcgacgcagtagaaaactcactgccccttctaatcctaagcagaataggttttctaatcctaagcagaataggattttcagcatgtgcatttttctatctttttagtcccttaatggctatataaggactgagcttcagttgatttcgtcaagaaattcggaaggaaataaacagtagaatacggagtacgaatttgatagatcaactgcattaatactggggacattcttcagaggatttttagcattcttttcttctcttttcttaagttaatatgtgtgattatgcttccataaacatgagtagctaaacacttaattattgtttagatggatattgctgacattattttatggttttaatataatttattttccctcagtttctacgtattctatttcattcctacttaattatttttaattgcctg

SEQ ID NO: 60449 - DNA, 811 bp, Cannabis sativa
  modified_base (59)..(60): a, c, t, g, unknown or other
tttaattgagaattaaaattttaaaaacaaaagaaaattacttttaatatttttttaannagtttttttttcttaatcaatattttggactccgactaggttcagacctaaatcctcaccacagtcctggcactgaacccggcctctgacccgaacccgaattcgaccccgaacctagattcgacttaaataaaataaaaaaaatgaaaatgaactttacagaacacattttttgttttctgttttttcaaattaaaaaaacaaatgtagttacagaacacatttttgtttttcaaaaacaaaatttttcaaattataaaaatttgactttcattttgtgattaaaaaattataaaacaaaaatgttaccaaacaacaccttaatttagcaaacaaagttagcacataaggtagcttccctaagagtttaacgtacaattaaaagtgtgtagagacaagagtattgttattaaatagaaatgtacttaacattatatgtgcatattaatatcttaagaatatttagtttaattttttataataattattaaattataaaatatataacacctcatatatatacttaataacatgacactaggtcatgatagtactgaataacacaagtaacattagcatatttggtagacataagcacaactttaaaactactgaaattaaaccaaagagatcaccaatttcaaaacatatcaatagtcctgcagtcaagtagaggaatgggataatgtttgtgtaacaccctactagcataggcgtattacgtgatatttaaacatactgtgcagctcgt

SEQ ID NO: 60450 - DNA, 791 bp, Cannabis sativa
aaaaaaaaaaaaaatcaatcatttattgtttttaatgtaaataaaatatcaattagtaatttttttattaaaaaatttatttcaaaattttacacatgtataaataataaataactatttttttttaccaataaagaaaaacttcattaatcaacaagagcaaatacaaactattacctcaagaaaccaacctggggaaaccagacacacaaaagattcaactacctgttacataagctagtcaggtagtcttttttctgtgtagacattgtccttttatttataatttgccatctataatttaaggtactctttacatcattacaatatatctttaatggatctaggatagccattaaaaatatatatgagttaggttatttttagaattatttttagaataagtttagtatatttttaatttagtttcaattgtgtttggaaaaattttacgcttgttatcttttatttttacagatttaaaatagaagaagattaaaaaatatcaaaagaataagatgaaaaaaaatgtaaaagaatctcacaaaaagatgatatataaaatagagaaaattgtgcatgaaataaaactgaaacttcaactctaaatttgactaggatctgatgatattttggagaaagtcaaaatattaaagttctagatccctattttatctttacaaaacttcttgaatcgtccaattttgagcaatatcgagagagttatggccaaaatactatcaatcgacgcagcataaaactcaccaccccatctaatcctaagcagaata

SEQ ID NO: 60451 - DNA, 917 bp, Cannabis sativa
  modified_base (676)..(683): a, c, t, g, unknown or other
ttattgcaaaagtttaaattctgcgctattttgattagtaatcccgtttaggggattagagtttcgtaaataacttgggtagcatgtctaattatttagggcgttacatatacatttattacacataatattaatttattatatttagaaaaatgtactctataacaaaattcattttcataaaaaataatgaaattcacattaataacaatattgtttttgtttttaaattttacacaaaatatctaaaattgtttttatttttttgtcgattttttttttttgcaattttttttacttgtattaaggtgaaaaagaattttctgttttgagaataaattcttgttatacgtgtaaaagaaaatttaaatatatatgtatatatatattaaaaacaatttataaaaaattatttcttaattttttttataatatagtatgtacttataattttggataattttttataaagtgcaaataaaattttccaaaaaataataaaacgaaaatgactataatagaaattaaaactgttaataacattcaaaaaggcagctaagtgtaagatttgataaaaggaaatgatccaaacaaaaaattaacgaaattcttactataaaatgaaattttaatatatatatatactagtaaaaaactacgtgcgacgcacgtatannnnnnnntatgctagttgttttctatgttatttataagtgatataattaaaaattaaagaaaaaatattatttgttattaggtgagattattattatgtgtataggaagaaatcacaaattaattaatcttataatcttaactttaatcaaataggattatagacatatgaacaataaataatcacgtaaaaattaaaaataattatttgaagaaagaattcaatatacacagttatatat

SEQ ID NO: 60452 - DNA, 696 bp, Cannabis sativa
aaaataaataatttaaaattgacaaattttagagagtcaactcattatctttataatttgcattttacatataaggagtattgaaaaataaaaatccaaaatctaataagtaaaataaatttagagaaatagtttaaacaataaatatatcgtcaaatatacaaaacaataaaatctctcatatatgtatatatatttatatgtatgagattagttattaagtaaatatgttacagcaactgggcttccgatttacttgcgctgcatctgggatcaaactagaaaactcccaagattaatacaccaaagccggttctgcattggcaacctcctccaaaggattttttttcttataaataatgatgcttctctggtggggggtcagcctgggtacagtctaagtgctgtgataagatattcggagggatcgttagtggtggtggaagttgaattcactccttgttgcatctcggtcctgctggcaaaagcggctgccattttgcttggccttcaattagctctccgttggtctatcttcaaagctaaagtgggctttgatagtcacaccattatccaagcttttcgacagaatgctaataaccatacggattggggacaattggtgcagaaagctattcacatgtgagattcatttcagtgtttagattttttatttgttgctagaaattgtaataa

SEQ ID NO: 60453 - DNA, 4181 bp, Cannabis sativa
  modified_base (27)..(41): a, c, t, g, unknown or other
tatgatattaaaaaaaattaaaaactnnnnnnnnnnnnnnntacgtgacttggcacgtaacatctatctagtacaataaaatatgtaaatcttattttaggtatcgtaaactgcttgaatttttttaaaaaattaacatgtaattttaaataaatataacatacataaaaaaaatatataaaaagtttttagggtgtaaacttaaatttattatagacttatcctatattttattgtagtaaaatttaacaactaaactaattgagtagtaaaatttgttacatttacaaattacaaaacaatgatgaccattacaataaagttaagcagtcaaaaataatttctgattctctctactgtctactactaatgtaatgttgtttatacgcacatgcatatatgtgtacgttgatgaaacttccaaaattagaagaagctttcatatccataaataatataaaatagtactgtatattatcaattctttaatggaaacataaaataatttaaacacttagtcaagggtctgaaaacaactggtagaacagaagaaaactttcattttttctttggaatatgagactatttataaatctaacgaaacatatcaaaccaaaatctcctcaaatatccaactagaacaaatcaaagtagtactactgggacaaatatagttactgggaataaaaagtctttaattttgcagaatctaattcagaataatcatacatgactaagaaactgtacgtacgacggtacgaattcaacgtgacttgcgtgtatatctataggaaataaacacaatataattatccaaactagttaattcaatactaaaaaggagaattaaccaatgtacattaagttacacttttttttttcttcgttttttttttgttttttttttaaacttagattgcgttttgagttgttggaattgcgatgtaaattgcaaactaagttgggttgcaatttgtctctggcaagaattcatgtaaattaaagaaaattaagaatgaaagattttcagaattctctattgatacgacatgctgctttttcgattcatttctttcaggatcagtcggggtcttacaaactctattgataatataaatgaatccgttgcttcatgcaaatgtgtaaaaaatgctagccgcacttaaaggtcgagtactctgccatatttgagttagcaacccgaattaaaataattcaaatgtacagatacaatcagaatcctaacaaaaataaaaaaatttataattaattatgcacataataaaaataaagatatttgtagacctactcttgtctcttatgttattcattattctattttaatcattttaatcaaaataaaaaaaaaaaaaaacttcttgtattacatatcatagtaaattcaatcaactttttatttcttattttttaaatgaaataaaatctatagtatagagataaatagattcatttattgcgtaagttatgattgaagcatttactgtaaagtacgaatatttataatttattcttactaattttactgtatgaaaaaaaaattgtaaatgaacaaacccctaataaaaaaagctaataaaagtatattaaagggaatactcgcctctggtatttttttagtgtagtgtggtgatgttataattgactaatattttagaaatattgagttcgaaatcgatatatttctattttttttttgcatcctgactttatttttcatatttttttttttttgtaattataatagttatgtccttaatttttttataaattttaaataataaaaaaaattaagtagattattacaaatgtacacatatagcggaatgatctcaaaaagaataaatatatagcggaatgttttgacaatatgtttctagccacagaaaacacagtagtattattacaaatatacgaatattgtccttataatatcatgtaaaactttaatgtgtgcgttaatattattggttgtttcacactgatataagttgaaatttagaaaatattaattgattgaatttctcagctcaaattatgttgtgatagtattgtcttttatacaattctcaattacaatcaatcaatactttaatataaagagcaaagaatcaaatagctgtggtggtatgctataaaggatagtgcttgtttccttgggtagaggagaaaaaaatgtcgagacaaaaaaacaaaattatccaaatgtcatttccttaaatattctttatctaaattttcactacctacattatatattaattttttgttttattataaaatcacacatgcagttaaataatatttcgcaaattgaaagaaaactcaaatttagataatatgaaaacaaaacaatattatatttgtaaaaaaaaaaaaaaaaaatccttctcattcattcattggttaattcatatgaaactaaactctttttagtttcttattaattgacacagatatgagctaaaaattcttcttatagattaaagtaccaaaaaaaaaaaaatcaaagtgattatgctaattctgcttatagcagtttttgttcagattatgattcaagttatataagctatctaagcttaattcagtagtgtaagggaaaaaaaaaactagtcaatacatcggcactagtaaatgaacttatagatacaactaaaaactagttatcttcattcatttaaacataattttaataaataattcaagacaaaataaaaactagttaagtgaagaatttaggttgaacaaccttaataataccaagacaataaagacaggtaatttgttttgggtttcacggctttgacaaatgccttaaaatttagtttttcagtaaatatataattacaagatattacagagattacagagattgttgaagtttgaagtttgtgtaagagccgacattgatgaaacgacagaatgacttaacataaatgcagactttaattaatccattaaatttcagagtattgagaatgagaaatgctaaagggtgcctagcaccttcctatgtgtcagtattgctattggtccaattaagtattgggtcccacgtagtttaatataatagattttaaagagtatcgctagccaatcgcaacgtgacatgtcaaaaaagtactaggcaccattggtgcctaataacaatgctcattcagaataggggcttctgacaaaaagaaaatagtgagaatgacgattgagttacacgatttaatgagagaacgacgattgagaaataagggaaagatagtagggattcaattgtactttgaagcataagataagtccatgtggtatctcatatttcttcttcttcttatttttatgacaaatcttgttattttgtttgaaaaataatttacacatacaaactaaaagtctaaatcgtttaaaaaattttcaagtattatttatgtattataaataatactttagttgagtttctttcattaatttcactattacaaacaaaagcctttaattccagtttttaagactttttatctcgatttcgctaaaataaaaactggaatatatactagtgggataaaatatttttgaaaatctaacataaaatggggactttttatccccgttatgacataaaaattaagataaaaagagacttttaatccatgttattacataagtttttatgaaataaccaggattaaaagttaaaattataataaaaaaataaaatccaaaaaaaattatattattccttgaaccaatttttataatcagattccaaaaatttatatcaaaatgtacaaattaatacatcatcaagggttcacagcataaagaaaaactatcaatgaccaccaataatgaagcttcgtgcaccacgaaacgccaagaacctagaagcaccatgactgacgaatggccatagatcaactctgtcaatctgagaaaagaaagaaggagagagatccagaatgatgactgagaatcagagtttcagcaaaaaaaaaataagaacaagatgaaataatacttggagattttggagggtatggggctctgatttgccctccgttgggtcatttgtggctggagaaaggtggctggtcgggctggtccttcatgcggcggaagagagagagagagagagagagagagagagagagagagagagagagagagag

SEQ ID NO: 60454 - DNA, 1035 bp, Cannabis sativa
atgaataaggcactcttagcgaagttggcatggcaatttgtctccaaggaggacagaccgtgggtgacctgtttctccaacaaatattgcagaaaagattcattttggagtgtcaacactcgagacagagactcagccttttggaggggtattttgaatactagagatattatctgcaaaggtagtatgactctagtgggcaaaggtgattcggtggatatatggaagcaaccatggatcccatggctgtcctatgaggattttactgaccttatgaacagagtgcagccccggttcccattcatttcttctttggctgatgtgtctaatcctgatggaagttggaacatggaccttctccaagatatgtttggagaaaggctaggaactagaattggcaacatcactcgacttcctttcggcacaaatgatactatcgtgtggaaggaggcgagtgacggaaggtttactgttaaaagaggatacgaagccaatcttggagacagtcattgcgatgatggaaagctgtggaaaaaggtttgggggaaagagatccattttagacattcagtgatgatttggagagtagttatgggatgcattcctactagagatagacttagtttcattacagaaaaaaattgccccctgtgtgatggtgcttgtgaatcggcattgcatattttttgggagtgtcattgcgcaagagcgttatggttcagcagtccattcccaatctgtggtgagaatgggagtgcaacctcggtaaaggagtggttagtttgggctctagagcgaattccaattggagctaaatgatcaatttctatggttcacggggtgtttgtttgaaggtatatggaaggcaagaaatggcctactctttaaagggaagctagttgacattgctacggtaagagaatcaatcttgagaagatataatgagtatcttttgctggcaactacaaaagaaatcacagagataaagagagtggcgatttgttcttcggttaggaatggaagtggctgggataa

SEQ ID NO: 60455 - DNA, 1233 bp, Cannabis sativa
atttatatgtacgccaatatcaaagtaaaactctagcctagattgatttataaaatttacttttttcttagtttttttcttttttattgctttttagccaaaaaaaaaatcttatttttatatattttcagtattataattatatatttacttttatcaattatgtttaaaaaagtattaaaaaaattatattaaaacaagtacatagtttattgaagctaaaatcatcactaaatataagctcatataattatttttactatcatctactaataagtaaaatttataagaaaaataaaataataattaataaaaagttataaaaaaaataacaacacaaaaaagattagtacaatatgtatgctcttatagttttctacactattacatatttactaataaataaatatgaaaaaaatattaaaaaagaagcaaaaaaattgaaaaaaaaaaaacagaaaaaagatggtaaaaaatgtagaaaagacttaaaaaaatatagtttaaaaaagaaaattgagtaaaaaaatgagagatcttttgagaaaaaagaataaaaaaagagattttaaaaaaaataataacattaatgatgggtacaaacaaaacaagatactcaactccaaatatgacaaaaaaaacctacaaattactaagaatcttatttagtttgagaatataaagagcacattataggaaaatcttacctaagcggtgcgcaacacgtaaaaaaaaataacaaatattgcatttttatttacttttttttccacttataaatataattaatcatttttacattttatttttatatttaatagaattttatatacttttaataaaaaaaaattaatactttcgttgattattttatacctatctatcaaaaaattaattaattctatcctaaatgcattggaacactattatagaattttggccaaatataaaattgactcattttttttagctcaaattaatcatcatccattggagatgacaagaaaaataccaagggaagtgctaaacatcatatatggtggcataccgttattactgcatttcaatatcaagtctcacaaattttaatttagtgaataatatgagaaactaccaactaatattaagtgtcatatttgtaagtgttggacatcttaatgtgttaaataataatattctattaataataaaaaaaataattcataaaaaaaaatattatacataaaaagccca

SEQ ID NO: 60456 - DNA, 832 bp, Cannabis sativa
gttatgaaaatctaaaaaaaaaaacacatggattacataaaaatttattaaatttcttttttaaatttgacacacctaaattactttctgagttagtctgtattctttccactataagtcaatacatatctacagagattaaataaaaaaaataaaaaagtgtacgttttttttcttgaaacaaaaatgcatacgttagaataattagttttttattatatttttttaaaaggtatgtattaatgacaatatgcataatatataaatcttggctaattaaaatttttatcccctgaacgaactttgacatgtatcaaatcatgcaggtggaacttttaaggtcattaaaaatgccccctaaacttatataaatatatatattatgcatattgtcattaatacataccttttaaaaaaaatataataaaaactaattattctaacgtatgctttttttgtttcaagaaaaaaaaaacgtacacttttttatttttttttatttaatttctatagatatgtattgccttataatggaaagaatacaggctaactcggaaagtaatttaggtgagtcaaattaaaaaaaaaaaaagaaatttaataaaattttatgaaacctaattattttttttttttggatttttataactaaatatatcataaacaaactaacaaatgatattttattctcactaactaatatcttatgacagttttcctttcaagtaatttttatttttttgtttcaaaagaaggataagtaatgcaacaatacaaaatttgagggtcggatatgtattctaaaatttataataccattattctatatttt

SEQ ID NO: 60457 - DNA, 999 bp, Cannabis sativa
tagatctaagatcctggtaatataatttccaacaatgatttggtacatgtcaaagttcagggggaaaaaaatcctaattagccttaattttatagctaatttacacaatggacattgaagtacaaataaaaaaaattgagcgaaatatagctttataatatattttagtcaaatttaacctaaaatatataccatctattaaaaatggtctaagctaatacttaaaacgaatcaatgttttctatttttcttcttataagaaaggcaatccaaaaacaacaaaagctgactgatagaacatcctgctacaagttttttcacgaacaaacatcttatgtagtgaatataaattgcatttacattacacaatattatctaatatgaatgagcttgactataatcatgcaaagaggtcaaagaacatgacatgtaacacagtaaatgaaaaaaatagtgtgctaatattatcctccaaagttgttgtatctaatagtactggagacttgagataatcacaagttaaagactttgaccttgatcttatgatacgaaaagtccatctacgcatctaaaagatagtagcttttgaagaactaattagtgctaaacaatgacacgatatatgtttctcttataacacagtaaaacttaaattcaataaatcaatggagcaaagcttcaataaaataaaagaaaatcaacacatgttgttccttattttccgtagaaacatatacaacatatatagtatacctttaatcaaataattatattatgtctaggttatcatattaaaacatacacaaataaactcaacaaattcaaaacacataaaaccactaaattaattgggagagttctcaataacaaaaacaaaatataatgtatttttagctatggccaaatttggcacacattacatcaccgttagagttaagttttagtaaaatattctaaaaatgataatatatcatatttataactctctattggagatac

SEQ ID NO: 60458 - DNA, 626 bp, Cannabis sativa
gacgagtttcattatttatttattgttttgctaaacgaacgagtttcattatttgttatttgtgtatccaaagtttcataaaactttgttaagatatatatatcaaagctagcaaaacggtgtccaaaaaggttaaactcatgtttggtagacattaatcttttttcattttcctcttgactttgcatatatcaattcaattgcaataatgataataaattatgacaaaatatccactagagtttacctacattttgacaccgtatcctaaataaaaacaaacgtcactaatagggacaattattacttttcaatttccatgaaacaatgaaataacatgttattgatatagggtcagtttggcacagttgtgctgtgggaaaaagcagttgtagttgtgctgtgagaaaaaacagctgtagcaaaactgtagaaaaagctgagctgagtgtttggtaaattataaattttaaagtactgtgaattgttaaaatctgttataatgataataataatgttataatctagtttattataatcacaaatatgtaaaaagttatgttgtataatattttatttttttttatatatttttattttttttaaaatataaatttatatgcatt

SEQ ID NO: 60459 - DNA, 1310 bp, Cannabis sativa
ctttcgaaaattctcgcacctggaaaagtcttggcaggcgtatatttgatatttatatccaagtaatgagtgcttaattttcctaagatttctctcttaattttcgttttaacttaaattgatgttttattaacttggttaatgactatttgtagtgctaatttatgacagggaaaccgtgttatacaaaattttgatattagaaaagaggcaggtggaatctctttcaaggcggtccagaaggaatttaaggttgcagtctcccaaaactaccttgaaatccatctgttttgggctggaaaaggaactcatagcataccagcatatggtgattatggaccttccatttcagcaatcagtgctactcaaggtaataaatagtccaactagtttgattgctagaatcatttgagcaatcaaatggaccttccatttcatattaggataatgtagttgaatatatctttttgatacagatttcacatctacggtcagtaacatttctccaagattaagcaataagaagagcagaactagtttgatagcggggatcactgttggggttgtcattttaagctttatgtcaattttagtggccttctatcttattcagagaagaaaaaagtcacaaatgaatgatgacgacggcggtacacacttttctttacgtttgttgcaaattactagttggttgttgaaagagaattgtaattttgaaagcttaatgattgttagttgataatttgcagagtttttggggatggatgttaaacagttgactttccattatgctgaacttaagaccgcaacaaatgattttaattcttcaaataagttgggagaaggaggatttggacctgtttacaaggtgtgcagttgcattaatcaatttcataacataaaaatctcttttagtattgatatgaaatgtagtaaaattccattgtgactacatttttacatttgatacaacttataatagggaacacttgaagatggaagaattattgcagtgaagcaattgtctttgacttctaagcaaggaaagagccaatttgtggctgaaatcgccacaatatctgctgtgcaacatcgtaacctcgtcaaattatatggctgttgtattgagggagacaaacgacttcttgtttacgagtatatggagaaccatagtcttgatcaagcactatatggtatgagaaattgagaataatgaatttgttgcttatacaaataacaatgactgtattttaagaaccaaaagttacactaaacataacaaatcatgtaactgccatgatcaggtaacc

SEQ ID NO: 60460 - DNA, 1283 bp, Cannabis sativa
  modified_base (716)..(718): a, c, t, g, unknown or other
gtctagttacgataaatgtaacgaagaccgctttgatctcatattggtatatgagatggtccaaattgtttaaaggagatgtttagagaataattagcaagtttgttggcacataaggttatcaaatgtaattgttattggaatcaatttgtagtccaagtgagagattgttgagttatttttaataatccaatatgtgggcttataaattaagacaatttatttgagctaatattctaaattggactaaataagtgatctaattaaatgagttcaataaatatcttattcggtacatgtgtagtacctaataataaacctaattaggatttatgggactctaattagtttgctatataaagaacataaggggcttttggtatgcggtaatgggagaagtgagaatgggaatctgaaagtttcctatgtttggttaggtttttaatattttaatgttggctaagtgaaagtggtggactttagtttggctgtcaaggaaaacccaatgaaaatgtggttttcactttccaatgctattggcaaacacaaacttttgcattttaaatttgtttttttttatatatgaatactactatacatataaatatttaaaatatgaagtattttccttattttttttatatattataaaatatattatcaatttgtatataaatttactctttataattatttattattgttatttttttttnnnaattatatgaaaaataataaataaaaattattttgaacagaaacaaaaatattgaattattagtattttatataaaaaaaaattattgtaaaaaaaaaagttatcacattccattgcaatgtcaaataaactcgttacaattgctttcctaagtttatcattcccttcatcactctctaagcagtggcggacctaggatttaagttgaggggggtgacactttttttttataagtgaggagggcgtcttttttttccttacattttataagctcgattattttggtcaaagctaactaccccaaaatatcccgtcaactcaagtgtccactaaaacattttggtacaaccaaaacttattctattaccgtcgtaacattcttggccaaataatcgagcttccacattcgcaaaactagaaaatattttattttaaaaaatggtatatacaatatccatatattttaataaaatttccgtgaataaattacacttattaactcattttcattataatctcaaattttacataattaacttgaaaaaaatcataatttacccattat

SEQ ID NO: 60461 - DNA, 981 bp, Cannabis sativa
  modified_base (948)..(956): a, c, t, g, unknown or other
cccctcccatccgagtaaaaggatgaagaattgataagaggatgagactagtcaaaaagccatactccctcaaatggatgtctgcttccccaaagcggggaaagtcacttcgccaaaaagttaccctagagtcactcggccaacctcagttacaaaagatgattagccaaagagtaaccctcagagtcatttagccaatgtcaagtgaaaatgtcactcaaccacgcagaggctgaagtcacttcttaaaaaaagaaagaggatctgtcgaggtgaagtgaatcctccattgcaccagcatattagcacaaagtaagattcaagcaagggaagccatcaacgcaaagcggaaaccttctcaaagaaaactaggagggcctcacgcatctgccaggcaaatccctcaactcacttagtcgacaagaacacttgaaagaattcttgtaaactgggggcaagtgttaaccctaaaaattagcttcgctaatcttcaagattatttgtctaagggaaaagagatgagcgagagcacactcacttagcctactcactcgatgcatatttcttgaagactatagatttggatgtcaggatacgtccgcacaatcccaagactaaccacgtaaaccctacaaggattcatgtgcgcatgccttagtgggagacccacttggaggctctaaagaaaacggagcttgaagtgtgcgtgtgtagtgcaggtgagtgaggagctcgcatgtgatccgtgtgtatgggggagcggtgagacgtgtgtctgtatgcgagtgtatggggtagtggtgagacctgtctgtgtgtaaaataccctaggattaagagaatggattagcaaaaccctaactcattaataatgtattattgtggaattatattattatataatttaatatgtgagaatttatatgatatatgacatgttaagacccnnnnnnnnngctaggggcattttagtaattttga

SEQ ID NO: 60462 - DNA, 1034 bp, Cannabis sativa
tatagaaaaacggttaaccgttttcccaggcgattcctaaaaaacaattttctattttggaaatccagttcaccggttttagcagttttaaagccttagttttttgtttcctcgttatttagggtatttttatgttatttattaataggaaaacttctagttttaagtttaggtccccgagaaggttttgacaagttgtttacctatttatgtgattgtgacatagagcctccgttcagcgcgtaattttctattcaggccgatcgacacacttgaatttgaaaacgaggtaagattagtataaaatatgtatatatgtgtgcatgtatgtaaattgcatgttgtgttatatgattcatatactaccaatactagtacggtaacggtatgcagtgcattggtacagtatatgatgttcaaagggtacaacacagtgttaccaacactagtatgggacgagtacgtagtgcatgtggtacaacctcagcggtacttagggtatggttcaaccttaccaacactagtacaggaggagtaattagcgcatttggtacagaggtcgtacttttgttaagaacgttcttgatcatctgttaagccttgtaaataggtgtatgggcacctcaatataagtcggtaatatgttatatgttatatgtttttcttactaggtttgtcgactcacatatattgtttgcatatgtaggtaaagaaaaggctaaggctgagcaccagtgagtccaaagcttggggatgattgtatatatcaggattgttagacttggagagttcggtctcgggacgacttgagcctacattttgtagtcacgaagcaacatgcctataaagtgtatttgaatatgtgtaaattttaaagacgagattctaactttttgtataaatatttatatatttataaaagtttaatttaaaagtttcaactttacacgattttttagaaaacttttgattagcaaaggactgcacagtaagtaataaatcattgtacttgcctaaacattagggcattacat

SEQ ID NO: 60463 - DNA, 630 bp, Cannabis sativa
gtctattaatatttatatgtatactggaacatacccacttgagtaattgtggagatactactaataaaaatgttgttttttaaaaaattaaattaattttttttttaatttgataattacagattaaaatagtaaaaaagttcccacaaaattaaataaatttagtaagagtaattataatatatatgtataaatattttttaataataaataagcccccacaaaataaaaattctggtcattgtgattagactgaaaatagaatgaatggatattgatagttaatatttttattttgagcattgttattaaggtgtctaacatcatggcatattacaagagttcaataaattttatttttcttaagccccactgaatttttgagtgagggttttcatattatttttctaattaacatgtgtacctaagagccaatagtaaactacaccaataaaaataaggttttttatatcacatattgaaattttaaatttttttactttttttattgtagggcaaattttttttcaaacatactttataagttttatactgtatactgtgttaagttttcacaattgttttatagttgttccactattgttttaattattccgttttgttgtttta

SEQ ID NO: 60464 - DNA, 695 bp, Cannabis sativa
tgtattaattgagaatatattgttgtgattttatatgaaaagaataaaatattttattatgtaataaatactatactatatttatatatagtatttctctttaattgatttattttattcattttttaatatgatttacattaatctctccagttaagttgtgtgatgtcgaagaaaaattagtagggatgaatttggctagattcataatgctcactagacagatcatgatttcgtctacaaacttttcatatatgttcaaacagaattttgttatttaatgaattttcgtaaagaaactaattaatattttctctttgtattcaaatatttgaggttcgatttcaagtgtcatctatccctataaataccacataaatcagcaacaaaagttaaaactcttctacttcttaatttcatatatttttagaagagagtatttttgttgtaatagatagttattctgatattccttagtgagtttgtgtgtctttgtaattacttttatgtgaagtaactttcgaagtgaagaacataaagaacaaccttcaggagaaggttcatccaagtcttgcttcgggagaaagcaagcgccgctatcttcgggagaatatttctacaagtcttacttcaggaaaaagcaagcaccgctatcttcgagagaagatttttacaagtcttgtatcgggaggaag

SEQ ID NO: 60465 - DNA, 504 bp, Cannabis sativa
ttttttttaaaaaagaatttatgtctttgtagtattttctatatagtatcggaaaaaaaaggatatttatgttttaatttgtaaaaatattatttatgataacaagtttatttcctccataaaaaaaaaaaaattgtaaaaatattgaagggaaaaaaaagctttaaagtagtaaataaatatgaaattttttagattttctttgagttatttaaatgcaactattgattgagatttagtattattctcaaatattttttatgtagttatttttttaaaaaaaaaattgtaacttctaacacgcttttttctccccaatgtaagtttgtatgaagtacaacggtaacaaaaaattggtaatattaccatcaaaataaaagaaacggtattagcaacaaatatatataataataataatataattgtgcttgtgatgagagtatattgcataatctatgttgcagtggtttaaattttcttgtttttgcagttgggcctggtggg

SEQ ID NO: 60466 - DNA, 1075 bp, Cannabis sativa
cattaaataacatattttttaaaacgctcatatgttgcttattattaaaagcagtaaacatttaatcacataagcagacagtgagtttgcctttgacgaggattgtatatattcagctagttttcaagaagtttaaaaaccttagtgttctaatataaaattgtaatgtcctacccagaggaacgccatgtatcgtatttacaataaactagtctcgttaatcggggtccataagctaagtgatttaaagtaaatattaaacttggtttaataagtaacttgcaataaacatactttacttaaaacaaaaatatttaaagttagatatttaggatcacgtaaaattatttttaaaacattacaagttattttatatagaccaatctaagcaataaaatggaattttttatgcaattccctgttggatccaacccctcgtggtctagcttggccgaaacatgtacaagtcatcctcaaaaccctcgaattcatggctgacctgacactgctttacccttaatttcctgcacaatagagcacccatgagccaaggcccaacaagacagaaaataatacaaaatgaacaattataataatcacatttcatatattatgcctccgcgtatacaactgtgccaccgcatcgtatattatattattccatacataataatgccactattattagtgtctatatagaatagacctacgtgttacactcacacttctctttaatttatttaaggccttaatatcatttaattatcaacttaacatattattacatattcatcaaagtacgcataatatataaatgcgtcatggtgctatactttacgtgctcagtttgctgtcttatagattttcaaggtatgtgaaaaaatctcaaattatagctgattctaaccaagcgccgatattcttagtcacaattttcaagtttcacaaagtaggattaatctccaaaatcaaattatcaataattcacagttaagaatatccacactgaatcaagtaatagagctaaacgagctttttaattatataaaaaaacttcccaatcagagttcggagt

SEQ ID NO: 60467 - DNA, 1509 bp, Cannabis sativa
  modified_base (1034)..(1050): a, c, t, g, unknown or other
ttaataaacatatcaaataacatcatatattactctaaagccttctgttatgttgcatttgaaacttacgatatagtatagcaataacacatttatttaataaagaaattttgatatgttaatatgaaaacttacaaatttaccaattaatattttaaacataatagaattagttatattataaaaattattatatatatatattaatttaaagttgagtgatcaaaataaataaccaaatgtgtataagaaaaaaattatcttaaattgattttttttttaataaaaagtaactaatttatatattactttacatcaaaaataacccaaatgttactttttttaaaaaaaaaacttgtaaaatactgaaatttcttgaagtgagattttttttttcttcagtttttttcattttcgataattataaataaaatattttcttaaaaatatttttataaataaaattaattttaagtataatattaaaaaaaaaaacctcaatattatactatatttttggtagctatgtataatatagactttttacaaatatatttttggaaatatttcttttgtccaactttaaataaaatttacattagtgcttttcctttttgctttttttttttttttttttgtcaattagttaagttaaactttgttttttacaccaattattcatgacaaatatataaagggtgtatttagtaatattttcttaattatttttttgtttttaaaattagaaaaataaaaatattttttaaaattttgttctataaaactgtttttactttttaatttttaattgagaattaaaattttaaaaataaaaaaaaaatcattttcaaaattttttaaacacttttttatcaatattttggactcccaccccaacctagaccttggaacctggacccggaccctaactcagacccaaatcccgccctggccccgaccctagacctgacttaattatataaaatcaataaataaaaataaaaataaaatttatagaacatacttttattttnnnnnnnnnnnnnnnnnaaataaaagtgttaccaaacactataataataaattaaattaatatgtatattactcttttttttttcttttcagaaaatatattactttatttaaatgtttagaattaattaaaatttagtaacttcgttattacattttttcttttgagaaaatatattacatatttaaaatctaatgcggtggttgaatgaacgaattctctattaaaaaaaatctgaatgatatatatcatatttttatttttattctacatacagagaatagaataaaattaatactactttacttggttaattttttgtttaaattttgtaactaaaattattaaaccaagtacaataatgttttattatgataaaaatatctacttaaaaactaaactattaattgcaaaatttcttttataatttgttcattccaactacattaaaaagaacatttaaataaaataaaata

SEQ ID NO: 60468 - DNA, 502 bp, Cannabis sativa
gttggatgtggttgtggacacccgataagagaagggacagcagcagtgagtgaagttctcgctaatcgagtgagcaaaggccaagcattcccttttccaaagtcagttctgtacctgtcataacctgatgtaggcagtggagatcccttgatagtaggcctatactcaagttcaagttcttcacccctatcaagtttttcaaggaaggttgtgcacttattgtaaggatgacccattctcccacattccatgcaatattcaggtaatctttcataacgaaatttaaccccgaatttgtcccgaacttgcgaaagggtaatcatacgccctcttaggagtggctttgttacatcaattttgacacgaatacgtaggaaaggtccccatccttcaaaaagggagtcttcaaacacattaatgaattcaccaattaagttcccaagtgctacagccaaccgtttagttttactcatgaaatgtagcctatagacttgaacccaaa

SEQ ID NO: 60469 - DNA, 880 bp, Cannabis sativa
tgacaatgcacccgagttggtttttaaggatctttttgctaaatttggaattatgcatgactttacatgtgtagaaactcctgagcaaaatgctgtagccgaaaggaaggaccaacatcttttaaatgttgcccgtgcattactatttcaagctaacttgcctattgagttttggactgattgtgttatgactgcagcctatcttataaaccgaactcctacaccaaacttgaacaatcatactccttatgaactaatgtttgacaagccccccaactatgagcatctaagaaattttggatgtttagtctttgcttcaaccctcactgcacacagaacaaagtttgattcaagaactagaacatgtgtattcatgggatatccacaaggggtaaaggggtacagactatatgatataaataataaagaatttttttatatcaaggaatgttgtttttcatgggaatatatttcccttttataaactaaacaacaacaaacactatactgatcctttcattcatattatttttccttctaatgaaatcactaacacaaacattgaagactttcccatgtcagataaggaagacaatatttcccacaacactaatcagaataaccttcctgctgaaaccgaaactcacttgactgccactcctgaaggagatattgctgctacagaccaactgctgcagcaagatgaaaacaccactgtcccaaggcgttcaaccagagatactgctgctacagaccaactgctgcaacaagatgaaaacaccacagtcccaagacgctcaaacaggataccaataactccttcttatctccgtgactatgaatgtcactctgttatacaagacaagatcggaagagcggt

SEQ ID NO: 60470 - DNA, 2737 bp, Cannabis sativa
  modified_base (2699)..(2703): a, c, t, g, unknown or other
atatatatttaaaattaaaatattgacaaagatgataatacaataagagttatttcagtagactccctatttatttcaccaatgagagatttttagtcttattttttaataattgtgtacgttgtagctatttaggatcacatgcatgtaaattttaaaaaattctgaatagtttatagtgtcaaaaataaggttcaaatatatttttgcatgcgtgattgttttttcttatcgtgtggtaagtaaataattgagttttattttctgcaatataaactattcacaattttctgaaatgtataaatgatcataaatagcaactatgtatgggattctgaaaagaaagttggactataaagctctttcgaatgtcaaagcagataaataatttaccgaaacaatcctttaaaaaagtgtaggacatatttccactgattaaatttattactatatatatgtataataaaaaaataaatactttaatttttgtcaataaaattaatgatatactcctatttaacttcgttaataatacatattaaaagttacaaaagtaagaaaatttatgtataacttctctaaaggagtgttttagtagatccctttatttgttttgaaatccaaaagagttttttagttcatttttacagttatttacggtcacttatgaatttaaattttgtgaatagtttataaagtcgaaattaagatttaaacagtgagtgtgtaaaaaaaaaagttacatgtataacaaaatattcaaattttatttttagcatggtaaattacttagaatttttagttggtccttcttagatatctaaatgtacatgattatgaaaaaaaaaattggattagaaaactcttttagatgccgaaatagataaaataatctactgaaataatcctttaaaagtttgctataaatttatctcaaaattaattattaaacaaaattaaattttataataatattgagttatatatttgcattgtgttttaaaaaattataataatatttttttatttaaatagttagacaaaatttttaaaattaatttactttaaaaagagaccctcactaaactacttttttgcttttctatagcaaataaaaaaatgtatataatagtaagtagaataaatatttatacgtaaataagaaaaaaaaattgtatgcaaagagtctattttgtttaatgtaaatctaaaattctatggtttattattggtgaaaaaactgccctcatagtatagggaagaaagtagcccccttacgaataaccctatatatatatttggaataattagtaatttttccctgaatttttgacaatattaattttgcctcctaaaatataccgcttgttaagaattccctgaacttttacatgtactgaaatttagtccttctgttaggttctgtcctattattccgttgaatgttgacatgtctttgtaaattagcaactttgcctcttaaattttgacaactatcaaattgtacccctcaaaataaaaataaaaaatattcaacatttttttagtaaaatcttaaaaaaataatttagatcttaagaaaaaatcattttgaatgattaagaaaattaaacaataaattaaaattttaaactaattaagggcaagtttggcacatctgtgttgtgggaaaaaacaagcacagttgtgctgtgagaaaaagtagttgtagctgttctgtgagaaaaagctgctgagtgtttggtaaagataattttaaaacaactgtgagttaaaaaagttgtatataagtattttataaactaaatgattgaatatctgttaaatatacaattaccaaaataagtatgatatttgttatctaatttatttaaataaattcatacatattaacatatttataattattttttatttaattataagataatttttctcttataatatttaattattttaaatatataataaaataattagttagacatttaataataataataataataataataatagtaaatctacataaatattgtctactaaatatttttaaattgttataaattttaatcataagaaataactcaaatttaatcaaattaatataataaaagacaatataacttaaataaaataaaaggaaaaatccatgaatatattttaattatgtcccattaaacttgcagcaatcagatctctaatattatctatttaacttaaatttgaagctctagttgtctcatcttcatcttcaatattagttagatcacttgcacaacaatttggattatctcttattttctcaaaatgtcaatcacattttgcatgccttcgaatgtaatcatgcaaggtcattaatgcaatcactatttttacttgcttctggtatggataactaggcatatctcttaatatttttcatcttttcttccatactccaaaagttctttcaataacacttcgaagagaagaatgtgcctagttcaatacctctttataactagtaggtttgctaccttgttgaaattatggaagatggtatctttggcctttagatggtcctaaaaaacctataatttatgggtatcccgcatccactacataatattttcctgtcaaatataatataaaaaatataattaaaaaattataaagactttaataatttataaatgtgtttagatggcaaccttggnnnnnttttggaaaatttgaagttgaatcacgtaaagct

SEQ ID NO: 60471 - DNA, 541 bp, Cannabis sativa
tttaatgtcgtgagatatgagtatttagacaaaaatgattttaaatcatttgttatttaacaccaatacataaactaaatgtgatactaaaactttaatttatactaaaatattatatattttggtgtccataaaagttaatactacatatagttttacttaaaaatattacatatacaatttaatataatattatgcaatacaatacatacggcataccaaacgaaccctaaggttactctcgaatatctaggagaatttgcttaattagtgtaaaataatttgtctaactagtattttatagcttaaagtataatatttgtaacattgtgtgtacatcctatcttaaaattaagagagaaaagtatattattacctgtctcattgaataccaactgagttccagcagtggaagaattactcctttcatcagtaccactagcataataaggattattagcatcatcagtaggcaaattcacagaaaccaacaccaaattcccatcttgttgcaacctcaactcaaatctccctttcgaaa

SEQ ID NO: 60472 - DNA, 1711 bp, Cannabis sativa
ctactggaacgtggaacatttgtgaccctactaccagtaaattaatgatgtaactcgcattgttgatgtaatattttaaacttcagttatgaataaattgaatcatttcttttatttatgtaattacaaagtcttactcttaaaaattacttaaggggcatttatgtatgattaaccggaattcatctggaaatacatgatataatgcaaacccacaactttaattttttttttttaaagtttttgatcaaacctttctaacgataaagggatcaaaccatcataacttcatgatttaaaacctgtctgacacgaaaggaaaatcaaaagttataagtgagatataactcataactcgcgtgcaaagctgaatattaacggctcgcacaacataggaaagtattaaatgagacatcaaggtgtcttggtaaaagtacttaaacctaatgtattgatagataatataactatttatataagcaatcaaaaatgtacaaagtgataaaattattaaaagtatgttcaagtttgcttaagagagattataactgttattgcgacgtagattataaatagcccacgcacatagtagattactaagtacttaaataggaaaattacgagcaatggaaagatcaagagtactctgcatttgatcaaaatataattgtttacattgtgaatgaaaacgaaagcaaacataaacattaagttcgaatgtaaaagtacagagcatttaagataagaaaaaggctaagttggacaactaactttacaaacttgtctttacaaaaatgccaccaggggcaaaccattaggccattttcctaaacaaagaatatgaggacgacaaggttcgaggagaaccatctctagaaaaaaaccagggaattcgatttggtgtgctgacccaatgagatgcatctcgacaactctcccagctgagacctcattccctgcggtcgagacctcattcccagcctcgggttttaggctgacttgaggatttcctcgcgtaagctttggtcttgagccatttggattctttagttgaatccgagacttcatcagcttggactattttcttcctagatctctcgtcggcttgggatgaacctttgagcatactccctaaatctacgttcattcctgttaagacaaaaacgaaagatcaatgaagcaacagtggtggtatatatataaaaaacattgcatttacaaaaaataaaaaaggagttcagaccaggccaccatttacaaagagcgatgcttactttcagaaatctcttgtaagaatcgcctgtattgattgacggttttttcttggtttggattgattggacaatcttcaaccctagaatccttcatttccaattcgaaccgagatttgaagtttttggaaatattggggaaagataggtgtttggtatatttcagtgctacaagttttgtgggataaatgtttgagtctggatgggacatctccgcaggtgaatggcaatccaatttttggatgaaattcaccaaaaactaggagtttgtggaacatggctagcctgaactatcattttatacttaaagcccagtaacggtaagaccgaaagttgggaaatctaacggttaggagtgaagaagaagtggaaagggcaattcattaatgctaacattggcccttggaaccaaggaaccattaaactcagggacatgcgtg

SEQ ID NO: 60473 - DNA, 806 bp, Cannabis sativa
aagtctaatgccttgaagaatatcaccaccaccactaatctgtagaaggaggtggatacggctaagaaggagatcgaggttgtaagggctgagctgggtgaagtgaacaagaaacttctagccaccaataatcgggtcgacgagctgacaaaggagattcaggagatgccatctaccgcccagctcgagtcgaataacgaggctttatcctaggagatgaatgagcttaaggatgagagggagggtctccatactcttctcgcgactttaaccacagataagacgaacttggaagagaacgtcaaatccagggaaacaagggaggaagagcttctgaaggaggttgagaacttggagtctgccgctctggaagttttctatgaattctggaaagccaacccagaaggaaactttgattacctcggtaataccaaataggcatatcttagttattgtgtggaccaagcagccaaagaaaaccccgaggcagccaattccacagccccgaccaatcagaatatcgagaccccagcctctaaggaccaagttgatttgtataaggaacctgggactcttgcagtgtgaatctcttttttcttttttatctgttcagcccatgggcctttattaaatacaatatgaatggctaagcggtctttaaacttggtaatacttcattttttttagataactagctgactaggcagcctttaatcccgggtttatatcatgcttttgtcatcttttcttaaatgagtagtttccttattttagtaattgtatgtgcaaattgttatgtttttttt

SEQ ID NO: 60474 - DNA, 648 bp, Cannabis sativa
ttttatagtagtgctgaccatgtacaacccaataacacttgatggattttgcttttgtttgttgtttttcatgaattcttgtgtatatatatatatgtatacctgagtgaatattatcattttatgtgggcaactttggtggtctttagagagaaagagatgcttaacttttgtttgttgtttctgccctgagtaacctttttagcctattatcattttttttttcctctcttgcatttgattgggttttttaatttatattgtgatagaaagctttgtgcaatgataagtgtatggtttagtttttttaattaattagattataatgttgttagggattaaatatgttgttagtggacaaccaaactcatcatgacatttttatctcaaaaacaataatatactaatgtagtatatggtacgtttacagcactcttttcttggggtgttttagtagactctttatctgttttagtagactctttatctgttttggtttagttatttaggactatttgtaaaattttaaaataatttaagtagtttacaatactaaataaaatttttattttttgttgtaggcacggttaatttttcttatacgtgtggcaattaactgtttaaatttgattttcggcactataaatt

SEQ ID NO: 60475 - DNA, 817 bp, Cannabis sativa
gataatatatattatgtatatttaccttatgacctcaccaattatagcatatttattaaattctaactggaatcagaatgattaataaaagaaataacttaaaatcaaaaataatcgaaaatattttgctatgttgttcacaaaggcagtcaattaagacaaattcaaacactatttggacattctctgcattaaggagtgtggttgaatgggatgctaaaagttaaattttaattgaattggatcaattattagatgtcaatttcaaaatcaaattaaaatttaatccaattcaattacatttatatacattaaaattatttatattaatttatttaataaaaatatatattaattatatttttagtggcttttttgttaaatttgtaatctttggttgttctatgtaaatatattgttgatgttttgttatattttattacttgcaatattgttattttagttattttaaacgtttagttaaattacgcttgtattaatgatatttttataaagtattaaagttaataaatggttgttcatatttttaagttaatatttaaaattaggtgtgtaatttaatatccaattaaaaaatcaatataatttaattagtaattggatcggattagattttgagattaaattggataaattttttaaatcaaattactaattaaattctttaaaaaaaaattactaattaaattggatccataaaaaaaaaaaaaaaagttaaatttgatcggatgccttcgatgtcatcattaatcctcttataacaatttatgtggaatataactactcttgtatatat

SEQ ID NO: 60476 - DNA, 761 bp, Cannabis sativa
atttgtcattctctaaaacacatgattcaaaaacaaaagcgttacctttgttccaatggttcaaaagtcttgacatctttctttcgaatgtccattctttccacagtgtgaacatagaagaatacgtctgctcatttgttctcaaattgtttcaatttctggttctatttcgattcaagctctcaaaattgaactcaaagttgcattgtcaaaagcatcatcctcaatttcttcatctttccttttgcccttgtctgcaaaattggagggaaccctccttgcaaacaataaagtctgttcattagcatgcaattttgcgtccagcttgtcaacgtcgaatgagttaaaattgttgatcatgtatgatacaacaaatccattatcttaggtggaaggctgttgagaacggattgaacccattgttcttttgataaatcaattcccaacagatttgctttctggaacttcaggttcatcatgagtaagtgtgaattgatgctcttaccaagagacattttcacactatagagttcatttgcgaaggcgtccaaaagatgaggattggggtgtgggttattcattttgacactacaaatatcaataaacagaaataaatcatttggttcaactatattcatacacaagtttagaaaataacagtaagtaaacatgtttgcaataataccaaaataaaacacattcaaagattttctaaggtttctaacaaaatgatacagtgctttgttttagttgagagtcaa

SEQ ID NO: 60477 - DNA, 1323 bp, Cannabis sativa
gcccatttagttctaaccctaaacttaataaattcctataaatagaacacaatggcatttgattcatagaataccttttagactctctcttgtctgacaaactgaatcaaaagaaagcctattattttccatttattatttcgaatttctcttgagttttattcacacaaaaattgtggtctttggtgttgaaaaattgtccacacatttcaaagtaatactcaacatagtgaggaagattgtgtagttcaaattgtcaactgaaagagaatccaagttcagatcttgatcatactctgaaataaaaaggatcaagggttagagatctgaatggaaggagtcataattattctgctgccatcaatgtaaagttttctataacttttatgtgtttattttattattttaggaaattcatatttaggatgttagattataaaattataatctaatatacatgttaataaatctatatcttggtaaaagatttctaatacatcaagcgccacagacgcctctgtcttctgcccccaaccacgtgcatgtgaggcacacagtgttgtgcggttcgggtgtgtcttgcacgtgccaagcatgcggttctccatccttaagccgcatggtcccatttttaaagtagtcgaaacattttcttcccccataccaacacgtgtcacccaaatgtcaaacttgctcttttttctaactaatcagaaagtgacatatggaaaatccagatttaacttataagtaattgtattttgaccctatacaatttgtaataagtttaaattgcgcatttatcattttatcttcctataaaaagaagcttaaatttttagtattcaggcagttttagatagaaaaatctagaaaaaatactctacgctctcagtgctagtttataatttttcttagttaattttgttatagatttctaagctcccttattattaaggtggatgatgaaacatagtgtatttagttaagtatttatttttatgttgattctcaatattatgatatacacttataatttttgtttctttaaataatttcaaaattttttaatatcatgtattttttatagttagaaatcattagtgattgattttttattttattaaaaataatattctttgtgttgaagtagttggccaaatatcaaattcctaaagtgcccttaccaaacttaactatattaaccaactgtctgttatgacagttggtgatcgagcactttgagctgcagcatcagtatttaaagggcctcacatcctttgatacttggtaccagaaagagagagagatagtgagagagag

SEQ ID NO: 60478 - DNA, 1699 bp, Cannabis sativa
  modified_base (1645)..(1659): a, c, t, g, unknown or other
gaaacatctgcaggaaaggtggcttggagaagggcatggttccattccttggtaggtgttaaaagatctgacactgtcatattggcatctgagtgatgtctaaggtaatgaagtttaccatatcctggaatccaggcatcgtttaagaaggagattgtggtaccatcaccaattgatcttccaagacctcactggagaagttctttgccccaagtgatactagaccaaacaagagaaggcccatggccctttccagaattaaggaaactagagtgtggaaagtaacgagatttgaggagggtggcaacaagtgagtgaggatactgaagaagccgccaagcttgtttggccaacatcgcctgattgaaagctttcattgatcgaaatccaagacctccatggaattttgagaaacaaagggaagaccatgctttccaatgaatttttcggttgtgctccgttcctccccaccaaaactgagccatcatggattcaagcttagaatgaaaggaggtagggagcctaaagcaagccatagcatatgaagggatggcttggacaacagattttaaaaggacttctttaccctattttggaaaaagcttggaattccatttatttagatgagaccaaacacgatccttaatgtaattgaaggcatcctttttagttcttccaaaagtttgaggaaggcccaaatatttgtccatggtatctctaacaggtatgccaagtatagtagcaacggtgttttggatctcaggaatggtattcggcgaaaagaacaaagcggacttggtaaaatttaccaactgtctagaggcaaggctataatcatgaagaattttcttgatgacagccgcagcgtcaggagaagcagagctaaagagaaggctatcatcagcaaagaagagatgagaaatagtcggggctcttcaggaaattttaattccaagtgaatgtctacggggttggcgctgttgagttttgaggtgaatgagagaggaaagaccttcagaacataaaagaaataagtatggggaaagcggatccccttggcgaattccccgggaaggcttaacttgcccaagaacctgctggttgatggagaaggaaaaagttgcagtagagacacaggccatgaccaggttaatgaagcgctgaggaaaagaaaatttctccattactctacgaacaaaaacccattcgacgcgatcaaaggctttggccatatcaagcttcagggccatccatcccagtcgtcccgatttacggtgggaaagggaatgcatgacctcttgaccaatgataatgttatcagagattgaacggtttggaaggaaagcactttgggtgggggagattatgcgactaagaattggtttgagacggttgaccagaaccctagatacgattttttagaacgtggagcaaaggctaataggatgatagtccgttatctgctcaggatttggccttttagggataagaacaatgagcgtcttgttgatagccactaagtccgcatctccattcagaaagctttgggcagtagtaatgatatctttacccaacaaatgccgattcttttaaaagaaacaaccactgaaactattgttggaaatatattttaccaggaacttannnnnnnnnnnnnnnatgttgatttaacaacctaaaattgaacttctaaaacgat

SEQ ID NO: 60479 - DNA, 809 bp, Cannabis sativa
caatagacttaggaggagcttgctgaatctccatatctacaagcaccctagcatacttcaccatcgttctattttgggtgactttatcaaccattattggcctacctacagtgctaaaaggagcacttaggttctttttaccctagtattgcagccctaaaccattaagtctcagccaaacaggtacaggacgaaccatactggcagcatccatatacattgaccacggcctcaacacaaccagtttgttatcgaaatgaacaatactagtctccaaaattatgtcccttatttcttcatcccaaaaacacaccaatgtgaaaccagagtgcatccttaccactttctcattacccagtttcccccaaatctcttatttcattctgattgaatatatgtattatatggagattcttgggatcggtgcaatgacaatcaaatgaaatattccagctgcatacatgatttagtatcgcataatcaacaccttcatcctaaattctaaaattgtattagagaaaaaataaaaatctctaataagtatccaatctaaaaataaaaaagtcgattaaaaaatatattcaaaaggagctactaaaaaatccaaaactgacccaaaaagagccaatttttattcgggatagtgagccaaattcaataaccaattcaaaaagtagagctcaaagatccacttgttattcgaagatagtgagccaaaaaaagttgcctatggccaagctgtccaagattggtgagcaaaaaatagccaccatcttgacgtggaatgttaaaaagtcaaacattggtaa

SEQ ID NO: 60480 - DNA, 990 bp, Cannabis sativa
tcaaatggttccccatcacgtgtaagatgcatagctagattcattggatcattacaaggtttttctgtctcatttaacaaatcaagtacatactttctttaagatagaaaaatacattgtttactctaagtaacgtcagcgtccaagaaatacttgagcacccctaaattctttgtgtgaaactaggtatgaattaaagactgaagggatgagatgcctttagtatcatttctagtaataataaaatttttttaaaaaaaagaatttattttaacgtattaaaataaaaataaaatgcacatatcaaaatatcccatattttatttttctaattaattatctaattagtaaaataaataaattaatatatatacacacacatatacatacatatacatgaattaggggccagcctttggctgtttatggtggtggcgtcgagtggtggtcgtcgaccaccttggtcgactgaggaaggaggtcgccggtgcatcaccgacgatggtggtggagttcacagagccaggctttgtttgtgactcaaataggtcgacagactcgattgctcctccaaggagctcatggatcacggtggtccttccaccactttcgtcgaccatgggccaagaaggccaatcgattgcttttactctggctacgggaccatggggtccctacggttgctttggtgcaaacccgagcctgacttcgagtcctcctccttttctccacgtgcatggggctgcatgggtcacatgcacgcatgaaaatcacgtgcttagacccttttgagcttcatgtcttgcaactgcaacccatcggggatcgtggctcgttattcaaggttcaaaacttgtcatctcgataaattggggtttactccttaaacccgagctcactcatcattaaaggtattgtggattgttgaagttttaattcttgacaaaaatttacaaataaatttaaaataaaattgttgggttttatgcc

SEQ ID NO: 60481 - DNA, 809 bp, Cannabis sativa
cacctaacctttccaatactaaagtactaggtggccttggcgtctgacttgtttggctagcatgttggctacacatttcagttggggtgaagttgttgtgtgtaactccacccaagagacggttcggtaggatttggccatcttttgttcaacccataggttggacctgtggccatggattgcacggctgaccttgtcccactttctcgagtatctcgtagggtcttcccaatttgggccaagcaccaccactcccagctcctgggatattgtgaatactctttgctgaacaagatcaccaacatcgaaggtatgacttttcacctttgagctgaagtgtcaggcgatctttccttggtatattatgagctagacttgtgactattctcgtagctcttctattaagtctagtgacttctagagcagagagtggttacgaaaagggtcgtaagtatctcactaatctgatggcactgtggtctctaccaggattattgtctcgcatccataggccattgcatatggcgtatgccccattgaagttctttctgttattctataagcctagagaacgcgagggagttcctctagccagtgggctttacaagcctgcagcttcttctttaatgtggtcttaaggattttgttgacgcttccacttgtccattagctctttgccaggttacagcaaagaagcttttaatgatttcgtgctaaacacagaagttggtgaaatattcactatcaaactgcttcacgttgtccgacacaatcatataggggagtcttattggaaattattttaccag

SEQ ID NO: 60482 - DNA, 937 bp, Cannabis sativa
  modified_base (207)..(211): a, c, t, g, unknown or other
  modified_base (681)..(691): a, c, t, g, unknown or other
taaataaatgtaagggaatgattaccttaccattgattcccattacttattagtaaacatgccaaagggtttaggggaatgggaatgggaatgggttgggaaatgagaatgaaaatgcgaatgcaaatgagaatgggaatgggaatgggctggggaatgcgaatgggaatggaaattggccggggaatgggaataggaatgggaatnnnnntgggaataggaatgggaatgggtcatggaatgggaatgggaataggaatgcgaatgcaaatgggaatgggaatggtccagggaatgggaatgtgaatggtccagggaacgggaatgggaattggggttttggggttttggcattttagggttttgtggtttgggaatgggaatgtgaatgggcatgggtcggcgaatgggaatgggctggtgaatggggatggggatggggatgggaatggaccggggaatgggaatgggaatgggaatgtgattgcaactgggaataggaatgtgaatggggcggggaatgggaatttgaatgcgaatgggaataagaatggaaattggaatgcgaatggggatgggaatgggaatgggaatgtgaatgggtatgggaatggggatagggatggtaatggaaatgggaatgtgaacgggaatgggaatgggacagggaatgggaatggnnnnnnnnnnnggaatgagaataggaatgggaatagtaatagcaatgggctggggaatgggaatgggcataggaatgcaaatgcaaataggaatgggaatcggaatcagaatgcgaatgggaatgggaatgggaatggggatggaaatgggaatgggaatcagaatgggtatgggactgggctggggaatgggaattggggtttgggtttagggtttagggcttagggttggtgttggggtttaggggttagaggtt

SEQ ID NO: 60483 - DNA, 1633 bp, Cannabis sativa
tgagtattgctttaatatgtgtggcgtaatttttcaatactaatgagcacgaaatttgatgaagaaaactcaagagaaatttgaaaaatataatgaaataataagaaagcttttctttagattcagtttgtcagataagagagagtctaaagtgttggttacttgaattaaaggctatcacattatctttatagaaagacgtgaggtttaaggttagaattaaatgggctgaataaaagaataaaatttctttaaatatcaacccttggcctaattgtacatcaaggcccatgggtttgaattttgatatttttgttaccaaaagtgaaacaatcttttctttcttcaaaattactatttttatattctatttatttaaatgcttctatttaataattataattaattattaaacaagattaccatttaaatatatttattaattagaccctctaagctctcttaatcaaaaaagaccctgaattcttttttcttctcaaatatgcccttttagtgaaattcataaataagacaatcattctttagaatttgtattgataaaacaaatcaattaattaagactataaaataatatttatcttagttagtttgcagaccatgtgttaatgtaatcaagcttctaatcatcagattttgaaatttaccaagtaaattttctattttctaggttattaattccttctaactctacctctactatctactatagatttgaaattgcactcttaattacatagaacacactatatacaaaatatagataccctatgatttatctattgttacaatcgaaacaatcaatgatcctctatagatattttacattcagtaggaataaatttaccgttttactcttcaatgtattttatcattaaaacacttattaactacttgtaaataacatttcaataaattaatataattactgaaatgagccttctattatttatcacgtttagcaaaactcaaaggacattatcatttcacttctaaatagttattgaagttataaattctatatccttgattaacgctcccactcaattgcactaccaaattcagaagatgtcagtatgggctagtcctacgggtatgctggtaacgaataagtcaaagaaccagtatagtacaattaagctagaacttaaccatcttaggattaagatcaattgtcctaagatcaattaagtgacattgacttagaaaagatataatggtaagtttatgatatcttttccactatcaatatcgatccagtccaatgtatagttaatacatccaatactagtatagtttgttaatgcacaggaaagaacattccacttacataagtataagtaaaccacattgttgattataacattaatgtaaatctagtgcactaataaatcttgagactaactagtttgaagcatataatcacgattattttctactatgtaggcaacactataatcatgaataactatatgtttgagatttaatagaatttatatattaaacaaatgaccatgaaagtaattatgtgaaccatggaacataaaatataatttctgatcttttattaattagtaaataaaattatattgaaataaattttatttagggcata

SEQ ID NO: 60484 - DNA, 1385 bp, Cannabis sativa
tttattgaatgagaggtagatattttaaaatattatttattaattttttgttgcaacaattcattaaattaataaatcatgatttgttatcttttatattactattataattttttgctatctaatacaataatattattctcataattttttgtttactttggtgaattaatttttgacagataaatcaattgtaaattattatattttttgctttgattattattactttctttttaatagtacaattttatggattaaagttaaaaaaatatttaataataaggaaaaaaaattaattaaataacattctatataaaataaaaaagacaccaacacaacactcacattttaattacaatatataatactatttaattttatttagtcactttactattattatgataaatggtcttgttattatcaaacaataataacatataataaaattaaaatattattaataatatataaatctgttactgttatatatattaattatatttttattattaattaagatttttttataacaactttatagcgcaaaggctttccatattcatccattagcctccctgtggttcagctctgcctattaggcttggaggatcacgacttattgattcatctattcttggaatttgtgtctctgctgggcgaaggcatcgcccatagcaatgtgtgtttcttgctagtcatgatgaaggatatttgtataaccctatacttcccctacgacttctcttagtctagcaagttcagtatcatcccttaagtccatgtggggtttgtcaatgctagggttgccaaccccaagtccagtttcaccaacataaacacgaggtccaacaccagtgccaagaacttcagtggttggctagacagtgggtctagtaggaggttattctcctagccagacctctatggtggaggtgtcggccagctggccaaagcatggtggtcgggcagccacgcttggattggtcacaacaagtggcacttggacattaggattcgtggccatagggtctcgtggttcaattgaacctccacatcttgtgatagccatgcagaatataaatacaaaagatgagagctttttgaataagaattttgggctctcaatgaaagcaccaaaatattgactgtaaatttagccagtcgacgcagagtctgactataaagacacaaagatttataggggttcgtcccctttgttcaggtaatgacctactctccttttagttgtattcactgttgagataataccatacaaattacaggttaaaaccttgtaatttctagctatggctttcttcagtattataacgatgagaatgtgtgttgtaggtgagaatacttgagagagagagagagag

SEQ ID NO: 60485 - DNA, 1458 bp, Cannabis sativa
agaacgaagtctggatttcgtaggtagacagttagtagcagcacgccataacaagtctttcactttcggaggagcacatagcttccaaagagtattccaaaagacggaattatcatcctgtgcacccaactctaagaacttataaattgattttaccgagaaatggcacgagctctccctactccaataccaaacatcacacaaacgacttgaagatcaaggaaatactaagaatttagcatccctttcattaaacatatcatgcaccaagtccacatcccaagccaacgtatccgtttccataaatgctttaacattttgatcaaaaagagtaggattattcgaagttactcttggattatcttcattcggcagccacggatccaacactatattaattcgagaaccatcaccaactctgcatctcgcccctttttgaacaatctcttgagtttcataaatatttcaccacacgaaacttggattgctccccaactcagcatttaaaaaggtaccattacggtagtacctagctttaaaaatcttgctgacaagtgagtctgagggactaaacaatctctttacaaagagttggaaaatatttatgattttttaataaaaaatattttctagtagtttaatttttttttaaaagaatagtaagtataatagtaaaatttctaattatatatctcaattgataatattaaaaatatattatataatattgtttaacaagcaaattacaacattgttaattttatttttggcatttttaatgtggtaaaaatattttattatttattgtttaaattcgactggactatttacattggttttcatatttagtatttgacttttatattaagtaatctatttttttaaaggaaagttgtctaccttttctatttatagaaaataaggtaaaaatagtaagcttggttactcatttcttttttatctatccagctgtgatattctgatcttgtgtgagttttctatttagattgatcagatttcttgaggaaaaaattgaagtaaaactttcatttttttattaaaggaaaatcacacttactactcacgattctgtaggtacaaaaatagaaatttctgggctgattgaagatctattttagggaattgtctagtgaattgtggtcttgttcagaccgtgtatgagctgtcaataaggtgtatattcattataaatacaccttatagctaggtcaagtacctcttttgcattttttattttcactcgtatctttagaaaagagggtctttattttgtagagaagagcttgttcgactcttacactgtttatatgtattttgtattgtcttgagtctgtattcaagcctacaaagaagaagaacaacagtgctaccttccgaagagggttttacaaagctttcgggagattacttttcaagtcttaccttgggaggaaacaa

SEQ ID NO: 60486 - DNA, 835 bp, Cannabis sativa
ttaagacaaaactagttacattttatatattcgtgttaaagattacattaaaaaaataaattttttaaaaattaagttaagggccctattttttccattttaaaaaatataaaatttattttatcatagaaggttgaattaataatttttgtaaaatatttatatttagttttttgtttggtctataaatataactcaaagctaaaaccatttccatcaactcaactcaactcaacttaactcaacagtccaaaaaaaaaaaaaaaaaaagaaaaagaaaaactgagagcaatttgtaatagtaaaaaactccaaacacagccatggcaccaaggaaaatctcagatttcgaaagggcaatgaaattgaatcaaaccccatctcagaatgaatcgaaggtctccaacccagacgagatatcaaagacgaagaagaagaagaaagagttcaaacccattatctgtgatgtaaatcctccaaagaaaaaattggtgaagacaatggcgtttgaatatatagcctacaagctcatttcttccatccatggcgaaaaaaacccagaacctgaaaaattcaagatcaattagccgacaagttcactaatttctttcatggcgaacaaaacccagaagcagaatcattagtagcttaaaaattcagatcaattttcaacaactacataggtatgattaggaagtttccaaataaacccaacattcccctgttatagagttgtgctctgttctagtgtcatctctttctttatatatttcaatacaatacccataaattaatttagagtgtgatgatgtcttaagttctcgttcatgggttt

SEQ ID NO: 60487 - DNA, 986 bp, Cannabis sativa
tttaacaaaacacagggttcaattggtaacttttgcaaaacacagggtctaaaaaaaaataaataaaataaaaaataattcaaataattttttaaacaacttttctagcaaaatttttggttaaaagatatttttaaaagaaaacgagactaggaaaggaaaggaaacttttggacactggtcccaactaatccaacctcaagacggccctgcaaaattttcacaaatatatatatatatatatatatatataaaaataactgaattaaatttatattgcaggtgtagtaatatcgatgattagtgagaaaaatggaggtggatacgcattgttattggatgcatctacctttgaagagattgcaagagcaaagtttccctatggtcttccctatggactccatggctgctgggttccaaatccaaacaaataaattagcttatatatatatatacacaatagagttcatcagaagttgaagattaatttgttctagctagctatagctaaggtagatgatgcaactataaatatatacagatataaatgtaattatatgtggaaattgggatgtgtttatacatgtaacaatttatcatgtatggtgtgggatattgaatgagagtgaatgtactatgattttggttctttttgtttttgtatatataaaataataatgaatgctttcactaatgtaagtcggtacaataagcacacaaagaaagtgatttaagagttcttaagaaaaaaaaaaacaataagaaattgatccgatgcacatttatagtaagcatttcatctttttattaaaaattctaaatagcttgtttttatgataccaaaaaaagagttcaaaatagtcatatacacacgtataacaaaatataaacatgcatccacctgaatatttcaagtttcaacacataataaattttctgaaaataaaatataaaggctaattagtaattttttccccgaactttga

SEQ ID NO: 60488 - DNA, 1298 bp, Cannabis sativa
atcagtgtattctatatttaatgtgtaatcttaccaattatagacattgtaaacaaaagggaaactttccctcaagctcaaggtcctatagatagtgatctaatctcactgggcaaagggtcgaaagaattatctaagagagtatatactcagagatatcgttgtaagagctttaaggaaagaatcattgcattctttgttcttaagtcaatacaaatcaaggagagtaggctattaccgaactgctcggggccgaatctttttaaaaattctgtgttctttatttatcttatcatattatatctaaattatatcattaatcgcttacaattaatactcattgtcgttggctaaaagcaaggtcaataataataaatattaaataattcaatattaaaaagtaacaattcaaaaataactgattcaatcttcacttttgcgaattaaatttgattggatttgagttattatgcaaaatagattagaccaaaatatgaaatccacacttagtgcggatccaggcctggccctgaacataagtgggttaggcctgtgcctaggacccacctagcgcaaggccccaaaaaaattattctcttttgaaaatgtacattttcttttattgattttgaaacatattaaatttttttctaaataggggcccaaaagtatttttttcctatggtccgctaaatctcaagctcagccatgtgcagatcgaatgcaatttgagtaaaataatacagattagactggataaacacccctaataaaaatgtacggtatatataagactacattaattttggttgtgtgattagaagtttttaattattattacatgtaatcagtgtataatttaaattttttcttatataattgattaattatttggaaaaaaaatattacaaaaatgtgttaacacataatttttttcatttttacgctttaaactatttaattacaaaaatatacttttcactaaaaacaataaactgtctttgggttattttattaattatttatatttgtattataattgatttatagttatcgtaaagttagttttctcattattttgagttattttcttactagataaaagtatatttttgtaattttagaattttaaaagtgtattttataaataaaaattttaaatcgtaaaattataattaaaacaaaaaaaaatatttttaaaaattctcctaatttaaatgtgtcataataattatttataaatattttgaaatttttcgaaaaactatttgcgccaaaagtatagttctagttttctt

SEQ ID NO: 60489 - DNA, 3849 bp, Cannabis sativa
aaaaaaaaaaaaagactttctattggagattatgcctttccaattgaataagaaacatactcgtatccatcaaaaacaatttttactggttacttttatcagcttccatatcaagaattcaacaggatcgtcctcgtcaatttcaatcttatcatgcagaacaatctaggtaaggggaaaaaaaaacataaccattagaagttacaatattaacaaaccaaatcttccaactaaattatagaaaaaaaatatagtattataaattttgcacacacacatagacaacaatttaaacaatactcagaacaataaaattagttttacagtaaccttttaatttatgattataagtgttaagtgtaaaaatttacccatagcagctctcttgatgttctaagagttcaatttattaaaattttataataagatagtctctcagatattatcaagataattacatttcaatatgtaaattcattttagaaaaattatacattttttgctttagtatttaatttttgtaaaacacctaagtagtactgtaaatttattttgttacattatacatttcaatatctatagttactatttagtgaattttgtttaatataaattcattttaaataatcgattaagattcaaaaatgtacaccaatgcaacttgagatgcacctaaaattttctcaatttcttgttaggtaatgaaaactcaatcgatctcaaagttcagcacatgttatttatgcttcctctaaatcagaagcaaattataccaacacgttttcatgcaaaattacttgttttcataaggacaaatactcatgatgtgttctcaaaattctaaacataaataaaataagaaaatcataacaaaaatttgtacccataaactgagattactcaatattgaaatagtaacccaaagaaaattagcaaggaaggcaaacttgaattcttccgaaaaccaaattttgagtgaatatcacctcattttttattaaatgaatcaacacatcgtaaggcaatatgtaatcgagagcgcttgacctggaaaaaaagttcaagacagcataagaaacaatgatcaattacaaacaagagccatacaaataaaaatgagtcctataatataaaatgatgacctgaaatggatatgaaagaagaatggcatcaattttggagttgctcccaaagcagcataatcaattgaattttgtgcaaaaaatgaatcgattgtgagttcttgtcagaatctattttccgttaccaacttttatttaattaacactaaaaatgaacagtgttggacaatgaaatgtaaattatagcttaactaatagacctttaagtttagatgtcatgaaatagaaactatattcctaaaggctagaaatgctcactttcagttggttcaacttcatgtacgctcttcaccctttgaaatcgccggggcctgatgggttctcgggtattttttacaggaaatactggaggatagtggggggtaaagtgtgtgagatggtacaaggattctttgaagatggctcggtttgtgctaaaattaatcatacttttctttgtcttatccctaaggtttcatctgcttctcggtttgaccattttcgtccgattagcttatgcaacttctgctacaaaattatttcccgtattttgacggatcgtttgaaggtagttattgatagacttgtctcccctttccaatccgcctttattccgggtagatggattgcggaatgctcaatcatggctcaagaagttttgcatagctttaaaagaaagaagggtaaacatggtgtgatggctgttaaaacggatatgagcaaagcgtacgatcgcttagaatggaacttccttcttcgagtcttgaaagctaatggatttagtgaaaaggtgtgcaaaatcatcatgagttgtgtaacttcagtgtcatattcggtgcttcttaatggggctcctttggctcccttcaatcctaagcgtggattgcgacaaggagatcctctgtcgccattcctattcattctttgtagtgaggttctatcgaagttaattttaagggccgaggctaatggggagttgagtggcataaaggtctcgagagatgcggtacctatttcacatctcttttatgcggatgatgcaattttcttttgcaaggcgactggggggaatgcggctgctcttatggagtgtatttcacggtatgaacgttggtcggggcaagaggttaataaacagaaaagtggagttatgttttcgcctaacaccccgttgaggagtagggaggaagctaagagtataatgaatatcaacggccttaatcactccgaaaaatatctcggcaatcccttcttcttttcggcaaagaagcgtaaggattttcatttcattaaagataaggtcaagggacgacttgaggggtggagggcaaagaatttgtctcaagccggaagaactacgctggttggatcggtgctgcaaagtgtcccctgctatgttatgtcaacggctttggttcctaagactatttgcgacgagttggacaggatcgtggcgaggttttggtggattggcaattcggaaaaacagagatatcgttcgtttaagtcttgggctgatatttgtcaacccaaaagatgtggtggtcttgggcttagaaggtttagggacattaacttggctcttttgtcaaaactgagctggggtttgctcactagggctgataagccttggattaagctgttggaatcaagatactgtcaaggtttagatgcttggagggtggagaagagagcgggtgactcctgggtttggcaaggaattctggaggctagaaaaatttgcaagagtggggctggggttctaattggggacggtggttcggacttgtgggagagaccttgggtccctggggtatctatggaggaagtccgtagtagtttcacttattctagaagacatgctttcgtaaaagtttctgatctttttgtggaagggaatcgagagtggaattcagatcttatcaaagaatgttttgaggagaatgtggctcaggctattctgagcattcggcctttgatttcttctaatgatagtttgttttggaaagcttcaaagtcgggaaaattctcagttaagagcagttactgggtgagtcaacaagataggttcaaggatccgaataaggtgtgggaaaagctttggcgttctcctattcatcctaggctgaaattgttactttggaaaatctggtctgatgttttgcctacaaagtcgcgtattgggaggttggaggaggggtgtgtgctctgcaacaatgctgaggaatttgttttgcatttgtttggtgcttgtagtgctattaaggcggttttgtttcatagcaactggggcattcgaattgatgatctgcattggaattccattatggattttggtttatggtggacttctgtgcaagatgagagtctgcagttgtttgttgcctgcacctgtgcgtcgatttggaaatggagaaataatgtgatctttcagagccggcctttctcgattgcagatttaatatctgatgttcaggcttccgtcagagagatgacagtgtttgatcttgcagatcctggggatattccaatttcgaatgctcaggacttatcggacctatcatgcgatgccgacttgatatcttttcatgctgacgcttcaatttcaggcgaggaagctggtttggcagctgttcagagggttgcggctgacggggtgcaggcctgggttgctactgagttcacaaaagtttctgggattctagaaggagaacttttggcaattctg

SEQ ID NO: 60490 - DNA, 2191 bp, Cannabis sativa
cataaaactctttttgtttcatactatagatagtcaatagtattgcaaaaatatattttactattttagaatcacttaactattttttataattattttaagtattaactaaataaattcatgaaaaatacaaaaatgattgaaaaccaaatctaactattctaacacagtttatagtctgtactaaatcctaaacaattaacttttttattttttgaacaatctaggtatttttcataattaaatttagaaataacacaaataattcatgaaaaatacaaaatcgaccaaaaatctaatctatcaattttctaacagtttataatccataaccaatcatagaaaataaacttagattattctgagtaatctaagtatttttcataattaatttaggaagtaaaccaaataattcataataattccaaataaattcagaaaattatcaaactttaccaaacaccttaggttagatactctatcagtatctgcgccacattaattgtcaaaatattttaataattaatttaggaaatcaaatcaggcaatgaatattaaaatctgaccatatatagaatatcacttaattaattttgttcaaatttaatgaatacaaaatatgagtaatttgcgacataagtacataagtttatattccagttgcaatttaatatctaaattaaaattttgcggcataaatacctttcgttacactttcagacattttgtaggtaccttgctgttatcttgcacactggacaccagatggcatgacacatcatttaaagtaataccacatcatttaaaataatgccacatcatttaacataatgccatgtcattttattaaatagccacctaatattaatcattaaagtaaaaattaagtttgctttaaaaaaaatatttacataaaaattaatttaataaataaataataaaatctgaaataacacaattaatacaaaatcaaataattaatctaaaaaaacttttaaaagcataaaatatatataggaggtattgtgggtatcgtgagagagaacaaagtgggcgactccaccttctcagacgacgaacaccgacccttccatcttctccgaccacggtacgttcgagggtccatctttttcgacgacaaccatcgatcgagggagtagtctgagaaaaaaggggcgacgcatatgttattgcgaactaccacaagaagtcacggttcgtacctcaaagacggtatctgaagaaataaagacaacaaaaaacaaaaattgaaaagtttaaactaacaaatttaaaagtaacttgtttataataccaataccaactaccctaaaactgaaagtccatatacatgcattcaagaaagttcattactcatacataatttctctgtgagaaaattgtattcttattgagttattttgaacttaagcactttttatttgataaagctatacaaattatcctttagcaaattcaataccggtagtaagcttaaccatgaaccagcccaataccatagcctatagatttatcacgtagacatcaacatatttgagtacattaacttgtgcttcttcctctttttctcaaaaagcttcaaattattataaaatttgaaccgatgtctagtcgaaaaacaaaatattttgggtttattaatttcaattgataaaagaaactagccaattatctagtaaaatactttagacttcaattttactttctctaaacgaaaatttactctcaaaccaaacaaggatggaagcagagaaaagggcatctaaccattagaggaagaagaactggttttattctttctggatacttttttggtagtctaccttctctttaagcaaacacaaaacctcctcacactccttcttagctccaatccatcagatctctcaaacccaactcctttcttcaactaacgacccaaaacccttcttttcttactcaaattcttcgaagctgttgtcagaggaattttgacaacattaattttatgcgagtattcaagggctgcttggataccaaaaaatagatatgtgagtactcacttagaatagcgaatactcaaagaatatagtgtataatatatgcaagtattgtaaatattataaaatagactcgaaaaaatatagtggttcagcaggagcttcgggctcgacctgcctaatccactgtt

SEQ ID NO: 60491 - DNA, 2097 bp, Cannabis sativa
ccactcattgccaattggttttgagatgaaatctcataattctcaacgataaacaataaatttttatatgtacaaagtttatatgagtaacactattgcaaatacacattcttcaaagtagagttttcccttaatcaatgccaaagaattattgacatgcatttaccatgaaatagtttcttggcaaatcaaacaaagaatggggaatctcaacccaaagaagtgaagaacactccaccaaaaagctctgaatatcatttgccgagcttgtggttgtggtaactaaactaaataatagattctgattttcaacaaaaataatattattgactggttgctaagaccatatggaaaaatgcaattgtataaatagattaatcacatacaaaaaactaggtcatagcagataaaatctgatgattcattcataaagtttagaatcaaaagtttttactataatatttttattttacctcaatacatagaatgtcttcgaatctcagaatgatcatatccctagagaataactgtcatcctccaaggaatgagggacgaccgatctttagaaagataaataatattgctattatttattcttgaaaaatggtatcattgtattctgtatacaaacttataaattcttaataagatgaactcatgaactataaagataactttaaaatcacataaaaaatcttcttatttattattgctattcatattattaattaccatacaatatttaattttgtagtttatttattacaaaaaagactaattatttaggtaataaaaatctgtgttaatattcgtattttaagaaaatcttctttcttaaaaacttataaagaacacttaaccttattgtgtatatatatacacctataaatttatatatattgggtgttcttataaaaatatatatatatagctatgtatattgtttgtactatccgccgatactagtctagtattagcggctaatatttggttcgtcgctaataataaatagcgaccaagtattagcggcagaaaatgaaaattttaccagcagacccctctgcttttaaaagtcttaattgttgtagagttgtagtgtatgcaagcaattttggtcaaaacttaagatttccattgcttcacctaaagttaaacatttgatgtggtgtgtgctttctcattccatcctagttgcttcttccttattctcttgacacatcattccttctcttatttgcctctttgtcatatgaaatcgaagattgtgaaacatgccatcttggaatgttctaatgcgaaaaaaacttggaagcactcctcattctttgctttttacagtagtcacaaggattatgacattaatgattacattgctaaagtgtttgacctatatgataaatataatttggctgtgttattttgtataatttagatgatatagaattaatgaaataaccttttcataataaaaaaaatcctttctcatttaaagctttatgatcatgttgttaattacttgtatgaatatgataatgctcatcattttggttttaagctgcaacctcgagggcaaggaaaagatgagcaggtacctcgacttgcctttggatattggaaagtcaatacagatgctgccattgatattgcattaaagaagcataattttggagttgtggctaggaatggctgtgacaatatcaaggctggactagtcatttcaattgtaggtatggttcctcctgaagttgttgaagttaaagcaatccttgctgctctttgttggatccaagcaacaaggtttccagtctcaattcttgaatcagattgtaaaagtgttgttgataaaatttatagcttttattgtactaattatgtacttagtgatactattagttgtattaagaattcattattgttcagtcttggcctgctaatagttcatgttctaagagagtataattggatagcacatagttatgctaaagcaagtttagagttaaactgtaagtgtgtttggaatggttatctactgttagactataatgtagtatatgtaatatagcatatacaaacgatatgaaatgcggaaaacaaact

SEQ ID NO: 60492 - DNA, 884 bp, Cannabis sativa
ctctctctctctctctcaaatttaaagttatgtagaatttagtaattgcttacacaattcgacgatatactcaaatttgtgtgaaagactgtgtagaaaaaactattcatcatcaatattgtatttttcatatttgaacctaatatcaatttaaaattaataatgttatttttaatagattataattaatttgggctaaaaggttaaattcttattttgatcgaataaaaggtcgctaaaatagtttccattctagatgagctgactactctatttaactggtgatatttttgcatcctacagggcactatatcatttagttaagaaccttaaaaaatatttgagatatgtttgttctattttattattttatatcttcattacttgctaaatgtttacaaatttataaaaatgtgtgtgagtttatattaaaccatcattgatttctattattaattatttagtatcaattttgaactacattgtcttagttggttgtttttaatgggattcatccccaattgatggccatctgttaaacagtctaaaagttttagatcatgactgataaatgtttgtaaatgcaaaatctagttgactcatccctaatagataacaacttagactaggatttacaatactgaaataatagaaaactcataaaataagaataactttgactctcacctaagcgggacattgttagattcttattttacttgaaattgccttttagcttgcctcttagctttttcatttaaaaattgcttaagatagtatatcattggacaagaaagtttataagacatctgcttatgatgtcactctattttcttctatgaaaatgagtggtgtagatgaacatattccaaacattctatgcc

SEQ ID NO: 60493 - DNA, 863 bp, Cannabis sativa
gtacgagttggcgatcacatcctctggcatagctctcatgaacgatacttttcccgccaattggtttacttttgccctgtcgtttgtcttaaatgatatccattcgaatccttcgttctctgccattttgacaatggcaaagttctgaggtaccgtcaaggcctgaccttgacgcagctcaccttcgaacactgatcgtccgttgttgtccacaacctgacacctgcaacgtcctcttatcgcgtagataatgctatgagcgttgatgttgtagtgtggtgcgtacattgcgttctgcaaattaattttaaatgtatgaaatatttttttttttacttttggactgagtgggccctagaagcgagcctaacctgctttaatccaaactcgaccctgcttaaaaagtagtgccaaataacaatgttgatttgtacttactttgtaaaggaagcctctctcggcgctgagtcgaaggaagctaaggatggggaggttgtagctgttaacggtggtgaggcgaccggcctgaggactgaagacatcggcacgagcagggtcacccatgttctccctaagcctcattgtgcaaatattctcttccaaaccattataatcacgtcctgagaggcgagcgtgctccctctcagtctgttgcaactcttgtcggcgcatttcttgctcttgctcttggcgagacctctgtggtttcaccaagtcaagcttgccttctactctgatgatggaacccctgaaatcgtcttggctttgaatcttcctagcggtctcagaatccacattgaaagcttcctgaatcaaattgacactgaatcccctgaaaacgttgttgggcaatccttcttgct

SEQ ID NO: 60494 - DNA, 822 bp, Cannabis sativa
ttgtagtgaaaattagtcaatctaattacattctaatatttttaaattaattcattatcccaaccattcactaataattcctctatataaagcaccaaacatttgatatcaaaatccatgaaattaataataccatataatcaactaattattataagtgtgtaatggctcaccgtttatgttccctttccttgcttatcatcctagccttggctagtaccttagacagcatccatgcactaaagtacgtgggcatcaacaaagccggatcaactaacggtggtatcagattcaacaatgatattacctttgaatacagcttccgaaccctaattacctccacaaatttcataagaaggctgttccagcaaaactcggcctctgaaacgaaggccgtgccaaagatcaccttgatcatcgaggatatcgatggtgtggccttcgctgtcaatggagagatccatgtcagcgcaaggtacatcgggggctacactggagatctcaagagagagatctcgggtgttctttttcatgagaacactcatatttggcagtgggatggtaaggggcaaactccagggtggttgatagaaggaattgctgattttgtgaggttgaagtctgggtatgtacctggacattgggttaagccagggcaagggagtaagtgggacaaagggtatgatgttactgctaggtttttggattattgtaatgatcttaggaatgggtttgtagctgagcttaacaagaaaatgaggaatggttatagtgataatttctttgttgagttgctggggaaaaatattgagcagttgtgga

SEQ ID NO: 60495 - DNA, 1305 bp, Cannabis sativa
tatatgttctattaaatttcgaacatatagttattcataattaaagtgatgtcatcacagtggaaatgattctatgtttaatgtatatgttctattaaatttcgaacatatagttattcataattaaagcgatgtcatcacagtagaaaataattgtgattatatgcttcaaattattatgtcctatgatttatcagcgcactagatttacactgacgtgataatcaatgataaggtttacttacacttggataagtagaatgtcttattcaagggattagtaaagtaaactaggattggatgtatcagctatatatcggacttgaccgatattaatagtagaaaagatattatgaacttaccgttatatcttttttaagtcaatatcacttagttgatcatagataatttgatctcaattctaagatggttaaactttagcttaaatatattgcacgagttctttgaattgtttgtttccagcttaccgtagaaccagcccaatacttacatcttaggaactcgatagtgcaatgagtgggagtgttaatcatagatatagacatctataacttttatgtctatttgaagtaaaacgatagtttctttagagtttagcttaacgcaataaatgatggatgcctcattttagtaattatattaattttttgaaatattatttagaagtagctaagtattttaagaataaagtacattgaagtgtaattttgtccctactcaatcaaaccttctatagagaatcaatgattattttgattgaaataatagataaattcatatcgtatctataattggtgtatattctaaatctatattgaagtcaggaagaattaataagttagaaattttactcagtaaatttcaaaatttacttattatgagtttggttacgtaggcgaatgttccccacattgtctgagttaatatcatcttatagactcaactaattgatttaataagtcaattagaattttaaaataaactatgtcttatttgagaattttcaccaagtttgaacaatttttagaagaaaaaaaaaataggggtttatttgttaattattacactttgtgggtgtaattaataaatatatttaaattatattttatttgataattattaaaataaaattagtattaaataatcagatgagaaaagtgctaaaattagaaagtcacttttgtttcatcaattgaaataacgtggaaaaaatcaaactctaaagccaacaattatattttggccctaagagattagattcagcccaactctttattttaagcc

SEQ ID NO: 60496 - DNA, 1184 bp, Cannabis sativa
cccctttgtgaaatgtggcacagatccatctcagaatatttttcccactagtcacagtgaattcgtactactaagacgtgaatatgaagattggtttcacgttaaatttgattaatatgccccctaattcaaaaatttaaaatactcttctttttatggtaaattttaacaagttttttcctcactcttacactcgttagtgttctcttaaaatctcaccaaacacattttgaaaaattgtgaaatttcacagggacaaatccaagaccgttgtgcatcacttttctatgggacacgttgagagaaaaagtagttttaagacactaacaatcattctaatcgaaatagtgaaaatctcacataattgatagtggtatccctttgtgaaatgtggcccagacccatctcagaatatttttcccattattcacattgaattcgtactaataagacgtgaatatgaaaattggtttcgcgttaaatttggttaatatgccccataatttaaaaattgaaaatatttttctttttagggtaaatttttacaagtttttttcttactcttacagtcgttagcgttctcttaaaaactcacactacacatcttgaaacatcattaaattttacagggacgaagccaagacttttgtgcatcacttttctattggatatgttgcgagaaaaaatagtttttaagcaataacaatcattttagtcgaaatagtgaaaatcttacatttttttatagtagtacccttttataaaaatttggcagagacccatctcataatatttttctctactagtcacaatgaattcgtactactaaaatgtgaatatgaagattggttttgcatcaaatttggttaaagtgtcctcctaattacaaaattaaaaatattcttctttttaggataaaatttaacaagtttttccctcactcatacactcgttagtgttcccttaaaatctcaccaagcacatctcaaaatattattcaatttcacaggaacaaagccaagacagttgtgcattatttttctattagacacgttgagagaaaaagtaattttcaatcactaataatcatttaaatcgaaatagtgaaaatttcacatttctgatagtcgtacccctttgtgaaatgtggcccagacccctctcagaatattttttcccactag

SEQ ID NO: 60497 - DNA, 951 bp, Cannabis sativa
agaagtcaatggatgactccataatggattacttggaaaaagaaatactactcgaagataagatagaggctaaaaactgcggtatagagctgctcgatatgtcatttatgacggcaggctttaccgcagaagcttcagccaaccgttgctcaaatgtattgatggagccgagtgcgattacatactccgcgaagtacatggtggcatctacggcaaccacgccaggggtaattcccttgctttaaaaataatgcggcaagggtattattggctgacattgcgagtagacgcctcaacctttgctagaaaatgtgacaaatgtcagcggatagccacgtaagccaaccaacctccaagccaattaaactccataacaagtccttggcccttcgcggtctggggcattgacttaattggagagttatccaaagggaaaggcggggtaaaatacgccgtagtcgcagtcgattatttcaccaagtgggccgaggcaaaagcccttgcgactattatagctgtcaaattgcgagagtttgtgtataattccatcatcagcagatttggcatcccttacaaacttatctccgataacggaaaataattcgattgcaaggaaatgcgccaactgtgcgataagttgggtattaaaaaagtgttttcagcagttgcctacccacagagaaatgggaaaacggaggccgtgaataaaataattaagcataccattaagggaatactcgaagagcgtaaggggtatagccggaagagcttccgcaagttctatggtcgtataatacaacccctcgatccacgattggcgaaactcccttctcgctttcttatgggtgcgaagccatgataccagttgaagtcggggcagggtccctacgaagagatgttttcaacatcagtcaaaatacggataaacaattgctccaacttgatctttta

SEQ ID NO: 60498 - DNA, 2217 bp, Cannabis sativa
  modified_base (320)..(322): a, c, t, g, unknown or other
  modified_base (1854)..(1855): a, c, t, g, unknown or other
  modified_base (2184)..(2186): a, c, t, g, unknown or other
cattaaacatagaaaccctataagctatctaaaccatacaggtactctcagcctatatcaaaattcagttctatttatagcataatcgatactcacttgttaaatctcgcatcgaaatcattaaacagttaattaatagtcaggcaattaaaagtaattaggcacgaataaaatagaatacatagaaattaggggggaaataaattatattaaatccataaaataatgccaaacaacatccatctagaccataatcaattgtttagctacacatgttcatagaagcaaaatcacacatattaactttaagaaagagaagnnnatagagaataaaataatgctgaaaaccctctgcagaatgcctacagtattgacttcggtctctgaaattcgtacttctttttccctctaaattgcctccctaaaatcaactccagttcacgctttatatgggttttccgggactaaaatgatataaaaacgcacatgttaaatgcctatttgaattaggaaaataccaaagcccacgtgagagaaaaagatgatttttgtgcagtttagggggtcgcccgcggcctgtgttggagtttcactgcatggcttcgtttcgactgtgatttttctgccgcgttgactgatagtattttggccataactctctcgatattactccaaattggatgattcaagatgttctgaaaagataagagagagatttagaactattatagtttgactttttccaaaatctaatcaaaagatagtcgaatttaggcttgaagttttttctttattttcttgtacaatttcctctattttatatgtcatctttttgtgagatttttttatcatttttttcatcttattcctttaatattttctattcatcttctattttaaatctgtaataataaaagataaaaagcatgaaaatgctccaaacacgatgaaaactaaattaaaaatatactaaacataatctacaattaatactagaaataaccgaacagttcccagacgaatttacttcaaatttagaggagaatgttaatgagactgaagacaagatttttggcctaaagtctcacgatttccatgtgttgtttcaacgcttgataacagggggcatgagaaagtttttcaagaaagaaggctaggatacaataattgaactgtgcgtatttttccaaaaattgtgctctaaacattgaatgttcaagacttgcaaatcatgcaaaaaaatattctagacattctttgtaaattagaaaccatttgccactagcatttttgacataatggttcactttgtgatgcatttactaaaagaagtgatacttgggggaccagtgcacttcaagtgtatgtatgtaattgaacaagccatgtctgtgtacaaacagtatgtcgaaaattgatctcaaccagaaggatctatttgtgaagcttatgcagttaacgaagtgttaagcttttatgaaatgtactttcgagaagtagttaacccaatttaaccgacaagatcgaaatagtgatgtactcccaaataagcctgaaagggaattctctgtatttaagcacgttgggcgaccaattggtaagaggaccatcgttctttaccaatgcaagataaaattaaggaagagtggtacattctaaacaattgtaatgaagtggagaagtagatcaattaagatactttttgcatacttaatatagttatcttcactgacgacattctctaacatgataatatttatgtgtagtgagcatacgagctacaacttaggggtgatcaaaatcttgacaaaattcaagagaattagtttcctagttggttcaagtctcgagtanntattgctttctactaattttgtcattcaaatacggtttattattctagtattgataacattgtttactcaatgatagatcaatcaactctgagcagataatcctgcagaagtatcagatgagttgtaggccattgcatattcctctaatccaacatgttattgttatccgtgatgtattgttaacggtattaaattctaagttgaggatcgggatgaaaatcgtaacacccaaaacagtggtattttggtgcctggaaaggatgataacaatgtttatagcgtactcaaacaagtgtacgagttcacttacttgaaggattgtagtgtnnntatttttaggtgcaagtggtgggacaaaaac

SEQ ID NO: 60499 - DNA, 1302 bp, Cannabis sativa
  modified_base (891)..(894): a, c, t, g, unknown or other
taccatagtcttaccctatatattgatatgtatatatttttggattgagtttgttctttcttcttttttgaatttgatagttattgttatttttttttctttcaacatatttgttgtaaagaccgcttatctttaatttgaaaattagcagataattagagtttaatcatgaaacttattaattattcttaaattatttatttatgatggtttatttgaatttagaatgcattttatatgtcatatatgaaatttcataaattttgcatgttttgtgcccgcaatattagaacacggtgtatggcttttagaattacatctgagtaattttttagtatagcggggaagtatagttagtcattaggaatgtcgagaatagtcaagattttagaattgaacaaaatacccctaagtgatgtttatgacttttagtgtgggcaaggacaaaaaagtctttttgccctatatttattttgtcctttagtgagaattgtgttgttttattaaatctaattttatgtgttttaagctgatattaattgagtaaaatcaattttattttatttaattttacaaaatatcaaaagataagcaaaaaatcaacttttctctcaagttctctctctccttcgaacccacctagaaccagctagggtttgggttatttttctacatttcaagcttgttccggcaagtgttgggtgatcttaagctctaggtaagtttctagtatcattctctttagtttcttgggttttaaggaaatagatttatgcatgatttgtgaaattagttgctgttgtttgcagtatgtttctgaagtttaaatatgttagatatgttgattcaaacatgttttgatggctggtttgttgattgagcaagctttgnnnnttagaactcaagcttggctctttaatggtgatttttgatattgagcatgttaggtcgttctattacttggaatatgtttattggggtataatatgcaggtctggaaggtttggtaaagtttggaatcgatttggttagattttggagttttttgggttttctggtgtaaactggctaaccgggcatgtaaaactggttacccggatttgctgctgggttccccaaaaaatttgtgttatcgattcgtgctagtttcaagactttggttggctaattccctattagtttaggatattactatgttaagttgtagtagatagggttttggtcccctgttgtgatttagcgtgtcacttatccatgttgttatcgatgtgatttaggagccggcacacctgaattcagaat

SEQ ID NO: 60500 - DNA, 1207 bp, Cannabis sativa
ggatcttatgttttgttattgtaagttgattaacattaacttattctttcgaacatttttactataaatcatggcagagactgttgctgctattgttgtttcgttactcgtgattatttttcaggaggttatgtatcccaacagacaatagtaaaaaagaaaaatcttatttatatatattaaaagaaaaaaagaaaaatatcattggttggtgcctagcttgtagaatatcactcagcccaaagtcatatttagactttggtggaaaatctttgatcatatctcatcattctaaatacaataaagatatttattactattgttattgtattactttgctacactctattctttcttcaatttgtcaattattttacttaaaatgtattatactgattttgttatgtttatttatttattcattgtttcattagcgatttatccttatacgcatttcatttttatttatttgttatctttttctaggaaactttgttcaagcaagagacattttagagtttttacttcaaatatttatccttactgcccaccctttatgagtcttctgaaggggatgggctgtattgatctttttaatttgaagaaactataagagagatcatgatacgcttctatttccttagaatgatagtttcacgaccttcagggttggtggagtagtaaaatttttattttcataaacttggtttcattattttaggttcatatgcctttttaataatcacaactttcacacttcccacaagattgatagtttatgattaactatatattttattaggtcctctagagatacatatatctgatagtgatacttaattgtaatgcttgatcattaagaataactcttgttgtgggatagttttgctaatataataatatttttttaacctacttctagcaaaatcggatgcgtgccttaaactatataaacgaagaaactgataataacctctatgatgctcacagtgtttttatcttggctccttttagattttattaagtatttagaattatatttatgagataaaatttaatatgtgatagttaggcttccatttataatttttgttacatattttgtgtatttatcttcctactttatatgtattacagggtatatatatttttgtggagatatgctcttttagggattctataaattgggggttcaaaatatggtggc

SEQ ID NO: 60501 - DNA, 3080 bp, Cannabis sativa
atgaaaaacaaaagttaacaaatctttttttttgataaaagcgtttatatcatagattcataaagatttagacctctcggtcattacagaatagggtgtctgggacggaatctactgggagggacccaaaagtctgatgggtaaaagcccatctagccacattatgagcgacaaaattacaggatctactgataaaagaaaaacaacaactactaaaagagtgggatgacttagtacaaaatgagatgtagttctctattgcccaacgagaccctttcccattgatggcgtcaataaccactctcgagtcactctccactataacatacttagagccgatatccagggcaacagtcgctgccaaagagcaggccgccgcttcaccacaaagaacatccgagaagttctcccgagctgtctgaactctaatcactttgccaagatggtttcttgccacaacagcaatacacatactatccaaccccacttttacatcacaattcagcttaatccaatcccgaggaggaagggaccaagcttcctttaaagctggggtaggactttggagcaaggtatcaaacatatcttcataagaattacaaatattatcaatgcatttgttaatatcaacaggacaattattatggaccttctcattgcgcaccctccaaatagtatccacaacaatagaagcatataagaatatatcatcgacacgagctcctttatgttttagatcccagatgaacttgacccaatcccaagctcggatgcctgtatcacacaccggatagataccccaaggagatgaacgccagaaatgaagagccacctcacaggatagaaacaggtgttcaatggattctacacaccttccacaaagtggacagctttgatcatctatatggaatctagtaccaatcacagctcttaccgggagggcactagacaggatacaccaccataagaccttatgacgctccaaaattttgctattccagagtttgttccaaagctttggggcaacaacacaatggggagctctttccaaggcctgagcaagataagcagacttgcacgagaactgcccattactctccagagtccatatccacctatcaactccgacaccagagggttgaccccctttgagaatggctgtaactgtttcattgtcaaaatagtggttcagcttttgggtatcccaatgcccattgtcttgaacaagatctgccacaaggtttaggttggggggggcacccccacttggtttcggatagaaacctttatagtgaggaatctaggggtcccgccagatatccgtagtctctccattagctattaacttgcaagcccctttcctcaagatagaattagccttcacaacactcttccagaaccaagaatcagaatttttgtacctgcaggtgagaaaatctttgcccctgaggtacttggcttccaaaactttgcaacataaagattggcttccgtttaggatattccacccccattttgataagaaggcctggttcatttctttagttttcctgaaacccagcccgccaaaatatttcggaaggcagagtttatcccaagccttaaggtgaataccatgatttcctttctcgaaaccccaccagaagtctcggaccaacccatcgatccggttgaccatacgagtagaaagttttatggtttgcatagcatacattggcagcgacagacccacagattttataagagttgctcgccccgcctttgacaaagtttttgccttccaaccttgaagctttgccgtgagattgtctaaaataaaattaaaatcagcatccttttgcctagatctgaagagaggcagacccaaatattttatgcacccctctggataatcaattcctaaagcttccttgatatcacgccgcatttccatcgaggtgtttttactaaagaaaatggttgtcttaagcttatttacctgctggcccgaccaagaagagaaattttctaggcaactccagaatccatttgcctcaattaaattagctctacccaccaagattaaatcatccgcaaagaaaatgtgggagagcaccgggcctcccctgctaagatttatccccttgatgttaccccggtcaagggtattggagatcaatcttgaaagaacttcagcagcccagatgaaaagatatggggagagagggtctccttgacgaaacccacgagagggtttgatgttccctacctgacccccatttagacagatgttgagggtcgtagttgaaatacactgcaaaatccaatgacggaaccccataggaatgccagagcattctagaacatgatcaataaacctccagctcagcctgtcgtaagctttaacaagatcgatttttatagcaaagaacccttccttacctttcttcctattaaaggagtggataatttcttggataatcacattattatcatggatatttcgccccgggacaaaagcagcttgcgtagggcatatgatagaaggaagaatgggttttatcctgtttgctaaaatcttagctataaccttgtacactacattgcataaagaaataggcctgaagtgatttgtacgtttaggattttggaccttcgggatgagcacaatgttcgtggcattaatccctctatgcatgtggccatttacaaagaagtcttgaatcgcatcacagaaatcagcaccaacagactcccaataatgtttataaaacaaaacttacatcccatcaggacccggtgctttatggttattcatggcaaatagagtttttttgatctcatcagaactaggagagcaaacaagagcctccaactcttcttgggggattcgctcctgaaacaactgggagcaattgtaatccagacaattcgcagcctccgtaaatatacccttaaagtagtccatgaactcactccctatggcttcccggccggagatccagacattatctttgtctataatactctcaatggcatttcgacgccccttaatggtcgccgaacagaagaaaaacttagagcatttatccccatctttg

SEQ ID NO: 60502 - DNA, 789 bp, Cannabis sativa
taaacatctttgtaacatctcaaaaatggtatgttggccaccaattgcagtatctgtaattattttgttataaagaaaaaaatattttttagtttttttttaaataatatatattgtattataataacaaatttacggtatcaaaaataataatcataacagatataatatttaggaagtatgagtaaaatcatttttatatagtaggaatgtttatattttcaatatttagaaaattataatttttttttatatgtatatgaatcaacatatatagctatagtatgcatcttaattacttgttttttttttttgttaaaaaaattgaataataaataaaaagtgtataaaaataataaatggagtgtcaatctcagttaataaattactattcgtagttattcaattaggagagaaaagaaaatagaaatttttatttacacttcataaagttataagtagacttttattttatataaaatatatatttttaatatgtatgaattttttatttttttttccttatgttcttaaaaaaatatacctataaaataaaaataaaatatattttaaatattaaggtaaaaaaataaaaataaaaactatatgcaattttattaaaaaagttaaaaaaaaaaataaaactaactattaatattaaacaaaaataatgtgaatttattttttaaaaaaaatattaaaattgagttttaaaaattaatttaagttatataattatattgtaatattatggtgcacttatagctttatcagtgcaaagtggaaatg

SEQ ID NO: 60503 - DNA, 539 bp, Cannabis sativa
tttgtaaaaattattgattggaccgtattcaatatttttaagcttatccagatctacactaattatatgttagatgttagattttaacttctggtctaatccaattcatttcagtcatccaatcgatccaacatgatgtatttcatatacatttattgattaatttggttttatctaatattttagactagattcatccaacctaagaaaaataagagtaaaattttaatgtaattttcatatataaatataaattttacgcataacaatataaaatttaattactcatccaaaataaatgaaaatattaattagttcgattagatgttggatatattgaattttcgaacaccacatttaccatctcatccgaatccaaatttaaattttccaatcgatccgatcacagttaaatatccaatatttggcggtggattgtaattgaatcgatcaattcttattggatttgatcaatttatgcacacccctagttgtgacgataaatggtgataccgttacttcaagcttttatttctcac

SEQ ID NO: 60504 - DNA, 2022 bp, Cannabis sativa
aattacaattgttaaacacatttttaaaaaacacaatttttgaatcacaaaccaatcaaaccaacaaacatcaaaccctaattttgacactataaacaatttacaatttttcaaaaatttataaaaatgttgtaatacactgtcataaaaaaaatgaaaatgaaaattagtttagtatttgtttttgtataaaaataactaaaagagcataataaaaattgaatgatatcactcgttctaattataactcctggtgcacaaagctttccaatatttcaaatgtcttgtcatgacaaggctgatttgtctatcttattttcataattaacaactaagcacgaaataagacctacttacatatagtagaagcattgtctctatcgatctatatgtaacatctacacatctaattgagcttaataccattcaactagtccagagcacactgcacaccacaccacattagtgccttaaattatggtttttttttttttttgtattcttttgtagaataaggctagagctttcaaagtcaatggtcccactaagtagaaaaattaatacaattttatcttcgtgaattatgctactttggtaatttgcaccacatatttatatagataaaataaacctacataaatataatataatatatatataaatatataggtttatcctcctcgtattattaagaaccaacattaagttcaacattcgtttgatcattaattgtttcgaagaaaaagttcatgtttaaaaagaaaaaaacaaaaaaaaaaaattaaaacagagcaaaattctttgaaccatcaaggcaattgacgaacaaaagcattaaggagcgagtaagttagttgactacttcaaaataaagtgagtgtgttttgatttttgcaaatatattccaaattaaagatgcccaaataagaagattatatagggtatacatctatctcttctttaaagcaatgaaacatctcttgagatcaaagtctcaactactacaaaaacccctccttatatcttttgtgtacattgattaagctgcaagcgaaaccttgttgatcttctctctttctctctcttgttcccatggaaaaacgccaaaacgggttgttgccagtactctgtgttgtcttctcccttggcctatgttccgcagcttcatgcgtagccgccgaattaaagagagccaaggtatgtaataacgattcagcctttcaggtatttgtatatttcaactagataatctgaattggtcttgttataggtaaaggacctcaagttgaacggaaagcaatgttatttgcctgagactcattcatttcggttgggaattgctgctttaatttgcctatgcgttgctcaaatcattggcaatcttgtagtggtgctgctttgcttcttattccatgccaaaactcccatggtttcaacttttcttctgattatttcttggtcaatcatctctctctctctctctctttctttctataaaataaaaattccttttactaacatgtgattgttgtttgtttttggaaattattattaatgggtggtggtggtggtggtgtaggataagctttggaatcagtgtgatattgttgggtagtgccaccagtatgagtgggcggcagccatacggaaaagggtggttggagggtgagtgttaccttgtcaaagatggtgtctttactggatctgcaatcctcgtgttgctcacaatggcctccacgcttgcctcggccattactactattaccactaccactatttctcaagttaaccaacaacaccaattagatccaaagttctagagtacatagaaaatttgggcatagcatgctattcattccattattattatgtacatgttataacagatgagtatgtacatgttataacccagaggattaactcaactcaactcagactcaagtcgggctaaggcaacttggcctataaaggcgaaagcttcaacttcaattttaaaattcgggtggcgaatcaagtttcttc

SEQ ID NO: 60505 - DNA, 1688 bp, Cannabis sativa
  modified_base (771)..(771): a, c, t, g, unknown or other
tacttatgtcgctaaaaataaacattgggtttatgccacttaaaaaccctaaaactttgggtacttatgccgctaattatttggtaatatatatttaatatttaatcttattttttagttcctaaaaaaatagctttgctatctattttttgctcaaagttttataattattgattaggattaattaccatataaagatggatcctagtttatgatatgataaagtttattagggtgaattttagttttttttttttttacttaaataatttttaattgtttttagttcaattttatgtttattagattaattaattaccttttaaagatggattccaatttagggtatgaattaagaactctttttgtattgctttttctaaatttcatatgatttttgttttgtggagaattaatgtaaagatttaattatagttttcaatttttaaataaaaaataaattagaacaagagatgtacatttcctcatgggaatagccccatggggacccgcctctaatgaggtgggaatttcccgtatagataaggaacagggcggggacgaagattgtttcttgtccacgatgttaaacggggcgggaacgaggattacacctcccgtcctgacgaggactcgtttagtattttattttatatttttattaatattttatattttataacttatagtttatgtttgcattttttaagtatattagtatctttttatgatttttaagttattttttgaataataattaatgtgtaatantttaatttttatgtagtttaatttaatatatttaaatttttattatactttattttcttattaggggattctccaccccatccccgctcctattatgggattctctgccctatcccctgcatccccgatgagaaataagcgggataggaattaaaattcttaatggagatggagacaagggagcactccctgccaattttctgccccacgtgcatctctaattggaaccttatttcaccatctctgtaatataatatatgaaataagagcatctctaatggtagcatcccttaaggatgttaaaaaaaacactccaatgatataacactcttcaaaaatactataattataatttcacatgttattatttaatatacatccttattttttagcaacaagaactttttagcattaattttttattaaaaaaatgaatagcatcaatgctactatatagcattcatacaaatttttagaatgacatgtatctttcttcaatagtatagcatctcaatattttgccacctaatatatctaccttattaagcatcctctaaatttttatcattagaaatgctctaagttcatagaaaaaaaaatgaaaatcatacttggaaaagcaatcctctatagggtggtgcgtagtttcaaagcactataaattctgggggctcaaaaaattaatcgtatgtataataaaaaaaattttttaaaaaaaggtaatatatatcgtgaaataacttacacaattagtgagagttacttataaggtcatcgttaaattttggaagatgcttatttatgtagattgcttttttaacaaaacacaagaatactataccatttattttcgtttagtcaagctcgaaggaaatcatcttttactttctatttgtgagatagaagctatagattcc

SEQ ID NO: 60506 - DNA, 1058 bp, Cannabis sativa
aataatcataatgaaaatgagaattacgagtttttgtgattattttaaggtatttacatcttcttttctaatcatatctataataatttattattaattatatgttataattgttagaaatttttttacctacatcttaatttactactcagattgtgactaatttaacatcataaatataaattttctaaaacaatgaatatatacacataagagattagagaaaaccttacattgggtgcaacagaatattatgtctctccttccattcagatttataaccttgatttctgtctgtagtagagtttaatcaagatttgatcttggatcttctctcctacgattgtgtttaacacagtcttccacaaacacctgagtatcaccttaaatagtatgggttgatactcaaacacctttagaacatattttgagagagagaagtcgaattccatggtgtatgcaattcgaaatatgtgaatggaagagaaaagcaagaccaaacattaggtttttcaatgttcttctctttctttatataagcattcactcagggttaggtttagatgagattgggcttaaaatatagacatgggttgaatttaatctcttagggccgaaatcatatgatgggctttagagttagatttttgctactttatttcaactaataaatctaaagtgtcttttctaattttattccacttatctcatctaattatttaaataccaattttaatttaaaaattataaatacctattaaataaaatgtaatttaaatatatttattaattagactcacaaaaagtactaattgacaaacaaaccccaatttctcttttcttctccaaattgtccaaaaattgtccaaattttataaaaattctcaaataagacatagtctatttttgaattctaattgccttattaaatcaattaattgtgtctacaagataatattatcccaaaaaatgttgggaccatgggtctatgtaaacaagctcctaacaagtagatccaaaatttatcgagtaaatttcctaacttattaatttctcct

SEQ ID NO: 60507 - DNA, 1421 bp, Cannabis sativa
aatgaatttcgaatagcttaaactactatcaagcaatctgactccaactctactttccaccacgttaaaaaattcttgcttttgaatcatataaatttatttacttaagtgagatttaaatcgaacagaacttagttttataattaattaaatataatttttactcttctcttctagagggttgcttcttattctattctttataaaaaattcttcaaactatagtaattattgtaaataaaagtagctttaaatatataatattaactctaaaaaaataagactacacaatcttagattttactcttaaagtactatttatgtaagtattttttatttgtactctcaaattatatgaatgaaatgcaactaaaaggataaatttgcaataatttttatatttcaggagattttttttttttaaaaaaaacttaaggataaaactcaagtgtcataatttagggataaatttttatttactctttgtaatttgtctagtagtaccacgtgaacttatgcctatacttagaaaaatattacattaaaattacaagagagaataggaggattacaatcaaaatatccaaaatacaaataacagtattacatcaagattacaaaaaaaaactagagaagaagaagaataacacacaataaacttaaggctcaaggaactttgttctaaaagtcatttcgtctctcatatggacacttaaagaaattctagaaatgctcttaagaatttatcaagcctcatatgctcagccaagggtctaaggatgaacatttcctcataagtaactaaccacaatgaatgatttcaactacatctctcacaaatgaacaatatgacctctatttatagagtattcactcccatatgaacatgaataaccaccataaagccattggatgttaccaatcataattgggtgtatggtattaattggatgatttggaggagttttaggctcttagaaagactcccaaactttcaaaaatatatgcacttgtatactgaaaaaagtaattagttactagttaccattttttttttagctttagccaattattctctaaagtgttccaaatcacttccacttgattttgagccatttatacaccttataaatgaataaatcaagtctccaacatctatattttcaatagctatcattcattcacattcataaataattagtaacatttttttttactaatttaagagttaaaaggaattgagaattacatattcaaatgatcatcaaaattaaagaatttgtaactcctattttgtgatcattctacacatattttgtacctccataatgtttgttataatttgataaaattaataatttgtcatacttaaaatatttaatctaaatattatattatataaaataatatatcattctcct

SEQ ID NO: 60508 - DNA, 1093 bp, Cannabis sativa
caagggattaaatggggaagaggtcttcctttatgcttcaattgtggtcgacaatttatggcgtactcgaaatgaaaaggtccacaataatattactttgaatttgacaaattgtattgattctattcaattttcttttgcagacttgcgtgctactattttccctatccccgttccgtgcctggaggaatgctggtctccccctcctcaagactggattaaacagaattgtggtgtcagagtggggcttgatagcatgtttttagcactggtggccagaaaccatctgggcgaggtggtgaaggttcacacgacttgtttggatttcactgatgcgctctgtggggaagcggcggcttgttgtttgtctatctctgcagctttggaagtgaaagcccagtatatcatagtggagagcgattcgagggtagttataaatgcgctcaatgggaaggagacccgttgggtcattagtaactatgtctcattttgtaacagtcactcttcttgtttttctagttgtattttctctaatataagcaggacttgtaattgtgttgcccataatgtggctaagtgggctttttcccacaagttggttggtgatattccgttatccaccatccctttgaatattttatgtgatgactgcgaggtctaatttgttgtttaatcaaatacgctttcattcaaaaaaaaaaaaaagtccctcaacacaaccgcacaaaatattaaatattatatgtgagtcatgtgggtttatttaagtaaaataattgtatattaaataaaataaatgtacttttagtactctcatactttctactagaggtgggtgttcgcggtgcgggtggtgcgatttttgactattttttcaaattaatccgcacatgtagttctttcaatttctcaaactgcacccgcaccgtaaaactaaaaaaccgcgccgcagaaaatggtacggtgcagtgcgattttatgcagttattgcaatttgaattatcactaaataattaaactatcacaaatacaataaagtttgagcaacacatatcaaaaataccataaggcttgaaaataaaaatgaaaaaaa

SEQ ID NO: 60509 - DNA, 2053 bp, Cannabis sativa
gtttaggatgttaaaaacatacctattagtaaatctagatcctggtaaaataaattccaacatggacctcaggaggaggcattgtaggagcaccctactgtcttatacgctagatttcttcatcttgttcattaatcttggcttacatttcagcaaacctatgttcccaattatgggcagcttgtggtcgattaacatccccccgaccgcgtgccctaccccttaggcctctgccttgaccatgaatattaaggggaaactgaactccctaacaaccactagatttgaccgaattactctagcttctcgcgttttgcttggtgtccattctatttgaacagcctgcaaaaccatgagctaaccctgtcagattgccatcaagattaaattctaattaccacttacttgagaaaataaaacatgcgcctattcagatatcaggctactgacatgcttcctataaagcttttcttatcacatactaataaagcaaattactaaagcataaaaaagcttactgaaccatgagtcgagcataactatgatgatgattgaacatatcgtgatgatcttcaaaagacagcctgacagctctgatatcaaattgtaacaccctagtaatctaggcgtgttattatgttcttaatacttactgtgcatttcgttaataatcagtaggtttattgaaaagtgtgatttatttaaatttttcataattaaaatttaaacttggatatacaaatactttacgtaaacccggattcctttttaaaattacaataattatacaaagtacttaattacaaaagttttcacctagcgactatcaaaataaagtttgttgccccgaagatcaaacactccagatctaattgtcccaatatgtacaaccttcatctacttgtgctaactactgttcagtcttagttttgtctttacctacacatataaacaatatctgtgagtcgacagactcggtaagaaaagcacaatcataacataatataaatcggattataaataggcggccatacacccaattacaatcatatcctgcatctcacgcatactgagtctagaactttcgtacgacagtactattgaccataatatcagcctatactcgatactctagtcgtaccgatgtgatagcatcaatagtactataccaaacattatattcgttagtatttagtgtaactttgtgtacactaatatttccattactaatatgttatctaataggaattcataaacatgcacgctaaacatgtaatcacatatgatactattataccaatcttaccttaattccgaattcaggtgtgccggtcaacctaagtggaaactgctgttcgacggtttagaggcccctaagtcacaatttacgtaaaactaataagtgatatgctaaatcactttttgggaacttagactcaaaactaaaagtttctctatcgatagatagcatgacaatacactgaagattaagaaaatactaaaaaatgagattcccaagaaaataccacaaaaaacggcagtctatttttttgggtccctaactgttaaaaccagtttctattttttacaacagaaacataaaaaatcttatttctcaaagaattctactccgaatctctcaaagagctctagaatacctaaacaagccatacataacataaactaactaaaaaatccatcatcaaggcaagaaatcaaaaaccacatcaatttactttaatcgtgcttgtgttcatcttgcttgtttacgattttttttaaatttgttgataaaaaattgtgtcaataaattgtttacctttagtttctgcgtttataaagcgttcttctatttgtaatgaattagtttgctttctaatatttttgatgcatccctagtttagattcatcaaacaactaataaaatgttcatgaattaattgtgtatacgcttagagtaagagtagatagtaaatcaacttagattgaagatttttcatgttttttttattagtttattaaactcttattgttattaattaacaatttaatt

SEQ ID NO: 60510 - DNA, 1061 bp, Cannabis sativa
tattcccagatgaagtgtacgtggtaatcacggaaggatgccacatcagattgtgcacggttagtatataccctccgcccctcggcatcacagatggtgttataaatcagaagttatccggaggctctccctgtcagcaaaggcagatgggactttgagattcttattaataaaactactataaagaaggatcagaagtcataagtgcttcaggatggtaacaggctagtttggtccgagaaagccttagtcagatgttcttgaaacctacttgggtgtgtcttatccagagctaagtggacagttgcataccctttgacaccaaatcagatcttgtcccctgagtcagaccttattagtacgcgtacgtgctctgtagctcctttttgtccaacgacttgtctagataccaactttacaaggtgaaacctttgaacgacacgtgtccttagtcccacaaattggattgtagcagccaaacaccacaagataagaaggttctttacctaccaacaatcagatcgccatgttgtaacaccagcgattgtaacatgctgagtacgaaatcctaggtgggtgaaaggtatgccctcacccacacatgtgcctataaatacccctatttttcatgtgcaaaaggtgaacatttttgaacctctatcaaaaattcctataagctttattctttgccaagagaaacaaaagggatacaaaattaatatttacacagtaaatacttgtaatacttaaacactcgtcgacaaggctaatacaacaaactcgtggattattaacgtccgaaccacgtagaaaataacttgtctattatttatcattttacatttttcttaagctctaattaatcggtttctaaaaatctcaataaacactagtaatttaaaaagaatatataattttattatcttattgtttctcttataatcaatttaagtaaatattgtttaattaattttattttaaattttgaaatcttatgtataataattttttcatttaaattcttattaaatttaaaatatattaataaaattaaaattaaa

SEQ ID NO: 60511 - DNA, 1337 bp, Cannabis sativa
  modified_base (783)..(784): a, c, t, g, unknown or other
tatttttcatatgacttctattgtttttcatactttgtaagtcctactcttatcagtcactattcggatggtcgttactaagaataaaacacttacaataatacttatctttcaaaattctacgacgttaaattgctaatgaacgtccatctgttagggatgaatctcactaaaacaagaactatgagaaccaacaatggagatcgaatatctctttaattaaagctcattatttaaaaaatatatttttaattaatcacttattttagcctatatattttaataataaaaattacttaatttaagttggtccaaaattaatcaaaattaattttcaactttaatttaatttttaaaaataaattttgaatatctctatatatataattttgaaattctattaaaatataataaaataaattcttgaaaaatatctattttaagttgttctaaaataaaaaaatattttaacgtaaaataaatttcaaactttaattaaataacaagttaagtatcttgaactaattaccttattttgataaaatatccctatttaagttgatctaaaattaacaaatttcaacttaaattattttaaagaatatctgaataaataaatctacttaattattaatttcaaaatattctaatttaagtttatcccaaatcaatttgaaaaactgattttcaacttaaatatattttctatgaaaattcaaataattaagtatctagaaaaagctaattagttataactcctttatttaattaaatacagaaaannacatatagtttatcttgaatatatttcattaaactaagtgtgtttttcttaaactaatttaaaaaataatctgacgaaaaattaatttcatgtatttcaaaattaattatgttgctaataaattttattaggttatattagtgaaattaacctgttacaattattcaaataaggcaaataggccttcacaataggggttattcatgtgagggaggaccgagttcagtatgtcgtatccactactatggccccttaactctcacacaaggcccaaaggagatgaatttaaccttaattaaacaactattattcattgaataagcgcaatactaattggacctaaataaaatatatcataagtgacaattttattttagcaacctagtttattttaatttatcaaaatttaaatgggctccctatatgcatctaggcccaaagccaacgtataggcacagacacagacacactgatttaaatggatcctatcatgttactaggtttatacacagatgaaagaggattataaaatttacccgttacaaattattta

SEQ ID NO: 60512 - DNA, 932 bp, Cannabis sativa
aaatttatacttctagggtgctaagttaaatttacatactcctaattaccccaatacttacactatcaacttatcacaatattcccatcaaaattaataattaaactcgttatgagatttttggcccccgctcgagtctccatggtcgccaaacctgaaaatatttttattctacatataactcatattacattcacacatgctatataaatctccgtaatttataaattacgcttatttacttacttatagaaaatttaaaatttatgttgaactagattagtaggatcataatcccacttattacatgcttaacccataatataattataaatcataattacttaccattagacttattgggatattacacctgctccttgatccctagtatttaggaggaccttccttagcaccaagtctcaggtcttgaaggcatgcatacagactctcgaattatagtatcatgtcatccttaattgatatgctgttaatctcatatgggctgcatccctcctttcctccaagagatctaggttttctgccattactttttcattggcctcctcattgaaattcttcacacaaaatgagctgagcttcaactcaatgagaagtacaacttcacacccgtatgccaaggagaaaggagtttcacctgtggtggaacaaggcgtattcctatatgcccagagtacatttggaagttcatccacccatctacctttacgtttctccaactttgttttgaggtttttcttgattatcttgtttgctgcctcaacccgttagcctgtgggtgcaccaccatcaagaatcccctctcaatgcctctctcagtgcagtaagaattcaacaaatctcctttaaattgggtcccattgttagtgatgatcttgtaaggcgctccaaatctacatatcaagaattta

SEQ ID NO: 60513 - DNA, 1016 bp, Cannabis sativa
tccattttaaaacatttatcgtttgttgcatagaatgatataatcatgtttttttgcttctctttttttggggctattgaatggtgtttaatatatgagggtcttctttaagagctaacagcgagtggtgttttcaaaaaaaaaaagaaagttttgacttttcttcttttcttttttatttagttcatatatatcaatttttttattttttttttcaaatatgattgcaacaaaaaagactttttttgttgtgtgattttatacataaatattaagaaaaaattaatcgtaccgaagttaattgcgccaaagacatgacttgatctcattatgatattagtctaaaattgatttgactttttttttggtgtgattttatacttataatgtgattcaaattgattttttttttttatgtttatgttttctaactttgtatattagttctttttctttccctataacattacatgaatagaaaaattgaatttttctttcttttgttctcagataacacaatacttgacatcaattcaaacttcaattttgtcatgatttgactactaataatttgagttatagtagtgcaagaattatcttccataatttctaattggtcaaatgcctctcctttcctaatttagtagattctagacttttgtatttatttaatttatgtagttctaccaccatcgaaaattatttcaactgtttttacaaattgaagcatctcgtggccaagttattacttttggatgagatgtttcaaaagaagctgatgttgatttaatgatcaaaacagtgagcaaatgttcttcttcatattgttttttcacattgtatgttaaacggtggaatagtttgtaatatttccatctcaatctgcaggcagttgatgcttggggaactgttgatgtattagtaaataatgcaggttgtttgaaactttccttgtcttatgttgttttcattccacattcgatctcttgatgctttttcggtgttttctggaatca

SEQ ID NO: 60514 - DNA, 669 bp, Cannabis sativa
aaaaaaaaaaaaccattcataaatataatacacaaaaacaagaaattaataaacacactatgacaaatgttctcctctacagtgtctcagtgtctactatgtagtgtctacacactacactacacttgcaatagaacaaagctctttattttgattagaaatcttcccacaacccacatggcatttgtaattggttttaaattttttatgaaaaaagttggcatttatccaataattttacaataaatcctctcagctcggaaattattcaatcaggatctttaggatttttttttttttcttgtgataattgtatttttttcgaaattagaaactctaacttcacaaacaaatcttaaaagtgtttttttttttaatcctgttgctgtaaactcaaagcaacttaataaaaatcttattcaatgctataaaataattatggatgttaagaaaatatatgatcccatctaatctaatttttaaattgtggatattgcacttgtgcgtattaaagtaaaaaatttaaaatttgcttttctgcaaattgaatgttgttattcttaaaactaattattctaataatattgacatccatttatatataatagaaaaaattaaaaaatagaacaaaaattaaaaaaaaaaatacaaaaatactttaacacggaa

SEQ ID NO: 60515 - DNA, 1512 bp, Cannabis sativa
ctcaaagcataatgaaacataaagtcttatggtgaaattaatattactcttgcacctgagccctgctcgttggatgttccatccacatataacttccaagtgtccgcatctaagtgaacaagcggattctcttctagagttattgcttctattaagaagtttgccaatgcttggcccttgatggatgttcgagggtgatatgttatgtcaaactgccctagttcgattgaccattttaccacttctgtacattctgagtgcttccgaaaatatggggtccacctaaaatagtcgctacatgaccatctaaagttgttaatacagctctaggagggtatcgatttccaggattgggagctacagctactgtccctgctggagcattttgtgccccctgaagggcttgtgcatttggagcttgtattctaggaagttgtgggtggcctatccctgagaaggatttatggctccttactgtttgggcatgaaaagttgtccatgtgcaactgcgctgtcctagatagataactgggattctcacccaattggttaacggtccatttcataccaacccttctattcatctttcaagtaatcacactcattggtggtgtgaccaatatcaacgttatattcgaactttttgttcggatctctttgggttttctacccttgtatattagcggagcttcctgtagtgtaccatgttacaagtttccatgtatacattattccgagtatctatgagacttgtgtacttggtgtaccttgattcttgggttttgcccttcttcgcagactcactttgattgggacccttcgtactccttttactccttaataggttatattggactctagaatttccagtttttagtttgtttgtccagtagcggctggctggttgtacaactggttgtatggaagtacttggtccatatatcgtaggagtagtaaaagcaattggcgaaaggtaaatggatggagttgccagaaaaaaaaaatataatagcatccaccaaaaaagtcttatcatttaatatataaaatcaaacaaagagcataaatcagttccctattagatgaccatacttcttccctttaccagccttcaaagacttggtttgcttctcatcctcactgtcaatatttttgtcattttctctttatccataggaaaataagagggcagcaagacgagttcgataaacttcaatgtcaaagtcattagtgacatctttgccatgatgaagaactccagaaaagtagcaaaaaatgtgctacaatcactattcaaaaataaatagaaaaacacatcagttaaacaactattatgcaacacaaaaataacacaataacaacaactcacttcttttatgaactggaaggctagtgatctccaccactcttagtggagctttcaaatcacaatccaaatcaggaacattggacctattcttccaaaacctaagaagatcaaaaaataatgggagcaaaatagaatatgccttc

SEQ ID NO: 60516 - DNA, 718 bp, Cannabis sativa
ataagaaaaataaattatattataaaatcttaattatttagaattatataaatgataatttttaattaattaatttattatagatatgcattattctaccgttagttttcaaactatatatagtttgaaaaaagatatataaaaattaataaatttatataaatcaatttcaaaactactgtcatcatcttatctcacttgtagtagttgtcactacattaaaagttattatcgtatcctacttttaatcgtcattatccttccaatttattaattgataatgagaaaataaatagaactgcatctaattaaatataaatttaaatagtagattttagatatttttaattaaagagatatcttcaaaaaaaattagaatttgaaaaatcatcacacaaaatataattctaaaaaaaaaaaaaacaattgagaaaatgactgttatcacaaaataaatattacgtgatagatatattgattttttttttcaaatatttataaaataaatacatttagtttagatatatattttataaataaatagtattttaattaaaaaataaataaaatagtaacattttttttctataacaatccgtttagatttagataaatagattttttatgtaatttttattttgataatatgtgcaattatttttagttattaattttaatatcaaaatttataatgagatcgtttgatatttttattttt

SEQ ID NO: 60517 - DNA, 683 bp, Cannabis sativa
tttataaatactttatattggttgctaggttttttatttctttcatctctttatattttattcatattttgtaagagagtgtctttattttgtagagaaaagtgatttcaactctacctctgtgactgtgtttatgtcttttgtattgtcttgatcgagtctgtaactaggtgtcaactaccgtgttaaaagattattagttcaaatcataattttaattagttaaataaattattgaattgtaactataaataccacatatgactacacaagcaaattattcaaaaaaaaattctaaaaatatcacaaaaaaaagtcaagttttcattaattattataattcgaaaagaatttttgtcacttaaaaaatttcaaaagacaataattgaaaggaaaaaaaaaaagctaattgtattgatttttgtaaatgacaaatgaacggtccatttaattgtgttttttctgttggtggtttgttttgatatttcatccaccacaaatatgagttatgggtatgtgtgtggtccttcaaatagaatggtccattttaactttttattatttcttttatataattttggttccatgccagtctgcaactagcttaatatcagtttctcataaagaattaaatatgtatatacatattacattgtgtaaaaaaaacacaaatatttataatg

SEQ ID NO: 60518 - DNA, 1534 bp, Cannabis sativa
tctctctctagactttctctctctagagtttggagtttctgatacttaaacagttgttgtaattaccatctcgtgaaaaataaaaattcaaagtagaggtagccccactactatcgtgacataggaggtgtactactatatattattgtgtctctcttattaattactttctactttttttattcttgccaatctagtgagcaggtgtggcttagtagtctagtctagatttttgagtaaaaaatcattataatttcggcaaaagttcctaaaaacttagagttgatgcagattaatctccaatctcgaaaattggcgctaatagtccccaaggtcacattttatataagtctatcggtccctaagttaactgatctattaagtactactgacaagaaagccacatgttgaaggtttattggtccaagtaatatatttaattaaaaataatttaaataataaaaattactaaaaatagataaataaaaacattgatatttttgcaaaaaaaaaaaaaaaattattttctttttcttttttatttgctttctctttccttatcttcttcttctttttcttcttcttcttcttcgtggataaactcgtccatggccatgaaaattccattgatggagaggctaaggaacaacctcatttgccatcctgatatgcttaaccgccagctttgaattttaaattttttgcaagatctttgttcagcatcttctctccttctctgcctttcaccaccatcgtatcaaaatccaaaattatagattggctcgtcggactttaaaaatccccaaattggagccattacagggtgaggcttcgacgacgaggcatttttagacctctcactagaaacctattttgctaaaaaaaatcaaatttgggcagcaagaaggatggggtatgaaaggggagcatggggacaacaggacattggacaaacatgggacggcagttaatcttgaggtagtgcagctcgaatggatctaagagaatcgaagcacgaaaggaggtgatgatggcgtcactgggttgaagggaaaggcaaggagaacctgaggacgaatacttggattttggggtgatgcgatggtgtgggactggtgagattggggttcaagagagataggacgatgagtggaaagggtgaaaattggtcagagcttcagaccatggtggttatgaaggttttggtacagaatgaagtagacgaaggagagaaagaagagcaagggtcgtgagaatgaaaaaaataaaaatgaaacaattatttaatttcaaaataatttatttatttttcttttttcaaaaaagaaataaatttatgattttaaaatttatttttggagtttttttattttttttttaattttttcaattaaaattattatttggatcaattaaaaattgacaagtgtcattttatttgggtttaatagatgagttaacttggggactaatggacttacacaaattgtgagcttaaggactattacctccaattttcgaggttggagactaa

SEQ ID NO: 60519 - DNA, 725 bp, Cannabis sativa
  modified_base (457)..(461): a, c, t, g, unknown or other
gtagagtagtttatataattttttataactttttttttctcaaatttttttaatagaatttgaagatatctctttgattaaaagattataaaaaattaaaattttaaataagttgaaatatctaaaatatatgtgaggtacgatgagaacggttttaaaaatttaaataaattaaaatatctaaaatttaaatttaaataaaaatttcaaaaaaagcatagttcaggaaaaaatagcctatttattattctaattgttacattttttgtattatttttctcattttacattataattattatttacacattaagagctatgttcattgtactaataaaaaacaagtttatactcagattaaaagaaatagttgataaataatttaataattgtaaggctatggtagtcaaggacatatttataaaatcaattgagtaaattattattattattattnnnnntattattattattattattgtgaattaaggtagaaatattaaatgttattaagataattttaatataaataattgaaaatatatttataaaccgctccgaagcgcgtttgtttcctagttttattaatatatcatttgaaattgttctccactaataataggacatttccttttctttactattattctaattaggcaataatttaatttttttagtattataataaatagttacttaaaaatataattctaatgtatagtaaa

SEQ ID NO: 60520 - DNA, 1157 bp, Cannabis sativa
  modified_base (1119)..(1128): a, c, t, g, unknown or other
atgtgggatgaaattcaagaaattcgcccaagaattccttgtacttatgctgcttctgtcgataatcttgcgtccttgaatcaagaacaagtccttcaatttctaacaggtttgaacgaatcatttttccctgttagagcacaaattcttctcattgagccttttccctccctgtctaaagttttttccatggttatccatgaagaaagacaaaggaaactcaaaaacccccaaattcctacactcattgctactgcccaggatacttctgcttcagctgttgcacaaaatccttcagtatcagctgctgctgcaaaccaagggtgcaacaaacgcatgagaccctattgtaccaattgtcacaaactaggacatctcaaagaaaaatgctttttcttgattggattcccacctggttatggtgacaagaaaaagaatgacaatacccaaccctcggctaatcaagcatcaacctcaacagacccctttcgctcttggctaacatcaccaaacaagaagatattcaaacccttatttctctgctaagtcagaaactgtagcctacatcttcgattgcagatgcatctcagtcgtttgcttccaacataactggtaaactcaaacctttttctcaaagtttatggattgtagacagtggtgctactcaccacatttgttgtaatattgatctcttttaccatttacacaacaaacctattgccacttccatcaaacttcctactggtttatgcattaccatacaaaaatctggtagcatcaaatttaatgacaacttaattcttcataatgttctttatgtccctgaatttcacttcaacttatttagtgctcccactttcctagacttaccatctcacaatgttttcttcactaaatcttgttgtgttattcagggttctcagaacaagaatattgggattgctaaaagggttggccatctatattttctgctgcaacagctcgatttgcttcctactgtttttcatccatctacttgtaataattcttgtaataatgtccattcttggcatgcgaggctgttgctataatttataaacactacgcaagtatacgcaatcaagtagtaaactcacacannnnnnnnnnaaccacagggaattggattaaatactact

SEQ ID NO: 60521 - DNA, 1164 bp, Cannabis sativa
ttgattatatagatttccacaactatgatattcattctcaaaaactcacatgactcaaacgaaaacctccattctaaaagatgaagctcaactttattttttttcgatttgttctattgatttcttcaacgattcctccaaaatacaatgatttcccaaacaactaaaaaaattattctctcatccatttttttcaactagcttgttcaatgattcctcctaagggatgaaactctccacaattatttttggattcgttttacatcccaaccaattcctcatacagagccatttcacccaaataaaatcttcaaaaagtggttccctccaaagaaagtggtagtaatttaggaatagtgtaccttaaacaaatgtagaaattttatatctcaaagaaaagcgcgatactaagataaccattcttaattaattttttttttactcatatatctattgtggaattaaataaaatagagaaataatttgattgtgtaaattgaatgaatacaaataacaattataactaatattacaactgatacaaataatcaaaaatagggaaattttattaccccctcaaggtgtacagtatagattttgtacagacatcttgttaaggttagtaatgtggaggtaacgggtgttgtaagcttattttattaggatctagatttactaacatgtatgttaattatagaactatgatctaacatcttaaatatgaattttctaaaacaattatataaatacatataaagttatagaataccttacatgagtggaagcaaaatataatagctctttccgttgagatctctaactattgttcttttctgtcgcaaagtattaccaaaatctaaacttggatctccttaggtgatagaattcttcacagtatatcttctacattgtatttgagtattggcttgaaatgagtaggcaaacactcaattcactatagggttcaaaaattagaagaaaaaaagtagaaaattttgaattctagagaggctttttatttttctcaaatgtctgaaaaggtagtttgataagccactacaacaaatttaaattttaggggcgacaattttgaggcgacaaaaagtcgcctctaatagtaaggctattagaggcgacaaatcatagtcgcccctaaagaaatag

SEQ ID NO: 60522 - DNA, 968 bp, Cannabis sativa
aacaatggctaaccagtccggaaatgaattgtaaaaagaatgagttaattttgtttctaggcttctcttagctaagctatgagcacctacattttgggctctttttacatgattgaactttgtacagtaagaaaactcagggtgtctcttaatttgattaacaaccatctgaatatcaccaatggagctgtcaattgctgagatttcttcaaccagctgcttacaatctgacctgatttcataaggactttgcaagttcttcggtttattctgcagagcagtaatcactgctttagcttcagctataggcacagtgcagcaaacatggagatagtgcataccagcagagacaatgttgcccaaccaatcccgccaaatatagccgagccccacccctgcttggtccggttggatggctgcatcacagtgaacacaataagtaccaacaggaggggcctgccattgatctttaggagcagtagggtgcatagtagggagacattctttcccactaatctctctcgggtagctattgaaaacccattccagcaaacgagccccattcatataaggttgattgttcccttgtctatttcgattctcccaaattgcccaaagaaccttgataacatcttcaaactcctccctagctagcttttgtctgaaatccactagaaaatccatcattgaatgccctatgctttccttgattaacttgtaataaggtaaacgtttccacacttttttaaccttttcacaagtccaaagcgcatgggaaagcgattcctcaaacctgccacagttattgcaagtagtgtcgattttcatacctctatgacaaagattggactttgccgggagccaatttcgacacattttccatccaaaaagcttcatccgtggaggcaaattcagattccaccacatcttccaccaagcatgaatttgatccatattagagcatcggg

SEQ ID NO: 60523 - DNA, 2651 bp, Cannabis sativa
aatttcaacccaacaccacctgttcttgtggtgcaatgaaggtatttcttgattactataatcaaaatcaagtcttacaatttttaattggtcttaatgagtcatatgcatctgtacgggctcaaatccttctcaatgaacctatccccaatctctctcacgtattttccatgattttacaagaagagaagcaacagaccctcggttcatctgatttgccctcagttgcctcctctgcccgaccctcatcatccaacaaccccactcgatccaagaaaccaataccatcatgtaccaattgtggaaaaccaggacactatgtcgataagtgttatttccttcatggctttccaccgggttatggtgataaaaagaaatcagacaaaggcaaaacctctgccaattgtgctactgtcagcaacaaaccagaaaatgctgcaatcaatccccctattgatctttccctccaatgtcaacaattcatctcgcttctcagccaacaattgagtcaagcacaacctcgagatgaaactaatcctgctcctgcgcttccaacatggctggtaacacctttttttttccaaaaatttctcttagatagttgatagtggagctacacatcatatgtgttccacaaaatcttatttttcttatttttccaatcatgccttcccctcacatgtgcttctccctaatggcactaatatccctgttcaaggcatcagaacaataagaattaataaacatctcattctacacaaagtactttttgtaccaacatttaatatcaacttattctctatccctacttttcttaacaacactgctaacatggtttattttcaccatgattcatgtgttttacaggctctttctgcgagtttggtgattgggacaactaaagacttggacaactatatgttcttccccaagattctcctcccatagctagttctagttgtcatttactttgtacaaataaagaagaccattggcataaacaccttggtcatccctctatgtacatttccaatatgttcaataaaatgtttgttgttggttcttttactaaaaatcagcattgtcatatttgccatcttgcaaaacaaaaaagattaccattcatttccaacaacaattttgttgaacatacatttgatttaattcatatggacatttggagccccttcaacataataagcattgaaggatacaaatattttctcacaattgttgatgataaatctcgatttactttgacttttatgctcaaaaccaaatctaaagtacaatctgtcatccctatgttctatagcatggtttgcacacaatactctaaaaatatcaaagcaattcgatctgataatgccaaggaacttaatatgcaatccttctatgcatccaaaggcattatccattaccattcatgtgttgaacaaccacaacaaaactctattgtggaaagaaaacaccaacatattttaaatattgctagagcattgtgtttccaatcacatttaccacttccatactagtcatatctcataggcatggccacgtatctcatgaataggactccctctgctctttttcaaggcaaaagttcctatgaaatacttcacaataaaccacccatttatgacatcttcaaagttttgggtgcttagcctatgcttttactctcccttacagtttgcacaaattttcaccaagaagccgtgcctcagtttttattggttgtcctcaaggtatgaaagcatacaccttgcttgacattgaaactaaacaaatataccactctcgagatgtcatcttccatgagaacatattccctctaaatggtcatacttcccctactaacatagatcatttttttcaacaaatcatcacacctatttttgagcaactcactcgagtcaccacacccataccagcaactacatctggtatcaatcacataccaactactacttctggtgctcttcaaacaccaacacttactactgaaattaaccaaaatactacaaatgaaaccggtgcccttctcacaccagcaaccatccctggtgacaatcaatcaccaaaagatatcattcatacacatcttcacacaacaaaaagtcttattgataacacaacatgcataataactcctgatgctcataacataccagcagtcccttctggtatctctcccacaccagctactgctgctgaagacaaaaactagattttacatgctgatttacaacaggaattagctccaatttttgaaaaatcagatccagaccttcttctcaaatctaaaactggcagacatgtcactaaacctaaatatttaaaggactatgtctgccacataacatccacggcttaccctattaaacaattcatttattataccaagctcagtcctcaatttagagctaccgtccttgcagcctactcccaaattgaacctcgttcttatacagaagcttcacagttcaaacactagcttcaagccatggatagtgaaattgaagctctcgaaaaaaataaaacttgaactatcaccaaattacctcctggccataaagccataggatgtaaatgggtttataaattcaagtataaccaacaaggttaagttgttagattcaaagctcgcc

SEQ ID NO: 60524 - DNA, 1032 bp, Cannabis sativa
atataattaatagtgatgataaaaaattaataaaaatgttaaataaattagaaaaatagagttcgaaagaataagcaaaaacactcatataagttgccacataatctccctaatactttcctttatatatatatatatattgatattgattaatttatattcaaagctatagttccattgtgatatgagatcatctaataataacttgattattttaatagtgactttcatcattgttgtgttttgctattaattatagggcttttttcataaatatataaaatactaatctctttaatttgtttttatttttgcaggcagttcactcggtggttcacggagattattttttattttggatttgtgtttggatgtattatttgggtgtattgttgggatgttttaaattttttgagatttgagtatatatcatatcatatcaatttttttattttgggtttgtttatatttttatttcttgcttcagttgttatatgtacatctagatggtgcaatatttgttcagatttgttttttaaattttatttaatttttttgcttcggtttataactgaagcaaaatctttttgcgccggtgcactactatttgcttcggttatgaaccgaagcaaaaacttttttttttgcttcgattcataaccgaagcaaaagaccaactagcgtcggttcataaccgaagtaaaaaatatcactatttatgtctacggttatagcgtcggttaaaccaaccgaagcaaattctttatatgtcacttaaaaactaaagtaaaaagctctttctgtagtagtgaatatacaaattgttatttagtgtattaacgagaaaccatatgtcattgaatgcataaagcgaggcatcaacctcgttacatctagtaaggcaaaaacaacgcatatcgactgtgaaaacacttagtgtaaaatgcacaaactaagtctaacagtcaaagaggatttaataagcgaggtgtctatctcgctataggaaggctctgttgggttttatgccct

SEQ ID NO: 60525 - DNA, 1297 bp, Cannabis sativa
taaccaatgaaataacagcgaactgttcttaaatttaacttttttttaagatcataagtctttacttcagctggacaaccccatacacaaagatgattcagagtaggttttcttccagtccacaactcaaaaggggtttcgggaacagatttacttggagcacaattcaaaatataaggtagcagtcatgagtgcttctcccctataagagctctgacagatttgatctgcttatcatgttgctaatcatgtcgattagagtgagatttctcctttcagcaatgccattttactttggtgaaccaggcatagtgtattgagaaactataccattttcttgtaagtacttagcaaaaaatcccatgagttgtccagattctgaataacaaccatactattctcctccacgatttgaataaacaactttgatgactcatcctaattatttctcaagaatatttcgaaagattttgagtttatcaatagcgtcagatttttctttgatcaagtactcgagaaaaatcattaatgaaaattataaaatacttacttctgcataaaatagtggaataaggtttactgatgttagtgtggataatctctaataaagatagactatggtaggcattcttctttcttgttttagtcaattttctacaagtacaatcaacataagtatcccaactaaaatcatcaagaggaggaagaatttcagctctaattattcgatcaacccttgcttcagaaaaattacccatttgtgtcataataataaggatgttaccgtaatataagatctcttacccacattattcactacattgaaagaggaagttaaggaagtcaatgacaatttgaaaagaccatcagagtaaaaatagtgtccaattattcggagtcaaacataatgtcaatattatgattggcaaaacaaaaagaatatcattatttaaccaaaaagggaagcgaaactaaattcttcttaaaaggtaggaacataaaaaatatttctcaagacaatcataactctaaattgtaattcaacaaaaaatgtgccaacttaaataacgtcaactccaacataagtgcacactctaagttttgtctccatctcacttggcttcctgagatcttttagcccctggttgtgcttgcttcttttctaattttccttatccatttttgggcttgagttgataaacatagtgagaagattcattcttctcctttttcagcttgctttcctcagctacacactgagaaattaggtcgctgtcactccattttttattataag

SEQ ID NO: 60526 - DNA, 1615 bp, Cannabis sativa
ataaatatttaattttttcaaacaaaaaatttgtaatctttaaaaataaaatacattcaaagccaaaatcttaaatgaaactagcaatacattcacctagtatatatcatatatgtatatatgtgctatataaacaacttaaagtcataaattttattagtgttattatgtagataaacacctcattttatatgttaattattttaaaacgataactttctttagtttttcaaaagtggtttgtgaaaatcaaatatttttataggaaaagcttctaaacaatattaattaataagcattttgaaaaatttaccgaaatatattttaaaataatagattttaattaattaatttcagaattgctttcaagaccatatatgtgaaagcataataataataataatataggcttttaataataattattatttataacctttaaatcaacaaactttaatgcatctccgtgaaaatagtcaatcaacaccactaattacgaatgctaaacattaattaagaatgtaatgatatgtacacataaattatacacaaatttaattaatatatttgacataaaatattttaattatttctctttatttaagatgagtcatatttattaaaaataaattatgatataaatatgttgggatatgattttgtctcgtaatgtactttcacggaatgtattccgtggtacattaaatgggtctcagggtacattaaataagtgtcatcatggtacgttttttacaatttaaccctaattatccctagattaatcttagccgtcagatcaaataactccctcatctgacggctgtcgtacatcacggattacaattcgtaaaagtataataaataaaatcatattcctaaatatgttatgtgaataatttatgtttgcaaagaagaggtagaaagactgaaagagagaaaacagtgttaatattataggatggtcaaatcaatatattaatttaattaagtgtactaggtttaaacctaatatggttagtagtggggacacactgaggtgtaatcctttatatcttgtctccccaatcaaatgtcaaatctctccacatacaatattaatataatgtcaaatatatatttatttattgttatttggtaacttaatgagactaagactatattaatgatgtgtggtattttatagttagttagtaattattattatttattaaattaaaatatgtaagagaattgatattaaatgtgcaaataataataatatatcacctatgatacttgacactttaaggtgtcttataacatttttcatttgctagctatttcattaatttagacttatgtgacttaatacacttatctttaaaagactttttatgcatatgtttaatactaagttgatgtaattttacacatatgtttagtttcttttttcttttaattagataatgaattttaatttttaatttttatattaaataaagatgtaatttatttaaataaataatattattatattagaaaattaaatatttgatataaaattttaaataaagacaatatataatagcaaccaagtattttcattctactttttgataactaaaattaaatgaac

SEQ ID NO: 60527 - DNA, 810 bp, Cannabis sativa
aagtgattgttaatcttgtagtataggaccttataacttatttctccatgttgaaatcgaattagggaaagaagaaggtgatccccacagtcatcaaagtgactaattctataccctgcctcttttcttatctcgtttgcaactttaatatacaatttataagtgtaaatttcagatgcattcttgtagtatggtctgactggatcagttaacgatggtagctgaggagaagtgtgcttattcttaaacatctgttgggcttcattgtagcgtagcttactgacaccaatatcaatacattggataaattctctaaggggatagctcgccaggagaaattttttcaaagttgcattcatagattcattctttgtgttgttctcattccagcgcaaaaatgacctcttacaaaggcttctccccacatgagtttagagctataagctttggcacaccattctacatcatgtagatcaaactcatcgattaagtctctctattttatttcaaattcttctggagacatgtacttgtacattagacgagtgaatgcacgggtaaaatttggatctttcaaatttttggtgacgttattgcttaaatgccatgtgcatgtgcgatgaaatgcatttggcatgacattcttaattgcaagttgcattccttgatcgctatcaattatgacaacaaaaggttttttatcgcccatacatttaatgaattttgtcagcatccaatggaatgtatctcccttctcatggaggagcaacccaaaaccaaaaacacaactgttgaagtgattgttaaccc

SEQ ID NO: 60528 - DNA, 839 bp, Cannabis sativa
agaggtagtgaacataaatggtcgacaccacgtattaccaaccattacacataaaagttaaaaaacgagggcctgaactcttcaatgattaaacgacaagtcttttttagtcgtacgtcccatagacttgtcgtcgtcgttttcccctttgaataaccgcgaatgcaatttggtccgtacaaatgccttcaccgtcaatcaaacgccacgtggctacttatctcgatctattacataaggaacgatttagaagaaaagagaaacagttaaatccgttaaaataggttcataaaaacgcatctgaaactttccttcaaactcacggaaatttcacccatcttcaacaaaaagtgaacccataaagcatatgaaatccctaaaatacccctctatgttctaacaaataacaatcactcccattaattattgatcgattttaacttcgattaccccaaaacactcattccattacaagtgcacacacactctctctctctctctctctctgtaaagtgcctagtaaaaatggcgtctcagctaggctctactccacgagccacctttcttcacttcagaaagcacaaacacaggtttgctcttccgccggagcaggtggctccagctattgggataggtgacgctaggaggagacaactattggggttgagcttcagagttggagtctcctccaatggcggtgaggaatattcttatctcgatatgtggaagaaagcggttgatggtgagagaaaagccgtggagtttcagaagatcgtcgagaactcggactcggactcgaccagtgtgcatcccggggagttggtggaaaagagcgagga

SEQ ID NO: 60529 - DNA, 1911 bp, Cannabis sativa
  modified_base (49)..(54): a, c, t, g, unknown or other
  modified_base (1378)..(1378): a, c, t, g, unknown or other
actcagaaattctcattcactttctctttctctcttcatcttcttcttnnnnnntctcatctattttatattattttatattatttcataacagttccaactaagaacactccatcatgagagaagaaaagataaggtaagtagtaaattgaattataaaattatgagaaataaattaaaatatatatagagagtttagtaagtgataggaaaaaatgatcattttttaaatatctaaaagccaaaaaactaaaaataaatttggagttattattttttaaaaaacatttaatttttaaatatatttttttaaaaaaaaaaagccaaaaccaaaaaaaaaaaaacgttatagccaaaaattttagagttttttttctaaaaagaaatcggagttgttatttttttaaaaaaatattatttttaaatttcttaatttaaaaaaaaaaaatcaattagttatataattttacaaatttaaacttaaatacctaattaattgattttaaaatggtaaaaagtgaactattatttcttgcatcattaaattctataatatacactcacaacattcattttctttctttggttttattataatattaatattttttattaaaaaaatatatataactaacaaactactaaaaaatttaaattttttttattaatgaatattgctgactgaaaattaaaaaataaaattaaatatctacataataaaataatattattaaaagattttgtttaaaataactaaccatctatttggtttgttttactaattatatatttttatataataattctttaatatatattcttttaaaaaaatataatataaattaaactaattagcattcatgtaagatctattaaaaaatattcatgtttatattaggtttatatagaaaattaaattaagagtaagttgagaaattagattaggttcacgtacagttgttttattaattagctcattgttttaaatcaattatgatctattctttcatgatttttctttggttagggtgtggttttctaaaatctagattttactaaaaaaaaaaaaaaaattattgtaaacaatttggttaacttatttttgttgattttgttcgatgagtgatttctacatataatggattatgcccaatttagctattaataaaaatttatgtttatctttaaaaaaatactaaaaaaactttaattgaaaaaaccctacaaaagtaagtattcaaactttaaggaaaattaagagtatgtaattaatgtatatattatttcattaatatttattttattgagaagttaataggagtatgaatgagagtaaataagtgttgagaatagatgaacaataataataataataatnataataataataataaacaactattgttatgattatgagatttatagtgtatatatatatattctaaaatgtgtaactgaacttaactcagagagtatatataatataattatgatggatacattaatatcaaaatagtctgataagataagtgcattaatatttaaatggatagagaagaataatgcatgaatcctacaaaaactcaaatcaaggtttggacaaaagagaagagcattacctaagtttataattgattatctgaataaaaaaataaaattagtcccaatcaaatttcaatatttaaggttccaaaaacatgttaaaggtactcaccatttaagaatatatacacaaaaagaaaaagtttataaaagttatatcctccatttataaagagatatatacctgcaacaataactaattacagtaaatatttatgggtcattctacagtgtacttccttaaaagagatgtattggtgcacctttaacttgtttcggcatccaaaaaatttttttagtctaattttt

SEQ ID NO: 60530 - DNA, 1172 bp, Cannabis sativa
tgtaggcatctcgggcttttcaacaacacccgtctttcagttcatcaattaacggtctcataaacacatccatgtcttttttaggagatgatggacttagaatcaataaggtcaacaacaacgatttagaactcatgcacttccaaggtggcaaattatatgggacacaaataactggccacatgctacaagagttgctcatgttcccaaatgaattaaacccattagtggccaatttgagcctgacatttctaggttcgacgacgaaagacaaatgaagtcggcggtctcaaaaaccgctgcttccattcttcagcatctgcaggatgcctaagcacactgtcttctttcgatctctgtgagtaatgccaccgcatgtcctcagcggtgtgtcttgagtaatataattgtttagtctcggtggagtgggaagtactgcataactttgtgaggaactttttttcccttactttttttcacccaacttgattcgccacacatatagggaaaactctttgttctcattctccttccaaaaaatgacacaattgtacttgcacatatctattgagtcgtaacccaaacctagattgcgcaattgtatctttgactcatagtgcgactttggtaattttacctcctctagaaataattcaatcaagatagacaacaacatatcaaaagagtagttactccacctattcaaaaccttacagtgcataagttttacaagcacattgagggccaattttttacaacaaggatgcaactcagactccatctccttaaacaagtcatcatacttgttgttgtcattgatcggggttcattgaaagaatcgttagtgctagtagagtcgtcaaatccaagatctcatcttaacatgtctgccaacacatctgccatttcctcttcgtcgtttttaggaagtttaattgcgggctgagaaaaagtctccccgtggaaatatcaggagttgtacgaaggttggatccagttgagaaataaatgaacccttatagttgcaggtgtgtgaaaattcacattcaaacaccgcatgcaagggcatcgagataatctagcaggatttacgtaattcgttgcaaccgcgacaaactcgtcaacaccacttcaaaactcgactgagtgtcggttcgccttcatccatctgc

SEQ ID NO: 60531 - DNA, 1281 bp, Cannabis sativa
gttatatgaaaaaaaaaatatttttttataaatattaattaaataatttaatattaaaaagtaattaatttaaaataactgatctaatctgcacttgaacgaaattgattggatttgatcatttgagctattgtgtagatgagattggatccaaaatataaaatacacacttgatgcggattagattcactatgagcaaaatagtgcgaattaaatttgatgaacacccttaatattaattgtggttatataattaagagtgttattattttaacattataattatgattataatttaaatttaaatttattatagatatgtaacaaatatatttttattattattttaaaaacaataaaataaaaaaaaaagttttatgttactattgtgacaatcttggttaacaaaataatatttttttaaaaataaagaaaagtataatatttctacaaaaaataaaagtattataaaatttaaaggtatgattaaattaaaattaaaattattaattatatgttttttatataagtaatacttaaattaagtaatttttaataaaaactgatatgatttattaaataaaataaaaaaaaaaaatactaatgataatacagctaaaacatatataaccaaaataaaaattaagtatacgttgtacttagcattgatttagtgtatatatatgattgggtaagaaattatgctctctttttttatagtatactttgtcattattttttatcttttcttttttatttaaatatttgatttgtattatcactgttttgttttagtaataatatatattttctaaagtagtttgggccttgacccgggtgagttagatctaagaaaatcaataaatctagagtagggtttgtatatatgtgtgtgtaagagttatatggatgaatcaacttttttatgatataatatttgctcgctcgaccatgtagtattgaggaaagatacctagttatagttcaatggccattaatgagattcaatgtctacatgtcttactagtctagtttatggagttttgcagattaaagtaattgctgtagattgttaagtacctacttttgtttttgtgaagattttatgattataaagttccagcaataacttgctataattaaatattaatatttaaatatgttggatacaaaataataataataatttgataacagtttaatgccatctttgaagcaaaataaattactaaaatcatactttctttaatttattattttacattaaactaggaaactaat

SEQ ID NO: 60532 - DNA, 863 bp, Cannabis sativa
tgataatgtaccacaagtggggtctgtttagacaagagggagagcatcgacagccttattttcaaacccatgtctgtattgtattttgaaattatagccaaaaatctaagtaagccattttttgtgctcaacggccactaatccttgttccagcaagtacttcaaactttcttgatcagttcggacaaggagtttgtgccttaataaatagggatgcagcttttggatagcaagcacgatggccatcaactctctctcgcaaatagatttggaacgagatttgttaggtaaaacctaattgtagtatatgatcagtcgttgatcttgcattagaacagcaccaaatcaaaccccaagacatctgcttctactaaaatggcttgtaaaaatcaggaagagcgaggattagaacagtacacatggcttcttttgggtgttcaaaagcttgtagagcctctagtgtccatccaaaagtgtatttctttagttgattcgttaaaggtcgagaaatggtagtaatggtaccatagtttttgataaactttcagtagtaccccattagacaaaggaagccctatagctccttaagagtctttagaactaaccatttaaccaaggtaggaaccttgtgaggatcaaataaaaccccttgaccctagattatgtatcccaaatactctaagcttgactgcctaaataaacacttcttgtggttggcatacaactaatattgtgtaggcctttcaacacctcttccaaatggctaacatggtccttcaacattgagctcaaacaagaatatcatcaaaaaatacaagcacaatttgtcaaagaagatatcaaaagatttcattcatgagggc

SEQ ID NO: 60533 - DNA, 587 bp, Cannabis sativa
aaataaaaaataaaataaaagaagataacacagtacagacctgtttcagtggatcacaacagaagaggttcttccacgaaatggagacccatcatcatccatgacatgcccatccatccaagattccctgccctgccctgctctgccctaacctgcccggcaaccattacgggtaggtagacacacactattatataatataatgtatagtttcagtggatgggtcctatttaagaaaataagacccaatggatcacccgccgtcaaattcgacccgacttaagtcatatattattgacccaaaaccaaacaaacgccgtagacccccacaccataccaccataaatacctagacaacgaccaccttatcccacttgctcaatttagcacctataaaatttctaaactaatttatcatttaatttttttcttctctcctttttgacttgcaatttattaattatgcccacatgcgacataagatatatatatattatcaccatatttttgttttattttatatttgaaaaaaaaaatgctttcaaatgtatgtaacatcatacaaaaatgaagaattgtagcagcac

SEQ ID NO: 60534 - DNA, 828 bp, Cannabis sativa
agcttactactgcggttcggttcctcacaaaaggcaacgtgctttgggcgccaggtgggtgagtcctccatttagggttactgaggcacgcttgcagactctcgaccaggatggctaccttggcgaattggactgctacattcccacccacaataattgtgccacaaaccctgaaagggggatgtgcgcttggtcgggcgctcatgcccagcaaggggcattgatgcctttgcaccaatactttaagaatgtggtggacttcttcggcctctgtccggcccaattcactcctaagggcattaagtatctgtctgccctcttcgtcctctacgcctcccagaagtgggatatgccttctccccacgaggtcagctggttcattgatttgaattccacccccaagcaaggcaggtcggggtacttctatttctctcaaccagactacaagtggttgacgggcaccgatgattcggccatcagcaaaattgggcattttgttccagcagattccaacaagtcaccacactcccctcactctttctcatagggatagaactcaaaagcttgcttgactggcgggggaagactggaatatcatctagttgacctccgaggacaactttgtgaagtatgggctctatccaaaggatttcattcctaagccagtgagggagagaaagaggaaatttggtgctggacgggttgaacgagctcatcaagagaatgaactcattcaactcaagcatgaagctaagttgaagggaggtgccagggccaagaaatatgctcaggagccctagaattctgaagatgaggctgacgaagagc

SEQ ID NO: 60535 - DNA, 797 bp, Cannabis sativa
tttaactaagagaacaaaattagaatttctaaaatcgaataatcgagtaaaaagttatgcacgttttagtctcgaaaaatgtaaatttttccaactgttagctatccaaaattctggttcccatccggaattccagttcacagcaaaatttttcttggaatgcaacctactggctacttttcaccccaacattatataaacttgattttcactcaaaaaattaagttggctaagcatttatgtcaaacacctaacctatccaagtgggattaatgagctttcaagtttaaaatcaaacaaacacttttcacacttttagccaaaatttatgtttattcatcttgagtgtgcttgcttatcactctaggtttttattgtattatcttaattctagagtgattttgcttgtaatttcaaacatattttcatattgtgattgaggtgaggttggcaccggtattgtaaacaacccggttatagtgagattgacactacaacaatcctacaaaagagattaatagttctcggtggtacaaaactattgtaagaggtttggaaacaccttggtgaaaatttctcgattgtaaagattagttaagcccgttaacttggctcgatattagaactcaaagctaggtccatagctttgaagatcaaggacgtaaatggcatagttctaccaaaccttttaaaaattgagagtttgcaatttctaatccttaaactctttacttttcaagtttgaatatttgttataatatattttttatcaaattacttgcatttatttaattaag

SEQ ID NO: 60536 - DNA, 3031 bp, Cannabis sativa
ctgaccgactattatataaatatatataaaaaaaaaaaactgactattttaatctacagtttggtcagtttaaactgaataaaccgagcttcattttttaaaaaaaaaaaaattaaaacattaaatttgctgtaattgtttggaaactaaaaaaaattagagtattatatcaaatatcatataatttaagaaaagaaaattcttagtcaaacaaataatgtaaaatagttttttttttttaaaaaaaaaaaaattgtttaaattatttgtgctactcatatagtaatgaattattttaaaaaaactcgtattattttatgaatgtgtgtatataatatgtaaatacatcaaattaaaataaaataaagcatggataattgagactttaaataaaaaagataagaagtaaaactaatttaataaaattgtacattaaatatgtacaaaaataattatattatatatgtatagtgtagaatatatatgttcggtcggttctcagtttaatcggtcggtttgccattgacactaaaactggtcgtacaaagactgttttaactgaaggcagtttttttttatttttgattttttcggtgtttaaacggtcggtgtactcggtttgatcagtttcttaaattttttgctcacccctaacagtaatctaatatagtttgtgtaacaatgtgtgagacttgactcatattttgaggctcaggctcaacatggcccttaaacacgaattattaatgttgagttcatgcccgacacaattttgttaaatggtttgacccttttttttaagtgggtatagccattttttttatatgagatcatgggtcataatgtaggcttatggtaaaattaagaattttctctcactttcttaatcagttgataatttttgaagcaaaaagataatatttttgtaattttatttaacccaaagcaccagttcatacgtcaacttggggctaggggctaggtgcgtctcaagtggcttttcgagactcgttttgatatttcttatgcatttgagattaggtcttacgctattttttactaaaataagaaaaatgctcggaacaaagtttgtgtttgaggagtggaaacatgcaaaccaggttgtatgttaacttgggcgcaatgcctaatgcccatgtcaacctgggtgttgggtccctatttcaatcttagagaatctcgtttgctcaccgatatcacttgtatctccattatttatgaaaacgaaaaatatgcccgaaacactttttgggagaaatgattgaaaaatagctcaggttgacaaaatgtcaaccttggcggttagcctagcaccagtgtcaacttgggcgatgggtcaatattttttcagctgagtagttccatttgattcccaaaaactctcgtatctcaattatttgtgaaaatgaagaatatttccaaaagacttctcgaaaaatttgattggaaataacctaggatgacaaaatgtcaacctggtcgctaggcccaacgccaaggtcaccttgggcgctgggtccgagttctggctcttaaatgactacgttttctacttgaaaacacccaaatcttaatcattaatgaaaacggagaatattctcagaagacttattctgaaatggtgttgaaaatgactcatataatgcattaacccgtagagacgccacatatgtacttttataaattagtttataataataaactaacgatttaaaaaatattttaatataattaaaactttatttaattattcgagatataaaattaatttttttggcattataaattagggtcggagatcccctttaaaaggatttctagatattattttaaattgttacaaccaaatacttatacttttcagagttatcataaaccaaaacactgcaccacaaagcacccgcaagccacaaaaatttaacaagaaaagcaaaagcatacataggatacttctaagtacagatataatcagacataaccattaaatcataatcagatatttacatacttaactcaagagcaagaaatcacattgtctaatacaaacaatcactagtaacacacatttatcttatatgacaaactaaattgtcactcgagtaaccatttctcacatttgccaaacgaagcagtattgttgtgtaataagacaaccgataagtaagaaacctaccaactgtttcaattagagtagtactctcttttacactgttgcctaatgagacaacccaatagagcaagaactctttcttctcttttacacggttgcctaatgagacaacccaatagtgtaagaactctttcttaccttgttgtctaatgagaaaccaaatagagtaacaactctcttttatagacgataattatcgaatcacgtattgacatgctatgtggcaccgttatacttttcttacctcatgtctaaattcacccatttcgatcaactcaagtggaaaatgctcaacaacctcaagccttatgtcacaaaaacggtaatccagtaggcaactcattttaatctattctaggacttaaactcaagattgaaagttatatctaaacaaccagtttggtagcatgctcactctcggacatgttaccttaattagctatttgagctcattcgcgttaattgtacgattagactcattataacgtttctcgtaaacaacaaccaaggtgaatcccatatcatggtgtccaagacatgagcatgagacttaacctacttccattataagtatatatttcccacaatatgaaaataacataattcattcgctcattatcctcaccccgattaaagctccaataaaattattgctcttatgacttatctaatattctgccttcagtagatttcaatcatccttgaaataaaagggttctgctttccgaaccattcataatggctccaagtggtctcccacctctgcgacacaacccaagatactaaagaaataaggtagcgtttggttggaggtaatgaaatggaatggaatggaaagga

SEQ ID NO: 60537 - DNA, 726 bp, Cannabis sativa
  modified_base (659)..(659): a, c, t, g, unknown or other
ctgattcactttctttggtctcagctttggagggccagacagtgtatttaaatgagctgggggttatcttttctgatattaaagtcatgttgtctagtttttctaaggcatctctttctcatgttagccgcaactttaatgttgaggctcatagattggctaaagatgcctttaggatagacaatgaactttcttagattaaaaaaatcccccctccttctgtgtaacttttgttacagttgttaccttaacctttatcggttaccccaaccacaaaaaaaaaaaaaaaaaccaaattatggtataaaataagagcgacatggaaaaaaaagtttctatgtatacgcacgcagacagttttttgtgactgtacataccaaagtttttttttttttttttgtaaaaaacaaaaacaatcaatgaactaatggcacgtttactaaactgtaattggaatcagattcatcaatagaagaaatgaatcggattaaaatataaaataatcggaaacaatatactttatacaacttaacattattaaaaaaaaaaccagttatcccagccgtccatctagcaatcaagctagcatctaagggcttcaccatctaagggcttcacctctacacgctgttgtttttcccattcccctacaaggccangttatcccagccgtccatctagcaatcaagctagcatctaagagcttcaccatcaccttcgtcaaca

SEQ ID NO: 60538 - DNA, 807 bp, Cannabis sativa
tcaaaattactaatctcttttgtacagttaaaaatacatgttaactttcttttgaacaatacccaagtggccaagtgttatatgcacttatgttgttttctgaaaaatgaaaagacagaggagaacatggcccatagtagagtctataatgcaaccaaaacttgatagttcatatcttaattataagactcaccataacacattgtttaggaagatcaaattgcattcgttttatttgttattttatttttgctatatgtgctgtaaaaaataaaaccgcaaagaaggagctacttattattgttaagataaaacacaggaaaactgaaataaaagaaagaaaaaattgatatgtttctttttgtcaagtgtgttatgttttcgttaactttgctattaactagtggccaaggatacaaacaagaaattataataataattaataacttgtatatttattaccacaccttaagcaccttcagttgataaatgatcaattaataaaggaccaagtgtcatttcctagctgtcccaatactatttcggtataatgccaaaaaccaacttttttggcatacattacatagcataaaaatccccaaaagtgaatatataaatattgacaaaagacaccaaaggattagatttagatacaatagaagagagatggttaagactaaggtcatctctttggtatcagtaaatactacttttgttttcatcttcttcttcttttttattgagttatctgaatctcaaaagttagcaccagcattgtacatatttggagattctaatgttgatgtt

SEQ ID NO: 60539 - DNA, 900 bp, Cannabis sativa
gtattttcttataatccattcttgcgtttttggcctcaaatgatttctttcttttaatgctcttttctcaggtttgcaaggctcattgtgttgttgcagcatgtaagttttgtcggaatttaatcgtatattttgctttgcatcgaattaaatcacatactccactgcttttacttgagtttcattcttgcgaacgtactcaccggtgacagagggtgtcaagggaagataccattttctttttccagggagaagatataattctgggattttatatgtgagacgtttgtgcagctgattggatttagtttatagtttatttattattttttccccatcaatttctaaggtttgcttggagtgtggatttttttttttttttgtaggaaagaaaatgtagagaaataaaaatgcaatattttcttctgttggattttgcttggatacagtatgtgcaatttcgtttggtgtttgaagttatttcaattatataatataaatttatcaaaaatgaaaaataaaaacgggaaaattgtagtaaaactatccgagttacaatttatgctatgcttaattttacagtttttttttttggagcaaaatcaaactttaattttgttttggtatttactatagtgagtagttaaatgccaacttgtattgtttatgtgtatacaagtgtacatgtgatataattttattggtcagtaccattttaattttttaaatattatgagtaaacaatttcaagagaatcatggaatatacaccataattaatgtttaaacttgcttgtgcatgatagcccatttctggctgatgacttgcttgaaagactttttgatgagtgcccaaatatcaaaacactctagaaattccattccaagatctttttcgacc

SEQ ID NO: 60540 - DNA, 2597 bp, Cannabis sativa
  modified_base (1255)..(1276): a, c, t, g, unknown or other
tagtttctttcataatagaactgaatctaagaaaacagagactggttttctatggaagaatggtgatcttcttcaaaccttttgtgggtcctccaaccatgatcacagcaacaaccttctcatctgagttccccatgatcctctaccaaagcaaacccagatcgccaaaagatacaaactttagtatttcaaatccaaactcttataaaactcagagaatttgacacaatagaaaagagcccagatggaaatttatgaagtatggcgtatctaaagccaccaaataattattaagaaacaaaaaaacaagtacggtctagctaggcagcagtagtgtgtaataattagagtgggttttataagtaagatccaatgttaaaaatggactaagctaacagttcaatgccactcgctgccgataagtactcacaaacagccaatgcggggaagtttccacttctttttaaccacaaaacaagagaagttttgtatgtgacaggtaaaactatttttttttttttttgtaggaaaacaagtaactatctcattcagagcattgtgtgttgttgtctgtactggtttcacttttctcgatgagagatactcttcaattggagcaccattccttgggatgggacccatatcagtttttttttatatcattttttttttcttatttggtccatcaaattcaaattgtttagggactgtttattctacatgctaattagaattttttttttacggaacttttattgtacatgtacaaattatgtttctcaacttttagcattgttacaagttttgtttaaaattttagaattattagatttaacaactttgtttaattttattaatggatatacataaaagtttagaaaacataatttaatacatattaaagtttggagacacaattttgtagatataaaaaattgagagcatgatttgacacaataataatcactctattagtaaaattgaacaaaaatctttgaatctaacaatttcataatttagaagaaatttttaacgacttaaaaaattcggtaaacataaattggtacttgtcgaaatttaagagacaaaaattctaatcagcacaatagaaatgaaataatattttagtatttgaatttaagttaattttaaattaaaatacataggtaaggtgttggacacttatttagaatatctcacatgagcaatcatctttcctatttagctgtcaaaactttattattattattattannnnnnnnnnnnnnnnnnnnnntattattattattatttatttttgagttaaaatgaaattatttgtccatgcaaaagtaaatttttactacaaaatatagtgagagaaaaaaatagggtaatagatagttcatgcatttgtattaatttcacatgcatcaactttgtttgtggccatgtgggaagaaaaagtaggtatgtttttcttctctttctttccatctaatctaatggtaaaaggattgttttgttggtgatcaaagttatggtattggaaaacacgaagatatataggggttgttaggccgaaaataactgaggcgattgaagttagagaagttttaagttggatcaagaatcaagagtaaaattaagtcacacttgagatggattgtttagttgttgtgcaagctttatcgagtctatttgaaatgttttctaatttatttggtttattaaagaatgtaaaactttgcttaggaagttagaaattattttattttattttgttaaacgttcaacaaacataatagcatttatttgtaaaatcttttagtttttatcttgaatgtaatttcagtatgaggaacattctaactaagctactattatgcttggtagttgagtttgaaatttaataaagctgatcattatctattcaaaaaaatggtaaaaggatttttactttatgtggtgtttagtttgatgtaatgtaatagtaatggtaatgtaatggaataagaatggtaataggaattgatttcaatgtttgatttgtagttagaatgaacattgtaatcagaattattgtgtttggtttgacataagaatgtaatggaataaaatgtgtattgactaaaaaagggtaatatagacttttactttttttactatatttttattaaaatattatttttctttgtaatggagtgtaattgtaacgaggattacaacggtattggtatgtaatcatcattacaatactcaatgtaataagcattactgacatgtttcgtttagtgtaatgagaattgtaatgtaattattactaccattatattatttgtttttatttttaaacctttgtaatggctttacattgtaatagtcattacactatgtattgtaatccccattacatcataaaactaatgtaataatgattacattgatagaaattatctcttttgtccttttttattactttttttttttaaaaaaaatttaaatattaaaaatattaaaactaaggatatttttatcaatatacaacttatttatttgattacaatgttcattacagagttaaactaaacatcataataccattcctattacaattc

SEQ ID NO: 60541 - DNA, 1059 bp, Cannabis sativa
gtatttatagagttaggaagaagatttaactacatattcttgaatttgtgctgctgttcattaaagacttcagttaattagaaaaatttatattattacttcaattaaattttatacatacagatctttaagtttattaattattgatcactaacaatatggactaatacactaaaaaattactcaatcaacttaaattttaataaatctaataaaaattaatttacgcccaaaaattaccttctaacaaaagaaaatgttaaaatggtaattttaattgtggaaatatgtggtaaataaaaaattaccttcttgcaatctcaaattgtagattatttgttttataaaatatacagaaaatcagaaaaagaaaatggaaaaacttgaaagagaaagatggttgtgggaaacccaagtagttgattgtattaatgaaagtcaaattgataagtttgaggttatggataataccatcctactcaaaggccaattcaaatgagaaatgagttggcattgttttattaactataatttagaagcatttgattttgatgacactaaattaataacatattaaataggggagcattcctttccaaaaaaaaggaaggaaatagaggagtattcttagacagtaaagggtggtaattcgggtcacaatatgaggtttgactttagcataaatacaatttagaattatacaagtttgacataacacgaaaaataatgcaagttgtattttgttagtgttttataatctttcgtgttacaggttatatccgtattagttatttaaaataaatttaaaaacttcacatgataagatcacactataaacaacaatttacgttacaacttaccaacatatcatgaaattttgcgcgtttgacataacacaaaatttattcaagttgtgtttatgttcatattttataaattttccatatcacagatcgtatttgtgtcgataatttttttaataaatttaagatgtcaatacaactcgaaaacgataggtaaatacaaattggcacattttctactcaatattgtgacaag

SEQ ID NO: 60542 - DNA, 891 bp, Cannabis sativa
aattttttttaaaatgttaaaacaaataaaaaatttaccagaataaccctttaaaacttgaaagagtttactacataaatttactaaaattataaacctctcttgttgggtaagtactaactaaaaaacaaaatatatgtagttgttaaaagtcataaacaaataataataatgcatattttattttatataataaataaagtacaagcattttattttatatttttattaaaatattgagtgagtggaactgtgctttgcatgcatcagagtcaccatctttttcagatgttgaaagaatactttttttaagagggaaaggaaatatgttttaaaggacacaaagttccttgtttggttaattgtagacaaagttcttgtttgggtaaatttctttggaagtttttgtaatagattcctttaaaatttaaatggtagattattaatatgtttcggcaatcagaaaatttttttagtctattttttatatattattgtatacgtttatgtaagaccatttataaatttttaaaaaattctgaattgtttacaatactgaaactaatgtttaaacaattacttaccatgcgtataagaaaaaataatcgcgtgtacaataaaatatataaatcttatttttagcattgtaaactatttctgaaaatttataagtagttctaaataattataattatgaagaaaaaaaattggactaaaattttttattaggtatcgaaatagataaaatctaccgaaatatccctttacggtatattgtaaacttacccaatttcttttaagttgtttttagcctattttttaatgtaaagaaatcattcgagagtgttttggataaaaaaaattcagttttattttttcttttcttattta

SEQ ID NO: 60543 - DNA, 1226 bp, Cannabis sativa
taaaattttatcaatacaatcaaattatcttcaattttataaaaactgaaaacaaattaaattattttattacatataactgagaatcgtttggtcaaatttcttaaattttactttaaggtactagatatgtacaattttaaaataaaagataccaaatcaatattattaaacacatagtactaaatataatttccaaaaaaacacagggtactataaaaatatattccctatctgaaagcatttctattagtttttcgattttatttttaaaaatatttcaccaaaagcatggcttctctatatacattacttacataaaactaagtatacatgcatttaaataatccataaataaataaataatcttttaaatcataaataaataaaaagagaaagaaggagatagacgaatggtcaatttggcacaactgtgctatgggaaaaaatagttataatcgtattatgaaaaaaaaaaacaactatagcagaatgtggtaaattataaatttttaagtgttgtgacttgttaaaattctattataatgataatgataataatgtaataatctagttcattataatcagaaatatacaaaaacttatgttatataattttttttaatttttttgttatatattttcaattatttttttctaaaagtatattttatatgcatttgataaaaataaattatagtatttttaaattatatttttatcatatataaaaataaacagaaactcaaatatataagaaactctaagttgatgtagaatgttaatattaaaagtataaaatttaaaatataaagtatttttttaagacaaaatgaaaaatatgagactaaatattatttattttaaatattttttaatatataataaataagtaaatgtatttttagtacatataaatttattatagacttttaatcaaaataatttttctaaaaattgggttataccaactataatttttagctgtagtttttttataaattcttcactaagttattttaaaattgtttaccaaacattttttcttcacaatttttttaaaaaacaacttttaatttttttaaaagttgtaccgaacaggtccaagatggaatttgagagtcaaaattaataatgctcctatcctaactcacctactgtgactggttgggcttaaaaacttgggccctcttacaattggctcatcatactcttggttatttatt

SEQ ID NO: 60544 - DNA, 639 bp, Cannabis sativa
gaagtcacggaccataccatcaatcctggtaaccagtcgattagagagtttggtggtttgcatggcatacataggctacgagagacccacagacttaatcagagtcgcccggccagctttcgaaagcaattttgccttgcacccttgtaacttagaagttaggttgtccataataaaattgaaatcaacatccttttgctttgaacgaaaaagagggagccccaagtacttaacattaccatccgagctcccaattcccaaagcttccttaatctcctttctcacaccaaccagagtattattgccgaaaaagatagacgttttgagcttattgacctgttggcctgactcagcacaaaaattcacaaggcactgccaaaaatttttagcttctaccactgaggctctaccaaccaggatcaaatcatccgctaagaaaatgtgggttagaatggggcctcccctagatagactgatacctttaatgttaccgctcctcaaggcctcttctagcagtcttgacaaaatctctgcagcccaaataaaaaggtaggggataaagggtccccttgacgaaggccacaagacggggtgatcctcgcaacctgaccaccgttcagacacacactcagagaagtg

SEQ ID NO: 60545 - DNA, 1109 bp, Cannabis sativa
aactccttctgtttagacgatctcaaccaagaaagtaatagttgatcgttgcgtttccattatttgtgcacatggttgggttcgtcggtgatcaaagttgttggaagagggattccagtgagcaagatttcgtcaagatcgtggcttagtacagtcgataagacctgagacttttaggacaagtagttagtacgatttaatttgatcgttaaaatagaggtaagggaattagaaaaagggttccagttggagttcaactaggttggtggctcgacagtggcttgagtgaggacttaactagtcgttggagtaggatcgacagatgtagactccatggttgacgttagtcgatggtgactgataccatgtagaatttcagagtatgaaatccaagaaaaataagaaacaaaacagagagactttagaaaaagaattgaggagaaaacaaaagctacttttttcattgattaaatagctatttaaatagaagagaattaagctattcaagattagttacaacactagctacattcggttatgaaaaccgttaacaattagactatgtttttaactaactcaactaattatattgacaaaaactaagaaagcttggggatagcaagatgattctctccacctttttttttttgaaaataatgattctctccaccttaaaatatgacaacatttcttttccttgtcctcatcatcaatcagactagtatcaacataatctctcatcatcaaagtatatgtgaatatttcaaactaactatagcaaaccatcacctagatttataaataaaagagtgtcaaaattaaattgaagataaaagaaaaataaacctaattaatgtctatcatcttcatagctttttttaagtgggaacttttttaaaatagaataatacaataaaatgataaaatattttggaggggtgagttctttcataaccactgtattcctacacaattttaaccaaatgatttgtaatgaatggataaaaaaaaattccatggtaggaacaaaattaatgtctccataatagaattgtcatatatatatatatacatctattttatataaagtgtgcctatataaccgaatt

SEQ ID NO: 60546 - DNA, 833 bp, Cannabis sativa
  modified_base (760)..(768): a, c, t, g, unknown or other
cacctaagtggtgcataacaagtaaaaaaaaacttaaaaagttatgtataattagaaataaaaaagttaaaattataattaagattattaaggatatatacatattaagagcatttttaatgaaaagttaaaaatgtagcgtatatatatatatatatatatttcaggtcatcttcaaaaaagtatactctaatagtgttatataaactggtccaaatttagcacatactaaagttgtgccaaatttagcacaaaatatagcatgtgttaaatttagcacaaaatataacatgtgccaaattttataccaaaataaatattacctttttatttactttttgccacttattaatgtaattaataatttttttcattttatttatatatttaatagaatttttttatatattttagtaaaatattttgttgattttcttacacatttctatcaaaagagagttaattttattctaaatgcattaaagcactattataaaatttgggctaaatataatttgactcatttttagctcaaattatacaccatctattgaaaataataaggaaaatattacagaaggtgctaaacaccataaatggtggcataccgttattgatgtatttcattatcgagtctcacaaatttgatttagtgaataatatggaaaagcactaactaattattaagtgtcatatctgtataatgttgggccttaaggtgccaaataataatagaaaattacactctataccctttttnnnnnnnnntcttttatttttaccttctttttgaaaatctattatttttacctctttttttaaacattgtacca

SEQ ID NO: 60547 - DNA, 777 bp, Cannabis sativa
atttgatttaataaaagttaattttattggttgaaaaaaaaaaattaggatcacgtgccaactctaaagagtccatacctcattctcttgattggaaatacaatcatataaagataaatattttattgaggcaaaagtaaaaataatcaaattttttatataaaatataatttgtaataaatttagtggatcatgtgtgcccccacataaccaagaaccccctaggtaccattagaacaggcccttaaaaataatgggcctaacaatatatttgaagatggagatatgggagaaagagagctaacactatgattggttagagagaaggaaattaggaaaggagggagagtttacaaaagatggagagtatatccttcatgttatttagtatagaaagtaaaattagaaggatgaaaagataataatttattaaaattattacattattttcttaaaatttatattatttatttgttatgagagtgatttaagaatttaatatacttattttgttattttctcctttcctttcactcttggaaggattgaattttatacatttggagagaaaatgtatttttctatctttcatctctcttcttctttctcccaaccaaatccctctccttcactcaaaaatctttcctacaaaacatagtaagatggagttgcttttcaaatattttctttctcaattactttctcaacaccttacactacacgtatgggcttggacaagcctaattcacaaaattctacaaataatactttttttta

SEQ ID NO: 60548 - DNA, 953 bp, Cannabis sativa
ttacataaaaatattgcataaaatacaattcaatataatactatacaatacaatacattgtaatacggcgtactaaacgaacttatctcttcattgtccatctatttgttatctgtttttagcttatctccctctcaagattccacatctatttgttaggatttcatgaagcgtcctttgtcattgtaagtccttccacccttagtgggccttcttgtaccctgtaacatgacctcattattgatatcctccactagcagcctaagtttgtcacaaatctcagactagatgatataagaagcactctcacattcggtcatccttgggcctttagggacacctgttggaaattgtaacttattgtggttaatatttgattgttctaatcaattaattcttttaagtatactagctatctacatatatgttagtttttttttattaaggttgttattgaatattagtggtgtgtagcatcacttacaagtggtgtcttgtgattagttaacgatattggctaaaagtcattacatgaaattatatgcgactcgttacttaattacaccaatagtagtgatatatgacacttaggaggttaggagggtgttaggcatcaatagtatcttttgacattttttttttattccaatttgaattacactcgtaaagagtcacttaaattgagagcaagaatagatagaataagacatcaggggcacgccaaagtgagagcaagggcttgctcatatgctctaggtaggggtcttcattaaactgcttaaactgtctgcaccacaccgcaccgcaaaaaagaaatgcggtttgaaattctttgcggtgcagtcccagtttgaatttttcttaaaatgcgcggtgcggtacggtttgcagtcttgaattgttaatatgcggttcaaaccgcatcgcaccgcacattataaaaatactaattt

SEQ ID NO: 60549 - DNA, 715 bp, Cannabis sativa
aggtcgactaatggtatagtaagtacttatattatttgctattgaattacctgcctacactattatagagtatgttggaaaaagtagtatagtgatgcttatgataagaatatgtgtatggtgtatgcataattatgttgatatctgtttgagttctaaatacttggaagatgcgaactaaatgtatgataagttatggagaaagtgtaagggcaattgaatagtctgattagcgagctgtctaggcttggggaaaacggtaaagaagaaaatcctttatcgcgacaatactaggaacatgtaaattctactaggcaggttagacaatgaaggaaaacagatccgagatctaagagaacaacatgctcgtcttgtgtctattcttgtactatctacacttcctgttgttccactggatgtggtgatatatgtgaagccaacttacgagcagatcagggagcgaaaactaaatgaatcaccaattatggggcagaacaaaaaagttctagggggaccagaatagtggtcgaggtgagaataagaaatggtgaccttattctgagtgttcaagatacaaaaagacgccatttgatgtagagccagatcttattttattgtggggtagtgggtaatctgaaaagaacctacccgtattaagaaagactgatatgttaaaggagaaaagtgtatgggtcctgcccaagtgctggttatg

SEQ ID NO: 60550 - DNA, 974 bp, Cannabis sativa
cctaatccgggaaacccgaacctacaacttaagattctgttattactaatagggactacaatatcctaggaggtaggaaaatacccaactaaggtactgaagtggacatgaattgagaaaacgagttgttcgggaatctgtcgaaaccggttaactgttttacaggtcctggcaaactggttgactgatttgcaccaggtttcccaaaacaactcaaaacttgctcaaaacttgtccaaatgccaccaaactttccagaacacctaaaataagcatacacaatatattccaatcaacagcacccacaaaaatgcacaaatacaaaatataccatggatgaaccaagcttgagttttcaaactcaagcttgtgcatccattacccaaaacaaccaaaccagttgcaagaagctactttcaacttaaattcaacttaaaaattgaaccataactcaatcgaaccctaacaacccctaatctctaaaatcacaagtcaaaaccaactaaaacattgagaaattcataaacaaagagtgtctagggcttacttacaccaattacaccttgaatccaagcaaaaaccaaaaaagatggtgatgaaggtggctggttcctcctggtttggtggtgctcaaagaaagagaaaagaggatgagttttttttttttcttatttttccttcgatttttattttccttttgttttttcctaatttcctcaaaatgagtaaactaaaggctgaaaataaatcaaatggacaacttccattctctcatgcaaccaccaaagcctccactaaaaattactaaaataccccttaatcttaaacttaggcattttaaagtcttcaggtaaaatggtcaaaatctataacccgctcaaattcagtattctacttttctccaacatatatcccactaagaaaaaggttctagacttacccatgtgctaaaaatagacatccatcgcattttc

SEQ ID NO: 60551 - DNA, 1421 bp, Cannabis sativa
  modified_base (562)..(565): a, c, t, g, unknown or other
tatgacatttgtgaaataatagataaatggttgaaaaaaaatggcaaaactataattaatgtagggcccacatatggccggccactatagccttatttttttataatattttatcattttttattccatataattcaatcctaactctaagtgaattagtataagaagaaaagaatagtctcataatgcaactaatgactctaaacatagttcacatcttgtcagatcactagagagttttgagacttcttgttcttcttcttcctaattttgaaatcctagagtgttaatcacataaaattttgagccttagtgattgagtgcaggcccacccatagcaacttagtcctcaatcataatgtgtaagactgtgaagaatcctaacaactgaaggagaatcgggctcagatcttgattatactctgcgacagaaaggaacaaggattagagatctgagtcgaatgagtcatttaattctgctgcaaccaatgtaagatttctcatactttatatgtgtttaaattttatcattttagagattcatatttaggatgttaaaaannnncttgttagtaaatttaggtcctggtaaaatataatccaacagataacgcctccaacctttcctcagctctcagatgaaacactcgtatccctcaccacgtatctagtctgtataccagtgatcttgcatcgcgggctctggggaaggtatgtgtcgcccgaatccctccaacctttaatactttattcatccatattttaatctttaattattgtgtgtaaatgggtaattttgtcattgctaattgtttgttgattaaattttaattgatttacatttgcacattagttataattttctcacaattatattcttaacacaaattagaatacagtgctcctcctccacccactccttcattataattaaaagaaaatgtcttcctacatttgtaatcaaaattataaactaaaaactttctttagatcaaaagattcatatatccaaatataactaaaataaataaagttcttcaaaataaatttgtaaaaaataataaactaccaaaatatggatcctgatctcatctcaaactttcaagcacaacccaagattttttttattaaataaataaataatttgtagatggcttctaggttatttatccatttttttattacataatttttatttttaattttgaaaaagatattgaatattatttaaacataaatggtgttagcttattattatttatttaaattttaatgacttagcactcttatgaggtataatatccctattagtataattcaatattgggtctcacttattttgatttaataaatattataaagaaccgctaactaattataaatcgtcatgacacagaagtgctaagtaccttagtacccca

SEQ ID NO: 60552 - DNA, 1066 bp, Cannabis sativa
  modified_base (56)..(59): a, c, t, g, unknown or other
tcaatcacttcaaatttcttatgttgataactaatcagattgtaaagagttttatnnnnggcataaaacccaacaatttgttccaaagccccttctttgcgctgtgttgcggatcttatgtttagaagtaacaaaacttggaaccttggcttccttgagtttctgttgtgctgcgaactgaggggtttgattagctctattcaaatcaacactcatgcggagaaggatgtgattatctggaagaattctgatgctggtgccttctcggttaaaggagccttcctgaataatcagatgaatagatttgctgaaaagaaggagttatggaagtggttatgggatagtaaaattcatcccagacagagcatgatgctctggagagcgatagcaggggcattaccaacgtccgataaatttgggggttgtaattctaatgactgctcgttttgttggtccgaatctgaaaatcctttacatctttttgtgagatgttcgatggtcagagccttatggtttggtggcccattaccaatcaaaactgagctaatctcgagtaatactctatttgaattcacttgttctgctgttgttaatttggacgtgtcttctaggcatactttccttgtctggtttgcctctattttggaaactgtgtggctgtggcggaacagaattcatcatggatctcatgtgcaggtctcgctcgacactctgctcttagatgtcaagaaacgctttattgagatgagcgaaatcaaacaggcctactgtgagaagactatacctacctttcactgcaatcctagtcctggagttgtttcgaaggtgatcgcgactgatggatcattcaaagaaggtaattttgggggtgctatggtggcaattgatagagttactaatcattggttcatcagaactacatcagggaagcaggatagtccgattgcagcagaactttaagccatcaaactcgccttactttgggccaaagagaagaattaggaggacgtgtgcatcttcactgactctcaagttattgtgaattccttgctgaaggaatcttttc

SEQ ID NO: 60553 - DNA, 1940 bp, Cannabis sativa
aacttgtgaaagagttatcattcgacctctttttagtggtttggtgatatcgatcttgactcgcacccttaaaaacggaccccatccttcatttaacgaatcatcaaacacttcaatgaattcaccaattatgttcccaagtgcctttgccaattcctttgttttactcatgaagggcaacctgtatatttgcacccaaaaaggtgtgtaaataaggtttgttgaggagacattttcacaaacatttggcgtgtacagaactatgtgatggttctgaaaatggaagggttctttattcaataccctttgcttatcaccctcacaaccaaatgttagtaagaacatatcttcatcttcagaaattttgacagggaacctaccatcccaatgttcagccatttgcctctgaagagtggtgagccataccttttttgttgttaaaattctggcatataagacactttcaatttcagacccacactgaaaaggctcgcccagatcaaatgcaaacacagtctcctcctcctctgtaagattaatcttgcctttcattttttctttcaacggatccatgatgaggggaagttacacaactgtcaggcagtggagtgggatgaaattgcagtagcaattacacccaggaaggagattgtagttgttttgttaaagaagaaagatggaaaccagaaaaaaactgtaaaaaactgaaaaccttgaaggacttgtaactgccacagagcactcaacataaggcagacgctcaataataagtaaaaaactccattatttatttattctctttaaaatttaaattttattaatttgaattttgatgagatattatcgcttggataataatacttggggtagaaaattaacgtaatttttccctcaaaatatctacttaacgatatttgattgattatcatattactagttatttaaataaattatctactcaaagaaaattatttaaataaattattaattattatcttattgttactattatttttaattatcatatataaattcaaataagtaatgatattatatacaaaattgaagactgaagcagtgataaatccatttaaaaatgctttaaacttatttttctttatttttttctaatttaattaaacctattttttttttctaaacttttaattctatttatttctaatttagcaaagaaaaaatactaaaatatctacctaatctttcaactatttttttcaaggatgaacttttatatttcataaaaaaaaaaaaagtaaacttttattgaaaataataagaacttaaaattgaaaatcatccattcaaagtaatttattatcactcggtgtacaaatattctagcaatatcatctaataaatagcctatcttgttacaaaagtcattaaagctaggttagtggtgaagaagggatgagaaaaaggaagagatcatgattcgaacccaagacttttaaattattaagttattaattgattgcaaaatactattatgctacattaaaaaaaaaccatcttgttacaaaatgattttcttgagaaaaccaaaatccgtctaattcaaacgaactaatagataatctaagactaaaaaatcaatttaatgtaaccattaaaattaaaaattatgcttgaatggtatggcagttgcatctaatactgtaaatatgggccgggctttttcacacgacacgaaaccggcacgagtctaagaggcatgagcacgatctgacacgaaaaaatatgggcttgagcacgacacggtacgatgctacaaattagcacgacacgacacggaaaaaaatgggcttaagcacgatacggcacgacaagcccgaaagcacgacaagcaagcacgaatataaaagctcaaaaaatacgacacacaaataaatatgattttttaattttgtacttcataa

SEQ ID NO: 60554 - DNA, 1991 bp, Cannabis sativa
cccccagtaacctcctactaacatagtaataaggttgttagtgatttccctcttctcacactattaccgcactaatcgcattttctgagacagccaagtagaggagtagtgtctctctggttacaggtttcgccaaaactaaaggtgtcgacaaatgccatttatgctcttaaaggcctccttgaaatcctctgtccattcaaatttcttgttgcctctcaatacattgacaaacggtagacacttatcagttgacttcgaaatgaatctgttaagtgccgccattcttcctgtcaagacctggacttcctttagtttggttggtgatggcatatctatcaaagccttaattttctcaggatttgcttcaatgtccctcgcattgactatgattcccaaaaactttccgaaagaaactccaaaggagcattttttcgggttaagtttcatattgtacttttttaatatttcaaggcactctgctaggtttgcagtacaatttctactctttaccaacttcaacaacatatcatcgacgtagacttccatgtttcttccaatttgactcgcaaacatttcattcacaagtcgttcatatgtttccccagtgtttttcaacccaaatggcatgactttatagtaataaagtcccatgtttgttacgaagcttgtatgttcttgatcagggacatgcatttttatgtggttatatccagagtatgcatccatgaatgacataagctcgtctcaagtaattgcatctaccaactggtcaatacttcgcagtagaaagcaatcctttggacacgccttatttaaatcagaaaagtcaataaaaattctccaagttccatttgtctttgggacgagaacaggattaacaggattggatattggatatccacgagggataaaatacctcgcgtataaagttattaaccaacaacttttccacttcctgcttgagtgccccttgtctcagaatccaagggtcgcctcttctgtctcttggtgtggtaattcatatcgacatttatgtggtggtagataatcttagggtcgatccctatcatatctccatggctccaggagcgccaggtcttgtttcaccttcaaaaagttaattagctgctatttcaattattcatccaggttcttcccaatgtatagacactttgtgggatttccttgatctagaacaacctcttccagctcctcaatttgtttaaataaatttctttcatcttaaatctgaggatcaagatcttcattgttcttctcaccttctttagttaagacttccattagctggtgaccagcctttctgtgctgcagctccatgcgataacatttacgagctaggatttgatcacctcacactactcccacacccattggtgtctgaaacttcagggataagtgcttaattgagctaactgtccctagtacaattaaggttggttgagcaagtagtatgttataagctgatggaaggtcgacaaccaaaaagtcttgcattattgtggtggataaatgtgctttgcctaatgtcaatggaagcttgattattccttaactggcgacaatgtcgcctgtaaatccacaaatatttaccatgcaaggttttaattaagctttttcaagtcgcatcttcttcagtgtatccctataaaggatgttcactaaacttctgttgtccaccagcaccctctttatcctcttattaacgagttggatggtaatttctagggtgttgacttgaggatacatcacatatttttcatcttccttccagaatataatcgaaggttctttagtctttgctttcttggaaggttccaaagcaaaggtagactgctcattcttcagttctttcacattcctcttttgggcattgtgctttctcttgcaatatgtggccctctcaagatagctaggatatcctctgcttcaaggggagcaggttgtaatccttggttgcatgggttatt

SEQ ID NO: 60555 - DNA, 744 bp, Cannabis sativa
atttaatttaaatttaaattaattgatataatatataaattaataaatatataatttaaataaattaaattaaattaaataaattgaaaaagaataatcattacagatttggtgtggattgttaagggtatatggcgttagttatgggggtatatggcgtcggttattcactatgaaccgacgccatatgtaccctatggcgtcgattaccataaaataactaacgacatagggtaccattcagcgtcggttgttttagaccctatagtgtcacctggatcagtgttggtaacgaattttaccaaaaccgacgctaaaaggccttaaaaactgcctctagagcccaaatttgtcgtagtggtagttgtatcctgaccacgggatcgtgaaggtaactgtagcgaggcttccaaaatgaactcaggatcatctcgggatgacctactgtgagagtgtttattaagaacattatagtggttatttccctcaaagtagtcttcagtaggatcacaggtgcgaagagaattgaattggtcactcaggttcaattcctctccatgtactcgagggaagtacttgtactgttagccatcgaggccatgggtaaagtaacgacactacttccgtctttcatctcgaaagtacttccaagtatgaagcggctcattggtccttactagtcgaattttgtagcctccaattttgaagcagcatctcctgctacttcttttaggttgaacaaaa

SEQ ID NO: 60556 - DNA, 964 bp, Cannabis sativa
aagtaaactatacttttaaaataccttatttattaagatcgttttaatttgtaagtttttttttttaaattacttttatgatattaaaataataaaaagcattagtatactttattttgggagttattttcacatcatcaagttataagtatactttattttgataatttttattttatattaaaatatgaattttttgaactgtaaattttatttaactagactaacttcgctacaacaatatcagcaacatcaaaagagagattaaacttctgaaaagaaaagtacgatctcatagttttagttataaggtgagcagttcgattaacagatcgtttgataaaacgtaaaaaaaattcctaaaagaatataaaagttgtttacaatcttcaacgacaccactaaaagtggatgacaaaatattcaaatttctaacagcttgtaccaatactagacaatgagattcgataatactaacactcaggaaattgcgcttcaaccacgaaagtactttcttgagagctacaactttagcaatctttgaaagaacttgttcaatctacagtcctgtaatcccagccacgacccgaccctaatgatcccgaacaatccaaccaaacccatgccttccctcctcgttgaacaatgcaccatcaatataaaaatatatataaatatttaatttatactaatattttaattttttttcttcattctcatattcttaaaataaaaataaaatctattttaaatattaagattaaaaaaattgaaataaaaaattatatgaaactttatcataaaaaaaatataaaaaaataatacataatttttttttgaaaaaaatgtgaatataaaattaaaataattattgatattaagaggaaataatgtgaaaaataatatttttaaaaaatatttagaagtaatttttaaaaattaatataagttgatatattttttt

SEQ ID NO: 60557 - DNA, 997 bp, Cannabis sativa
agaagagattatattctagtgtttcacacccttccaaaacttgatttcacttaatgacgtgtcactctaatattggttctgagacacctataccgatggagtcttttttggagcccctatagaagaaactccctatatgacagcaaacatgtaaaaatacataaagatctgtatttatgtaagaaccctaaaaatatatatgggtttgagtacaacacggtatgaaaaatatggattaagcacaacatgacacgaaaaatccgtaaagtacgacacgtaagcacgaataatctagtctgatagcttaacacattaaaaatcttataatttgatcatagtaataataataataataataatttaagtatttattagtaaatatttaaattttaataattttaataatttttttatatgatttttttagataatattgttaagaaattatataaaaataattgaattataaaaaaataaatacagtttaataattatttcattaattataaaaataaaatgtaaaaaaataaagcacgaatttaagtcagtataagaaaaccgatcagcaccacacagccatatttataacacaactcaactcgtgttttttagtatcatgacatgatacaactcatatttataacacgatatgtatttacagctcagactagtaacattagcatatatatataggaacatgattttgtcccgtgatgtactttcacgaaatgtattccatgatgtacgacagccgttagatggggaagttatttcatctgagagggttgatctagaggtaattagggttaaaaaatagtaacataccctgagactcatctaatgtaccacggaatacattccgtaaaaatacacggaatacattcaaatttgtctgtttgtttcaggctccagcatgctttttcagtcataatttggtacttgcttaccaactatggtagagggatcttatacatatgttattcccacaacttctatc

SEQ ID NO: 60558 - DNA, 1037 bp, Cannabis sativa
  modified_base (186)..(189): a, c, t, g, unknown or other
  modified_base (314)..(327): a, c, t, g, unknown or other
  modified_base (411)..(412): a, c, t, g, unknown or other
aaggcccttgttccaaattttttttttaggctccaaatgtataagtgggattaaaagtttttatcccactttttatttttttatgtgtaaaaactgggataaaaagtcacttttgttgtagtgaaatttcgagcctatagtgagtgagtgcatgtccacccatagcaagtctagtactcaatcatnnnntgtaagactgtgaagaatccaacaacatgaaggataatcaggctcaaatcttaataattacgctacgatagaaaggaacaagggttagagatctgagtgagaggagtcatattattctgctgcannnnnnnnnnnnnntcttaactttatatgtgtttaaactcaattatttgagaaattcatatttaggatgttaataaacatatttgttagtaaatctanntcctggtaaaatatattctaacacaaagatcacatctggttatgtttttcaatcaagtggatgctctatatgccggaaatcaaacctagaaaccatttttgccctgtttgcaactgaagtcgagtacattgcatgtactaaagctgtgaaagaagccctatgacttaagggaatctccatggaacttggtatagaccaaaagtgtataactatccattatgatagtcaaagtgagaaaaaattaggttttccatgagagaaccatgcatattgatgtgaggctacattttattagagatatactgattggaaggaaagtaaagctggtcaaaatgtccactgaagacaatgcagcagacatcttcaccaacgctctacctacttctaagttttgtcactgtttgaagctactaaatgtaatggaagtttagacagtgttcaatcacctatgtagtttcctagtttctatgcatataacttgtcaaggtggaaatttgttagaactgtatgcctaagtaatatgccacctaagcacctaagcaatcagttttaactaactctagaagttagttaatctagttagctagagtagagtaaaatcatgtaacatactcggggttactag

SEQ ID NO: 60559 - DNA, 836 bp, Cannabis sativa
tgaaggtatcaaaagatccagatcagaggaaccaacatacaatctcattcttcaagtctacctgttttccaaaaccacttgtatgggaacctccattattaggaacttagataatggctggtattcaagtacacatcgctaatggagcattaaatgaaaacttcaactaatgaattgaagttaacatattggaacaatcatttgccttaaatgggcaatgtcaaacaatcagcttagtgaaagtagtataaacaagaaaaagcaaggacttaccgattccttgtttcgggttaggtttatcagcaggaggcttctgagaaggcagattgattggagcttcagtaacctcgtacctgactctaaagggttcgtctggggaatcttcttcaatggagaaaaaaaaaacaaataaaatggggggagcaaacgaagaagaatccaatcaaaataaaatgtcaaatcacttttccttgcacttgaacgccttcatttaatgactctagtttaatgtataaaaatattttcggagtgatataacctcccattttaatatctttctcaacctcagttcccaaaaatatatgccggagtattttttttttttcatgacagtgtttcgtagttacaacaacttttctgtaaattttttaatttttttaaatagtttacagtaacgacaacaaaaattttgatatttcagttcaccacatgtgttcaaaaacttccaaacgtgtttttgacactataaactattaggaattttgaaaaaaaaaattataagaagaatgttgtaactacaacgaacaccactatgaaaaaataattgtaaaaaaaaa

SEQ ID NO: 60560 - DNA, 1698 bp, Cannabis sativa
atttagttattatacatgattttactatttaagttgaattatattttgtattttttttaaaaaaaatataagaaaaatatattttgtattcatataataagaaattattgttagttttaaaaattaataatatttaaaagaactatatatttttaattttttttttacgataataaactgctattaagtcaattagttctaatagttttttttttttttttttttccagagatttattggaacggaattacaagatagaaaatgggatttcttccaaaaaaaaaaaaaaacttaaattgactggtgaatccatcaaccgtaacactaaaattacaactaacatataggaaaaatatgcatccgaaagttaaattaacaataaagtcttcgtatcaaaaaatatttcctaactcattcatatacatttgagttatttagtgttaaaacaaacgatgtagaatcttaaaaaatagctcttacaattattattacccttcatggtgcctaagcaccactgtatataagatcgattattgttattggataccagtagtgcctagcatttttacacatgttgttttacgattgacaagcgatactctctattatactaaactatgtgggactcaatacttagtttgaccaatagcaatattaccacaagatagtgccacgctaaaaggcaccagtactagatacaactaatgccttttagcatcatctctataaaatgacgctctataattattatttactagctttgttgattaccaatatttgcaaaagtatacattatttgtttaaaatgtttctaaatagattaattttcttgtgcccatgcacactactacataaaagagtattcatgtcggtcaaaatgttagtttttttttagaatctatcgatgctataaaaatttagtgtcagtaaaaacctgacgttattattagaattgtgtttatccaaaaatttgacccgacgacatggacaacacttttgaaacgtgacaagaaggaaacaatcttgaggcccagccaccgagactaaggtggtcaacttgggcattggaaactataccgatgccctagtagacaatagtgggcacccggataggcaccgagatccagcaaagacgtttttaggtgccatcctttgacaaagttcaagtgaacatgtcttatagtgaccttcaaaacgatgaaccatgaagttaaggatgtaacaccctactagattaggcacgttatcgtattttctaagtattgtgcagttccttgctaatcaagggatttgttgaaaaacgtgaataattaaattttttataaatacacttaaattaaataaataagtacaatacatattctaggatcctttttttttttaaaaaaaaaaggttacgtacatatatttacaaaatactgatattacaaatttcgtcgtctagtaactatcaaaataaagcccatttatctcaaaaatttgaacactccaggtctaaccacctcgatatgtacaatcttcatctaaccctaggttttcatggctttaatctgctgacaattcaagcatatggacacataatcaatcatatcattcttcatatcgaactttatcaagaatctcttgtctaagttcaacattattcaaaatgcaaacttgagttttataaagtaccattccattatttaacactaagaa

SEQ ID NO: 60561 - DNA, 1677 bp, Cannabis sativa
  modified_base (1009)..(1021): a, c, t, g, unknown or other
ctcaattaaattatagaacacctataattaaaattagtttttaaatcattttaaattatatgattatttattgaatctttctcaattaaattatagaacacctaacataaaactaaatatacgtgcaacacacgtaactttcttctagtatatatatatatatataaagctaaatatactactagactacacaacaaaaaatgaggtgtccagctagattaatattacagatcagatgttgatctttccctcgctacatctgtattttgggccttgtggctttcaactaatatgtttctttctcaatgatattaattaattagaatctatactgttgttcgagtaggatattatcctacaattttgctagaatcgctagttaaaaatttgtggaaagtggattgaatattatatccaacacttctaataattacataatcagcataattattgggtaatactttactaatattttcatgtcatcttacaattagttagttaatactttactacacaaatactttaatattaagaaccattaataccttttaacatttcttttatataatatggttttatagtaactagctacttgtttacttctaggtgattaattaactaaaagtagtttatgaaataaatatagattacgtacgtgaagttgaaattatgtcatatatatttgtaaatatatatgttacgactcgaacttagaccgtggcagatatgtaatataatttggatagtcaaatatcacactttgatccttgtaagataataaaacttataaatgatcgtttaatttatattacaaaatactaaattaaaaataatgaattaactcctatattaataagaaaatattagtaataaaatcaagaccactcatttatataaaagaacaataatatccctacagttatacaatcaccaaatagatagatttaataagttaatataataccaaaataatacctaatatccatcattcctcatttctaactagtannnnnnnnnnnnnagtcatccaaaccatccatttcagctcaaatacaaaatcagtttcattaaaagacaaaagagtagaataaaactaaactagtaactatggcgatgtgatgttaaaacgccgaactctagtctttgtttggagcctctttagatttgctaaccacaaaataaagttgtgcttaggcacatttaatctgctccaaacaatagaagcccattgaactctaagcaatttatacccctgctaaatgctgtaagaacttggaaattagcaatagatttgaattgatccttgttgccttgccacaatacgtcttcagtaccaactaaagatttgtaacttatatatttttttttcaataaatgcatgtttaacaagtaaaaaagaaataaatactgtagaaaattggtaagatcaaagtaaccgaaacctaatcgaatacatttatgtactataatttctattttattattaagaagattgtcattacaaattgttcaagtcctatttttcccaataagtatacatgccataataaattatatttctgtatatatcaagtcaaatattttagaataattaacttttttagtccctgtacttatgacactatactatgatgccccttaatttataagtgtagttaaaaataccccctaaaatat

SEQ ID NO: 60562 - DNA, 1125 bp, Cannabis sativa
gagatgttttaagaaagttgaatagtaaattagcaatattatctaaaatagagagtgtttttttgtcaatctttcgtgctcaaatatatattaaaataattttcttaaaaaaaataaaaaataaaaaattcataaaggtgttcgttataattgtaatatcatcattgaaatagtttaaagtgtcaaaaataaatttagagatttttgaatatgcttggtagattgaaatattgaaaacaatcataattttttaaaaatttacaataataatattgttactataacaccactataaaaaaaaattgaaaaaaaatattacaaggtatgatttaagatatgatttaataaaatgttatttttagtcctctaggttggatgggccttatgcccgcgcctaatctgccttaactcaggtccgactctgagagccctatacctcatcgatatgcaccgcaagttcgtagctcagctcatgagagtacccatccaattgaattagttatagttatgtattgatgaattgtttcaaagatagacaaattagaagcattctagcttttaaaacattgtcttctaaaaaatgcatctttatagtatatatgttttttggcgtgattttacaacactttttatgcttattgtttaatttccaatagtatatgaattggataaatatatcattttggaccttttacaaaagttactaactggactctttattttttttttaaagaacttaaaagttcattactgagagaaaacgatgggcatcacaggggaaatgccctcccctttgtaaacaccagcagaaagtgtggaacctttaacacttttagccaatccatcaacaaaaaccagttccgaacgattaacataagaaaaactacaaactcgaaaagttttaactaaatctaaaatcgaaagagagacattaagaaacttccaattaggcacacacttccccttatccagtgcctgaatagcagtcaaacaatctgagcaaaccagtattcttgaatttgtcctttgcttgacccaagagatagccaaccatattgctctagtttcagcatccagaaccagcagttgctaactccaccttatacatccaggatccatcttcca

SEQ ID NO: 60563 - DNA, 834 bp, Cannabis sativa
agtagttcataaggagccatcccattgttgccttataggtgttgttgtacgataaatcaatcaggggaaggtactttacccatgatccttcaaagtctaatacacttatccatagcatgtcctctaaaatatgaatcgtcctttcggactgaccatcagtctgaggatggaatgctatactacccatggctcgatgtaagctctcctagaatcttgatgtgaactttggatccatatcagaaatgatagactttgggacaccgtgaagatgaactatttctccgacatatagttctgcatactggtcaatggataaaatcgtcttaacaggtaaaaagtacactgactttgtaaacctgtcaactatgacccacacggagtcgtactatcccgtagccctaggtaatccaagtacgaagtccatggtaatgtcttcccatttccatttcgaaaggttcaatggctccagaaaacctgcaggactctgatgttcagccttcacttgttgacaggttcaacactttgcaacgtattttgctttatcgttcttcattccaggccactagtacatggacttaaggtcttgatacatttttgttgtccacagataaatagaataagaagttgtgtgagactcattcataatttctctcttaatatcatcatctatgggaacacaaacaccgttcgtaaactgtatcaccccattactatcaactatgaattcattagattttcaagctaaaatcttgtctcgggactttactaaatttggatcttgatattgtgcttctttaattctttccaggagagtagactataaagtaatgttat

SEQ ID NO: 60564 - DNA, 1180 bp, Cannabis sativa
tagaagaaagtcttacatttaccatccataaccaatttgcataaaggcaaataatcaatgaagtgtttgtatggtgatggcttataataccagacagaaataagtggtgtttgttcattatttgagtatgaatatgaacaataaacatagaatagtaacaaattattacctaataaaaagaaccaagaacgccaagtgagaagaattatgaaggtgtgtaattactgacatacatcattggttttcaatgcagttcttccattaaaatataaaatacaagtaaatatttaatgagattgattaaatggggaatctttttattacttgcctacatttgcaaatgttatatatataatattatgcatacgcactctaatttaattttataagatccacataggtttagctagcactttttatattaaagaaaaagtaaatcaaaaatgtgaatggtgaatccattacaaatttagattattgtgctcaataatatatagaacaaaaaaagccaataagagcatctccaatcaataggggtttgtccattcgattggagttttttttttttttttagtgtagcgtaataatattttacaatcagttaatattttaatggtgttgacacgtatgtaatatagtctaattttttagattaattttatgtaaagtattgctcaatatgaatcatgattacatgtcattttttttattttattttattttttggttgagaattcaaaaagaaaaattattaatttaatgtgatgtgggattatggtgggtaacttttagagttgttaactattgaagtattttttgaagaaaaaaaatatatcaaatcttatgtggatgagacatgaaataaaaaagtaacattttaagattacttatgtacttttggcaactataaatgttatctttattgaacgaacttgaaaatggaacgaatgtatgctttttttcactttggtttcttattcctaatgtagtacacttgtctatctaatttgtatcatgttttttttttttaactcaatttgtatcatgtatataactcttcatatattatcttgagtaatttgcggcaaaacccccttaactatcaatttacttgcaaaaaaccatccaacctcatattttggtgggaaaaccctccaaagtactattctgtttacatttt

SEQ ID NO: 60565 - DNA, 1345 bp, Cannabis sativa
ctgtgatgaggtttgcttcctttttatgtctggacatatgaaattcgttaatgaattggaatggcaatatcttctgagctttaattgtattatgtgattttgtttttttagtcttgaagtttttgattttttgtttgggtgtttttgattgttaattaattggcatgtgatgatacaatgatatgcaattacagattaattgtgatgatacaactccgcttattatctgatgccaatgcctttgttttgtttttttattctttggggtttcgtttggttcaattttgccaaaatcattagttggtaacaccaaaattatgcaatttgttttttttatgaacaagttaatgcattaaaatctaaatttggctagtctagcctaaaagaaacccaaatcatcttacaattaaataaatttaagggtaaatatcattttaaattctgttttgcaaaagttataaattagattttgcaaaagttatagattagattctattttgttaaatgataaaatggatgtgagtttaatttttgataatttttttttaatacaaccaatttaaaaataatgtttaatatgaacagatataaaaaatgtaaacagttttgtcatagcacttttagatcagattataatttagggtcctatttgaactattttagaaaattttctcatttaacaaaatatatggtctaattgttaaattttgcaaaatatctaaaatggtatttatcttaaatttaaagctgaaaaaagcaaggaacacatactagccacctttcaagaatgctaagatttttgttaaaaaaattgagaatgaagaataaatctttttaatagaacgtatttgtttattttgatgacttcattaaaaccatcacagaagattttgcaatcaatctagcaacacagcattactagcctgcatcctgaaccatattagaatctaaatggaagaggttactcagccttgaaataatgatttggaatgcccaaaatagatccatccccataaaagctaaagctcttacagcacactcagcaagatcgaaagaaccattgacaaagatggactgtacctatgaatagtagacaaaataatcctgaagggatgaaatcccttatgttaattggtagtttatcatttgattttttattggaattgtttttgtcttcatggcaaatattgctattctattgaaatttatatttgcttcaaatgggctttcatttacaatgtatccttactaatgtacaaaacgaagtaggactcttgaggttttgaatctagatattctcctcgattgtcacaagtcttgcacaaaattgtgttcatatagctca

SEQ ID NO: 60566 - DNA, 1939 bp, Cannabis sativa
  modified_base (847)..(849): a, c, t, g, unknown or other
gaatgtcaactaattatttgataactagagtctttctttgataaatgattactatgagtcagactcaataaaatttggacattcttttttttttttttttttgtcgttaaagagcactctttctttatcatcaattcaattattgttcgagacttagaattttattttattatcaatccaatcactgttcgagacccaaaattctattttattatcaatccaatcactgttcaatttttttttttttcaaattcaacattatattgatacatttttcataatgagtgattcattagctattttgagtctcaatttcatagtaagatgcaatgcaggactagtcctgaaatttagtggtctagcccgtctatactaaggtcgggcctgatgtaatgagtttctcttcttattatatattaattggtattgaaataaaacttcatatattttaccatacagcaaacattttgtggatgatgtttaataatggttttgtattatgaattgtgattgtccagccctgctttttgtttgctcttttggtttgtttcattgtttgctgtacccatctccatcagcaaagatcttccagatattgaaggtgaccgcaagtaagtttatatcaattaattaatttacttttgtgtattattatttttcttttatataatttactataaaactaaacaatatgaggattatttctaggtttggtataacaaccttcccaactgaatatggaccaaaaaccatagcatttatttgtcatggacttgtccttctcaattatggtatttggctgcagctattatttggccacaggtacttatataaatatatatatatnnntatatatatatatatattggttatcttatagtaaggtaactagttaccctaaactgtatttcttacattaactttttttttttaattttgccacaaaataatttgttcgaaaaaaaaccccatatttcgtaaactttgccaagaaaaaaactatagaaattttactggtgtcattcgatacagaactttagaaactggatctgccgtcattattaagtcaatttcctattttggtggtaaaccctgataattctttcgaaaacacatccagagattcttgtaccacatgtacactttcgggttctactggtaccttccttgtagtgtccactacattatagctaaatatctgatacattcccctcgtaacaaatctcttgccttaaacattgatatcattagaactcggtattcatgaacttttctcacaagcacaaacggattctcaccttccggttcaaatgttgtcatcttcctcttgcaatcaatggtagcattatactttgctaaccaattcattcacaagatcacatcaaaatcttctaagtttaactcaatcagatccattgacaattctctatcttccacacacacggaagagatctaacccacctgctaaagataattgttctccaataggtgacaacgtaccaaaccgacttgtcatcgcatggcctactcaaactatcaattactctacttgacacatatgaatgcatatcaccagaatcaatcaaaataatcaacatattgacatcaatagaaatctcacctatgacagtggaagggccagcgttagcatctgtttgggtcaaagaaaacaccaaagcaggtacaaaagtatcatctttcttcatatatgatatttgtaactgtgggtagttcctctttagatggcctactatcccacattagaagcaagctcgaggttggcattcgcccaaatgacgtcttctacaccttaggcactcagaataggattgccaactctcattttttacctcgaaggaaatcttgattaccttgaaatttcttgttcgggcccgtaatgggtagatcatttggtttcctctttcggtcaatagggtta

SEQ ID NO: 60567 - DNA, 1146 bp, Cannabis sativa
ctcattggctaaaaatgttgttgggcatgtttatatctctaatcttcttcttttatttattttttctttttattgcaaatttataatagcaagcctctttctctactctctcttctaatttttgtcagatttgagatgcaagaatcatctagatatggaaatcttggtatcggcttgatggcaatgacatcgcaatagatgagggggagatttgggtgagttgatggcgacgacttgctaacaaatctgggaagcaacaacgttgtgagagaatctgggcgatgacgactgaaattgggacagtggcgataaagtatcaatcctagttatgctatcgatttttcaaagattacttgctttttttcctgtagaaagattagttatttttaggaaagattttattgtagttatagctcgaagagtaaatatttatattatctcatctaattttataataattattattatttgtgtgattttaaaatttgggatgttaaaattataaaaagctcagttgctggagatttttcttatagattagaatatgattgagaattttcgatcttgttttatttttaaacatattgagtggttttgattttattatttttcatagactactagaaaaacctccttttatgtccatcaatattggactagataaatttttcgagtcccttttgtgttggacataatagcctgggacataaaaggggtgtttctctagacaacattattggactagaaaaacaaacatttttagtccaacaattttcgactagaaaaatatttctagtccaacctttgtttcttaaagttttttttttattttaccccataatgtatctcacacaagcaaaacaaaatttcattaaatgacgtgtcaatgtcctattaggtctgacacactcctattcatggggtcttttccaagcccctatagaagaattgtcctatacatatatattattaatctttgggaaatttgaaagttcatgcttaaaaattgtccatggtcttttagtatgccacattaaaatctataagaatttaatgctctaaaattaattaaatcgcaaaataccctcctcataccttccctctttctcttagccttctctccctctctctctaactctcaccaaa

SEQ ID NO: 60568 - DNA, 1255 bp, Cannabis sativa
tgggagggatatggaggattgaaggaggatgtcgaatggaatatcaagatcaaagaaaagttcgaaacaggtcttttcttaacttttacatttgcatttgaatcaattcaaagcagaatattaactaaaatgccatggtatttatctaatggggtgctaatcttgggcaaaatggagaattctaatgaatcttggaagaatgatttaactagctttcctatatggggtcgggcatggggagttccgattgatcttttgactacaaacaacacagttcgaatggtagccaaggtaggggaagttattacagtgcaaaattcagatatctccaagatggtagcaaatggctttttccgattctgaatctggatgtctaccaacaaaccagtgtgtccaggttttcccctcccctgtagcagacaaaagaagtggataacattccaatatgaagaattacctttcatgtgttttaagtgtggaagaattgggcatagccataaagattgtcaccaagatccaatcatgattcaggaggaaggcacggagggtactgctgcgtatggaaaatggttaaaggttggaaatgggatccgagaaggcatacaaggtgatagacatggaatgggaaagaatagtgctttagaagatactatgaagcaaccgacaaccaccattggaagggctactactgtttcttcttctccttctctagttactatgggagatgtaagaatagggagtatgaatgggacggatagcagagaaactaatcaaggcaagatacagcagtttttagaaggggggtcaatgcattcatcaatggattctggtttgaaggcaggggacataggtaaagaggaaacccagggtaggagtgatgatggaagtcggggaaaacgtcgaattgtggaagactatggagacttaggctacgggaagctgaaaaaatcggccacggtcttatccaaagaaattcaggatcaagatctctataacattccagtttcctacgcacaagaagcccttatattggatggatctacgccctttgtagtgggaagctgttcgaaaaacattgcaaaataaaatagaaggaaggtggcagtgaagaaagactccaaggctagaaaagggaagttggaaaacaaagtggctagcatttctcctatgggggattcggtaggcactcagatcacggaagaggcgcaccctgaaactcagggtcgcctacagccatgaatattttattatggaa

SEQ ID NO: 60569 - DNA, 765 bp, Cannabis sativa
aattttaagacaaaaatgggatgaaatggtgaagaaatgagggagatagggtggattttagtggtggttggcgagggtttcgtgggttttcaggggtctgttgtggctgttgttatcgtggggaagaagaagacgatataagggtttttttgttaaacccttaaaatttcccaatttctaaccgacggaataggtttattaatatatatacctacggtttttaccaaaaaaccgcctctaaatgtcaacttcaaattaggtgggtgttttcacaccctttagcttccccttttataaaataggttgaaaaaagggaagctaataaaaaggggaagctaaagccccatgttgtagtagtgattttttagccttgtaggcaagcattgcatattacaagtgtatacggtctggacatgccctctctatttctctcattcctctctaaagaagaagaagttaataggaatttttagcagaagttttgtaggttgaagaagttactttcccttggtcatgatatatatgggtatttataagtggtttcttgatcaacatgcctttaggaccagcccttctgccagagatctgactgttaatttggtaggtgacaattccatcgtgtagtgcacagaggtatgaggagtaccgtccaaacatcccctacgtgtcactcaaaggtcttcccttttcgaatcatccccctcacatggctattggataatgggcaggcacgatggtgcacatgccttgtaatatgacctgaca

SEQ ID NO: 60570 - DNA, 879 bp, Cannabis sativa
ttaccctaccttatttgatggagagtgaatattaaccattttagccgtacttataaatctaaattatcttaactcagctaatattgtaattgctttcactactacaaaaagatgaattcgtgacggtcccaaaaataatttttttagggaccgtcgtttaaaaaaattgagtaactgtttaaaattgtcgggaaaaattagtattcctgacagtttatagcagtgcctaaaatattaggcgacgtgtttcgttaaaaacacacacaaaaaaaaaaaattacgggattatacccgacggtttaaaatcgtcgggtataccccatttaaattaatttttttttttatatatactacaaaaaggggaatagccgacggttctaaaccgtcaggtataaaccttcacttacttctcgccacatttgtcacgtgcccacctacttcttttctatttcccacatgcccacttatttcttctccattttccacaccctaaaacggaaatattaactctccaaaaccccacccacgcgcaccatcgccctcctccctttcttcttgtccatggatctctacccacccctcttcccgtcagtctccctctcctcttcgtcgcatacgtcgaaccaccaccacctcccgtcggtgtccctctcatctccgtctcatacgtcggaccaccaccacctcccatccgtctccctctctcttcgagctcggtataaatatatttatttatatattttttattttttatttatttattttgttattgtataaatttaatgtgttttaaagttaattgttattgtaataaaattaattagtttttttttacattagcgataattaaaaactatcgcttattttgcccattttgcg

SEQ ID NO: 60571 - DNA, 1321 bp, Cannabis sativa
aaatattattaatttaaaaaattatatttaagtttaaatatatttaaaaataatattttatttagatattagggtttgaaaattggaaaaatagaattttagggaaaaatcccacaaaattcagaaattgtgggttggctcgcagcagggctgcacgtgcagcccaggaggctacaaattgcccaagacgagcgagcaggagggagtgacgccgagaaaactcggcgtgtgcagggtcccttgagcggacgtgcagggtgggacggatgctatctgaacaaggggctaaccgtgtctgaagacacggttgtctgagtgagcgcgcgcgtgttcccgtgttgtccaagtgcctggtgcacttcgatgcacccactcgacagccatgtcacccaatttttaaaaattcataactttttcaatttttatcggaatcgagttccgtaaaaaccaaaattgcttaatttttcacaaggaatttgttgaccgaggttttcggcaaccagtataataatatattagaaagctgtgagaagtttaatgcatgagatttttacgtggttggggcgttaatgagccttagtttacgagtcttttgtatttatgagagtatttattacagagaatgttcttggtgacttttctatttagttcttacgaagcccagaattctcgacccctgccttaatgtgtttggggggtatttatagtattttttctagggtaatccctagaattgtcccatatatatttctgtgtaacttcagtaggggcatgcattcttagctcatgcaaaataggaaatgtatggtctgtcccctaggtatttcaggggttagatagatatactcatttatcccttcttgactgatgtgatcccttataaagtagccgtcactaggcttataaatcatagcgtaatagctgcagaaggggggttacgccgtcagacttaatatttatggcaataccaatacgccttctcccatgcggcattaaatgcgagatgactgttgagagggggtctgatatctcccggaagtgctttgctatagctttgccctccggagtgcgtgtcccctcatgccttctctaggaggtgcctctttagccgaccctttaggtttacaaagacttagccaaattataccaaagccatactcttcaaatctatgtgtcgcgatcgcattggtccacgtattttgggcaaaatcaggggaacagaatcgaaataaaatattttcaaaaacagaaaaaaaaatattttttatggaaaaattttgtacaacacattcattcatcaaataacacataaaccacatga

SEQ ID NO: 60572 - DNA, 788 bp, Cannabis sativa
catggtatactgttatgaataaattgtcattcaattcaattcattattttttgttctattttgattgctaaattattgccattgcgctattgattacttgaatcatttgttatggtgttcttagtgaggttatgatctgcaacaaatggtatcagagctgttgtagctcaagatcaagaactgtttgatcaaaggttcgaatggcaatggctaaattcgaagttgacaaattcaatggagaaaatgacttcggactttggaggatcaagatgaaagccctactggtacatcaaggcatctcaaaggcaattaacactgctgcacttgctgaaattgaagacaagaagaaggtgaatgagatacagattaaagccctactaagaattttaaaagtatgaccgaactgaataattataaacaattcagattcactaaaattattcaaattaaccaagttcattaatgtggtcggatttgaaacctacattaatgtactaaaaaatctatatggttactaaaaagcataagtttttttgacataataataatatgttcttaataatattttttatttcttccaagatcttttattattacataagtctttattaatgttaatgctataattctaataaataaataataaaagaagggaaataataattatggggtatatagcagaatgatatatatatatatttatatatatatttgacaaaaatgagagacataacccctcaattaaggcctaattaaaataatactacttaatcagtaaacctttgctc

SEQ ID NO: 60573 - DNA, 1466 bp, Cannabis sativa
cattagtttagttattgtaatctgatgtgttataatctagactggattgtttggtggtggtggttttaaggcacattccctatttactattgaccaactgttttgtgaattgtgacagtttggttagttatgttagttatgtttgttatgtacataaatagacataagcatacttgaaagttgagttaaccgttttctgcttaccgcatttgatttggaatgctttgctcatgaatcttgttactgtagttcttcatttttgtactgtgagtgtatgaatcacaacataatggatactgtttgtgtaaatggcagctcattgattgctttgctcaaataatgaattttcgagagaggaagcgcaatggcattggatcaaagagaacatgatttatgcccacaagaatttttgtacgaactttgatatttaaaaatcgacatgaaccttttgtatttgtgctttaatacaatgtcgactatgctttcatttaaaatgtactctattgtgtgtgcttattgtgtagagggagttacttggaagaacaatgactgtggagaggatggcgagggagcaagagtggtccattctttattacgatgaagatttgaatttatgtgacaatgtaatttgcattttctggatacttttgtcttttatcaaatttttttagttaactttttttatgacgttgtttgttttactttgtcgcagatggtgatacccctattagataccgagagtgctccgcactggtatgcagcgaatctgaccttggataatgcaacaatggaaatcagagatttgttgtcttctgcaatgcataagaggtcacgtcggaacgctttcctggagatggtatgcatgtgtgtacatagtttgttgttctattagtgtaattgcaagcatctcagctgtaattgtttttctttttttttttgtagctgaacactttggaccaactattcgcctctgtgaagccagcaaacctcaaatttggctagttcctaattatttcttctggcagtgactacccacaacaacaaaatgggcacgattgtggaatttttgtaatgaagtacatggaatcaattgtttggggaaatgaaacaatggaagaggtaatttaatgttgttttctttagtttagttttcatctatttaactatgtgtttataactaaattgaggtatcaatctatgttaagttgatttatttttatgaattttgtcgtcatgtgtatttactgaattggatcccaaatgtattggtagtttgatcctattgaagccagactggattgtgttagaaaaattgtcaccagcgagagtaacaaggctaaacatgcggtgatggagggagttaaaaagcaatttggaatgaccaaagctcttccatcagtatccataactttaccagtacgtagtccatcaaggtctcctcgagacccccgattcagcacagcgaa

SEQ ID NO: 60574 - DNA, 862 bp, Cannabis sativa
gttaaccatttatgaatcctactaatctagtttaacataaaattttaaatttgctataagtggataaataagcgtaatttaaaattacggaaatttatatagtatgtgtgaatataatatgaattataagtggaataaaaatattttcaagtttaacgaccttggagactcgatcgggggtcagaaatgtcataacaggcttaagtgatagaattaatgggaatattgtgataagttgataatgtaggtattggggtaattaagagtatgtgaaatttggcctagtatcctagaagtagaaatttcttagtggctaagaaataataaaatattcctttattaaataaattttttattattattattattatattgatacatatatatatataataagctcgaaagataatctatcatttctctctctttgaccttcaacatagacaccaaaacccccacctcctctatatttcataagttcttaaaaaaataataataaagaatcaagtaatagctttgagagaaacactttgtagattcaagagaagtatcaaggtaagctatattaattattctaacaattaatttcttgaattaatgaattaggcttttaaagagagttagttgcatcttcaagtgtttcaaatttaacaacgcatctgaactcgttttcaaagatttatttttaaaatttggcattttacatgaatttactcgtgttggaacacctgaacaaaatgttattgctaaaaaaaaacaacacttattaaatgtcgtcaggggtcttttttttcaagctaattttgcaataaaattctggattgagtttgttttgattgctactgttgctcctaaaatcgcc

SEQ ID NO: 60575 - DNA, 1447 bp, Cannabis sativa
gaggaattatacaagaaccttcagaagagagaaattcaggtaatatattaatatatacatataattcaatttggtcaaaaagataataattacaaaattcattgaagtcattttcgatcaaattataaatgtcccaaataaatgaacatataataattttttttcaaatgacatttgatgtcagagaacaaatatgataatctataaatttgtacagaccataatgattctttctatctctctttcattaaagaaaaaaaaaattgacatcatcaaaatggaggaattagaataataggagatgtggctagtttttagaaataatataattgtaattagtagttgtggctgatgaaggtaatgtttggtacatatagcttgctttagcaaatccaggtacaatcgtgatggataagctttaccagtcggagtttgcagatgagattggggaaagtaacatcttcctttctgtgggagatgctattcacacttttgctcccaagactagcatcaccgaagaaccttaatcaaaccttaaatttcattatttgtccacatccaagttctgtaaatgtcatttcatatatttttaatacaagagcctttttcactgtattttactattgttttctttaattgttttgtacttcttatttactttttggaaaataactatttagtcatattattttattacaataattatcaattttgcttttgaacctttgacactactaaattgtgcttctagtaaaaaatttctttcgaaaatataataattatattttgacactccttttgttaattaggttcttttagacactacaaacgatcgtgcatctaaaaatataaaatataatgcttgtttaattttttttctaaaatataataattacataatttcactatgtttcttttgttagattttgtttcttttaccgttaatacactattgcaaaaaataacttcttacttatattgtaaagtaacacataaataatagttggtcaaaccgacgtaataacaacaaacgcaaatagtcttactttttacttcatttaaaaactgacgcaaatagtttttttgcttcaattaagaactgaaacaaatagtatgcactattggcatcgttctgaagcaagaaactttgcttcaaactgtaaccgacgctaattggattattgcatcggttacagtttgacgcatatttgtacacaatttttttttactttttttgtcaactataaaatgatgcatagttgtaggtaaggaaaaattacaaatttctctgcaattttccccacctacatttttagatattagaattagtttgtataacaatatttgtatgactaacaatagtatttgtaatataataatgataatatttttcgtgtaaccaaaaaattgacataactgttaattatggtcggtttattcagttaga

SEQ ID NO: 60576 - DNA, 770 bp, Cannabis sativa
gaacatcaacctgtgggtcgcggaacatacatccttagcccccacctctattggtgtttcctttcacatcgattctaattgatcttttagttgcaattgtgatctctcacaatctaagcctaaacattgaaaagattgattttttctacaataatttttgtgggtttttttgctggtgcttggcacccataacggtatgtcattatctatgttgtttagcaccttccttagtatttacttatgaatgacatttttttttataacttgtatggatttttttaatgatcttagtttttttttcttataaatgattttttttaatgtataatatttttagatgaattattttttattattattaataaaatattattatttggcactttaagatgcctataatactaatacaaatatgacacttaataattagttagcagtttctcatactatttactaaattaaaatttgtgagacttaatattgaaatgcactaataatgatatgtcactatttatggtgtttaacacctcccttaatattttccttattatctctaatggatagtgtataatttgagctaaaaaaaaaatcaatattatatttagcctaaattttgtcttaataattcagtgcatttaggttaaaattatcccttttttgatagaaggtgtaaaaaagtcaacaaaattttaaatttttattgaaagtatataaaattttattaaatatataaataaaatgtgaaaaaaaaatgattaattaaattaata

SEQ ID NO: 60577 - DNA, 3061 bp, Cannabis sativa
cagtcaaccaaatgtataaaaaaaatcccaaaaatactcacaaatataatcaaaacaacacacaatgcacaacaataatctaaaaataaaatataagtgtacgaaaacgagttttgaacctagaaataaaataataaagagaaacttaacgtaaaaaaatataccataatatcataaaatggagcaacctcattacaaaactaaaccaattttgaacgttacaaaactaaaccaattttgaacatgtgaaccctttgaaactaattttgacactatgcaaaatcataacaaaatataaatgataaataataaagttaactgaagataatttaatcaatcaaccaaatgaaagaagaaaaaataacacacacacaaaaaaatccaagaaaaaatactaatctcaaatataatcaaaacgacacacaatgcataataataatctaaaaatggaatatatgtaaaaatcagtttcaaacctagaaacaatatataataaaaagaaaacttgaaattaaaatttttacgacaacattataaaatggagcaacccattacagatccctcaaaacatgtgaaataagtttcgaacctgtgaacccggtgaaataagtttcgaaccgttgaatccggtaaaaccagtttcaaacttgttaactttgtgaaaccagttttaaccttaagaaaaatcataaaaatatctctgaaatcgtaacaaaacttgtgaactcatacaaaaccataacaaaaataaaatgttaaaatcctaaatcatcaactacagttaaaaataaattaagaaaaaatacaataaaagtcatatacaaataaaaatgacataatgagacatagaaaccagttacatgaatcaatctgactagtttctacataataacatatgtaatttttgcttaaagtagctggtttttatatatcgttatgtaaattttattaatttctgaaacttgttatttgttgttattatatggatgaaaataactaataaataaaattaaagtcatatataaataaaaatgatataataagacatagaaaccacttccataaatcaatgaaattaatttctcattttttattgaaaaaattggtttctatgtcccattatgtcatttttattaatttacgaaactggtttctgggtgttattatatggatactaaaacaacccccttcatattttcttatctgttgtcaagacagtagtcaatcttcaatagatactaaaacaaatactaaagaaggtggagaaaagcacaacaacatgaggagtggcaaggcaccaattcttgatgagcttaaaaaatagagttttttagctatgatttttctagtattcctgtagtgtgtctggtttccctttagcttacaatgcataaaataggaaattatattaattacataattacaatacacaaaacagaaaactagaataggttgccatatttatctgattcaatcccacgattgtaggaattgtcttcgtgtttgagctttacaagatcattttaatgtaataacttcttgtaagtagctcaaaaacgtagacttctacctggttagatgttatgtcttccaccctcgttgggtaattaacaattgcagatgttgatgaattatatagaggctgctaaggacatttacctctgcccaaatatcagaaatgtgagaggcgtgtcactcggtctttctacacatcaatgtgcaaaaaactggataacatttttcccccaagtctatgcaggaccttcctggtcgcacgtggacttcacttgatctggagtcttgtccaaactggtgacgtgtgtcctacgtgttgattaatgaaccgatatgactctggtcaagggtctcttcaatttcgactcatgaatgttgattgacagctttacctcgaattgcatattaatgtttgtgtgtgaagacggttatttttccaacaataagtacacaacgtacacttttgggaagaattcgagatgtttaaattgaaatgattacttcttcctttcgaactacctataaataagattgaaaaccctaattaatcactttagtcagccatcaaccccacgacaaggcttttgatatcattccacagttctccaagtggctcaatgccccccagtattgcggctagccttccttcttcggtcaacccctgaactttggtagcttcggtcataaatctgcttatatatgctctaaggggttcttctgacatctgctttatttccaccaggtcttctagatgcaagggaagcggacgggaggagaaaaactatgcgtggaattctgaggagaaggcattccatgaattaaaccttcttggaggcagcttgaagtaccactgctgggcgccttttgcgagtgtagcagggagtattctatatcgggcatcacctcttaccccttgcagatccatctgcatctaaaaatacttcagatgtgataaaggatcctctttcccaatatacattttttaggttggcattttgaatttatggggtaattcaaggacttcaatctccgatgagaagggtgatctgcgtgcacggtcaagttaaggattagtgagtgttggtccagtcaagccttgtaccatgtttttaagttcatctagttgtgctggcacaaatggatgaacttgtttggcttgctgaccgacctatgtcacattgggatctctttgaatcggatcctcgatgcgaatgcatggctggacagctggtgggacgtattgttcgtctaggacccttcttcgatttaagtcagtcctgaggtcatgtacggcgcgcaacctatcgaatattgaagtaccatatggtcttggtgtctgacttgtttggccagccggttggccagagatttcagttggggcaaagttcttgtgtataattccaccaaagggacaagtctggcaggatctgccagtctaccgtttggcccacaggttagacctctggtcgtggattggacggctatttcgggtttgtgcggtatgctcagttgcataccctttcgatccgcccgaagggatactgga

SEQ ID NO: 60578 - DNA, 2109 bp, Cannabis sativa
ctaatggattacagcttgccaaaaagaagcgtctacgaccctaatagttagcatgtgtcaaaggttagcctcaagggacccaaggaggagttacaagctccaaaacttcacatagtcctgaaagcttgggggtaaatgttatcggtgtttttaagcaggagacacgtggtacaattagaggaaaatatttgttaaactctcgaattaacaatgacgaccattacaatcctcacagagatgtgtcattaattttggaagggcttaatgaaagcttgatgtagcgagctatctctggcctagttagcatctttgacacacaaaaggatcatactgtccccagactccaagaagtcgtggaacaatggtttcaccacttgacatctggataacgactctcttatccaatcacaaattttgacacctacacgaatgtggatgaccacctcaaatttacatggaaatcaacctatagatggtttcacctttttctgacacaaaatcagatcttgtcccttgtgtcaggccatggtagtgtgcgtacatacctctggacacatcttttttcctgatggctcatctagagggtaatttataaaggagaaacatttgtgcgacacgtgtccctaatctagacggtactactcaccatccctacacactgcacgatcaagaatcttcttcaaggctagacggttagatttgaagttgtattttcctgcccttggagtggactgtggttaaaaaccctatgtgggtaaagagaatgcccttaaccacacgtaagcatataaataccctctttttttatgtacaaggggtgaacaaaatttctactagcctaatctatgcaaaaattcttacagagcttttttcttcttcaagagaaacaaaaggagtacagagctaggggttatactataaaaacatactatattatcaaaatactttcctaaggggccaatacaactgacttgtggactaggaattattaatgcccacgtaaaaaacacttgtctactatttacttttttgtttatttctaatgctgtgtttatttagctttcaaaaatctcaataaatagtgggagttcaaacgtccttgggggctagattaagtgcctaatgaattcatatatgggcatcgtgcaaggcttcgaatccttcaagcctaatcccatttgtccaagcgtgttttgatagaggatgtcaataaaacttctgttcaccactagcacttggtgaacacgggcattagccaattatatcaccaaaacaagaggatcattttgaggaaagtggacttctcgtgcatcttcctcagtgaacgtctcaaagttgctttcccgattaaaattctttggtggcctttgttctaagcacataaccattggaggttgtctcacctcccgtgcatacttattacttcccttaccttacttctctcaatacctctggagcttcatttgggttcgctgcctccattcttcggggcattgatcctccctacaatatcctccttagtatccccattgtattaggtcttcgatttccatcttaagatggaagaattcttctattttgttaccaatatctctatggaacttgcaaaacttactaggatctttcttcaacatgtccttcctcataggaggcagtttttttgaaaggtactcaattttcattcgtcaagaagatgtggtccctcgaacatgtgagtctagtgtagtaagtgaatactttgcgctggggttcttcctccctcataatcttcttatttcaatcatttcttcccccatagaattctcttatcttttgaggctcctcatgcatccgagggttcgccaatctacctagatcactcttcccttttgtgagattctcatgcccgtattcaacttgaatgtacttcttggtttttgcatagaagtccttcaactcttctagctctatcttgagcatgttattccacaacttgctttttggacagaatcccacagttataaccatcttatgctcgtccctagtaaacctccaaacttttgatgcttcaacattgaaacactggatatagcttttaaggctttcaacttctccttgcttagtatttgc

SEQ ID NO: 60579 - DNA, 2097 bp, Cannabis sativa
taaacctataattcatgagtataattatacaaccctaattcatttaatataatgataacaataataaatattaattaacccttcaattaattacttttaatgacacagccggtgcatatggtatagctcagaaatcacgtgttcctcatgtgataattaagtagaagtactattccaatttccaagctcttaaaaaaaatcttaaatccacataataataatctgattaaattaatcatagtaatatataataaataactatttcgtaataacaacaacaataataatttacacgtctcaagtattagcacgttaaaaaaacacgttttacatttatttataattacgtaagaaaatcatttaagtacgtttctacatagatataatattaatagtgaaattattattattattgataaatttacactcatttttatgtatttaatgttagtcattattttaagtagataaattaattatttggtgtctagcacattcttatgtgttattattgttattggtctaactaagtatcgggtcctatatagtttaatataataatttttagagaatatgactagctaatcgcaacgcgacatatcgagaaagtgctagacaccactaatgactaatagcaatactcttatcatatctataaatatttatatatagttgaaatgtgtcataatgtatttattacattaaacgtggagaagacaaatgggggccaagatatatatatagcaatctttttaattttttttttaatttcttatttttctcactctgagacccttgtttggtgccctaatgatgtatttattaaaaaaaattaaggcatcaaaacatgataaaattttatttttatattagtggtcccagtgtgtatgtatatatagtttctcattatctgtcctcatttatatgtatgttattttgataaatgaagcgtgaatttgtgttcatattattatacaaaagatatgtacattgttattaaatattaatagtgcctaatagtatcttttaaaaataattagtgatattttttaaaaactattacattaaattatatcgatacttaattatactaataataatataacaacaataatatttttcaaaaaaaaaatatgtaattaatcgatcttaattagcttttggattatcataacccaatacatattgagagtcacattaattattaccattataaaaatataaatatttttatatttgtgtaacacgttcttcacgaatattccaataatcccaacttaacttttttagtttttagtactataatttctttctttattagttcctatcaattaggcaaatactaagtatcttcattatgcattttttttaagtgaattcttatttgattggtaattttaattttcttgtaatatattattaaaacaaaaaaaaaaaacatacttaataaattccacacgtgttaattaaatatttaaattatagaaaagtataaaaagtacaaaatatatagagagttgttggtgtatttatatttacaaattatcatgataatttatattaattgaaattgattagtaattaaattaattagcttctaattataattgaattagtagtataagttgtttattttattaacaaaaataaaaataatcagtcttgttactaaagtatttattactttaattaaaataaaagtatttcatttgcaatctaattaagaaaaaacaatatttggattatcaatcaattaattctcaattataaatttgtgttagagtacatgtatatgttggattattttcactacttaaagaaaacaaaacataattaatgaccataacatatacaatttttttgagaaataagtttatgtatgtatgaacatatataataacttaatcataaagattatatactaatgattttttttttgtacttgattattgataattttactataattgaggtcttcatcaacaaaaagagctatcactactcgttcttctcattcctcatttctttattgaaaaaataattataagaacaaacaacaactttatttctttccccaaaattgagctaattactaat

SEQ ID NO: 60580 - DNA, 3419 bp, Cannabis sativa
  modified_base (205)..(214): a, c, t, g, unknown or other
gggtttggggtccgagttcgggttctgggtcctgggaccggggttcaagtccaggtctgggtctgggtctggggtttgggtctgggttcgagttcgggtcccgggtttgagtctgggttcaggtcaaagattggtgttgatcccaaatcttttgtaaatattataatacaagctaatacaaactatttattatgtattaaataannnnnnnnnnattgtattaaaaattttggtcgtaataattaatataatatattgttttatctaaatatagtgttatttattatttaatacaatacgatcatcatacagcgtaccaaatgagccatataattattaaatagtgattaaaataataaaaaaaatcacactacccattacttttctatgtatataaatagagcatattagtggtgtctaacactttttacagataacgccttataattaaatagtgatattttttaaaaattatttttttaaattatataagactcgctacttaattatactaatattagtatgatacggagaagaatgcttgatactaataattttttagcaattctcgtataaatatcatgtggccccacaaaagtgttttacatgagacattatcctatccacacaatctggttgtcccataatctcttcccaaactcaaactcacagagatgataatgaagatcagattccattccactaaccataattttcactcactttactcctctccacaacaacatgcttcattggaaaataatgaaagcttagcaacaatggtgttgataacatcatcatcatcatgacatcagtccttaaccaaacccatcttttatttcccaccaaagaaaccccacaattcaatttcaattccaagctccaagaatgcatctcactgcttaaaaaatgcagaaccatcaaagaactcaaccaaattcatgcccaaattataaagtttggatttttatgtgaccccttttgtgcaggaaatcttgtggccactactgctctttctgattggggaagcatggattatgcttgcaagattttcaggtgtattgatgatgatatcccagaagctttcttgttcaacaccatgatcagaggacatgtcaaggatatgaattggggtaaagctttgttaatttactatgaaatgttggagtgtggtgttgagcctgataatttcacttacccacctttgcttaaggcttgtgctaagttatctgcaattgaagaaggtataatgattcatgggcattgctttaagcttggattacaaggtgatttgtttgtgcaaaatagtttaatcaatatgtatggaaaatgtggggaaattgaacttagctgtgatgtgtttgatcaaatgcttgaaagaagtgttgcttcatggagtgctgttatttctgttcatgctagtttaggtaaatggtgggagtgtcttaagctttttggggatatgatgatgagtgatgaggaaagaaggtttagagctgaggagagtgtgttagttagtgttctttctgcttgtactcatttgggtgctcttgatttgggtaggtgtactcatggatacttgttgaggaatattagtggaaataatgtgattgtagagacttctttaatggatatgtatgtgaaatgtggttgtttggagaaagctttgtgtttgtttagccagatggggaagaacaagaagaatcagttgtcctactcggtgatgatttcggggcttgctatgcatggacatggtaggaaagctttagaggttttctctgaaatgcttgaagaaggtttgagacccgacgagattgtgtatatgagtgttctgagtgcttgtagtgatgctggcttggttgatgagggtctaaaatggtttaagaagatgaaaaccgagcatgggatcgaaccaacagttcatcattatggttgtattgtagatcttttcggaagagcagggatgttgaatgaagcattcgagtttattaccaacatgcccataaacccgaatgacattatatggagaagccttcttagtgcttgtagagttcatagtaacttggaaataggcgaaattgcagcagaaaatctagtgaagatgaattctcagaaccctggtgattatgtggtgctttcaaacatgtatgcgaaatctcagaagtgggataatgttgctaggatccgaaccgaaatggcttcaaaaggattgacaccaaatcttgggttcagcatggttgaagtgaagagaaaggttttcaagtttgtatcacaagacatgtcatatcctcaatgtgatggtgttcatgagatgattcaccaaatggaatggcaacttagatttgaagggtataaaccagacacatcacttgttttgcttgatgtagaagaagaagagaagatagagagattaaagtatcatagtcagaagttagcaattgcttttgctcttatacattcttctagaggaagtcctataagaatagttagaaatctgagaatgtgcagtgattgtcacacttatactaaacttatttcagttatctatgaaagagaaattactgttagagatagaaatcagttccaccattttaaagatggagtatgttcttgtagagattactggtaaaatcaatgatttttctccttctttccccttctttatgtatattcaattcattctttttttctgatatatgttttttcattgaagcgtcttagatatacattttttagttacacaagttggaattcgatcccaaaaccctccacacactcaaccccttttggccacttgaactagccagaactggtttctgatatatgtactcaattaatgatgtcttcttctgcaaatatctaagctttgccaagtgaagagaagacaatctttcatagaataattttaggttgttttagcttgaagattttagttaaggctatgtgatagctccaaaggacatgttatattgtgtgaagaaatttgggccggccttaggcacatgtgttaggctcgtgcctagggttacaattttcagggaccccaaaatagaaaataaaaagcatcgttaggctattatttaaataaaattaagtatattgtaaacaataatagtcgtagcgtaattagttgagtgtatggcacattacataatggtgtgggtttttttatatatattttcaaaagtgatgaccctaaaatttaaatagccttaagtccatgtattctcaaagtcggttttgttaacactttttagttagtactcttttaaagcaacataacttcctttatatatttgtagtgtagattttgatgggaaatttacaaaaatactggaatttaggttaatttttacaaatatactgtcacacagaaaagttttcaaaaatactgtgtttttataaaacaccagtaaaac

SEQ ID NO: 60581 - DNA, 1374 bp, Cannabis sativa
  modified_base (358)..(373): a, c, t, g, unknown or other
catctccaatggagtaaataagtacactaaaactgccaaataactaatatccaatggagcatctccaatgtaattttaatatttttatataaaaaaatgcttctttaatgtgggggtgcatgttcgcggtgcggttggtatggctttttactatttttttaaaccaatccgtaaatgcagttttttctaattttccaaaccgcaccctatcgcgaaactaaaaaatgcaaaaattgcaccacaaaaaatagtgcagtgcggtgcggtctttgcagtttctgcggtttggactatcatcaaataattaaactatcacaaatacaataaagtttgattgtcaaaaataccataaggcttnnnnnnnnnnnnnnnnaaaaaaaaaagtttcaacaatacaataattagattttcaaaaaaaaaaaaaaaaacaatacaataattagtgagttttgagttgaacatttacctattcgacctaaataaacataaaaattggtatttttataatgtgcggtgtggtttgaaccgcttattaacaattcaaaactgcaaaccgcaccgcaccactccgcgcggtttaggaataatccaaactgcgactgcaccgtaaagaatttcaaactgtatttttttttgcagtgcgagcgatttgagcagtttgatgagcactcctaatgtgggatgctaaaatttgtgtcaaatttaacacacactaaaagttagaatttaacacatataattaagagataattacgtaaggcccccttttttaaaaaaaaaaattacatttttacgtttaaaattttttttataatttttttgttatttttatgtatttgtgaaataatccttataattaatatacttttctacttacattattctcatttagtattaatgacttacttcaatatatttttttaaaaaaaaaaatattaccataatttttttaaaatacaattaatataatgattatcattaataataattacttttttttgttaatctgtatcttaatttgctattatgtattaaaacacgattgtaaaatgtataagtcaaatatagcatttattaattttttgcaccaaatttagcctatttttttactccacgcattggaaatggtcatagagaaatatttggacacagatatctagctaacactatgtaatcgaaaattagatctcatatattttaatttaataattatataaaaaattattaatcatctataagacgtcatttcataataatattgaacactactagaaggcactggcggacccaatgaaggaccagtgtgggcttaagcccatgctgaaaaaaatatttcttttactttttaactaaaaagaaatttttttaattatt

SEQ ID NO: 60582 - DNA, 780 bp, Cannabis sativa
gtgccctaagttaacattatgtcaacatgggcatgggtgcttagggcacctgaggctccgggtgctcaaagctaaaagtactccaattcttattctgttgactcaaatatgttcgtgataggtctaattcattttctagtacaaagtttgatcaatcttcatttagaagtgccaagaaattaaaatccttgggcacccaggttgttattttttttattttcatcttctagaccttcaagttggattcttgatgtcttcatggtatagaatactaaaatatagtgagttggaaataacttagcaggatccaaatgttggttttatggtaccaaatcaaatatgcaatggaagggtttcgtattgcaaattatcattgtacaatatcccaatggatatccacgtgtgtttacattaaatcaatacacaaaattaatagtttagaataaatacctcatgatgactataagggtatcctcaaaacttctagtatgttatatcccttaatcctttaatccaactgaggacaatgatgcaattggactcagattagtgtcttcaaaatcgttccaccacacacaaggaatagtgtgagctattaggataaagtgtatagggttgttcttgttgagttctcaacacatgagcaagaacagatgagagaaaaaataatttcctttttttgtcttaatatcaaaaattatatgtcaaagtgtaagtctgatttctcaaatcaggctcctatttatggtagttaaaaattctttaattaaatcatattta

SEQ ID NO: 60583 - DNA, 1002 bp, Cannabis sativa
cagccacaatatctccattagagttccttaacacagctccacaactagtacgttggttggacttgtctactgccgcgtctgtatttaacttgagcttgcccgaaggaggattgagccacggggcatcagaagttgtagtcgaccgtgagggagaagtcaaggaaggaggagccttcgatttctgggcaatttgatactcctcaatatatgacagagcaaaatagagaaccatatcgtatggcttggttttatttccatgcttttctctattcctttcattccataaatataccacaagattgtgataaattgtttaagtagagtcagaccagagagtagaaaaatgaagaaagcattcctttaaagacatactgttaaggagtatactgtcaagtgagaaaggggagtctttccaaattttcctaggcctgtggcaatagaacaaagcatgtagaatcgattcactatctctttgacatagcggacaaattggggactgagttatatgcctgtgatgcagaacagcagtagccggaagacaatcatttatcacacgccataagaaaatacgaaccttcgaaggtaaagataaccgccagaatttcttccaccattgctgtgattgtgcaccagatatactaggttgttgctcctccaaattagtagccataaaatatcccgatttcaccgtgtagcagccattatgttcatggtgccagataagtgcgtccgaacatggtgtgagggtcaatgggatactaaggattcgctcaacatcagaaggaataaaataagaattcagcaggtttaaattccaatacctctctgctgtaattagagaagaaaccttaatatgatcgtcgattccagccaaaaccaaaggacgaaaattggtgacaccaggcagccaaggatcacttttgcacaagatgctttgaccatctcccactttccatcttagaccttttgaaagcaaatctttgccccaatgaatcccttgcc

SEQ ID NO: 60584 - DNA, 755 bp, Cannabis sativa
aatatcattgaattaatttgttgaacccatcacaaaattacggtgtttatctccttttatgcattcgcaatttatctataccacaaatttaaaacaaaatcctaacaagtaagtttaaaataacttaaataaaaaaatatcataattctactaaaatttcagcaacataacgactataaatcagacgtttcaaaaaaaatagaacacaattaaacacatataacgagaacaataataaaaaaaaaaagttatttatacttatctgaccatagtacatgtatttgcaaaacttactctactacagataaatatttaagatattcaaactcttctaatatgcatatatattccatccatctgatcacagtacatttatttacataatctatttcattacagataaatatttaaaatattcaaactcatcaaatatatatatatatatatatattcttattaaatttaaataaaaagtcaacaaatgtatacctttagttagttaaaaaactaaccaatattagctgaaaatctttttccccctccaatgagaattattgatggttaacttcaaaatctacaataaatgcaatcaacattacctttagttgctagttatataataaatgataacttaaatctaattaattagttagttataactagtatgtatataatactacttacatatacaaatataattggtagtagtaataattatacataatgtgcaattatgatatttacatcaaatctat

SEQ ID NO: 60585 - DNA, 1116 bp, Cannabis sativa
tctgtcttttttattcatccttattattcttccattgtaatctctctattatttctaacatagtccacagcttcctatcctccacctgatccgaccaagcagcccctatccagtcgttgatacccttcaaaacctgctgagaaatgttgcaggagaataaaagatgagccaaactctcatcataacagccgcaaagtactggacaaagtttgctgtcaatatgcagaatctgagaaagatgagcccgactgagcaaactatccttcactgtctgccagcaaataaatcagtgctttggaatagcaaaacgattccaaacaaatctttggtgttcaaattgctcaccatgacaaagactcttgtagaacttgttgacacaaaatttacatttacaagttgtatcctccacttcttgctgagaaaacatcgatctaatattgcataattttttccaaacattatatatattgttaattctatttttgacatctttattgtgaaaaaaatattttataatttattgttcaaattcaattgaagtatttatattaatttccataatttgtgtatttgacttttatatttttgtatcaattaatttttgtttggaaggaaagttgtctaacttttctatttatggaaaataaggtataaagggtaagtttggtgactcatcccttttttatctatccgggtgcgttaatctgagtttcctattgtgtttgatcagattttttgaggagaaaaccaaagcaagactttccttttataaaaagaaaaaaaaagtcgcacgtactctcacaattcggtaggtacataaatggaaatttttgggctgtttgaagatctattttaggaaattgtctagtgagttgtggtcttgttcagatcgtgtgtgagctgccaataagatgtatattgattataaatacaccttatagccattaggtcatgtatctctttcatacactttaaattgtatacatatcttaaggaaagtgtgtatgtgttttgtagagaagagtgtgttggtctcttactctatttatatgtattttgtattgtcttgagtctgtattcaagtttacaaaagaagaagaaaaacagtgctacctt

SEQ ID NO: 60586 - DNA, 1098 bp, Cannabis sativa
atctcttttgtatcttcctccttagggcatcctcgaaggcttccggtaatggaccatgttggaggtttcattatatacattttctcgagtatcaaccaaaattgtgtactcgaaaaatttgggctcatactctttccttggtttaattggagcatcattcttattctaacttcttctgcctagcttgctcttggaatggcttacacttttttttggaacttacgtatgttgcttcaagtgtttgggagagatattgcatcaagtctataccgctccatacctagagaaatgggtttgtgtgggtgcttgtccggaagctgcgagtttgtagataatcagagtatattatgttcctagaagtgtgactactggagatagaactggcagggtaaaacttggcgttactactggtggagtaggtgttagagggattccaaaagcttgtttataagtgtcttcctagttattagttccttgagctttggacaagaactaggacaacgtctcagctctttttccttgagtttcactccacaagaaggaacctactattaatccagactcgaaagctaccagtttcatatcgtcactgaactttgtctttgaaactacttccatcacccactggatgaagttcttcaggatttcaccaggttgttgtttgaggttggtcagagatccgacctccatatcatagtctctgacaactataaactatttttggaaggctgactgcaactctttccatccatgaacccatttgggggaaatctcttccacttgtcttccatggacatggttagtgttagtgaaaaacaaaggcatttgacatcgtcacttactttttccacttgcatcatctagttgtatttgaataggtgcatcctgggctctgtccagccaccatacaactctatctgtggcattttgaagttgtcaggtagtggggcttctatgatccgtctgacgcatggctccggatcttcatctttcgaatccaagagggcacaactcttcttcttgaccaacttggtaagagcagcaatttgttgttccaatcttttggtgtcactatccagaaggtcgcatccgcaaacc

SEQ ID NO: 60587 - DNA, 1380 bp, Cannabis sativa
aatcaagaagaaaaccaggaacttctaaaattgtccttagatctacttgatgaaaaatgaactgagtcgcaagtcattaacgcagcgtaccaacaccgagttagaagatacttcaatagtagagtcaagaaaagactatttaatgttggagacttggtgctaaggcgagtatttgcaaatatgagagacgcatctgcaggagtggtcaactcgaacttggagggtccatatgtcatcgaagcagtagttggaattggagtttacaaactggctcgactcaacgactcgctaataaaaaactactggaatgtggaacatttgtgaccttactaccaataaatgatgtaactttcattactgatgtaaaatttaaacttcagttataaataaagagatccatttacattaagtaattacaaagttttactctttaaaattacttaatgggcatttatgtatgattaactggaattcatctaaaaagacatagtataatgcaaacccaccatttcaaaaatattttgtttttaaatttaaaggttctcgactaaacctctttgacgagagaggagtcgaactgttataacttccgaaccaaacctttttgacgagagaggagtaaattgttataacatcttgatcaaacctttttgacgaaaaagggatcaaacaactataatttctgattatatacctatctgatgggagtggaaaatgaaaagttataaatgagatataagtcataactcgtgcataaaactgaatgttaacagttcgcgcgagctaagaagatgttaaacgagacattaagacgtattgataaaagcacttgaacctataaaatggatagacaatttaactatttatatgagaaaattaaaaatatacaaagtgataaaatcattaaaagtatattcaagtttttttaaggtagattataattgccatagcgaggcagaattgacaactgctcaaaaatcaaaaaagtttggtagataactaactacttaaacaggaagattacgagcaatggaaaaaacctaaaagtactttgcatttgatcaaaatatagatgttcacattgtgaataaaaacgcaagcaaacacaattgtattaagttcgaattgcaaaggatctggcagccaacctgatccctacttttaaggaaataccaatttgaaggggaaagcacctgcattcatgccgagtaaaaggcatttaagacaaaaaaacccccaagtagggttttaaacttatctttacaaaaatgccactaggggaaaccattaaagtcatcttcctaaaacaaagaatgagggatcggtaaactcaagaaagagtgtctacacatagcttggagaaagaccggctacacatag

SEQ ID NO: 60588 - DNA, 2209 bp, Cannabis sativa
aaagtgatggggtatttattaaaattatttttttaatattatttcaatttattataagataattaaattcattgtcatgcatttttcttgagttctaaatattttattggaaaaattactttaagaaaataattttacaagagaatattaaaaatatatatttttactaataacttttttttaactaaaaactcactataatattaatttgaatttaatagtaattaacaaaaaaaaataataagaatattttagtaatttattgtaagaagcccaaaacaacattctctctttttatatttttatatagttatagataaaagaaacaaagttatactagtaaacaaatcaccataatcatttaatatttagaagctctcatgaataagaaattagaaatagaactaagactagccaaaaagtactcaaataccaccagaaattacactaattaaattcaacttagaaaatggttagtatttaactcattattatcagatcaattaaaaaaaacacagatgaatatatatattcatgtttgtatgaacaaaatgtattattataatgaaaaaacaataatagaaaaactagaattcaattagcttgttattgtaagaatataaaaccagccaagtaaactaagaaactttcaaaagaataaaaaaaattacacacaaaattactagtgacactcataaaagcatagcaatgacaaatgtatgtcaataaagtaatagatcaataaaaaaaaaaaacacaacaaaaagagagaccaataggtaaaactgttaaatcaaacactaaaatgattataaaaatccccaaacataatttcagaaccaaaaactgtccacatatcaatgttattgttagtactagtaaaaacaaataacattaatttgccaaatttaatggcaatgagcaggatcaaagattatatgccaataaatattttaatttcactattacaaagcaatattaaaatagagctagattcagaaaatataaatagaaatttactttttctcctagccttacaagcttcaactcaactacttgagcaaaaatattagcactagcaacaacatctgttcttcctattactggacctttgtgaagaacaaggtatgtgctaccacaacaataaattaatctttatggcagcccatattattgcaacagtagaaatcccattaatctcttcattcaatatctgtaagaaaaaaaattacaaagaaaatctaaccatgagcaatataaactctctctaatatatgaatctattttcgaagaaaaatcacattcttagctttcggtttgcattcgaataacactagctagagcctccataaatgcaaaattaaaaacttactaactatacattgttttaaataaaagtacaactaaaattattatgaaaaaaataactaacatgtggatttggaggattggatctcgattagttgtgtgccttagtggagttagaggaacagtggctgtgggctgaacaagaacaaaaatagagaaaaataaagagtgtttacaattaagtttggggtgtgccaccccttgttgaaaaaaaatatatattcatatttatataattacatatatatatttgtttgttctctattgttactaatatttttgtaatggtggtggtgatttatttcaggtacaaaataggaaattgcagaaaaagggaaactggttatatgttgtgaaaagtaagattttgtttttagaagcgggaggttccaagatttatagcaaagtttcaacattttctcaacactttgaagcagggacaaaaaagaaaatgctattctgaagcaatgttgcagtcccttggagcatgtgaagttggaaattttttgggggttttttgaaatctattctcactaatgtgggggtttcggaaagaaagaaaaaaataatgaaaataatatttacttattaaactaaataccaccaaatatttagccctaaaagcctttcactaatctatcctcttctcatttcaatctccctttccagtaaacaccttctcgcaccctagtcaccattttctcatctccgagtgttctctctccatcacagaagctccaccacagttttgaagccactcacggccgacaagcttcatcgcaataatcacttaaagtcaaaatcgaatctagccaccagtctagctctaatcctctctgtt

SEQ ID NO: 60589 - DNA, 1344 bp, Cannabis sativa
aagtcagtaaataattcgaataaagactaatagaatgtaaataaagaagatagaaaataaatatttccaccgtagactgatggagaaggaatggtaataataatagtattgtattttgtaaatgcttgaataagcgtttagtgagtcaagatgagatgatcctttaggactcctgggttttccttttatagagtctttgatggttgaattcccgtattctgaagaacgaacttgggaagtggtcttccccttttcaaggagaaaggattgattcttctgcttcagtcatagactcattcctatcctttgtgtcagattggtcttatagctgctgggctcgcttgggccttgtattttagccaaagcccaatgtattttggatgagtgggttatatttaatgacttggtttgaagggttgtaatttcgatttgggtcgtaagaggcatttgggcttggtgtaatttttggccactacagtgtgtccctaactctttgagtcaagtgtggttgacttgaagagtagtcgcgctgactggcaaaaaattgaaatatatgtttcgataattattatttttcaacgcatcaattggctttgagaatgtataaatattgagtttttattaaaaataatttgaatgagtagtatacatatatatatgagataaataacatatagtacaaaatggcaatagttgttatggtgataataataataatatgtttgacaataacattaaatgagttttttttagggcataaaacccaatagaacccaatataagattagctatctgggcttgaacgtcgatctctccttcttccaaattggccatggtattggatatgtgtcccttgctcttgatttagtctgtcagggccccacggtgggcgccaaattgtagagggaaaaatctacaatgattggaatggaaggatcaggagcactgacaacctgtagaataaaggaaaaaaggaccgttgagaccttgggacaccaagatggtgccagccgaagggactccgacgatcaaatcagtaaataattcgaataaataataatagaatgtaaataaagaagataattaataaattttccaccgtagactgatggagaaggaatggtaataataatagtaatgtatttcgtaaatgcttgaataagcgttcaatgagtcaagatgagataatcctttaggactcttgggttctccttttatagagcctctgatggttgaattctcctattctgaagaacgaacgtagaaaatggtcttccccttttccagcagaaaggatcgattcttctgcttcagttatagactcgttcatatcctttgtatttg

SEQ ID NO: 60590 - DNA, 984 bp, Cannabis sativa
aaatatgattgtacgaattttaataattttttacatttttttatgattttatttgcagaaaatacggtcttttatgtgtttttatgttatacacttgttaatttgttgttgtttatttttatatttgtatgttatcttctgtacacttgttattttttcaacataaaaatgtaaaagctttacaaaaaatagaatttacgtaattatctctaataaattcaaaatgaaatttgtactaacgaaactgaaagaaaattacagtgttacaaatattgagtacttataccgttaaaaataaatatttagttgatgctgcttacaaacttaaaaatttagttagttatactgttatttacccaaaaaaatattatatacaatgcttgagtgattggataggaaccatctaaattaataaactctccatacattaaataaatagtaatttgcggcataaatatataagtttagctctcaaataaatacttaagtttaattttttactgtaataatacttaagttatatttttggcactctataggtatttgaccgttaaatgctaagtcattatccacgtgttattttttttattagtatatttaaactaatttttttaaaaaataaaaatttaatgacttggaccaatcaggaattgccacgtgacaatttacttaacacttattacttaacaactaggtacctatagaatttccagaattataacttaagtattattaccggcaaaaattaaacatagttatttatttacaattgaaaattaaacttaagtatttatatcacaaattactcaaataaatctacattttatcaaaaaataaaaccaaatctcaacttctatttatatatatatatataaatttcaatcacatattatttatgtaattatcaaaattctataataactatgtgtgtaatataaactcccaaatcattagcaatataagacaaataataataataataat

SEQ ID NO: 60591 - DNA, 848 bp, Cannabis sativa
atatatatatatatgttttcaaatgtaataatatgtatttactatatgttttttcccaaataatacttaatattacttttatcaataaatttataacattgaacattatagtcttaaaaaataaaattaattaatataatatgatagaatgttagaattgggcttttttatttttatacttcaaaacaattttgtttttttgtttttttttttgtatttttatgaaattccacatagaaattcctattgcaactaacggaacaacctaaatcgcaactaaaatttgtacagcaacccacatactgaagaaactagtttagaaactgaaaccgtaaatttgaaaaaaaaaattacaaaaatagtatatgagctcatttctcttttaaaattattaaagtaattgaattaaatataaataaagaaaaaaaatattacttctaaaggattaaactcatcacgttttaattattttaagagtacttaattattataaaattattataagttgaagatgttgtagttttctataagtataattattgtcttaaaaatatatttaattaaaatatattaaaattttgaaattaaaaaaatatataattaaaattaaagtttaaatagaaataaaaagaaaaaaaaaatataaatttggagttaagttagagtttggttagttgaacctgtaattaatgatatttaaaattagttataaataaaattatattaattatagtatagtttttaaaagttaatttgagtcattgaattaaatcaaaatttataaattattattcctattaataagtaaaacatataattcttattataatagctcccattatatacgt

SEQ ID NO: 60592 - DNA, 1872 bp, Cannabis sativa
cagaataaagggggacgtcagacttattcctatcctgagtgcctgcgctgtaagaaacaccatcccgggacttgtaaccggagagcttgttttcagtgtggaacagtggggcacctaaagaaagattgtccccagttgaagaaagaggaacctaagcctaaagttaagcctgctccagcacgtgtatttgctatcactcaggctgatgttgccgccagtccttcagtggttacaggtcagcttcttatcaacgactttgcttttactgttttatttgattcgggtgctacacgatcatatgtatcatcgagagttcttaatcagcttggtaggcctagtgatgtgtttgagatgggatttggaaccatgttgcctaatggggaattaattatttcaagaaaatgggttagatcggttttaattagaattgaaggcagagaattgagcgctgatcttgtggagttacctttggccgagttcgatattatacttggaatggactttttgtccaagtactctgctattattgactacaaacggaaaatggtaacttttcaaccggagaatgaggaaccatttgtttccgttggttcagttcaaggttctcgtgtcccaagaatctcagcattgaaagctagggatttactacgcagtgggtgtgtaggattcctagcggttgtagttgattgtagtgaacctgtgttacttggacctgaagaggtaaaagtggttaaggaattcctggacgtgtttccagagcaattaccaaggttaccacctcagcagaagatagattttattattgacctaatacctggggcagaacctgtttcaaaagcaccttatcgaatggcacctgctgaactaaaagaactaaagatacaacttcaggggatgttggatctagggttcacccgacctagtgtgtcaccttggggagctccggttctatttgtaaagaagaaaggtggaactctttggatgtgtattgattacttggacctgaacaagttaaccattaaaagcaaataccctttgcctagaattgacgatttgttcgatcaacttcagggcaagacggtattctctaagattaacttgagatatggatatcatcaattgagaatccaggaggaagatattccgaagacagcctttcgtactaggtacgttcattatgagttcctagttatgtcattcgggttgataaatgcttcggccgctttatggatctcatgaatagagtattcaaggactttcttgataattttgcaattgtatttatcgatgatattcttgtgtactctcggtcagaagtcgaacaagaacacgactcagagatcataaactctatgcgaagttcaaaaaatgtgagttttggttgtcacaggtatcttttctgggacatattgttggaaaagacgggattatggtagacccagggaagattgaagcagtgaagaattggcccagacccaaaacagccactgaagtttgaagttttctcggtttagcgggttattatcggcgttttgtggaaggtttttctaagaattgcaatgccgttattcgagttaactaggaagaactaacagtttataaggtcagataagtgtgagggaagtttccaagagctgaaacaacggctgattacagctcctattttagcctagccatctgatcaagagaagtttgtggtgtattgcgatgcgtcaaggcagggtttgcgctgtgtactaatgcaggcagataaagatatagattatgcttcgcgacaattgaaagatatgagcaacgttacccaactcatgacctggagcttgcagcagtagtgtttgccctgaaaatttggcgacactacttatatggtga

SEQ ID NO: 60593 - DNA, 1005 bp, Cannabis sativa
tctcaaagcagctacaagctttctcaatggaaatggggacatcacccctcttaataccactctcatcatccttattcacaaagtcaaacgacctacttccctatccgaatttcggccgatcaacctctgcaatatcttctacaaagttatctccaagactatcacaaatcggcttaaactcgttctcaacaattggatttcccccaaccaaagcgctttccttccggatagactcatttcggacaacatcattattgctcaggaagtagcacactccataaagctgaagacaaggggtaaaaaaggatggatggcggtcaagctcgatatggccaaagcttttgacagagtggagtggtccttcattgatgctattcttcgaaaattccaattccctccccaatttactaatttggtgctttcatgcatctccacgactacctttcagttcaacctaaacggcagagttactggccgtgtttccccttctagaggaatccgccagggcgatcctctttctccctacctctttctcctctgtgcggaaggcttctcgtctctcctgcgacagaaagaaagaaataagaccctcccaggcataaaagtggcaaagcgggctccggccatctcccacctgctttttgcggacgacagtttccttttctgtcaagcgtccattaactcttgtaatgtcatcaaagaggttcttgacgtgtacgaaagggcaactggacaaaaagttaacttccaaaaatcctctctgtacttttctcctaacgtggagttgagggaccaaactttgatctctgatttcatgaggatccccgttcgtccctcttttgaaaagtatctgggtctccctcaacacattggccgaacgaaaaagcaattgttccattaccttcatgacaaagtttggggccaccttcataattggcgaaataaagtcttttcaaaatgaggcaaagaaaccctcttaaaatcagtcattcaagccatacctac

SEQ ID NO: 60594 - DNA, 758 bp, Cannabis sativa
aaaaaaaaaaaaaaaagacctaataatctccccctttgacactttaaataatcaagcgctattaggatttggtgggggtgatttttgtgacgttgtgtttgattttttcagatctggttttatgcacaagggtattaatgctactaatttggtgcttatcccaaaaatcacaaattctaaaaagaaacaaccagtttaggcctatctctctttgttatgttacgtacaaggtcatttctaagattattgctaataaaattaaactggttcttcctagattgatttgcccaactcaagctgcttttgttccaggtagaaatattcaagataacaatgtgattagtcaagagataatccactctttcaagaggaagaaaggaaatgaaagtttttttgccattaagattgatcttattaaggcctatgacaaactgagctggagtttcattgatgctgtgttggagagttttgaggcccttaggatctttcacaactgggtcaatcagtgtatcttaaattctacctttaatgtgtgtctcaatggaggtcaagctgggagaattctcccttcctgtggcatcgccaaggtgatcttctttccccttatctcttcatttgggttgtaaaaattctttcaagacttttagaaagctctattgaaaagggtaacatcaaaggtgtaagactgagcaagggaagccttgccctctctcaaattttcttcgttgacgatattattctggtcgagcgtgccaata

SEQ ID NO: 60595 - DNA, 546 bp, Cannabis sativa
attaatttaatataaaaaattaataaccactcataatttactaaaaatatagagaaataaattaactatgttaaatttaaaataaaaactaaaaattgttacaagtttaatagaataaacaggatttattatttcccttctcaacttttttttgttaaattttaaaaatcgttgcaaatgtctcttatgcaattactttttgatcatttatttaaataatgtggcagcttgatattttactttattgtacaaaaatatcattttaatatacatataacttgaaaagattcaaaattacttgaaatacaataatgagaaaatcaaaatgcaacagagaaagatccttcaatatataaatgaaatataataagcaaataattttaaataatacatttcctctatgtttagaaataatcaacattaaaataaaactaaagcaccaccaacattttagatcgtttgcctgtacatagcccatcgcagtatacatagcagaactttcctatctaagtgtaaggggaaagtaaaggagtgagctaaaagccc

SEQ ID NO: 60596 - DNA, 3375 bp, Cannabis sativa
ctgaccaatctccatggtttttttttttctcatcgaagctgtgaagctcttacaggcataactcacactctgtcttttcaaatctgctttgtttcttttatcattctttcacccttaactatttttaatttttataaattttatttacataattttattttatattaaattgatatagtgtactaagttcggttactctttctaatggtgtggctattcgacaaccttggcaggcccctcctagttccaagctgaaaatgaacttttttttttttttttttttgagtgtaacatttttacaatcatatattagtttaatagtttaaaatttaatagttttaaagtcttgagctcgaacccatgacctctccctttttatcatccctctttcaccactaagctaactttagtggcttagctgaaaatgaatgcagcttgcgatgctcctaaaaagtgcctatggttcactctgttaagagagatggtaaaagtgcaattcaatattgagttaaaagttttatataatttttcagataaatttcaatcacatagcatttatctaataagttttacagaatttacttgtggtattataattagtaataatttatttttataataattagtaaattaaattatgcaataacactaatacttaattacaggtatccttttagaatttctctttaacttactttaatactttttcgcattctcttgactactaataccgtttagcatttgacgtcatattacctaataacaatgctgatttcttaactaatcaaaactacaaacagtttgttggttaataaatcactgcaaaagaaatccttggacgtctttgaaactcaacttgattacaaaaacaatagatagtataatgtaaagctatcattggacggtatactataaatgatttctttatatctatatatttgtggtttttgttggactcaagtgtttgcatataataaacacaacactaatttgaaatattcactcactcaacattcacactaaatacaacacgaactgaacgacgaccatcaaaccaagtaatcgatccaaaattgtagccactctgagcatctttgccagaaaatgaaacccgaaaaggaacacttttcacacccttagagaaaaataacttctctggactaactttgaccaccaagccttgtggagagtgaaccttggcaatgtaggtagaattgaagggtccaacattggttacacttcttttgatgaccttagcaccatggtgtctattgagttggctgatagaaattgatggatagttgatgttggagatgagttcttccatggagagttttggacaagtgaactttgtgtttgacatggatcttatgttcttctctgtatagccataatagcaaaggaattggagatagtcttctagtgttgtttcaaacactaaccctgggttaagagctttcattgggttgatttctcctacacctgtttcgtgtggactcgctatggagtttgagttgtttgtcaatggttttcccatgttgttgtattcacttgctgcatcaaaacatagaaaaatagattaaattttgttcttgaaagggataattccagttctaagtgaagattttgtgtaatttttttaacctgttgtcatgagtgctgatctgatcatggaagatgtccatttcggtcgaactgatttgatgaaagcagctgctcctgtaacatgtgggcaagccattgatgttccagatttcaaagcaaaatcggaaggttttaagcctgttggaactgcccctggttcatcactttggggtatcatagcagctaaaatggccactcctggagccattatatctggctgaaatttagaaaattgtttcacttttttaatgcacattacaaaatctttaagaaattggcatgcatatatagctacacaaataataagatggaagtgaaagtagttataatgaccttgagaatgttttctgtgatctgtccaggaccccttgatgaaaaaaatgcaacaattggtgctggcctttgtcttagaacttcaacagttggaataattgctcctgttggtttccttttttcatgaattagaaaagtacgccaaaaaaacatacttccaattaatacaaagttgaatgtaaactagtttgagtaaggctatagtaattaagcttttaaagagtatgatttgttagtaaatgtaaacataaagcttacttggtagaattgatatattttaggatatgtgagccaacatcattgtcaacttgtacgaaggagaaaatgtcagagtcaaaaggtactcctttctcaccatcatctattaaaatcattccttctgctttggcatcttctacaactagtttcctgattttccttgaaactgtaggatcatcatttacacaaacaacaatcttgcctacaacctttttagcatccaatgatcccgggtagcagttactacaagaagattattcatatgatataagtataaaccacacacattcatataataacacatctattcaagaaaaaaagaatcatgaattttaaccaccttgcttcagatgcaggggtaaattttgcagccacatccttcccaaacacaactggatacacattcgagcgcgagtggtttgataaatttatgctagatccctgctcaaacattaagatatgagcacattgtacgctcaattttggtggcttagactgaaaaaaacatgcacactatgttgtgaacttgtgagaagtttaatttagaaggcttactttaaaagattgtccatttcccagaatgactgtggactggaaatctctatcaatactagaagctgcaacagtaaagatccatggggcagtattaacagcagtataaggatcaggcccatcgttcccagcagagcaaatgaccatgactcccatctgttcagcatgaaaagcaccaatggctattgggtcattaaggtaatcagattgaaagagtgaacccatcccaatggagattgagatcatatcaactccatccttaatggcatcatctatggcctttaagatggtggcaccagagcatccctcggccgagcatgtcttgtagcttgctatcctagtggaaggagagccgcctctcgccacgcctttggctaaaccgtagtaactggcattggcaactcttgctcctgctgcaatggatgttgtgtgtgtcccatgtccaatagtatcccttggagagtttttggctttaccataatggctcttgttaattaggtatgactttgatagtagtgttgtgttgtagtatcttgcacctatcaatttcctacaagaataagactgttaaaacttgttatgtttttt

SEQ ID NO: 60597 - DNA, 1265 bp, Cannabis sativa
  modified_base (622)..(631): a, c, t, g, unknown or other
ttgttgtgcattgtgtattgttttgattatatttttttgtgtgtgtgtgtttttttttttcatttggttgactaatgaaattagttttagctatctttactgttaattatttatgttttgttatgatctttataggatcaaaactggtttcatatggttcatcagtttgaaaatctgatcatggggttcacaaattttgagagttttgtaatgagattttaatttacttgctttaaaaattggtttttgttgttatatttttaaggctaattaggattgttgccccctgaactttgacatgtaccaaatcatgccccctgaacttctaaggtagctaaaaatgtcccttgaactattaagattgttggatttaaggattttttttccaattttagtaacaaagtctaacatggatgaaaattcaagggccatgatttagtacatgtcaaagttcgaggggcatgatttgatagatatcaaagtctgggagcatgatttagtatgtaaacaatcactgaaatagtataattgaatgaaattagacaacagtccttaaatccaacaatctcaatagttcatggggcaattttaacaaccttaaaagttcagggagcatgatttnnnnnnnnnnaaagtttagggggaaaaaaatcctaattagcctatttttaattagttgtttgatataactggtaactcatttcactagtttaattttataagtgatttcttaagaattcttatatggtatgtcttaatgttttttttttaaataatatataattttatattaaggtttttatattttatttaatttttatatgggggaagctcgttgtacaatttttgttaggattttgtataagttcacaagttttttttttttattttttttttattttatggtttcacaggttttgttatgattttttatagagtcaaaattggtttcacagggttaacaaattcgaaacttgtggtttcacatgttttgtgggttctgtaatgggttgctcttttttattatgttattgtatatcttttatttcaattttcttttaatttgtttttaggtttgaaactagttttcacacttgtattttatttttagatttttagattattgttttgtattgtatattatttttattatattgatgatcaatatttttttattttgtatttgtttgtgtattttttttctcatttggttactgataaaactggtttgagtttacttctgttgtgaaaattatatacacaag

SEQ ID NO: 60598 - DNA, 831 bp, Cannabis sativa
tcaacccttagcaagaccaaattgtcacatcatactggccaagaacatccattccacccagtcatatgctaaactcatttcaagcttgagtgccattaatcctcttctatcgttatttattttaaacaattaatgaagtagcttaaaactaaccataatgttgtcatgtattgagtgtcctaggacaaatacactctagaatgattagatgagggggccaagaatacttttcatcctcagtgataaagcttttgcaataattatatacattacattacacaaagcaataagttgatactctttaaccaatcatggcttttgtagttttggtatcaccaccatgtttgacttattaaactattgcaccaaagcaccgtcatttaagattgcaaggcatacttggttgaccctttcgcccacaacatcccaaaatctctaaaaaaaaataaagcatgatattcgtttagtcccagagctttagtggtgccaatggccttaatagccttgtaaatatcctcttgagtgaatggtgccataagacgctcattatcagccaccaaaatacatgaattaataccatctataccacactagatttgctcatttgtcgggttggttgtttgaaaaatatccataaaataccgccccacttcaccaaaaatctcttgctcaagacacaaattttggctagcttctatcataatctcagtaatagcatttttcttcttcctcaacgatgctctattatgaaagtattttgtgtttctatcacttacagtcatccactccgacctcgatctctgtttccaataatgatcctctctattcata

SEQ ID NO: 60599 - DNA, 646 bp, Cannabis sativa
gacgatggtttgttaagaaccgccataattgatttcagaaaaaaatatatatctatattttttaaattttctcctgcctcgatagtcaaaatatatacaatattatatatctaatcaaattcaaatatatcaattttacatataaattttgttaatagttaaatgtatgacaactatatatgttctaactttataaaaatctagtatatatatgtatgacaactatatgttctaactttataaatttagctaagattatacttgctagtaaaacaacaaaagtaaaactaagctggaaaatattttgtatagtagtcgacccattcttcacgcacagtgttaatatcatctattgtatactccgtcttaccatcacagtgcaatataagagtaaatcaatatgttagtttgttaataattaaaatttatcaaatttaaaagaatatgttaattactcacgtgtttcgaaagatattcttttggatcttttgccatagttaaatctctcattagccgcatgacgtaaaaaccgcacacagtgtcattaggttgcttaaggccctacatatcatataatatgtattaatatttaatttatacataaaataaatgatcaaataaaatacttttcaattttagcatcata

SEQ ID NO: 60600 - DNA, 806 bp, Cannabis sativa
taaacctcgagcattccaactgcatagactcatttttctcgctggggccgcgtagcagcacccgccgttgcatcatcatctgacattgatggaaccacgacgtcctcacaagacactgctcgagctctcttcaggatgctgcgaacagagttgccaacttgagcagattgacgggtgaaggggcgtctagttccaggggaagaaataggggaagcaaatggacaaggctcttgaataacaggacctgcagatctggtactttgagggggagatgggctgggcatggtcacatcaattcctttgcccttatcagtatgggtaatgatggacgtggtcataataggtggaggaattgtggagtgagaaaatagcgcaggcacaaaagcaggaggaggagcgaaaccagtggtggaagtgtccacacggagaaactgatcaacagcttgctgcaagctttgattattggcaatgctacgagggaaatactcttcataaggagtggagcttgaaatctcaaaggggttcctcttgtgatgggcaggggttgtggcacgcagggtttctttgtattcaaggagaggacggacaggaaagttatcacagggcatgagaaacttggtgcacttattgtaggtatgatctatgaggccacagaaatagcagaagtttggtaacctttcaaatttgaaactgatccattttgggttacttatcccacgaaatcgaatggtcatacctcgccgtagaggcttggtaatatcaaacaatattcggagtcgaacataagggccaaaattctcaagcag

SEQ ID NO: 60601 - DNA, 1235 bp, Cannabis sativa
ctccgccctgatgtgttcaaggctccaagcgccaatcctagtcgagccacttgtactagcctcgccactggctccctccgaggtgtcgcgtgtaagtcgcactggcggatagcaactaaattcgccagcaattacctatctaacccagtagtcttgcttgtattcgaccccaaaggtcctcaaagtatctcttacataccctgcaatggctcccaccttcgactctattaactctacctcgaaggtgacgttagggtcccgaggagtctttgatttatgtggcttggaagacataatttcaaaatccaagtcacctgcttcaaaaacaattgcgaccttgggtaaaaacataggtttagccaaaggaatagaagacaatctgggggactcagaccaagcagcatctcgcaagaaacggcgcctgccttttgaaatttcttgcaagaagcgtcggtggcgactagcggtatcttcttggtgaattttcactaagttttctctaattcttgcatcatttatctctaatttggatttaggttctaaagttctgggtttatatgggatgtcaagttcagaaggacactctatttctaattcttcttaacgataaacttctgaaccagattgggacattgctgcaaggagaaagcaatcccaatacctgaaagaaatttatcaagccaaaagttggtaaattggagaatctcgaaaacctatgttctgcctaaaccctaacatttacccagataaaattcaaccctaaagtttctaaaactagatgaagtaacaaaggtgatgactaagaaattagaaatcaaacccagaaacacaacgttaaaaacatgtaagaaaataaggagaaaagtcacttactgtttgaagttagtttttgagacaacgagcggcttcgcaatctacgaaacaacgtacgtcgtgaagatccctccgaatgcttgaagttaaaaatcaaatcagatgaaactcgcaagaaaaatgttaatcacagagatggcatgcaaggtttctggcaaatctggaaatggtttttctgcagaaaagcttgaaaaatttctagagtttctaaaatggcaaaagtagtgtaaaggtggtttcttttttcattttatacccttgggttaacttccgttagaacaaagagacaattgatccaacaggtagaatttgaaaaagaagtggaaaagatggtcattaaatgcttatgtacctcgaaacca

SEQ ID NO: 60602 - DNA, 1578 bp, Cannabis sativa
cttttcctataggttttgtccctatttataagggctttaggaatgacagttattctcttttgatcttatttaggtaatcgttcacgaaacatgaacaatctccacgtttcatatttacaacatgtggataaaataaagtaactattgagaactgctttttgttcttatcaagaagtagtttttctttgtcaagataacacactccaactatggctcgcattcttcaacgatgttcacaaattactggttgtattccgcgagatgctagttaagatgtttgtcatcacaatttttttacagtaattctcgaactagtctttggaaattctgagataagttgtactttgtttatttctcttaatattttaacatacccatgggtatatgggtcaatgagttacaagcttttaaataactcgttatctaccctttctacctaactcattctttcatgctattcaactgcctcgttcatcttagtccaactctaaggatttagcttataatcctgttatcctcttaaatcattatattgatagtaccatgcgatgtcattacatcttttaaccgaagtttatcccgaggcaggaaatttattcattcttcgcatttattattctcttcattcttttaggtctacatggacacgtgtcatgttcatatttcacgctcaaaatatgggcataacaataataattaatagaatacattattttatccaaacatcgtgttgtttattatttaataaaatacgacccttatatgacctaccaaacgagccctagaatagtaaaataaaagtctagagacaaattcaattttaaatggaaatgtgatacattttattaccatgaaaggaattaaaaaacaaagtatttcatacaaataatagttttacaacaaagagttaaagggtagtttacagaaaaagtaattttgttttaaaaaaaactataagccaactaactgattggaagaggtgcaccattccaactagtgagacattcaagcattggatcaataatttttccttggcacattgcagtgaatactttgtcaaactcctctcctggtgatctaacattctctccagtaagcaaaccagtccccaactcctctctcacaaacttgtacaatggataagacctgcactccttgatcttgtttgatatgtctgcattcccactttcaatagcattccttgcactttcaacctctttaggcaaaagggttttcaattcttcttcaaaagctccaatcttttggaagattgaagtgttgggattcttctcactttcaccgttaaccaaagcttgttctactagtacttgccttagtttttgcatcaaaggataggtagcactacaaggatcatcaatatacgtgaagacatattccctatcgacaactttaagcaactccttctcgcaaaatcttgatgggtggagctcgccacttgcaccagtcgtcaaaactctcttagcaacttgagtcacaacttttttaactgtatgccttaggttctcctccaaatgtctcaagtcaatggcttgacaaagagctaccaagaatgttgta

SEQ ID NO: 60603 - DNA, 553 bp, Cannabis sativa
  modified_base (108)..(108): a, c, t, g, unknown or other
agtccttgtgtgtgatagaagattcagaagactatggtgtaagtactttgagaccaactaatgatacaatatacgaaaagttttaaggataccctaataggcttcaanaggtaaattatcttttcgtttattaatttcagataaatatatatacatatggtggtcatgaggatgtggtacgataattattagaaactattattctgctacgtagttggtttagtacctcaaaactaacgtaatgagttactaatttccatatttaaatatgcgatcattacagccaaattccctttaaggcccaaggacttgaatttttgccattttgtttcaataaatgaaacaatcttaccttttttcaaaaatactacttatctaatctatttatttaaatattaattttatctatttaataattatcaaacaaaattattatttaaatatatttattaattagacccgcaaagtgtcttaattaaaaaataacccatatctcttttttcttctcaaatcggtccaaacttagtgaaaaatctcaaataaaacatactct

SEQ ID NO: 60604 - DNA, 641 bp, Cannabis sativa
tttattttctagaaaatttggcagtataatggctgtattttgaataaacctaaaaattataacctgcataaatatttgtacaaaaatatatatagcacttagtgccctagggcagtttagaaaaatatgcagattaggtttttaatttttcaaataatttggaaatcattaaaattggaatatgtctaatgttattcaacacataaaatcaagtccaataatcaactaagtccctacctcttccaagtcgttaaatttgtcagaaagatgatcctaagctctcaagtctcgagctccaattatttagtccaatcttagatatcactctcatctataccatcaattggctaaataattataattattgcattctacattaaaaattgagtctaacgatatataatatgactatattcaaagtttagagttttgagacatcacctaagcgatgcacattaactatcggtggaggtaaaaattagtgtactagaattattgccaaaaataggtgtagtatatatcaaaacgatcacctcgacaagtagatcatacccatgccatccatttgtcaaaacagtacacgatatcgccaaaaggttgccagaaaggggcaaaaatacaaaaatgtcatcgaaaaaagt

SEQ ID NO: 60605 - DNA, 1763 bp, Cannabis sativa
aaaatgtgtcatacctttgtggattcacataaatagttaattgataattactccatttccttatttaaaatatttgattcttgaacgggatcctagaaataaattcttaatattgtgggatttaataataaatgagtgagatacggagctggatatctggacgtcccttaaccactctctctgaagcactacttgatgttatccggagagctactatgctagatgcttatctcgtttggacgagatctctgtccatcatcctgatggcttgacctcgctaatggatccagtccattatcttagttgggcctacatttgggtttgttgtagctgaactaaaccatcttagaattacacatgtcttctatccagaaacacatataacatttacccccaagccttcctaactctggagttttgaaggcttgcattcttctttctagatggcatgaggacatgtagaggctaaaagggtgaaaacctttttgaattccaaataaacaagttgtggttgacaacttcttgctttttggaatggagcaacatgtggcattttttattggctcgtgcaaattacgcgtactgaaaaggagcgtgaagcgtggatttgcgaaataacacttgatcatgtcagtgagtgtcccgaggtgaatgtcatcattcgaatatcttagttccaagcaatgcattaaatgtaaaactgacagcttttttcgaaccatgtttgacgtattttgtatttttttggatacaatctgagccattgatttaagggcactcagattgccaattcattactataaatattgcaaaaatcatttgttcaccatttttacctattttgaattttgcattcaaatatttagagaaaaaagtaaaaattatttctctggtgaatgaaccattacttcaacgagtgtcttcatcttctttttcatattcgtgcacgtgaatacctaggagcgccatcctagttctaaccattgattcttcgacaccattaagaccacatgatctccaggcagagattgaatcgctcattaataaagctcgctcccttcaaaccaccgttgtacacctcgaacaatcttcctcagtgggattttatttaagactgaagcacaacattcaaattcccacttcaaatcctccacctttcccaagttcttcatcttcatcaagtaagtaatctttaagtttttgaaattctgaatagtgtttgagttttgtttttcttattttatgattgcatgtttgatgtagtagaaggtagaaaataagatttaaggctttagggaagttctgaacatccctttaaaatattgaccttttacatatactatctgtagacattagtgaatttctagttatatagtcaaaagttagcaaaagacgctcaagtatggctgaattttaattcatttgttcaggatccttatacttccaaatgatatactttgtgatatttcaataaattctttgtgttcttgatttgattgtcttagaacaatgttccttgagaatcttacttcaggacatagggtttggtggggacctctccaagcaatgataggaaaggattctcctatacccttactatcttttttagtgtgggtatttaaatgcttaattttatttttattctttttttagggtatgcttagtttttgttataaaattaattataacatatatatgttgggttttatgtcttaaataaaactctatttcaatgtaatctttattctttaaatatcaataaa

SEQ ID NO: 60606 - DNA, 846 bp, Cannabis sativa
tttgtcaacttcttctttgagcgcaccttgtctctcgaaatctaatggtcgtcacttttgtcattttgctggataattggggtcgatattcaaatgatggcagattatatttggatttattcccaccgtatcgtagtggctccaggaaaactgatccaagtttgccttggaaagataattaattgctattttagttcttcctctaaactttttccaatgtaaacacattttttgggatcgtttggatttaaaataacttcttcaagctcttcaattggtttgagtgttattttcatcttgaattcttaggtccaagtcctcttctttcctctcgtcttcttcagttaggattaccattagttgatgattggctctcctactctaaagttctattcgatagcactcccgagccaataactagttgcctctaactactcccactctttcgtgtgttaaaaactttaggaacaagtgtttaattgaacttactgcccccagtccaattagtgctaggcgacccatcaatacattgtatactgacggaatatcaacaactaagaactcatgcatttgtgtcatttataagggtggctctcccaccgttaatggaagctcgatgatgcctaggctagcgacactgttgcttgtaaatccacataggctcaccatgcatggtttcaactttacatcctctaaccccatcttttttaatgtgtccttgtagagaatgttgactggactctcattgtctaccagcacccttttcacccttttattggcgagctgaactgttatgacaaggggatcaacatgtgggtttgtactgttaacgtagatttttgttaa

SEQ ID NO: 60607 - DNA, 892 bp, Cannabis sativa
tcgaggtgataggacaacgtggttgggccatgaggacctccaccatgaggaaggtgttttgacgttgtggtttggctatgaggacctcagccatgggggagatgatttggcccacgtggtgtcatgtcgagatggagccaaacgtgatgaatcacagttgttttaccacataggcgtaggtcaaagtgattggacatggggcaaccacttaggcgtaggttgaggtgattagacatggtgcaaccacctaggtgttggttaaggtgattggacatggtgcaagaattaggtcttttggctcttttttccacaccaaggcaaaaaaccacaccatctccatgaattttttgaaagatagcatttatccttaagtttgtcaaaatactattgtcttatggtggatctataaaagaaaataattcttgcatttttacacctcctatccacaaatattagtgttatggggagcaaatatgtaaatgaccactaatatttttaagtattttagaataataagaaaaatataacaaatgaaaagcctcatttagccttcaaaagggccatcattatatgtcacactcatttcatctcttctgttagaaaatataagagctcttccacaatagaaaatcctttccacaaaagtttcaaatactcacttcaaaggaaagctccaatagaaatcaaatattgttggagaggattcaagcttaaagataatcattgggtaagttattcttactctttcactatacactttttattttccatcttaaaatgcatagaatccatgagtaatatagttttcttcaaaattttctatgaaatcctctttttacccattttgattttgctatagttgtgaaatttagtttgtagtttttagaatcta

SEQ ID NO: 60608 - DNA, 1057 bp, Cannabis sativa
ttttttgtcaaataagctatattttagctttttaccacttatttacacctcttaaaatgctctaataattttaactgtaaattggggactacggaaattacaaaaataagagtttgagagttattactctcaattttttgagtttataccgcaattttttttttatattttatacattaaatttaaacagtatcgatcacgtggagtactgtcagtgatctgatcctaattaaagacaaatatggttgttgtagttgtttttcaaagaaataataacaaatgggtggttgttgctaactactctataacatcatcatatacttacaaaatgcacgtaccctactaattatgtttgtaaaaaactaataatagtaacaacatttccaagaacattctcatcattttcaagtggaaaaacaaattactttgagcctagtgtccaataacacatcctgattgatttgatatgtgctaccttaatttgtttgatctttttctatatatataccaagcttggcatcaatattggcataaaattattctcttctagctaggtttcttcttcttaattaatatatctatctaaatagaacaaaaacatgggggttgaatctaatattggggaacaacaaaccaacaaagccattggatgggcagcaagggactcttctgggcttctatctcctttacatttctccagaaggtttcttttttattatctttttaatttaaaatttaaattttattcttgattgtatatttatatatcttccttccaatactcaatataattttcatgataataagtaaggtctagtttactcgatgtatagtaagtttgttgtcaagtttttcaagagtgttttgatccatattcgttggtcagtatatatatatatatggatttttattactacttaaaaaaatggttttggattggatatatggaaatttaagatgaagttattgtgagtgtttttagatactattccttaaataataaacatatatgtttggtgaataataattaattttgcaggaaaacaggagagaaaga

SEQ ID NO: 60609 - DNA, 3052 bp, Cannabis sativa
  modified_base (461)..(462): a, c, t, g, unknown or other
gtatatttgaactaattttttttaaataattaataaaaaattaatgactttgaccaatcaggaattaccacatggtaatttacttaattagatacctacagaaattacaaaattataacttagatattattacaataaaaaaattaaacttatatatttatttacaactgaaaattcgacttaattatttatgccgcaaattattgaaatgtaaatacaaagtaacaaaattataaatgaataaatttgtacctattaaaagtttatatgatatgatcttgaaatatgtatatatatatttgtatatggacatttttttgtcaactctatcaatttcatggaaaattcatttgagaataaattaaagtaacaataataaagaaagtatatggtcaatgagagcattccacatatataatattattattaagtatcatgcattataatatatatattttttnntttttttttaaatttataatttggattgttccggtaatttttatgtagattgatatataaattttaattgcgatttaggttactctgttaattgctataagaatttctgtgtagaaatctataaaaatatataaaaaaaatatacattttaaagtgtaatttttttttctgttttttttttaggaaatcatgcatgtattataatttaaagtatattaaaacaattgaattaaatttattaatttccctctcaaaatttgagggatgaatttaataaatgtgaatagtcccacaaattaaatagtgggtaatgtataggcaattatagtcacatttaattgattggtcaacatatcacgatcaatcttctaaccaccattttgttctataataaggtgtaattaaataatgttagatgaatttttattcataaaaagtaatactaatgttagattattaagaaagctaataagatttttagttatctctattattattggtccacatcatttagggagactcagatttgtattgacagcgagttatatatgtaatgctttcgcttcaagatttcattggtcgtatttttttacgtgctcatgactcttgtatacaagtatgtctctctggtttacattttgaaatgacgactaatcctgcaagctttgatctcactcgcacatttcataaaaaacttctcaggaggtcactcattctaagattactccaagtcaaacattattaatttgaagttctcaagtgatgggcaccgaaaacaaaatgtacaagtcatcttcaattgtgtagtctcgtacctacagagtctcacaatcgccacacttaatcttttccatatgatatgaaattacatagcttaccgagtatttttcattacaaattacggaactacaaactgttacaaattataactaaacaaatcatttactttacttgtcactacatatataaatacttttcaatagtatgcatttgtcaattttatttgtaacttacaaaattataaatacactttaatattaaaaaataaataaatttaaaacaatttttttaaaaaataacttttaatatttctttttcaaattttgttttacatattattttgtatatattataatttttaattttcatatattttttaaataattttgaattttaaatttaataagatttcatatattttctattttaattttattttaattatataagtattttttaaaaaatatgagaaggaataaaatttaaaaaatattagaatgaagtgccttttttgatgcaaataaaacttttttacaaataaatatactaaaatgataaaattttgagaattggattaataccatttaaatctatcaaaagcatactaaaataataaaaaaaattagttgttaaacataataataaactgtgcctattgcaaaattttcatttaaatttaagtgtagtaaaattaattaagttgttaagcatagccctcaaagttttatatggtcttggccacatattctcaatacccaatcttccacatcaccatcacacatgaaaaccaaaataaaattaaacaattaaaacattactaaattaaaaaaaaaaaaaattgaatttcttgtttcaaaatttttaattggaggttgtcttttttctccaatcaaacctgctaattttccttaggtatgaatgcaatttagttcaggttgtgttttgttattaccatttaatttctgtaacataatttttgaatgttttaatcgtatttatataacataattttgagtattttaattttatctatgtgaattaaccaataaattatttgactcaataaaatagaaatatctcaattaaattttatgtaaactattttataaaacatatattattattaataaaattacataattaattaatagaaaaattaaacaatcaaactttgttattaacgagatgatgtaatttatttggacctttcattgtaattatatacatgattagaaatagaacccatattataaccccgccgtcaattaacgatggcggctctactttttaactcttaaatactgacgttaccgttataacgtcagcaaacgtgtttttaacggtacttttctctctctatataaaccaactaaccttcacttctttacttactaccaaaaaaaaaaaatctttcttcttctatctctctaaaacgagctcactcaagtgagtcagttcctttttccaccatggaaacaaaattcgaaagcttctggtttttagctctagcttcaaaatgctcaaatttctcttcccaaaataccctcctcatcttcttcttcactttcattatttggatatcaatcgccgttttctactgggcccatcccggcggcccagcttggggtaaataccgttataattacaaagcccaaaagcccattaagaaaattactactactatccctggtccacgagggttcccagtaataggaagtctcaatctcatggctaacttagctcatcgcaacctagccgctgttgctgaacggctcggcgcgaaacggctcatggcttacagtatgggtga

SEQ ID NO: 60610 - DNA, 1992 bp, Cannabis sativa
tcttgaacaactttatggagctcactccaagtccaaaatggatgaaactagaaccttgattcaggttactagaaagggaaacactcccatgacagaatatcttaggcaaaagaaaaactgggctgaccttcttgccttagctggagagccttatcccgagtctcaacttgtcacaaatgtcctatcgggtctagatgtgaactatctcaccatagttcttcaaatcgaagctagacctaagacatcttggcaagaactccaagagttattgctgagttttgacagcaaaatagaaagattacaagccatgtcttcaaatggcaaaggaatcaacaccttgatggatccccaagctaactttgttcaaaagccacatgttggaggacaaggaagaggtactgccaactattctcaaagtcacggtggcagaaattcaggcagaggtggtggaaatcgtgctagaggaagaggaaggttcagtggcagatctggaggtccaaaacctacttgccaagtgtgtggcaagtatggtcattcggctgctgtttgctacaacaggttcgatgagcagtttatgggttcagatccaaacatctcaacacacaacaagaacaacaacagcaacaatccctcagcctatgtagcaacaccagaaactgtggaaagtgatgcttggtttgctgatagtggagcaagcaatcacatcacatccgaatcctcatccatgacacaaaaacaagagtatgggggtaaggaaaaagtcaccgttggtaatggtactcaactctctatctctcacataggcaatggtgttttatatactgattcgggtcaatgtttaaaacttgaagaaatgttgcttgttcctgaaattgctaagaacttgttgagtgtatctaaattaacccttgataacaatgttctcattgagttttatgctgattgttgtgttgtgaaggacaagctaacaaggaaagtgcttcttcaagggatgcttaaggatggtctctaccaactccaagcaccaaacacaaagccaactcctctgttctcaagaaaaatcgagtcaaataagcctaaggagcaactgttttctggtgttgctgtcaagtccaagtctagtgtcagtcggtcaaaaaccaatgtgtcttgtgtttctaagagtgatgtatggcataggaggttaggccatccatcacacaaagtattaagtcaagttttaaattgttgtcaagttaaaatttccaagaatgaaatgaatcatttctgtgatgcatgtcaatttggcaaatcacatgcccttcctttcaaaccttcgaataacaaagctagcaacatacttgatttaatacatagtgacctatggggaccttctcccattgtttccaataatggttataggttttacatacacttcattgatgattgcactagatttacttggatctaccctttaaaaaccaaagctgaagcaataaatgcttttcttcaattcaaaacctttgctgaaactcagtttgaaagaaaaataaaaagacttaggactgatggaggaggtgaataccaagccctacaagacactgctttagcccatggaattgatttccatcattcatgtcctcacacctcagctcaaaatggtagagctgagagaaaacatagacacattgttgaaatgggtctcactcttttagcacaagctcacatgcccttgaaatattggtgggaagcttttcaaacatctgtttatttaattaatagattaccaacaccaatacttgaccataaatctccctttgaggctgttcatggtaagaaacccgattatgccttcttaaaggtatttggtgttgcttgttttccttgcataaggccttatcaagcacacaagtttcagtttcactccttgaaatgtgtcaaccttggttatagtgaggttcacaaaggttacaaatgtttgactcccacaggtaaaatatatatttcaagaaa

SEQ ID NO: 60611 - DNA, 1583 bp, Cannabis sativa
caaggggtatagaatctacatttcgaataagggtaaactaaaggttgtgattactagaaatattgttttcaatgagctggaatatccccacttgacctccggaaaaggtagtctgtctccatgtaatacaagaaaaataggaaataagaacactatatgcatgaaagtggattatggaacgaagctccctgaagaaggttcataaacagaaactagtgtggaattggaagacaatgttcagatagaagtcgatgcagagccggaagataacaaagactaaactgaagttttagaaggattaagacaaacaagtttggaaggttatcagttggcacgtgataaaaccttgagagagattcaccctctggcaaggtttgcaaaagcagacttaatagcatttgcactggcgacagtacagcaagctgaaattgaagaacctggaagctacgaagaggcaatttcaagtggaaacaagttaaaatggcttcaagccatggatgaggagatggattcactccagaaaaacaagacttgggtagttgtaccaaagttggagaataagaagattgtggagtgcaaatggattctcaaggtaaaagagggatcaacaagaaagaaccaataaggttcaaagccaggttagtggttaaaagttttactcaggtggaaggtatagactacactgaaatcatttcacatgtggtaaagtataagacaataagattgatgctatctttagcagctcaaatgaagtttgaaattgaacaacttgatatcaagactgcctttctaatggattcttagatgaagagatctacatggagcaacgacttgggtttttaggtggaagggaaaggagttgaattggtgtgcaagcttaacagatccctatatggtttgaaacagtccctaaggcaatggaataaacgttttgatatttatatacaacaaattgggttcaagcgattaacatatgatcactgcttgtatttcaagaacctagagcaatctgcagtcatgttcttattgctctatgtagatgatatgctcatcatgagcaaggataaatctgtgatcaaaattatcaaagccaagcttaaaagagtttgagatgaaggagcttggactatttaaaaagatacttggtattgaggtttcaggaactggaggaagggaccattagcttgaagcagttcaggtacatcaagaaggttatgcaaaagttcaacatggaagatgtaaagagtacatccattccgttagggtgacaatttattttttcggaggaaaaatgccctaacagtgcaaagtagaaagaggaaatgaaggatgtaccctatgctatggtcttagaatgtttaatgtatgtgatggtgagcactagaccggatatggctcatgctctaagcatcctaagtcggttcatgttcgatccgggtattaaacattagaagaccctcaaatggttactaaggtacttgaagggcacttgagattatggtctgacctacgagaaaagaaatggagaattggagttaaaaggatttgtggatgctgactatgcctcaaatagagataccaaa

SEQ ID NO: 60612 - DNA, 831 bp, Cannabis sativa
  modified_base (403)..(405): a, c, t, g, unknown or other
gatgcactaccatagaaaatggctaccttcagtatggtgtgacagcatctagttgcgggatcaaattgaaaaagacaaaaaataaaaacttgctaagacaatgatcctattttcactacacacactaatgtctaacaagtgtacaagtttgtaagtctcctttagtaaaaaaaatcttggttcacttgtataaaataaaaacttaatttttgtatcaaatattttaattttttttattattttgaaaaaaaaaataatattttaaaaaaaatgtcgtgtgacttgacttttaggctaagaattattgttcatttgtcattcttttggtaagtataaccatgtgctttatttaataaatttttgatgagtttcctcttaaaatttgatttcttattctttatannntgtttaattgttgatcatgattgtttttcaaatcttagtttctttatgtctttggcccttatagataaataaaaagggggagtatttgagattttaattttgattgtatgctcaaggggaagttgaggtttatttgggattttaattttgattgtttactcaactgtccaaggggagttgaggtttgtgtttgtgttcatctttggtcaaagttagctttttattttggtttaatgttgtaaatttcatagagaatttttatatttgttttgttaactttattttgtaggtctttgttaattaaaaatattttgattatctaatgtgccaaagagggagattgttaggtctttttttggtattttagttgtcaaaatattttttaattaatgtgcaattttattgagcatttaaatagtttttatt

SEQ ID NO: 60613 - DNA, 1399 bp, Cannabis sativa
tgttaaaagaaattaatctgccatggggtattttagtcactctgttaatactctgctaatcacactgttttgatccaagtttcttggattcgaatattcctcttgctgtcatacatcattttaccgttttcatagggatcccaaattattccctttgtaacaaacttgaatacgtggcacctgcctatttgcttagtttgattctgcaatgattgtatcgattgtaatatttgtctataaaaggaatacaatttcctcagctgtaatttagctgagttttccccaatttacttttattaccaaatttgactacaaccccaaacacggacccaaaaccaaacttaggacctggcgctagacctagggccaaattggaacaagactgatatccaaaactgagattcgaatctgaacctgaggcttcaacctaacccgtagttagtgtttgaatccatgacccatacccggatccatacccagacctagacccagacccaaactgggatccagacctgatcccggacccaaaattggaatcgaaccaagcctgggactagaacccagacctgggatagtaacaggacccaaacctaaacccaaacttagaccagaacacataccgagacttggacctagaccgggacctgtgacttaggacgtaaaccaagaccgagaccttgacccagaccgagacccgaacctaaacctacacccaaacccaaaacctgaggccggacccaggacctaagaaccagactcagactagggacccgaacctcagactcgcactagcactgggacccaaactgggaccataacccaaactgggacctagactcagatcgggactcgagacccaaacctgaaccaaaacacgaacatggacccggaccaggacctaggacttgaacatacattggggacccagacctgggaattgggcccacaaactaggaccaaaactgtggcctcagaactttgatcgagatacatgacctgaccccaaaccgagacccacactcaggaaccaaaatcaaaacttgaaatggagctggactgggatcttggaataggactgggacctggactcggacctaaacccgccaccggacccaaccacaaaccttaactgagaccgaaacccagatctgaacctcgccctagacaaaaatcacgacctgaacccagactcgaacccaaactcaacctgaacccataccctgtgacttgaaactagaaccaaaaccagaagcggattaggacttaggaacaggaccaggacctggacccacaccttaaactataaacggacgaggacccacactcagacacaaacccaccgtgggattgggtcccaaacccgaactgggatgcaggaccagaaccaagacctaaactt

SEQ ID NO: 60614 - DNA, 553 bp, Cannabis sativa
aatattatagatttaagtgctatcaatacttttaatatattgttctaaaaacttatatattcgcttttatttttatctactctttgtttgattataaaatttaatttttaacattttgacactaccaacaaaaatttattaaagttattttatttacttatcaattcaaaatttactaacaaaagaatgaaaatatttacaaaaaagtttggtactatgaccaattactgcaaagctttcgaacaataattttacaatatttttgactagtcttacaatgcctaccacacgattaattcaatgggatgcaaaacatgtttaatcaataaattattaaattataatcattgtgtaagaattagatctcaagttgtcatttgtgtcatttatataggagtttttataaaaatattgagtaaaaatttacaattttactattacacggaattttttattaaaaatactgtcatttttataaaacaacctaacactaccgtaaaataacaaaatagaacaattaaaaataacaatagaacaactaaaaaacaaccgt

SEQ ID NO: 60615 - DNA, 809 bp, Cannabis sativa
gtataattgtgaagaaaacataatgatgtagattgtgtaatttcttatcatttaattaataagtgcaacttgaatattgttacctgtcccaatttgggaaatagagatctgtagctccttgattagtcataacattttgtgccaagattcatatatatttttctatgtactacttactggtacaaagatgatgacttaaagtgctcagcaaaatcaataccaagcctaacttcagatgcttctgagcttacttcaagcatccaggctgctggattttgtttgtctctaattttaatcagtcctggaatttcctggaatagattaaatatatatgtaagaaatgaaattgggtagaagaaatttaagaaagttaatgtgtgtatactcacttgaaaatattcaacaactttttgagagttctggcctaatggacctgaatagatgacttgtcctcctctcttcataagtagaagctcatcaaaggcttcaaagatatcaatgctaggctgatgaatggtgcaaacaacggttcttcctgtgtccacagtatttctcactgtcctcattacaatggcggctgctctagcatccaagcctgaagttggctcatccatgaatatgattgaaggattagctacaagctccactgctattgttagtctcttcctctgttcagtggacaaaccagtgattcctggaagcccaactatggcattcttgagattgttaagttccacaagttcaatcacttcttccacaaacgcctaaaaaaaagatatcccagttaagagaaaatgttgtatgaagct

SEQ ID NO: 60616 - DNA, 1547 bp, Cannabis sativa
tgaatggagttttttgaagaagactatggaagccttcggttttgagccgagatttattaagttggttttgaagtgtgtcagctctgtgtcctattcgattttactgaatggtggtccgttgaaacagtttcgaccgggtagaggcctccgccaaggtgatcctatctcgccttacctgttcattttgtgcaatgaagtcctctctaggatgctcttaaagaaagaagaggatggccttgtctcggggttcaaggttagcccccagagtccttccatctctcatctcatgtatgccgatgatatctttattttttgcaaagctgatatgggtgaaattgaggttgttatggagagtatccagttgtatggctcttggtcgggtcagtgcctgaatgttcagaagtcggcgtatgtcttttcgaaaaatgtggacgaggctactcaggctgcctttgctcagttattgggttttcgaaagctgagcaaggaggatagattcctcaggaatccgatcatcaggtcgaatagcaaggttaaagacctgaaattcatcaaggaaaagatctgctctaagatagaggggtggcggtgcaaactcctctcccaagcgggcaggtctactctgatccgcgctgtggcccagagttctccggtgtatgctatgtctactttcctcttccctaaatccttgtgtcgtgagatggatcaggcggtccggaagttctggtggatggggtgtgacaacaaagatcgatttttagcgctctgtgattggaattccttatgcttacctttggagaagggtgggttaaattttaagaagtttgaagacatcaatcttgctctggttgcgaagcttggttggaaacttgctaaggaggaagattccctatggtgtaaggtctttagagccaagtattggggaaataggggtcattccttttggaacttgaagatgcttaggaatgcttcctttggtgctagaggtatcatggccacgagagatctgatcaggaacgaatcttgctggcttatagcggatggaagcaaggttgacttgtggcattctccttggattccttggctagactggaacatgtctagagctgccttcaatccattatgtgttcagaattctattaaggtctctaccttgcttgatgaggatggggagtggatatctcgattggtccatagatggttcgtccctagtgtggccagttctcttaacttaatagggtggcttcctacatcccaagatgatatcctagtgtggaaagacgctacaaatggggtgttctctccgagagcggcatataagtctacaattaagggtcgttagggggagtctgatcagctgtggtctcggatttggaaacttcagattacggagcgcctgagaatgttcctttggaaactttgcagagatataatcccctttggaagttgactccaaaggatttttggtaatgaagttagatgtgtcctctgtggtgtggaggaggattcggcctaccatctgtttttttaaatgtcctattgctaaa

SEQ ID NO: 60617 - DNA, 770 bp, Cannabis sativa
cttattttagtcatatagaggctataaaatactttggccactttagctctaggccaattggtgggagagacctcttccatatttttggcctatttagggctaaagagagggcaatggtcgaccaggatgtttatacaccttttggtgaccttcctcattttgttttgacgtctttatgataaaaagcacttttggtaaaaaaaaatctccttctaatttgatgtggctgacctatgccacttttttgtgcataaggacgacacatttcgactaagcttgttttttagtgaaaagtagtttatttcacttatgtcatactccttggtgttgggggaccaaattaaacaagtccaatttgatggtttgagagtagagagcactgccatcctcttgtggtactgctctccaaaagagagagagagtgctgtcatcttcttatggtcagtgctctccaaaagagagagaacactgtcatcttcgtgtggcagtggtcgaccatgcattgttgagtgacatgcttgtgcaattttgactctatgttcaagttcaagcttttttatgcttaaataagtcaagtcattgttgtttccttgtcagatagaggtctgtaggatgaaaacccttacgcaacccataaatcttaggttgggcacacttgggtgtgtgtcccaacactaaatagttggttagagtttcatgactttcctaaaagcgccatgggatcctcaaatagtatgtctccacttatttggtatttgtaagtcttatta

SEQ ID NO: 60618 - DNA, 995 bp, Cannabis sativa
gtcgtgatgaagtgaatgaaacatcaaacatatgataatgaagaatttgaagattaatattaaaaaaagaaagaaaaaaaaacacttttattaaaattgataaattaattataataagccacgtagattgactgacttagtcgtagtactgatcaatcaataatattacttaataataataaatagtacaaacaaattaattaacaaacttagtctaattacgatgacattttcttctgcttcgttgtgatcatccgatgattcggctggaaatgactttgtctcacttaggttaattgtattatttggtgggaaagatattgaaaacataataatatataaaaataagaatagagtaaaataaaatttaaagatgcatacaaaaaaattattaaatttaaagtttttttttattttattttaatatgaaatagtggaaaatatttcaatagtactatacaaccaaataaaaggattaatgaagtaaaaattaattgattcattttcattttattacttctaactagttttgtaaatataagtcggatttttttgacaatacgcaatttaaaaagcatgagtacgacccgttatgaaaaaatatgacactggatataacacgtatgatgttgtaaattgacacaatacaatatgataaataatcaaaaagcatgacacgtaagcatgaattgactaattaatctgatggcacttgaaagtacgacacgttaaaaagcttgataatttcataataataaatattataaatcaatgaaaatgaaagtaaatattttaattttaaaaattataattattttttatataattatgtaaaattattgtaaaaaattatataaaaataattgaagttaataaaaacacatataatttattagttagctcaataatcgtaataaaataacagtatgaaaatgagaagcatgtccatttgaaaaaaaaaacagattaatctgaacaaagtataatacaaattc

SEQ ID NO: 60619 - DNA, 524 bp, Cannabis sativa
aggtttcctgttgatgagaactcaaccatgaagtcagttgttgaatacttccaggagatgtatggtttcactattcaacatggccatcttccttgccttcaagtgggaaaccagaagaaggcgaactatttacccatggaggtaggcatagatcacaatgtcacatcagatttccaactgcttgctttatttctattcacttatgtttatatatatatttggtagatgctaactttgcttaaatttatcaggcttgcaaaattgttgagggccaaagatattcaaaaagattaaacgaaaagcaaattactgctctattaaaagtaacatgccaaaggcccaaggatcgtgaacaagacatccttaaggtacttgctaattgctctattttgtaggtctacttttattgctgtcttgcatatttttggaatcaaattatacgatgaaatgctctaatcatagagttatttttctactttaattgctacaactgtttatgagagaaaagtatggaaactggtaca

SEQ ID NO: 60620 - DNA, 1118 bp, Cannabis sativa
tactcttacatgggtcattatcgtgtcattttttagttaatcatgttagctcaaaaatgtcctgtttaatagacgggtcagtcgtgtcaatccgaaaatgacccgaacctctttatttcgtatgagtttcgagtcgtgttatcgtgtctgaccttaattgccacccctagtaattcttatgcaaccgttctatatattttgcagtgcatgcgacggttgctcgaggagaaagacggaatgcaaggcttaaatggtctaaaatacttctcaaccataatagcagtctcaatgagaacactttttgattccaagaaggggctgatgagattcttgactatatctagctctgtaattgcaacaatagcaagcacatattgggatcttgtcatcgattggggtcttctaaggcgagattcgaaaaacccctggttgagggacaagctaattctacaacagaaaagtgtttactttgtggccatggtaagaaaatagaatggaaccttaaggttctaatagtataaagattaagggctattagcttcttttgttatgaatatgatcattcaatcaattttgggtacttgacaatgtaggtagtgaatgttgtgctgagacttgcttggatgcagacagtgttgcaatttaatgttgattctcttcatccaaatgccttaatcgcaatcgttgcctcgttagaaatcattcgtcgcggcatttggaatttcttcaggttctactatgtttcattttgtcattagtatcttatctttaaggtaagattattactaacaataatacattgaaaaatttataatagaccaaaaatttgagaaaagaattacaaaaatacatcaacacagaacaaaatttattttatgctttgaactcttttatttatcaaaatacttcttcagttaaaataataaattgttttttagttgttttatagtttatttatagttgtcatgaagttatttttagtttatttctaattgatttatagttgtcatgtttcaactcagaaatctggattagacttctaagtcacactcgctcgctagattggtgagaatgaataagtagttaagttattgtaagaaagacacaataaatttata

SEQ ID NO: 60621 - DNA, 774 bp, Cannabis sativa
ggcataaaacccaacataaacctcctttttggacatgggagaactgacctttgagttggagacgacgagctttcgtttatgaagcaaatttctgttcaagagcacgccaaacagagtgagatgtggcatagttggcaacagatgcaagaatcgattcagacatgatgaacgcaaccatgataacagaagttgatctttctttctccactaaatatattcaggattcggagtattgtcgataagattttgaggcggtggaacccctgtaaacaagatctcatcgagatcatgtccgatgacggtgggagtaacttcagatttccaggacaggaaattggcacggtcgagtttaatggtgagggaagaggacaaagagttcgagaatggattcccagatctagttgcagggggttgtggggcaggggcctgagctgtaggagcagcattgttcatggcatgggcctgaggatcggaagtagggctgaacatttagacccgcgaacccgaaaaacccggccactcaccccgacccgctgccaaaaaaaccgaaaaacattaaaacccgtgtggtcgggtcgggttcaacccgaaatcaccccacacgggtttcgggtttagatattaaaaagtggttttttttttagtcgggttctaacccgtgacccgaaaatacagcaaaaaaaatatttttttttattaatttttagtttatacactttactttttactgttcattcaatgactagtagttggctacagtagatgaatagtttt

SEQ ID NO: 60622 - DNA, 798 bp, Cannabis sativa
attttaagttgtgttttgaataatgattagtttattgagtaataattaatgtgtaatattttaatttttaagtaatttaatatttttataaattttattttttaattagagaattttatgccccgttcccgcccccattagggaatttttcgccctatcccatcgggggaataagcaagaatatggattaaaatccttaacggggatggggatggggacagtgggagcactctctgccaatttctcgctccgtgtacatccctaattggaagtcttgttgtcatagacatagtttaatagtttcactcatctcttgaccatctccaatggatggtgtaaattttaagttaaatttggcttaaaaaaacattatatttatcccaaattttacaattttatttcaatgcattaggtataaattacttatatttttgataaactacgtaaaaaagtcaacaaatgtattaaattttgattgaaagtgtataaaaattcaattaaatatagaatatcactagtaggtatcagtagtccccaacaccttttataggtcgcgcattagaattagttaacaatattctttaaaaactattttctcaagttacatgagattcgatacttacaccaaaagtggtatgataccgaagaggatactagacactaatggtaccttttgacaattttctaaatatataaataaaatatgaaaagtcattaaaggtactgatgagtgataaaaaaattaataagaagtaacatttattatgtcataaaattgggctcatgctatattttagg

SEQ ID NO: 60623 - DNA, 1154 bp, Cannabis sativa
taattttagaaaagagaagagaatagagaagaaaagaatgctaaaaaccctgttgaaaaagcctttgtgattgatttttatctccaatttttgtcctccttcattgcttgtcgaaaactattgaagccccttcttttatagccaaaaaaaaagataaaaaaaagatgcaaaacactaaaaaaaaaaacatattttgcttgggattagaaggggcgggccgtggcatgggatttctatgcctaggcgcggtcccccctttatttaggcagtaagttttctactgtgtcgactgatcgtattttggccataactctctcgatattgctcgaaattggacgattcaagatgctccagaaaagaaatctagaatttaatgttttgattttttccaatatctaatcagatcattttttctattttatagtttatctttttgtgagatcttttttccatcttattccattgatattttctaatcttcttctattttaaatctgcaaaaataaaagataaaaaacgtaaaattactccaaacaagagtagaactaaattaaaaacacactaaaaattaacctaaaaataatagtaaaaacaaccttacagtttcatgaccgtagaacatcgaatacaagtgttgacctaacatgataagttgtccactgcgtacacaaatgatgagataaatgttatgcgtgatctgtgaattcattacgtgaaagcagaagcggagcgacaacagttggcgtgttaatcagtgtgcatatatctcgatttattgttactatatagatctttaaatatatttagatgattataattagtgttaacttaattatatatttttaaatatatttagacaatattatcgttagtttaattattgtgactatacaaaattttaaatatatttagatgatattagcattagtttaattattgtgactatacagatttgtaaaaatttaaaaattaatgtaggagaaaaaattgcaaaaaatctatttttttttactagttttctaatgtaacgactaaaaaaaaacgccgctaaaaatttttttataattaaaaaacgtaacaagtactataaggcacggtttaaaaccgtcgtctataatagggtataggcaaggatttaaaatcgtgccctatac

SEQ ID NO: 60624 - DNA, 4133 bp, Cannabis sativa
ccatcgggcaagagtagatccgccacttttatatcttcattcgacgagggccctcttggcctgggtaagaagtctttcttatgatctatccaaggatcgtgccaaacttttgtattctgaccatccactattcgcttataggcacccttacgaataatcgctctagatttagtcacattcttccaaaaccacgagtttgaggctttcgggttacattccaaaaagggctttcctttaatatatttggcttccaaaatccgacaacataaggattggttccctgtcagaaggttccacccccatttagccaggaaaccctggttcatttcttttgtttttctgaatcccaacccccctaaagacttgggaaggcaaattttgtcccaagcttttaggtgaagaccataattacctttctcagagccccaccagaagtcgcgaaccaaaccgtcaatcttagcagcaagacggttggagagcttagtggtttgcataacgtacataggaagggacagacctaccgacttgatcagcgttgcccttcccgattttgaaagagtcttagctttccagccatgtaatttcgaggtcaggttatccaaaatgaagttgaagtctgcatccttttgtctagatctgaaaagagggagacctagatacttgacgttgccttccggcgatcctatacccaataatgccttgatccctagtttcatgctgttaggggtattcttactaaagaaaatggaagtcttcattttatttaccttctgactagaccaagagcaaaatttctcaagacaatcccaataacctttggcctcctccaaatttgctttgccaaccagaatgaggtcattagcgaagaagatatgggatatgatagggcccccctactcagcctgataccgctaatagatctcttcgcttgggcatcttccagaagcctagacaaaattttggaggtagggagaaagagggtccccttgacgaagaccacgcgaagggataatctttccgaaggggcctccgttaaggcaaatgttaagcgaggtggttgagatacattgagaaatctaatttcgaaattctaggggcaccccaaagcaatcaattacctgatcaataaatctccaactcatcctatcgtaagctttcatgaggtcaatctttatagcaaacagaccttctttgccttttttcctattaaacgagtggattatttcctgggcaatcacattattatcctgaatattcctcccaggcacaaaggcagcttgagttgggcaaataagtttaggtaacactggtttgattctgttagcgatgatcttgaatatgaccttataaacgacatggcaaagagagattggtcggaaatggctcggtctcttagggttctaaaccttgggaattaggacaatattagtagcattgacgcctttgtgcatacgccctgagtggaagaaatccaagacagcttcgcaaaaatcattctcaacagattcccaatagtgtttaaagaacaaaacagacattccatcaagacccggcgctttgttattactcatggaaaagagggtagtcttaatttcctcgtgggagggttttctaatgagttcggcctggtcttccaaagatattctatcctggattaattcttacaattcatctctataccgttctccagccaagtaaagattccttggaagaactccatgaattcatcgcctatttcctgtcttttagtgatccacatattatctttattgagaatacactcaatggcgtttcttctaccatggaagcagttagaaagaagaatttggagcacttatcaccttctttcagccaagagactctggccctttgtttccagtacaagtctttcctctctagctaaagtttgctattttttttctttttcttttttgatgcaagtgtgccttcaaaagaaaagaaggccagctaaactttgctttgtttcttcaaaagatattgtcccttctccatccttcaatttatatgctatatatcattataataataagacttaaacacacgtttctccatctcattttgttcttagcttgaactcttccacgttattatacaaaaatatatacccatatattctattgatgtacaaatatatattttatttttaataaatagcggctaataaatctcttaaatttcactttctataataattaacttaattttttttttcgactaaacttgcccaactaatttttttgtttgtaaatttgcttttccattccacaacttttattatttgccaagctaaatataaatgttgttaattcagaattttattaatgacacttgataattaataatttatataatgaatacttaataaaaatatatactttattatgaattctaatataagagataaaaatatttacataattttgtagttaaaatctacaaatgacttatacttttaatgacacttgcttttccagtttttcaattcaatacttattttaatttttttattataatatttacagtataattatttttgtttaacaagtatatttttgaagaatagatatgaatgtgaagaaaaaaaaaatattaagagaattttttttaaaaaagaattaagagtacttttaaatattaaaaatatatatttcatgtaaaataaaaatatttaaatgagcgtaatatttatgcaaataaaactcttcaatttttcatgctaatattgaagaaacaatttaataatttttagattctggtcattctttttttcttctttatttctcatgattaacacacctctttcccagtgttttttttttcttaaaaaaatctatatattattatagatgtatcacgcaaaaatgccgaatatttcatattagtataaatggtgatgtattacaataactacatctaattgttgagtagtcttctctacaaactaattttgcttgcacataaaacacatgagaaatgccaaaggatatcttaaatgtcaaatactacaaaatttaatatttggtcacacacacctttttatttaataaataatataaaaaaatcactaaccactcgcaacatccctcatcaatattatagcaatggccaaaacacatgcaagaacaaaaaaaaaataaaaaataaaataaataacgtccacataggtagatagatccagatccaattttatatatactttttatttgattttatatgtattttattaaagaatttagtcaatttcggaggttaaatctaatatttatgagtgcatgcatgcttgtaaagttgtaaataataaagaaaagcttccttcattattccttttttatttttttcctgaaattctacattgcttttttcgatttccaaatatataattttaccaaattgtctaaaaggaatcattagcaaacgtgtcccatataaatggtccccaaaacaacattctctcaattaattcacgccaaccatatatattagaatattattattggacactactagtgtctaatacctttaaatatgttacaattagttggtgatattctctaaaaattattatattaaattatataagatcgatacttaaaaaatactagacaccttttaacatttgttgtgtatatatatatagctagcttcttaatatttatgttaagatcattcaaaatctggcccaccacacatatataaatatatatgttttatattcagtcttccatatctcttaatatataaatagagaaccggatcattattattagggcactattccataaccataatcaaaatatgtctgatcagatcaaacatcttcctcttcttctagttctgtttcttataatgttatctctttctcttcctagtttagctcatgatagtgacaatgatgatgaccaattaggtttctcttcaaaaccaaaacattttgttacttattccattaataatcatgataatcatcagaaccacctccaaagttccattagaaaaaggtccggtggcggcagcggcatagtctcaaccagacctcatggtaaatcggcttcatcaccttctgggaaacaaccactttatgatctccctctctacttctgttggactcttct

SEQ ID NO: 60625 - DNA, 2707 bp, Cannabis sativa
taaattataataattaaatgttaaaactaattaataaggacaagtaatatatactaattaatctcatcacctttcttattgtacaccttctagtcttttataactagttttctaatatcaatttttagttagttgatttatgtaactacttataatgatttaattttaaaaatcatctattgaaaaatctcttgtgacatcttattttttttaagtaactaatttttatgtttcaattaatttttgattgatgtaggtgtcttatctgtttgtttcaattttttaatttattatattaggtaactaattaatttatgcatttaattattgttatctaggtcctaaatttaagttttttatttagttatttcaagttactataatttttatgtgttagttctcaatttgggttttttatttctctgtgtcaaacttttaactagttgtttgatgtaattagtttctgccaataaattttataacccatttgtaagaatgtatgtcttattttttttaagagttggtttttatgttttaatttttttagttgattgtaataggtaactggtttctgcatttaattattgattttattattttagtaactgagttctaagtttcaatttttgatttggttgttttaggtaattggtttttgtgttttaatttttaatttgtttgttttaccaaactgatttctctgcgacaaatttttaattgattgtttaatgtaactggtttctccatgtcttatttttaattgtttgtttaatataattggtttcaataatttacgtttattaatgtgttaagaattctcttgtggtatattattttttttatcaaccggtttcttttgtttttacttcaattttttagttcgttgtattaggtaattaatttttgtattaattatttgttgttttgcgcaattgacttctgaatttcaatttttaatttgattatttaagtaactagttttttttttgtgttaatttttatttagttaatttacgtaactagtttctcaatatggtatttttaattagttatttattaataggtcattgttaaaaaaaaaattaacaatatgtcttatttttttaattaactcatttttttgtattcaatttttaatttgttgtttattgtatctggtttctttaattaaattttataagttatttcttaagaatttttatgtggtatgtttttttttttaagcaactgatttttgagtttcaattatttgttgattattttagccatcttattatgtttttatttttatgttttagtcagttgcattaagtaattaatttatgtgtttaattattggttttgttgttttacataactaagttatatgttttaatttttaattttattatttcatgtaaatgattctcgtgtgttagtttaatttggttgcttcacgtaattggtttttctgtgttagagttttaattggttataaaatgtaattggtttctgtgatttaattttacatgtcatttgttattcaatgtgaatgaattctgtgatataatttttgcaagtcatttgttaaaaattcatttgtggtatgtcttattttctttttaaagtgactagtctttgtgttttaatttattattttatgtgttttatgtctatagttcaattttttagttatttgtattaagtaattggtttttgtgtttaattgttgttttgttgttttatataagtgatttctaagttttagattttgatttggttaattaattcagaaaactgatttttatatatactagtttttaatttgttgttttacgtaattagtttttatattttaaatttttaattagttatttgatataatcaattcctgtaatttaatttataagtaattgtaaaaattcttcaacaatatattttattttatattttattatatattttttttcattgttttaggtgtcttatgtttgtttacatttttagttgattgcaataggtaactagtttctatatttaattgttattttcgttattttagataactagttctaaattttagtttaattaacataatttttttttttttgtgtgtcatatattttaaatagtttatatataaacataactggtttctttgtgtcagattacaacgtctaactttagtgacaatttcgatgtctaactcctgtgacaactctaatgtctaatgctagtgacttttcagtaatgacaacaactccgacaaattttttaataatttttccgataacaataataatttcgatgtatattcttattctatattctatttttttccgactaatattttgttttagtatatatgctcaatttaggaatatatatacccaatgtttgtgttagaccatttggttgcaggtcaggatgagttggtaagagctcaactattatttagtacatatttatcgtcatcattatattattgcatagtcaatattttcatttgaccaaactaacttgtacatgtgtggctaataatctatatatttatgctattatgttatttttcattgatttattaaaatggataataataataattaaagattgcttaaactaattaaaactacttatacataatgagaaatataacaaaattggtattacagatcaaaccaaaaaataaatataagtacacatatttttttttgataaaatgtgtacg

SEQ ID NO: 60626 - DNA, 1071 bp, Cannabis sativa
tgattttgttactaatattttcttgttaatataggagttagtccattacttttaaattagtattttgtgatataaataaaaggattatttataaattttatctttctataaaggttaaagtatgatcttttaccactcaaattataaatattacatacctgctcggctaaggctcgagtcgtgacagtaactattgaattaataatctaattattttaaatgcgtgagccgtatatgtatatcattattgtgaaacatgggcctctcattaatatgcaagtatttttccaatatgtgtaaaaattataatttgtttgttttgaaataaatgtagcatttatgacttagcattactctacatttattatggctttatcctaaacccaatctttccctttcggatgcgatgagttggaaaatcttacaccattgacttatcaatcgatgcttgcttcgaggttgtaatatgtggaaactggtaaggaacacaatgccacgaaatcaagagtaacatgccccggtttttttgtgttttttttaggggggtaacatgtataaatagataaatcagaaatttaaataaaaaaaactttgaataaaaaaagttataactaatttatttcctaatatcaacgtcatcaaaatcttatctggagtgaaaaaagtatttaagtgtaatttttttttttttgttgagaaactgatttgtaacattaaaggatgagaaaaagagaccaaataatttgacaataattttttttttaagaaatttcaatagttacattaaatttataagtctcataggtaaatttatttttagtcattaaatcactatttaatggttgtaattatttttctaaatgacttttgtcctaatttatgataacatagtatctttctcaaaaaaaaaaaaatggttgtaattattttaaaaattaaaataaataaataaattaataattcataacttgatactttatttatttataaaatcttaattaaaattaattatatttaaaattaaattactaataatcatcaattaacttcttacaatttgttattaaataa

SEQ ID NO: 60627 - DNA, 1607 bp, Cannabis sativa
tcacaagtaactttttgttgtgactaaaagtctcatttagtcacaaaaaattcatgttgtgactaaataattgtcactaaaggtagtagatttttgtagtgtgtgcttactaaaaaatctttggttaaaattattaaaaattaatttacaaagtattttaaatttgtaatattaattatttttttatttttttgtgcatgcagagcaaatgggagcatgagaatgaagatcttgtttttcaattatgaatgatggtggatttcaatatatttaaataactgcaaagtacccataaaaactttgcaccaataaaccaccttgatcactttatatttttctgtattgtattgtataataaattaaaaggctattcgttagtcctcttttgtgcaagaaaggaatctcgaccaccttatcttggtgtaagagtaacttcattttgcactagtacctaataagattgtcattgtttgtgtgccttttagttttatgtatcatgaaataaatgaataagtattgtgtgttttggagtttttcttttcataattttgttccttgcactaaaatgtgatgaggaaacatgttaacttcattaaagcaaaacacaaatccatatacgtactataaatacgtaaataataataaatttaatagaaaaataaagcttaaagtaaaacattgaactacactacttacaatttatatatgttctatcttttaaaatacctcccacatgacagtggctcagctgttttctctatattgcaacattttaactataaattaatgagaatacaattatctcactttaatttgagctgagaaatcaatatatgccttatactaatttttgaatttggtatcagagcaaaaataggctaatctcatggcaaatccaaataatattactccagatcaatagcagctcaaaggctaggaactgttatcttttgaaagaactatccaattacaaatcttcttgcatctataaaagcatttaaaagaaaacaaattcaggtgtcacctgagtgggaactctggcgggtaaccaatactccttttgtactactatagctaggtttcgggtgtcacccattcttgatacattatgatgcttttattaatatatgtattacaaactaaataaaaaattaaaccctaatctaaaaaaactaaaccaattgctttgtggttccgtaaaaatgtaattcaaaaaaattagtaaatatatgtattaaagataattttagatagatttatgtaataaaaaaccctttataattttgaatacacgttttttatgtaattattaattttttttctttgaaataaatacttaatataatggagtctacgtactattattataaatcttctaattaatgttaggtgaagttaattatcccatccacatgttatgagattaataaaaatactacacatgcaagtatttgatatttaatagtaattgagcagtgtagaaacatgctatttaattattcacaaaataataatatgctctatatatatatgggtatgttcttaattggtattacccatgtatcagtattttattcttgaccattggatcaaatatctaatggttg

SEQ ID NO: 60628 - DNA, 1607 bp, Cannabis sativa
ttggtctcaagtggatcctaaatattattgaattattgttatcatatatatatatatatatattctaattatgtataatgagtacactataaatttttaatcaaatgaggggtatgtttgcttagtcttttgaaattagcattcttttaaattatatgaatgatattttcttctttcttcaaattaatagcaaagctatattatatataataataattaaatccctttgatcataatatatacaatactttagttgggtttgagagctagctagcccatcatataaataactctaatctgacaatttgcagtaatcttaatattaatttaattagatccattgatcgatcattattatcttaattatgggatgggtcccaaacatatataataatatagataaactggtagagagctaggtccaaaatacggaattaaatattataactaattaataactgtgaatataaaattgtattaatacaaactatccctatatttacttactaagttatatgcttaactgttgttatttaatatatagttgatgattaaatatctgtgccatatgactgatatatactaaaagtctagtgggacataattattgaaattcgaatctagctatattaacatgtacagtagcttaaacttcggctacagattctgtttagctgcagtttttgcttctaaattaattaagctttaagaaacattttatttacacggcaccgtgctgtatttttcacttaaattaatacctagtatctcagtctctatatacaaatattaaaccaactataaaattttgtactttttttaaaaaaaactttgtacactaattaaatatatattaataattttattagtacaagcaatggttacaattttactgtctcttttaattaactttcatctaattctatacaataacaacacaataatttttaattaatttctttttggaaattttgttataaaaaataagaattgcattttctaaagcaataagctcaaagtttacgtgtgtatatttattctaattacatatatgagaaaaacattatctcgttttctttattcaataataataataataataataataatacaataatattataattatatgaataattgatagcatgatttgagacttgtatgttttaaatagtaactgttttttttcatatacgtcctatttaattcgaatttccagtaataatatatgaatacgatgtgcttaattaaaaaataattggtatattgtaatttaattgataaaaaatagttatagtttatatatagtactgaatgcttattggatggatggtttgaggcttttagcatcatttgatatataagaagtaaactaatgaatgaaatgtaaatatatgaaagaataggttgaagagagatgatgatatattaatgctaagtctacgggaacctctcaatcgtcatgtgtgtgcatgtgtttgttggttgtacgtataagagttcattcaacatttttcatattaccaatttataagcaaatatatttttattattgttatatattttggtcattttcattttagataaatatcatatatttttttttt

SEQ ID NO: 60629 - DNA, 1294 bp, Cannabis sativa
cgtaattaagatgttgccaacatagatgacattcatcagcgctttaagttgtcaatgaaagttggccaatcgaaattaagtcgtcgtgtatggtgggcggagacacttttgttggcgatttactacaccgacaaaagtttcatgaaaatcttagatttcgagggaaacttatacaagagtgcacttaaatgcgctgataaaaaaaattcctaccattattctcaacacttttgctggcgatatattctgtcgaaaaaagtgactttcccacttaaataccatccctcctattggcagtgtttttatggtttttttttaccggtgaaattcataattgcatcaatgttactaacctacactagatttgatgcaaataattttcggtgaaagtaaaagataaagtattacactcctctttttgcaaactttgttatggtggtgcaatttactacatgcataggtataatgaaacttttttggtgtagttaatgaattgcgctaacaaaaattacgtttcttgtagtgtattttaaaaatattaatatttagtctaaaccttcgatcttcagtggtggtagacatcataggtgaagagggaaaagaaagaatagagttcgtgggcatctaagagggaaaatgggaagttggagaagaataggtcttttttgctttttatatattttacttcaccttcaaatttaggcggtgcattctaatgcctcgataaaagtttattcccacctaaattttcaccatatttataccaagagggaaatttactaccaaattgttgtgatctttgtcagtgcaatattgcaccgacaaaagtgattttcctcacgaactaaattcctatgtgtttgaggttaagcttcacacttttttcagtgcaacaacataagtgtgttgacattatttaactttcttggtgacttatgtcgctggcaaagctttctgacctaatttttaaaacgcaatccaccaaaaattatttttaacgtccccatcaaaaatgtcggcaaagctttatttttttttccatcacattttataaaatgtgcctagaaaagttttttttcttgtagtgtatttacatcaattgaattttcatatcaaataataaatcttgtaaaatattgtaaagtatttcctatgtgtctataactttttcttattttataagtacttattaattcaataaataacaaacacaacaaagaatatattgtaagttttcatgtcacataaatttctcataatctattttacaaaaacttacaagttttgaaccctt

SEQ ID NO: 60630 - DNA, 1813 bp, Cannabis sativa
tattttcactttttcaattttaaaaataaaaaactaattaaaaaagtgttaccaaacgatacctttgttaattaaaaaaaaaattaatttcagagtaataaataatattaccttaatcttctcaatatcagaagttgaagaagaagaaagattagcattggaagaagcaaagtaagcctcgggacacctctcaacgacgtcgttttctctacaaaacggcaaccaatgagcaccgaacttagcagcttcaatcaacccaaacagactcaaatctgacccaccgtcatcggaaacataaacggagactttccccgccggataatcaaaacccataaccgaaagcacagtgttcaccacgttcatcggcggttccttgtacggatccgccgtacaaacgaacacatcgatcgccggtaactctttctccgattctttactgatattttggggaaactcattacggtggattggtttcattcgaaacgactgcgttgtgagccatattaggaataaaacgacgtcggataggaataaggctgaggagattttggtatttttagttgtgaagagtgatgatagtgttacagtgtggtgatatagtaatgtcaccgcagctgtggcgtaaaccaccgcaaatattcggtttgggattgtgagtcgggaaagttccggcttgtggagtggtttggtactaaaacgacgtcgtagagtctccatttttaattttttgttgattaataattaaaggaggattttgtgttgttgtatatataagaagattttatatttttggtaagcgtgtgagagtgtgaattactcacgtgtgagatcattggattctaattatattaaaaggagtattctaaattcaatatatatagttgaccgacagtcaaatcttgtcatgtgaattttgagtgagagaggaatatttattatagagcatttttaggatacttatggtgtttaatattaggatgaaatattgtattaacgattttttataatatttattaaaataaaataaataatttctgatattgaattacatcaataacgatatttttctttgttatatagaaaatgctaagaacactttctcaattatcttatatcgatgtcacttttaagtcgtgttaagtatcactaatatcttaataataatttttacaaaactatatatgtacataaaaaagaattgctaaaaaatattattggtgtttattattgttctcagtgtcatactgttattagtgtaactaagtacatcgggttctatataatttaagaaaataatttttagaaaatattgttggtgccacctatagaaaatacttgacaccactagtgccgaatagcaatgttctacacgatataatataagttattgtaataatttttaaatatgtgtaaatttttcagcagcaaatatttttacatagttattttattgcacataaatttttacataatttttttatgtaattattttgttacaatgttcagtttttttattgttatcatttcagagactaatgctgcattcaatgtgtaaaggttaaaacttttgctgctaaaaatgaactaaataggaatttttaccaaaaaaatttaagtgcaacaaaataaaccatataagaattttcatcacttagaaatatacacaaggatctaaatgcaaaaagtgaactacaaaataactttttaccataaatttccccatatccaataataaaattgactcaattaaaatatagatatatattaggttaattattttttttttctttctttaattttttcttttgttttt

SEQ ID NO: 60631 - DNA, 1272 bp, Cannabis sativa
aaattttagcatttccattcaaactcaaaacacatatacctacaaccattcttaagataaataatgcaaaaattagggaacatcctattaaaaccaatcaagacaagatttttggaagttataggtaatttttgcaagaaataactgagggtaaacgtcgtttttggcgagaagcgcttgcctgaaacccaaaatttaactaatattcctttagcgagacctttgtttgtacctccagtcactgttactttttcaccaggtgactaagattttgaaatcatggcctcgaaagctcaaaaatccaagaccccactattaccttcaaggcagagctcattgagtctaaagttagatccatatgagcttatgttggggaggtatgaagtcgcgtggtatcaagtatgagtgaggatgtcgagttaggtctgtcgctctaagagaattcagttgttttcctcctgaacgtgtgattcgagaagaaagttatagtactagcgagccgtctagaataggcgcttggagcctcgaacacataagagatggagcagtagtccctcttaaagaatactacaaaaagttctgcaattacctcgaaatttctcccgtttagctgattccaaattcttacagaattttggccagcttgaaagttttatattaaattctgaagtgggagtgcccaaccccactagaaattttatatttttattctgtaaaagcctgtcccgcgaggaggcaaggagcagggggtttctactttctcgggacccacacaaatgatcaaaggatcattgtgaggttgcccaataagaccgaattcaaggatgacttctattggatgtctggccttgtccatatcaatacaaatacgtttcgcattagacgtaagtattacctcatctcaaaagtttggttttgagttttcaatttaataattgtaggcatttacttattttgtttatgttgtattaacaacgattacgaggaggcccattgtgactccaaaaattgaaagaaaacataggattcttcttggtcttcctttcgatctacgagctactgatttcttattacacgagaacaacttgaagacctccaatcttctcggcagcgactaggatacctacaactttaaagtctcaaaatactcaaactggcagtaggttacagttcctgctgacgaggaagagaaggattatgttgctcactcccactacttaaagaatgtaacccctcgggaagccagagaagttgcctcccgaggtaataatt

SEQ ID NO: 60632 - DNA, 560 bp, Cannabis sativa
ttgccccaagcgcaaagatactccataatctgttttagctgtcattttatcatgcaataatattagtgatgtaatatgctttccgatgtgggacagattagagtaccgccaatatctattgatttaatcccaggtcccaaccttatcaactactacgcacgagaataaaaggcttaattattttaataccacaccagatttcaaacaaaattattgctgacaatagtatctgtagtacgcattaaaagctaatgaaatgaaataaacatgaatcacgacatacatttcttttaccacattttaaaacaaaacaaaaaatatatattataatatatatgacctaattccactattagaaataattgatcttccattgaagggtggatttggtgagacaagacactaatggagtgttaacatgtttatgaaataatataaagcaataaagttaagaattgagataatatatatcatggtgacatcaatataattaatggttccaataatcactctatcactcatatgccatcggtatttctttgttttttttttaaaaaaaa

SEQ ID NO: 60633 - DNA, 1437 bp, Cannabis sativa
tactttgtgaacacccctacttatccccatataccctcctaataaagaactcaaaatctacattaaaatctctcaaccctattcatcgtcccctagctttctcgcaggcgtgcaaaccaatagcaaaccttttttcgcgattcatcaatatccctatatattgttttttttaattctaaaccaaaaaactccattaacttccaagcccttcttcttctcctcttttatctctcaagcgcgtgaaccagcaaaccccccgagccccttttgcgattcatcagcttctttttcagttttgttttacttctaagtgattcacagtaaggtcattatttaatttttcgttttttaatttttcttttacttattattgaatattttttttaaaaaaaatatatttattttttattttgtttaatttttcttttatttattatttaatatttttaaaaaatattattttcgttttgttttgttatgaaacaatggtcaattggtcattattagaataatttatttagaattaatcacactgaaatgatttttagaatcaccaataatattgttggatcatatgttttgttctatacctgttcaaacaagatatggtaataaaaaagtaggaaaattttacaataataagaacactccatttattctcatagcatggtgagaatttattagccattgattatgttaatttttgaagatttaaaatatttattatgtaataatatgtacattatataaattggaaaagtgttttattaattttgtctttttgaaaaaatagaaaggatattaaactccttgtgaagcacatattgagcatgtggcactaaactagcacctcattaataaataaagcaaatagttattcataaaaaaagataactctaataatataatttcttaatgtatttttctataaataattttttctataaaagaaaaatacattattattttttaaaggagttattctatatattatttttttagtaatgtattttttttttttgaaaatacattaatgtatttataatgaaaagaaaattcttacaaaaaaaaaaatatttatatgctaatcaaatatatatatattaaatcattaatctttttttccaattttatagacaaataatgaataatttcttaactcttttgatttttaaaataaaaattatatatattataatattttattaattataatttatcttaaaaaacgttaacatattagtaataattttgtattaatataatatacattttaattaaaaaaaaacttagagtaatgctaaaattgttattgatgtttagtattttcttaggtgtcatattgctattggcacaattaagtatcatgtatcatataatttgattaataatttttagagagtatcactaactaatcataagacttacacacctaga

SEQ ID NO: 60634 - DNA, 803 bp, Cannabis sativa
aaggaatagcaaagtgtcagcacatgtcatcaattatattccacctcatcattggcacataatatcacaatgaatattccatctgcaataccgttacaccagctgcctatatcgtactaggaaatctttctgttttgatttatgcaattgtaatgtgacacctgttgtattgcctatggttgatattgttgtatcttgtatccaactttgctataaattgaatactctgcctcagtcttatttgagctgagttttatatatcttatacaccctaaaatctttcttggtatcagagccgtacacggcctccgcccatggaaacacctgaaaaaggtgagtctctgactatgagctctactgggaataatcccacggcaacagggaacacctctggtagttccactcagctcccaacacctattctcagcattttagtaccctaagccagcccttttcactaaagcttgacaggaacaatttcactttgtggaaaactatggtttccaccatagtcagaggccataggctcgatgggttcttaaatggaaccaaaacctgtccgcttgagcttcttcctacaggtaaaaacaaagaaagtgttgagatatttgctgtcaatccagaatttgagcattggatcattaatgatcagctccttatggggtggctctacagctccatgaccgaaaccattgtcacagaggtcatgggttctactacagctgcagagctatggcgtgctcttgaaaatctgtatggtgcctattctaaggcaaaactggatgatacacgaactttgattc

SEQ ID NO: 60635 - DNA, 933 bp, Cannabis sativa
  modified_base (26)..(40): a, c, t, g, unknown or other
tatattaataagtaaatctaattatnnnnnnnnnnnnnnnatttagggcataaaacacaacaaaataacatacgttgcttccaattggctagtgagaaaattataattcttggtataaaaaatttctccttctcgaaaggttacgacctgatatgagttaaaagaacaatacaatcttatccagggatttaaaaataaatgaaatccatattcaaacccatctcatcttgtgaaatcgcaatatgggatgggatcatatagaatgtaaaaacaagtgagctatgaagctatttaaaacagatgtcttctagaaatatcaattttttttcttcacaaaatgcaattcaaaaaaaaaaaaaaaaaaacagcagttttgctcgagcaaaaaaagaaattctaagtcaagcaaacatacatttgggcaattataaataagaaaataataataaaaaaaaataagactactaagaatagtctcagggttgaaatcaaatagaattttcaccttcagaacgagaaatcggcgattttcaagtcgtgttatcgtatttgacccattttatcggccctatagaaagatcgcgttatgtagctgatactggtgtaagtggtttgttgtccagtgaataactaggtgaggattggagactttgtgatggtatagatgttcattcctgcagtgccacaatttccacaacaaacaaagaaaaaactaaagatctctagtggataaaagattagaaacaagatgtaaaatatcaacaatagataacaggttatatttagtagtatattcataaaaggcgattagtttccataccttctagacataaattttatttatcaaaggaaaaatttgaactatttcataaaagataaaggccaaggaaataattctttaggattaagagtgagaggtcttaggtatgcttt

SEQ ID NO: 60636 - DNA, 800 bp, Cannabis sativa
tgattgtcaacttgggcactaggcacaatcctaggtgttaacctgggcgctgggccttgtttctagggactcgagtttgttggtttcctccctgagtttacttgaatctccattatctctaatgacagtgaagatgttcgaagcactttttgctgaactgatttggaaacagcccaggttgacaaaatgtcaacctgggctcagggcgcagtcctaagtgtcaacttgggcattgggtccctattctacccctttggaagttccgcttggtccccaaaactagttaattctcaatattttatgaagacaaagatgatgctcgaaataattctgggaaaagtccattttttctggcccaatttgatagattgtcaactggatgcagggccagccccaagtgtcaacctgggcgctaggccctattttttccgcacaaacttgttatttttccttcggaaggacttgttctacatttttgatgaagataaattcaatgcaaaaaaaaatcttctgtctgacacttggaaggcacccatattgacaaattgtcaacctgggcgttgggtgctcggggtggcccccccttgggtgctcaaaaaccaacttgctccaaatcttattttgatgcctcaaatatgtccatgatatgtttagttgatgtcccaatgcaagttttggccactttgaactaagaaagtcccgaaaccctagttgaggatgtcaactttggcgccaggtgaaaccctaagtgcccaggttggttttcaggttgtaggttcgtgtaattttagctcccagac

SEQ ID NO: 60637 - DNA, 760 bp, Cannabis sativa
  modified_base (388)..(389): a, c, t, g, unknown or other
ggagttgctaaaaccttagttataatacaagaacacttcttttggccccacatgaaaagagatgttgagcgaatttgtggtagatgtgtaacttgtaagcaagctaaattaagggttcagccaaatggtctttacacacccctacctattccaagttcgccatgggttgatatctcaatggattttgtgttgggtttacctaagagtaaacgtctgagagactcgatttttgtggtggtagatagattttctaagattgctcattttatccaatgtcataaaactgatgatgcttctaatgttgcaaatttgttttccagggagattgtgagattacatggtatgcctagaaccattgtatccgatagggatgctaagttcctaagtnncttttggaaaacattgtggggaaaacttgtgacaaaactttagttttctactacttatcatcctcaaacagatggtcaaacagaagtagttagtagaactttatccttatttgctttattatattacactcgtatcaaactacttgttgcttacaaattagactcattgttgttggctaaaagcaatgtcaacattttggtgcttcattgagagctgaactcaaggatcgctttttatctcaaatctaatcacaagtacgatggtggtacagatgcgtagggtcgtggttgatccggtgaatccacaggcggtggatcatgcactgtagaacctagggaacacaagggttccgccaaccgtaaatcccaga

SEQ ID NO: 60638 - DNA, 840 bp, Cannabis sativa
gtgtaacctggtgtcctaggctctaggttagatatcaaatatctgtgtatatcaacactcgtaactctaaattagttgatgggatactctgctttgacataacaaccatgtatcttagttctcgactcgacagtagaaacttcattatgatattatactgacgaggatgtaaatcatgttatgaaatatacttttcttatttatttgcaaattcaatgatgctaattttcccgttttttatttttaagatgcggacttatattgttctaacttgaaaatgccccaccatatgcctttactttaaagttgtacatttgacttgggccttttggtatgacatgaaactggtatgagcacgacatgtcacgacacgaataaatatgggtttgggcatgagaggaaaaatatggacttaagtggctcgacacagcaaacatataagtatgaatttgttaatataaaaacacgacacataagcaaaaagaaaaacacgatttattttttttttttttttttgtataactgttttttaaaatgtttaaataatatattttccaaaatgtttaaactatttgtaaaaaaaaaaaaaattaaaaaaatcttaaattccgtagtgactatgaagttatttttttaacaaaacaattaaaaattcgtttgttcaaacaatccattgtccctttaaaaaaaaaatccatgtatgctttaaaattagaagttaatttgaaaaatataaaaaaaattacgaatattccataatcctgcgatgaaattgaaaagttaatggctcaattctggtggaagactactggtagtaaaggcaacggtattatttggatg

SEQ ID NO: 60639 - DNA, 1001 bp, Cannabis sativa
tttttaatcttactccaagggttccttaactccaaaacaccttgaaataattttccgaagcttcccaaaaatccaaaacacccctcttttgtcttaaagaattccttcaggctaattagacttcttgtagccaagtttaacttttcttgagttataagtagcctaagttattgaatttgagatggctagggttaagagaagcagaagattacttgatgaatatgattcccatgttgctcagttcattagagctgagctaaaagtgcataagtctaagaacttggacaatgctactggtggaaaagtgatggcaactgtgcttctcaaagttgccattgagagtgatgatccaatatattgagcctttaagcttaggtcccttgtgtctagtacccttatagagcttcaagatcaaaccatttgagatgactattgcctcccaaaaactgttgtttgaaagccttggcatggtgctcccaagggttcccaaaatacttgttgtagtgcctggtcaagattccatatgaatgcaggttcttacttacccttgcatcaatggttcatatccatagctgacttctttggtgtatgcccctacaaaataaatcccaatggctataggattttgtccaccttcttcatcttttaccgtcttagaactggtcatgtcccgactcctcatgagataaactttctctatgacttaaagaggagtccaggctggattaaggcttttaccacttccaccaattcaaaccttttataaaaaacatgacaaagagtaactgacctttacttttaagagtatatctatactcttgttcttccatcgagacgcatcaccttccaaaaagctgacactttcaaaagacatgctcctctggttgacatgaaaaggagagctaaagccatgttaattgacatcccaacatgggagagagatgtctgaactctctttaatactaaaaatctttggaagtttgggttgattatgtcatgcc

SEQ ID NO: 60640 - DNA, 4664 bp, Cannabis sativa
ttctttcatctgtgtatgacttagcaacatgattcattatggtcatatcattgattcattatggtctattaaaaacttaaggaaccatttaatcccccacaattactatatatgttctctaatcaatcaatcacgtatttctaatccaatgtaattgtaattgaaattgaaatcaatttgaaatcacctcaatgtcatgagaattttgagtttgtgtagctcctccatgactttcttctcgactgtgtggattgagttgggaagcttctgctggggtctcaagtaataatcccctgattcttcttcactcatctgattaacaacatcaagaaaaatatttagaactttatcaacagaggtcgaacaagtctattctctgtacgtgaagaagtggtagcgtaaacattgttgtggaattgccaagctcttctcctttccatggcctggaataaaggagttccaaaagaatcgcgattgtgatggaaaccagatttaagtagcctctgtccttaggtttcggccggagatggtggtccaatcagaatgcgattgcgatggaaactctaatctctctgtctcaagtctcaacggacagattttagagatagaaaagaaactattagtttgtgattaaaaaactgtattttctaagagggaaagttaactctatatgcatttattgggtcaaaatttatcctctaattatttgtgtatcaatattatttaattacgtcaatttttcattgagcccaaaatcactcctcccattgttcaactcattctctccctccattctccctctctcttcaagagaaccgtactaccgcgaccactaccaccatccaagactactgccgccatccaagactactaccaccatccaacaccactcgacccactagaaacccaatcggactaaccctctcgactccatttcaatctgtatgagcccacgccaatctcgttcctcaacagcgaacgaagagaccaccgccatgaatggagagacctatatgagtttattgatttagaattaaaatatagacgaatctttgttatctatgagtttatgttagatttagaatgttgagtttggtcgaatctgcgttttgggcagaaaataagttttacgccaggtttgatgcctttctgttgttgaaatgagtgaaggttgaagacataggtccgatgtaggctcgatgtaggtctgatagtggcccgatgctatccatttatttattttttatgttattattgtacacaaaaatgggtaccatcggacctacgtctacaacctttactaattctaacaatagaaaggcatagagttgcatcggaccagtattgcaccatatatatagtgcatatttgagtagcatcgagccactgtttaggggtgagcaaaaaatcaaagaaattgacaaaaccgagtacaccgaccgtccgaacaccgaaaaaactaacaccaaaaaaattgaaaaaccgaaaaaacctccttcgattaaaactgcttttgcacggtcggttttagtgtcaatggcaaaccaaccaattaaactgcgaaccgaccaaacatatatattatcactatacatatataatataattatttttgtacatatttaatatacaattttattaaactagttttacttcttatctttttatttaaagtcttagttattcattgctttattttattataatttgatgtatttacgtattatatagacattcataaaataatacgagtttttcaatataactcattaccatattagtagcacaaataatttaagcaaatttaaaaaagtttattttacattatttatttaactaagaaagtttctgttcttaaattatatgatatttgatacaatactctaatttttttagtttttaaataattatagcaaatttaaagactcttttttttaaaaaaataaagctcggtttggtcggtttaaaacgaccaaaccatgtattaaaaaaatcagtttttttttttatatttatataatgctcggtcggttttcgaattataaccatgaaaatcgaaaactgaattttgaattttttttgtgtaaaaaatcgactgttgctcacccataccactattgaacctacatcttcagtctgtgctcatttcaacaacaaaaggcgtcagacttgcatcgaaccaccatcagaccttcatctcttacctccagattatattactatcgtacccactatcgtaccccatcgtattaatcactacaattttcttttgagtatatattgcaacaattatatacaacacacaaattttctaactttctttttgttgccattcgagttgaaaattagaaaaatatttaattatcttttattttttcttttttagtcctctaagtgttaaaacttcatataatattttttttttaatttataaaattttatgcgatatcttcttttaatatcaaaactttatgattttttttttttaaaaaaaattcttattattttgttttcaatttcatgatgttactaatattatttttaatatattttattaataagttgagtttaatttttatactttaaaattttatacaatattttatttaaattactttgatgcttttattttatctctgatcattatgtattaaacattgtttatctttaacttatatataacatttataaattaaaatatacataacttaaaataaaactatgcatatgtatcttgcacgtaacatttatataaattaaaatttaaaagccaaaaaaaatgtaatcgtaaacctgacaataacaaaaactacgtatgagttctaatagaccaagatgaccataatgatagtcatggctaccaattaattcactaataatcatatagtgccaaaaggagaatgttgagcttttgacataatttcctcaatacttttgatataatcttgcgcttcaatatcacacacatataaatgacaatactagttgtttctattttttataatatttgtttttattttcactaaaaatattatagacttttgcaacctaacttttctactgaagaaaatttaattaatacaaatttacaataaatagaaaactctcactatattactaggtaggtctcatgtaaagcaagtctccctgtaaaccaaagaaactaacatattattaggcaagtctccatgtaaaccaaagaaactaacatattattaggcaagtctccatgacgaatcaattcctagagaaaatcatatcaagaaaaacatttaccaagatctctacaagaatgcaagtttattaaaaagctaaaggaacaatacaccccttaaccttatctaccaaaatttgctctaatttgtagagcttcaacaatggttccataccacaaatgtggctcattcatgaatgcgcacagttacggaaacaaatggcggtcagaaatggagtgagacatttgggcagaagatcgaggcaccttgattccgacatgtctcatttggatatgtaattgtgttgttgaacaggttgtctcgatggaagcgagataaaggtgaaacattgaagaataaaaataccaacgtacaaagagaaagaaaataaatgagctcgtagaccaaaagtctctgaatccttctttcatcatcttccgcacaatatccaactagcttcacaagatttggatgcttcacaacacctaaaaaattcactttatttatacattctttatgccctggacactagaatgcaaatacatggtaaatttcattagataacttcaagcacctgacaatggcattccaaaagcaacattgatcttctaaaacaaaatccatttcaacaaatcaaagatttcaatagctattttttatcggttgaacatgtacaaaatgggttccttcttaattgaacccttgaacaacatgatgagttctagaattgcaaattagtgaacgttttttttttctttttataaaactttttcttaggactataaaacacttccaacacattattcagatttgtcaacaagctactgcaaatccaagattcttgaaacagaccaaacaatgaaacaatacaaacataaatggatttgtatatacatcgtgccaaaaagaaaagaaatgaggaaagacatgcctggaagccactacgattcaactatttgatcgcaacatcaatcttacagggaagggcatcttcgttgtcgtcctgtcgtcaatctcaacatccgaccccgaaaccttaacaactcctccgtaaacgcagccaaaacctccctccccaaacaacaatgccatactgaaccctctggtggccgatttgagctcggagaacgtggacaccctcagatcattggctctacacagactcaggaactcgtaaacaccaatggagtcagaaaagtccttggagtcggaatcgaactcggagcggcgattactgtcaaggctgctggaggcaacacttagcgagcgagcccaagacaccttggagcgagagtttgctaatgaagatggtgataatgctggagtttgccaatgaagatggtgataatgctggagtttatcgagctctgtttttttttttttctgaggagatagtgtgagagagagcaagaagccgtataattggtaaagaaatatatatttgtgcat

SEQ ID NO: 60641 - DNA, 698 bp, Cannabis sativa
ttccatctctgtttcacgatcaacctgactttacatgaataattttggaagatttgatctgcgaatttaagtatatgtaacctttatatttgtatatataattatgaaagaaagagaagaagaattttgtgaaatctcatcttttattctctgttctattcttaattaatacagaaatttatgaaagcattggattaaaccaaaattttgagttagtgttacctccaaattctgtaataaattttcaaatactataaatatgaatattatatgttgttaggaattaatttatattcggtaatataaataataataatttattttactcagctaaattagattatgtagtttacaaaattaattctataataataatattttaattataatattattattattttttttgtactgtatagtatatatgtataactacacagcaatataaaattagctcaaataataataataaaaataatcattgaaaaaatattaccttcaaataaaatttattttttaatattatttgttatcgttaattactaaatatttttgtaatattatttatttgagtaattatagcaaatctttctaactaaaattgatttttatttttgtaaaaaaagttgcatatattttacctacccttaaataaaagaaaatcattaaaattatagtcgtattattatactctttta

SEQ ID NO: 60642 - DNA, 788 bp, Cannabis sativa
ttattttttttcgtcattttctgtttagatcattgcaggtcttctttttagttgattttgttagaattaatggttgtattaccctcattttggttttattctggttgtgttgctgatttgaacgatgtaggtatgttcatcttcatcgttcgttccgtgcggctgaaggtttagagcatgtggtttttttgtaaatatttgggtgtaggctgtataaatgtttaatgggccgacccatagtatttttgtaattttttttttcttttttgtattttcctgttttttttccaaatatatatgtgtaattattttcctcacaaacatacgaagtagtccatgcatcagttcagcaacaaaaaaataaatataaattaagacaagcataaggttgtggtgtggcataataggatcctataatatcaaaacacttgtttggaatggcaggcaactcttatttacagcctaaatttctcccttatactctatctgactactgatcgtttatgccaatacaaaaacaaaatatgaaaatggtgagtttaatttacttataatttaatcccaaatccactctatactttttccattacttataatttctatatgaattattatttaattttatttagagatatatacatatattacgtgatacgaattagtaaacattattattgttattattatttatttttattttttttgggtaaataagatcattattgtatttcaacaaaaaaccaaaacaactggctgcactattattaattttttattttatgtttaat

SEQ ID NO: 60643 - DNA, 1057 bp, Cannabis sativa
taaaataaaataaaataaatcacacagtttattaataattatttgattataaactattacacacacaaaaataaccaactataattttaaaaataactaagaaaattagatcatgatttttttgcaggtatcaaacgtggtgaaagctatgatgggctaacgtcatcgaaaggaaaactaattattttaaaaagggtatgataaaacggcataattttgatttatattagacccaccatatttttagaattaaattgtaatttacgtacttgggtgtaaattaccctacttttctataggtggtggaacctctctcctattcctctctctctatatatattttggctatgctggtgagtggtgactgagagtacgcccacactagtgtaatatgtaaatccaaaatcaaaatccaaattctttattatactgcacaaaaaagggtcattccacatatccaatctaattgagagccaaattgtcatacttactaccttcacatgatttcatataattaatacactcaaacccaatctaagcattatcatcaaagtaataagtcttctctcatcaaaacaacaaaaaaaaaaaaatcttttaaagcataaaaacacttcgcccctctcgatcactaacctttctacccacctgcttcattacatagttgattttttttaaattaaggtgtggtttgctaagatttttttaatcagtttatttttttaaaattgaaaaagtaaaaatattttttaaaaacatgttctataaaactatttttactttttaattttttaattgaaaatcaaaatttgaataacaaaaaaaaaaaaaaaacactttcaatatttgttaaacaatttttttttcttaatcaatatattggacttcgatcagacccgaacccaaatctccctcacggccctggtgctgagcccgacctctgatttgaactcgaatccaaccacgaatttagacccgacgtaaataaaatcaaaaaataaaaatgaaaataaattttacagagcacattttctgttttcaaaattgaaaaacaaaa

SEQ ID NO: 60644 - DNA, 650 bp, Cannabis sativa
agaataaaccaaagaaactcaacttgccattaaagaccaaagttaaggttttatgctcaaacttgcacaaaacctaaatcaaccaaccaaaccagctgctagaacccttaaccaagtcaaactaagcctaaaattcgatccctaagcatctcaaaccataacagccactaattttaaaaattacaagttcaaactaaacttaaaagcttcaaaacataaaactatggttctagggttacctttgattgctcctccttgaatccttagcttaaatccagaaaattaatggtgaaaaaaggtgatctcctctggtttttgccccagccgaaagagagaaagagagagagggttctatattttggtttttcttcaattttccttaactttgtttcaaatgaaaagggattgattaattaatcccttgctgaaaatactaattaccatgtgccatctaattaggcagccacctaatcattttaataataaatgactaaaataccccttagacttaaaactagggtatttcttaagctaggggtaaaatggtcaaattccataacccctcttaattccgatattttatcttctataaaatatttcccactaagaaataaggttataaacttatccatgtgatcaaactagccatc

SEQ ID NO: 60645 - DNA, 816 bp, Cannabis sativa
acatacttttgtaagtaggagtcattctttttgatcaaaaactcaatctcccacatcaaattattacattcatttctgtcatggttgtagtccgcatgaaagcaacaaaacttagttgtatcccttttgcttatatccttgttcatgggagatggtttcttgtacgacaccatagaatgggtggttgcatagattgtttctatgtcatctgttagaactaagaaagcagtaaatttagaggcattttccccatgggatgctgttcagcgttgcctgtgaacttgcctttctttccattacccttcctattgccgttattggagcttttccaaattgaatttgaattgttgggacattgtggattctaggtagatgtaccggttgttgcggtatgctgttgatttttcttttgcctgatagtatccacatgccgcactccttcctcgagcttaataaatccatatgcttgttccaaaaattcagccattgatcccatagtcaatctttttatgtccttccataattctccgaaaggctcaatgctcctgagtatttctgctaatcttccatcttcagtcagccctctaaccttcgttactttggtcagaaacctgctaatgtaggccaggagaggttctcctggaatttgcttcacttttaccaggttttccaactgtgagggaagttgacaggaggaagaaaactttgcatggaactctgaggagaaagcaatccttgaattaaactttcctagaggcaatttgaaaaaccattactaggtggcctttgtgagtctggccaaaaagattctgcatc

SEQ ID NO: 60646 - DNA, 657 bp, Cannabis sativa
gtatcttagggattaggtgaatataaccttttatccttctttgattgatgtgagtcttcataatggagtcgtcactagactcgtcgattatcgtgtaatcactgtaaaagaggcttacgccatctgccaaatcctcttttggagttttgatacgcttcccccatgcagcattaaatgcgaagtgacttctcgaatgatctcattttctcccggagatgcattgttacatttccaacctcccggagagtaaaggcgtattttatgctcctctccggaaggctcactacgtatgatgcacttctctatctatgacttaaccgatttttgtgagtgggtgccctttgagatctacgtgtcgcacgcagtcactgccacgtattttgggaaaaatctgaggcaataatacagatgaaaaaaattgcaaaatttaccagttacaaattatttataagatctattggcaattggactataattaaaattatattattggttctgtcaacaaattaatcgtagcaatttagatcaaataaataataggtttgtaaaaaaaatgaataaataattaaatatacaaacataacaaacatgtaactgataactagaaagtaggttaagatattttaattttaaaaaaatatttaaaatatatcttaa

SEQ ID NO: 60647 - DNA, 1016 bp, Cannabis sativa
atggagcaagaacactgaaatcgatgttaaaaaaataaattatgaaaaacaaccgtaaaacaatgctaaaacaaataaaaaaaactaaagaataaacacagtatattgcaatatataacttataaaaatacacagtaaaaaaaataaaaaataccgcctgtcagtatttttgtaaaaaaatagcaaaagtcagtataccatgtaaattttccatttatatatatgggctatttacaaaaatatgggaaaataaagataagttttgatatatatggcataaaaacttaagtacactaaatatgacattttttacaaaaaacttacaaatatggtaaaatttcatgaggaatgtcataaaaaaactttaaatttgtgtttatttatatttaatttttcctttctaaaaaattaaaaaaacgaaaataaataaaaaataatctcaactgtagatgttgttgttatacccgaaatttagttggaggacacgtgttaaggtaaaaagaatgtgaatcggtgcaatatctttttatggaataactcattaattatgcaagtatcagagtatatttgtaacccactgactgtaaggtcttaggcgaggaatcaatgtacaaactgacacttagtgtattgagaaaccatatatcgctaaaggtgagtagcgaggcacaggagaaaagtaacacataccttagcttgcaatgaccctctgagttcagaagtttatccttccagactcataatacccatatgcaccaaccattttccatttgttcctacagacttcaagcctcaaccggagtttgaaacgatggattctagggctgaggagcttccgaccaatccaaactaggggaaccccgtagcttgccatggccaatcctcacaagtgatcccagagggtataggtcttgtgggcgatctcaaagatcctcttcaggttgatgaaggattccagaggaagattggcatggtttcaggtgatattttctgttattgcttttcctaatatttgg

SEQ ID NO: 60648 - DNA, 1159 bp, Cannabis sativa
  modified_base (1099)..(1118): a, c, t, g, unknown or other
ataatcaaaattttgtatgtaaaatataatttatataaaattgagtgggtcagccccacatgactaacttaaaatttaaatacttaaattgctatttattaaaatgagaaatacttaaagacattagtaatgtctagcaccttttaatgtgtaatattgttattagtataattaagtattaaatttcatataatttaatgttataatttttacggagtatcactgaccaaaaataaaacattacctctagatattactaaacaacactcgtacttaatagcaatattcttcctaaattatatttttagtccctaacatttatgatttaatagctatgctcttacaagattctatttttggtccctaacatttatgatttatacactttaagcctcaaacatttatttagatattaatttattactattatctttaaacaaagccaccaatatttaatctttgccacttttctttgttttaaattttatttttgttggtgcttaataaagaacaaatactttggttggtagttaccatttggcatttgacccaatattttttttttaaataattgttttttttttttgacaatttttaaataattgtttttaactaaagaaaaaccaaaaaaaaaaaaagtgcaagtttaatgagtggtagttaacctcgttttgtcgaatacaaactttttaatgtctctatcttagcatgaaatctatcaaaatatattattttaataatcatgtcacatgtgtcacatgtatgttttaaactacatttaaaaatagcacattatatgacaattactacaagcatttatgaggtaatagtctttactttaggcaatttatactttaatgaaatttcgatttatatatataaaaattaaagtcattcatgattaataatgtagtaatttataattggtagtggactatttttaaactagaataatttattgtctaactgaatgttacattttaccaaatataaaggttaattataattttttttttctgaactttgacatgtattaaattataccctatgaacttaataagattgttaaaaatatccccttaactattgagattgttgnnnnnnnnnnnnnnnnnnnnatttcatttaattttattatttcagtgattgtttatgtact

SEQ ID NO: 60649 - DNA, 1299 bp, Cannabis sativa
ttttgacatgcatttgatgtgactcgattatgatcgaggtaatggtatgaaacgattattatcgttgtgactcgattatgatcgagtaaaagatacggtcattaccattatgaatagttactcttgaaaccgcggttaggtttcttacttatcgttcgctttatcgggcaacgatagtgacatattcagctagtagttaacgagtggtaagatggggtactttgtaaagtacccggactgtatgtttatgatattgtgttatcgtgtaatcatattgatatgagatttatttaacagttattatttatttaacttttcttgctgagtctctgtgactcacgggtgctttatggtgcaggtaaagggaagagaaaggttgagcagccatgagtttgtggtcatagcagcgatgtacatatcagccgcagcggcatgacctcgtgaacaggatgctctattttgaaaatattttgggattacaaagtttatgttgtaaaagcactagtgaaccagtttatgaatattttgaaaacagggggaccccgtagttaatatcacttatcttatttaaattattattttttatatatttttaattttaactatcaaaaatttaattacccacacttttagtataattatatagtatataaaataagaattttattaaaacgcacacacgtggcgttcctgtgatcagggcctgaacccagtcctagacccaaacctagacccgggcccgaacgaacccagtccagtcctagacccaaacaaacctggacccgaacccgtaccctatgacttaaaaatggaaccgaaaccggaagtagacagggactcgagaacgggactagaaccaggacttgggcctagacctagaaccgtaactggacctagacgtagacctggaaccgtaacgagactaggaccggaactctaaccaagacctagacccgaactgggacccagacccgaatcccaacccaaacttggacacggtacccaaacctagacccgaactcagacccaaacatggaaaaatactcgggacagagaactggggccaggacctagaactgcaccccaccctcagtcccgaacaaaaactcggaccaggactcgggacctgaaccagaaccaaattgagacaaatgataaggatccagatctggaactcaggccaggtcccgaacccagaacaagaccctaacccggaccctgacccagacccaggacccaaaatttgaatttgaagaaaaatcaccaggccaggaccctcgaacaagactaagaccgtga

SEQ ID NO: 60650 - DNA, 621 bp, Cannabis sativa
tgattaatttcccaaaaataaaattatgaagaatgaaaatgtaacaattgattttttatttattacttccaatttttccacttttgggagcgaaagtagtgtagtggcaagaaaattgatacctgcgaaagaaataagaagtggtggtaactggtaaatacgacgtcgttggagtggtaagttgaagaatttgagttgagatgctcagattacaatcctggtctcggttgcatgggatcattcacgaataagagagtttcatattcagctccggttgttattgagtttttgttaacattggccaaactactaaacagcttgggttggtgaaagagaaacttttccaatgactttgatacccctaatggttctattaattacgattgtgccatttatcagttttctgctgccgacatcttacgtgcttggtggttgtacatcaacttttttaaaccgtactacccaaataatccgttcaaaccaaataaaaataacccaacaaagaaatataaaccatataaaaatgtgaggaatgttagttacaaccttctattataatctctttgaaattacatgttttttttttttttttataactcgttatagttacagtatcatccc

SEQ ID NO: 60651 - DNA, 1266 bp, Cannabis sativa
ttttcagtaactttttccgacgacagtgacttttccggcacctgtgactttttcagtgatttttccggtgtcagtgactttttccggcgtcgatgacttatctggtgccgatgactttttcgacagaacttattattgtttacaaatatggaatttccatcttattttacaaaaatatggcataaaaaaacccatataaatataaaaaaaagaaaaaaaaaaaacaaaaaacccataaccctttagcattatttatttatgccataaaaaagtaaactctcataattttccatatctagtgtcatttctacatacctaaatttaactttcgattgtcaataaatacttaagtttaagtttttgcggtaataatacttaagttataattttgaaacttctataaatacttgttgttaagtgttaagtaaattattacgtgtcaatcattgattggtccaggtcattaaatctttaggtatctcaccgttaggtgttaataaattatcatgtgacgatccttgattagttcaggtcattaaatctttagatacctgaatgttaagtgtaaataaattgtcacctagcaatccttaattagtcaaagtcattaatttttattttaaaaaaaaagtttaaatgtaccaataagaaaataatacatggataatggcttaacatttaagggtcaggttcctacataagttccaaaaacataacttagataatattaccgtcaaaaattaaacttaaatatttttataactaagagttaaattaaatatttaaacgtaacgataatttgtctactgattctttttaattattgaaagagtataatagaagaaaaggactaatataatttagttggaagtggaccaatgtatgtgatgagtcatactgatgaccctcttcgtccaaaaatgtttatgtcatgaccctcttcgtcacccccatatctgattgatggcctagtgacagtggtcccatcaacatttaaaagtagacagccatctttaataattatttacaactaatttgaattttccatactttctttctctttctctttttctctttctctcttttatgttttacactaatctaatgtatttgttgtttctacactataaaatagtcaatgaagataaattttgatgaaaataatatgaatgcggtaattataatagaaacacagcacgtagggccaagtattctaagattttggacacagcttttgatatgcctatcttcactttattcagctgt

SEQ ID NO: 60652 - DNA, 994 bp, Cannabis sativa
ccgctcctgaatgatctctggccagggccgcaatgcacatggagtctccaccaactttcacatcacagttgatcttgatccagtcctccggcggaggtgtccaaaacggtgtgaccacaggaagaaccggggggaacaagaaggaggcataatctgtaaaacaatgggaaatagtgttaattacattcacaacattaccctgaattgagttatgtaccttgtcattgcggcatttccaaatcatgtccacagtgatcgaagcataaagaaacagcttttccgcatcatccccatttgtctttaagttccaaaggaatttaacccaatcccagaccctaccaccagagccatgcaccgggtatactccccagggggaggatctccagatgtggtaagcaaagttacaatagaggaaaaggtggtcaattgactccgcctctgccccacacaacgggcaagtctcgtcatcaatatggattctcctagccaggttatcccgaaccggtagagcattagaaaggatactccaccaaaggattttgtgtcgctcgagaattttcgaattccaaagtttgttccataaggccggagccaccacacaggtcggggctctttcatacgcctgtgtcagataggcagacttggtagtaaatttcccacagccctctttagtccaaatccacttatctcttccctggccgctaggtctacccccttttaggatgctcgtaatcgtggcagagtcaaacatagtcctcaacaaggaaatgtcccattccccattctccaatatcagctgtgataccttttcgatgttcctagggtaggagggaatgggtttcgggtagaaatctgtcccatggaccaaccaggggtccgaccaaatgttcgtctcccccccattagaaatgagtttgcaagagcctatcctgaggatagctttagtcttgaccacatttttccaaaaccaagaatcagcattattatacgtagc

SEQ ID NO: 60653 - DNA, 1194 bp, Cannabis sativa
ccaactaatgatggctgcattctttcttcatcattgtcattcttttaatttgaagtaactagaaaacatcatttctagaaagttgttcactcacggttgctagttccagacggagtcttgtgaaatgatagtcgagttcggaaggatgttcttggatgactatcatgtccactccgagttcagtctttaaaatagctagtcctcccctacaaaagagttctagttggctagttatcactcctggaatggtagattcggatagtcgactctagcagactatatcctatctggatgcatcttcaccaagtttccttggaccgtgaatctaggagctcatatacgttctcagaggctctgagacttaagcagacatggagattttgctcaaagaggagttggttaagttagttatttttaactaacttaacaacctcatttcttccaaccaccggctttaggatattgatcctaaacctataaataccacatccacttatcattttagagactggaataaaaagatgaagaagatctcagagagatgagaatgagagtttgagagagaaaatattgagaggtgtagagaaaagagagagtttgggtttggattttgtaagaagaatcttctgtagatgaagaagattcttgggtgtaagtgtgagagttgaaacacttagtgagaactcaacagagaatctcgccttgactgtatagtacctattcttgctcaatcaataaaggaagattatggtggtgttacagaactggagtagagccatagatcacatcgatctattggacttgaacaagtatatatcttggtgttgatttctttattttctgcatttatttttacttgttttcattactttgttcacccctaattttcatacagttgttggtctcgatttgttaatcttgtcattgctaagcgtttgattgtttagagttttattgatttgattatacactattagtcgtaattttcccacaattgatatgttttctttttaaactaatacttctattaaacattttttttattcaaaaagatgttgtttattgaataacatccacaaaattatacaacaaaaaatacacataacaataataaaaaataaaaatataaataaatatatgtgcagtccaatacacataacaatagcctagtatatatatcacaatggtaggtta

SEQ ID NO: 60654 - DNA, 1058 bp, Cannabis sativa
aatagtaaaaatgacaatatttttcgtgttgatatatgtatttttgtaattattttcaaaaagtttataatttttttttttaagaaaatctaatttgtttcaattaaaataggggatgaaatcatgaaatgttatgtttggttggactcaaaccttatgataaaatattattttatattagtatggattggagatgtagtaggacatttaaaaaaaaaattgtaaaaaatgtacaaattcaattgactatacattaaaattatttattttgttaaagtacttgaatattttttaaatattgataaaaaatcaataagtgattagtgaaagtttgggtaacctaactaaatcaccaaactattttagtgggtaatcacatgtattatgtatatatataaaatatataaaaactcttaattatattttattaatataattccatccaatagtctaggtttaaccttgttcatctattccattaaaaattagacaaagtcatagtcaattgagaataattagggagtcggctttctaggactattaattatttatatatattataatattgtatgataatataatggataatcaaattaaataattaaagatatttcatagtgtggtggctaacactaattgaaataaataactataaaataatatgctttattgatgacctttcaaccctaaaacataatattctattgagattttttaacaatattataaatcatgtgaaaagtttaattattttttaattttttacattgaattgtaaaaggattcctattacaaattttgggctgcaaagttgatggttaaagtagttgtttaattaatttaattggtctgaatctgggataatcaaagtattagctgtatttggaaccaatcaattttcataagcattttatttttactttatatattatagtaactataaagggtacattatttgtcacaattggttttagaaattaatattaaaaaaataattctttttacaaatttactaatctatatatatctatatatataaataaaggaaagcacaatag

SEQ ID NO: 60655 - DNA, 995 bp, Cannabis sativa
atcaacttgaatttttaaatctttcggtgaacaaattggacggaccaattcctcatggcccacaattcgatacattcaaagaagattcatataatgggaatttcggattatgtggatttccacttaaatcatgcaacgaggacaaaacaccatcaccaacctctcaacaagtagaggaggaggagcatgcgaatgaattatttgattggaaaattgtgttgatgggatatggaagtggaatggttattggtatttcattgggatacatactccttaccgataaaatcattgatgggctagttgaaacagtgaaaggagaacaatggagtcgttcgataaaaagatcaaagcagaatgctggtcaaaatcgtagaattgggagaagacattagtttgcattttttgtattttgttgaattgtctgtaataacttttgtgtgtattcttaataaatcatgttgttgtttgcaaaaaagtatgttgtcttgtacgtagtgatctaatattatgtaagtttttgtttaaaaagattttaattaactttgtagtttgtagttcgatttatatagctagcatcaattttaaatttatactttattgaaaaataaaattatagaaatgatgtgctttaaaatgagattgagaattaaactgctatttgtttggaaagaaattaatatatcaaaacatgaataataattgcttgatacaaatatttggtttagaagagtgttaaggagactctcttttgcactctcttcatagatgaatgacaaatgtcaaatttttagattgatttatttgtacctattaattaaccataatcttaccatcttattacaattataccattttaataaaattaatacaataattattattccactaatttctgaatttaaataggaaagaaaagttatcttttaatcttctcatcttcatagatattttttagtataaaaacagaaaacttacttttcaatgatataaaatag

SEQ ID NO: 60656 - DNA, 1244 bp, Cannabis sativa
  modified_base (1009)..(1020): a, c, t, g, unknown or other
taccttctttctgaattcaagtgtactggctgacctgaacgaaaagtctcgcgctagatggatgccctaatcacattatgaaaccgggtaagttacaagatcaaaactctaatccaaggaaacccaaatctacaaccattggttctgctatactttttagaggttactttaactctggaaatagggaaacacccaaccacggcacggaatggacgagaattgagaaaacgaagcatttggggatcctgccaaaaccagttacccggtttgcaccagtacacaccaaatttttcatttcttgctcaattctccaccaaatgcaaccaaaccttccagagtacctaattatggtatatacaagatattccaaacaatatttcacagaaaaactcagtgtaaacaaatatgccattaaagacctaaacttgagtttcaaagcttaagctttctcaactccacctccatagctcaaattcaataaccagaacttagtatcaacttaaaattaacataaaatcagaaccctacgaatttctaaccctaacggcccatacatagcaaaatcactactcaaccaacactaaaattcaagaactataagataaggatgctaaggcttaccttgggttgatttcccttgcaactctttgctgaaaacaccaagaatcagcaaccaattccttggtttagggttggttcgaaagagagaagaaggaagagaggttatgttgatttttggcttaattttcttattttacttaatttctttctaaatgtaataagatggatttcccacataaatccttggctgaaactacatgctaggtgtcaccatacaagacagccacataactctaccctttttgcattttactaaaatgcccttttcgttaaaactagggtatttctaatgctaggggtaaaatggtcaagttccataaccccgcttaatctcggtattttattttctcaaaagtaattcctactaagaaataaggttctaaacttnnnnnnnnnnnnaaactagccatccatcgcatttttcgttatcgccgagcaaaaattacataattcacatataggatagataatactcctagagtttaataaaatctctagaattgagaaattataactctaatactaattaatagtaatggggtccacaaataattaaattcataaataattataaaaataacagaacttagtgctaattgcctttactaatccaaattactaaa

SEQ ID NO: 60657 - DNA, 544 bp, Cannabis sativa
gctcttaggttgagactcccacaatgccttgaggtagttcaggcctcagctgatagtatttaataaggccatatagatgttacttgaactaaacacaaagtggtagaagaaaggaaaacaatccatttttgtgaatttttgttcaccaacttaaggcatgctattgaaggttttggttttccattgcatcttaatttgatcccatcaaatcatttttgggatgttgatatttgatggtaatattattatttttaaccaaaaaatgtattttttttaagaaataatatttacatattgttttatctgttatgattgttttggataacattagttgagttatcttacttgtaatattggagaaaaaaaatacaaagtttacaatcaaacggtgaccactgttgtcctaatgtagactgccccatggtactgcctgcctgttctattatttatttttcggttacaagaaaagagtatcacttggtgcgatctttctccacccatttgatctcagataattttagggactagattttatttagtgtga

SEQ ID NO: 60658 - DNA, 1946 bp, Cannabis sativa
  modified_base (1858)..(1861): a, c, t, g, unknown or other
attgtgccttttgaattttttagtcttctaaaaattataactatttacagtgtcgtaaattggtcattttattaagttttgtcacacgtgacaaacaaaatgatgataaggctaattagctagttgccacattagttctatatcgacgctaagtgtgcaattaattcaaaaaatatatatattttttaatttagttttacttaattttctattatcaatttatttttatagtttaatgaatatgcagtgtaatttcttcctaatataaccaaactaagtataaattaagagtaacaaaagaaaggtaaaaattaaaataaaaaataaaaaagtaaatatacagtataatttcttcataattaaatatattaactataatgtaattatagtattccaaagcataattcaaagttaagtcacgatgtgaaccaataacaatagtgaacagagtgtcatcgtcaacaaaattgtctacaataacctttaaaccagggcagaaatcattgaacaaattacgagaatgtgtgagattggaacattcagaaatgtctaaatattaaagataagggcaactagagagtattctgaatacacctttagtagtaacacttgtataagcaatctcaaaatgctttagccttggcattgaagatgcaatagcaaaagcatcttcatctttactatcatcagtaacaaaaaccaagttcctatccaatctttttaaattcttgcagtgatttccaatagccctaatggctgagggttctatgatacaacaacttatatccaaatgatcacatgagagtttctcagctacactaatttcaaatgttgttacatccctccataaataagcacctcgaatcttcaatatccgaagtgattcaccacaactacaagtaatatatttttttaaaaaaaaaaaattagtacataattaaatgagcatatatatataataggttatacttagttatatttttaatttttatttttattatgtgtatttttaaattttataaattaaaagaaactacttatgattaattttttactattttttttttaaataatatttaaaattttaaaattttgaggaaaataaatataaagtttaaaaatatttctaatatgcaaaataataataatataaataatatgttaatatctatatatatttaatttaatctaaaattactataaattaaattaacccaaaataaataatattaatatttatacatatttaaattaatctaaataaattaataatattaatatttatatatatatttacaaaactaaccttactaacacaaacacggttatatttaacaaaatatttttattcttaaaatattttagttaaactaacaaaaattgttagatggtaacacttacgaggtatagcgataagagataaggatgaatcattgagtataaagggtgcagaaagtgagtgaagttggtttgaacatcttcttatcaatattggaaacaatttgaggaagcatgaaggttttttaacacgaccatatttatcatataatcatcaacaaataataagtcatcattgaatattgttgtaaagtctatatcttgccaacaataagggcttgcaacaactttgctccatggcttgcaaacaaggggaaatgatgggctaagtttgtctctaaatggtaactttgtaaaaattaatgctagggcttctggtaacagatcactccaacgagggtaacaatgcttttccatcatcatcgatatcactgatcatactaattaatgtaagaaaacaaaaataatgtaaaatgaaaagagagaggatagactgtaaatatatatctttatatattannnntgcctatctaacggcaattcttggtttaacagaatatacttaaaaataaaaaagaatattctgttaaatttaacgattaggtttg

SEQ ID NO: 60659 - DNA, 678 bp, Cannabis sativa
tcttcgaagtagtgatcttgtggcaattggttaaataaagagcctctaaagcattccaccaaggggtcatcgtcagaatctttcccgtctagatcttcaaacatagctcaaaggcaagtcatcatcttttccaccttttgagaaaatctctcttgacatgctagcttatgtctagtttcaagcaattcattagacactcaaaacactatggggtctttctcgtaatgataaccgtctttgtaatacctgtctttaacataattgtcatcgtgttcctcttcttcattcatgctggttctctggatcattcccttgatcgttcacattggacgtatctccacctctagcatggctcagttgggcgtgctttggcgagagggggtttacctccaccatgaccgtcttgaggccaccttgaagagtcttcttgggaattgtcttttgtgtgactactagggttgtagtagtggtttatgtctttcttcagctctcaatgaaagcaccaaaatttttaccaagatttttcagaaactaaatatttaagaactagagaaactctaaattgtagagatgaagattttttacgtggtttaggtgtgaataaaccttagtccatgagtcagtctattagcctcttagggtgagtttgatgtatttacactatttttgcaggaaacc

SEQ ID NO: 60660 - DNA, 781 bp, Cannabis sativa
gtagacttgtcaccccgttatcgccctatttcatgttaaggtttatactaaattttttcagcaaaaaaaaaacttataaaaatattgttgtttattaataaaagtttaacatttttatatatgttttattgttaaattattaaaatttaatatttgataatttattaatataaatataaaaaaattcttatttatatatgagactgtaacttgtatagtacagaaaactaagatcacttatgtaacgccctactgatctaggtggtactgtgttttcttaattattgtgtattcctttattaattaaagtatttatatatttaaaaacatatttaattaaaactatcatgatcaaactgaaacataattaaatacataaaaataaatatttcacgatggcgttcaaaagttacatctgtatagaaaatatatttactataaagttgttgcctagcgactatcaaaataaggcagaactgttccgaatatctaaacactccaggtctaatcatctcgatttgtaaaatcttcatctagcctgagttctctatcgttctgactttgccttgcatttacctacacatgtaaataatatttctgagtcgacagcctcagtcagaaaagcataaacctaaatatataacaagatcataaccaggtgcccataaacctaattaaaatcgtatcctgcgtccaacgcatactaagtttggaatgttcctacgacaaagcctaacatatatctgttgatatctaataaaattctatgtacattcataca

SEQ ID NO: 60661 - DNA, 748 bp, Cannabis sativa
ctcagatacacttaaacaacatcaggaaagtgaatatggggcatattgagttcattacaacaaaaagattcaaatatatctccagatcagaatattacaacaaaagctagatcagtacaaaattcatcacagaggggcatattgagttcttttggaggaagcttacagttgaaagctttggaacccttgggttagggttcggatatccaaaatctcaaggtagttgttcatgcaaaagaaaggagaggaaattagtactgatttagtgataaacagagagaaagagatagtatcaaacactgtaaaatattagggattaccaaaataatacctctgtattttggaatcccacccattgtaatctctaatctttgaagatccatagtggaacgaggcgagctcgaagaggacgtacccagcacaattttggggaacctctataaaatttagtgtattctctctattgttcttttctgcattttacaattacatttatctgtttgtgtttgtttttctagggttttgattcggtttgaaagggggttaattttctggggttagattcaaactgggctaaggtttgatttctggttgtgattaattctgggttggtgttcttcatgttcttcagagaagaacattgaagaatgaggacttggctagggtttttatttttgctggttgtgttaatgtgtttggacaaataaaagatgatacatatatctatatgtgatatgattttagggtt

SEQ ID NO: 60662 - DNA, 1038 bp, Cannabis sativa
ttgaggagaagaaggaggaggtagaaatctcggtactatctctctgttttacattatacattttgattttagttatcgactctttcattttctgcatgtttcatctattattttctttaaattttaattatacacaagccaacaaaaccattggaaggagctgaatcggaattgcatgatctgaagtgagaagaacaagcaggcccggccttgatatttagtgggctgtagagaaaaaaaaattattttggggcctttatttaggaaaaaaaatggtatttttaaaaaatcaacaaaaaaaaaaattgtataattttaaaaggagaaatttttctgggcccctggactaggtgggcccttggcaaaggcctagcccgcctatgcaaaagaaattgttataaagatattttttttgtttaacttttcatatcataatagatcttaaatctacgtcgaggaaaacttaagattgctgcaaaaatgcatgttgtaacattttattactaaattgattatctgactatagtttgttgattatgtgtttgtcctttctactcttttaaccataattaatcctctcagacagtttcagggaacgaatgaaaaattatacagttgagtatcaatcttctcgttttatgattcatatcattatcatactatggtcagtaaaaattctagtctcagtttattggcaacagtaaaatatctcatatatacttttatgcagtacgaaaatgattcccttgcatgatattatctttctggcattcttatcatgtagtagatgttaacatgtttctagatataagaaagttttacagtggccttttactggatatgacacactcatgagatcaaacagctgaaaaggcaaaaaaaaaaaagaaaatatatagtttctccaaatttactttgccagctcaaaataatcacactgattttacactctgcaacaataacagtcattaagtataaatttaaggttgcctgaagattgaagaattaattcataataaaaaagattgaattagacca

SEQ ID NO: 60663 - DNA, 1113 bp, Cannabis sativa
gtcattaccgttattatgaatgtgtaattactcgcttaaaactgcagatagattttttacttattggatgctttatcgggcaatgatagtgacatatggagctcgtttgtaacaagttgtaaggatgctttgagggcatcaaagtcagtttatcttataagacatataattgtttatatgatattggttatgaaatgaataattccttataatgtgtgatgtgttcataagttgtgcattgttatgatatatattttatgtgatgtttgtgttctactttcttttcttactgaatccttgtgactcacaggtgctctgtggtgcatgtatgagtaaaggaaagttggaccaaccatgagttaagagtctctcggcaatgtacatatcagttattgtatcttagctcttagtggacaggatccaacttttgactgtattttgaaaatgagctctatttttgtaataactgtatagtaaaatgtttgagtttataaacaaggggatccccaaaaccagggtattttgtaataaaagttttaattatgaaattaagttaatttattaaaagttttaattagcccacactttcataaatcgttagtttattattaaaaactaatttataatagcatacatatagcacctttacgggttagggcattacatatagttagtaaggatgtaacttttaataaatatgttatggaatttattgacaaacctgctggaagtcaagcccatactgaccgagataaaattgaagcttcaggaactgagcttgaggtggagcctttgataagagtggagactaaaacacttgtagatcacggaagtgatgattcggaagatgattccaaaagttataatttgaaaaattataaactggctagagacagagcagggagagaagtaaaggctcttgaaagatacagacatcgtgatttaatcgcatttgcatttcatattgctaattagattgtgcatgaagagcctaccagctatgcacaagcaatgaaaagcaaagaccaaaagacaaggaatggagctatattagaagagatgcactccctgaagaaagaaccagacttgggatgttgtatcgatgccggaaga

SEQ ID NO: 60664 - DNA, 2200 bp, Cannabis sativa
agccaccccaaaccaattaatttattagtgttgttatgatttgtattttcaactttttgtatggtttgatgaaatgataccaaatgctttctcaaatagaaagatattctgtttctgtttctttttatatatattttagtattatgaagaaaagagagttgaaaagaatacaaaagaggggcattttcttttttcttttttctttttttttttaggaaaaagagagagactgagaaatatctcttctgaattcgattcgatgtgtggtagtcatgtaataataataataaaacttataacaccctttgctcttgtaagtatattatcaatcataataagataagataacataatatggtcaattaatatggttgaaaaagttaaaactgaaaaatgtagtagggtaagcgcgtaagactaataaatcctttcttctggttttactttactttacataacaaaatacattattatttgttgttaaaaaaattaaagtagatataaaagaaagaaaataaaaggaaaagggaaaagactagaaaagaaaagaaaaggctgccagccgataagagaagagaaaagaaaatcgaagaagaagaagaagaagaagaagaatgactacttctccctttccgttgaggcttttcatgcccaccacttcctccattactgctttctcatctccttctccttcttcctctgattttcctaccaaatcctcctccgcaccctttcactctctttgccctaatttcattttatcttctattccacccaggatgaagtcgccccatctttccccctcgaggacggtatctccctctctctctctccgatatacaatactacaaccatgtatgcaatcatttcacatatatttttttactatgctttccttctttctttatctacagatttttccttttcaacttagattctcttgtgacacactattaaaattgaaaattgctaaatgacttacttccctgccttcccttgacttagattcgtatgtctttctctttttccgctgttgattgattactggtttcacttccaacacttatcaactcttgagttcatcttaaatgttcatatgatcctttcttacagatgtggattataaaacagtgatgtatgtatgtatgtatttctcagtattaaggtcctagtgttaagtgtagtgatgattagttattaatgtaaacaaccttcatctctctctgtaaatctctaccagtacgtttttcttagctgtttaagtgatgctttctttactaataaaattaacttagttaaatatgtttgtcttttatttggaagccaatttgttgacataaactccactcctcactgatactgataaataagaattatttttttcccctcaatagaggaaaatattttattgtaataaagcttgaacttatttgtatgaattatgatcaccacgttttgtgggcggttggttttcactaatgatttactaccaggggctctctttttctgtactggtatagtggctatgcaggcatggtagaagagacatggattcacaatatgaagagaagaatgatgtacgcatgtttggttctgatgaagaggttggcactcaaactcaaatcccaacccaagcgcaatcagttgttgaaggatcaggctcagttttagtatcagaattcaaacctgctcccgatgtggattatctacaggtacaacacaatatcacatcacttagtttctctaccgactttttaagttattcatgatgtatgttattccgtaacaattgtgctttgcctccctgccccggcggatgagcacctttagttttataaacagatagccaacttgaaaattaaacagataaccaaatagatacataatgattacattacatgtgtgtgtgtaaaataaaaagatgattgaataaacatttgctgatcacatccatacatctgttgcaacttcatactttgtcaattaaatatttataggaacaactttagatcttaaagggtatttatttattttatctttcaggaattattagccattcagcagcaaggacctagagctattggattttttggaacacggaatatgggattcatgcaccaagaacttattgagattcttagctatgcaatggttataactgtaagagctcctgatctagagtctcttatgtggtactata

SEQ ID NO: 60665 - DNA, 730 bp, Cannabis sativa
atttattatattagattagattctcaatcatttttttggtttgattttttaagatacgtgtctataaataaaataaagcttaaaaatattttttatgaataatttaatatttttaagtaaaattaatattttttaattaatttcaaatttttgtcagatttttttttaataatttttattatttttctaaaattaataaaatattataattgcttaaaaaatagaatattataatttttaaaattatttttttgataaaatgggcaaaattttatattagtcaaagtttaggaggtaaaaaggctaattcttaacggtaaagataacagaacttaacagaatggcataattatgtaattgttatattttagggagaatttttaacaagccgtatattttagggggtgaaattaggtagtgccgaaagtttagggggcaaaaatactaactattctaaaagtaattttgtgaatttattacccattaagagtttagggtttataatacgtattccaacaagaaactaaacatcctaatcaatttacattaccattcttattctattgcatcattattactattaccattacattctaccaaactaatacatcacgtgagctctataattttctaaactcttatttacttataagaaaataagaagaaaaactaaaaataaattagcaaaaaaaattgaaaaaaagaaggaaaaagataggtaaaaaaaatg

SEQ ID NO: 60666 - DNA, 986 bp, Cannabis sativa
tttgtttgtctttttgaagcagccaagccaatggaggagcttttggcgactcttgcccagacctatagtcctgactctgcccttcctcctgtgcctgaccagacggtgacgctggggaggtcttcttctagcgtcaccttaggccaaatcgtcccgattgacggagacggggaggtcgaggaggaagaggaggaaggtgagatcctggcccccttggaccaaaaatgcaagggtaaaatggtggaggctatgtcttccaaaaagcctatgagggtggatactccgaccctcagctctgatttggggattccacctgaagcggaggaatacactgtgcctcccagcatcgtccttacccccattcccgcagatgaggagagacatcaactccggatcgccaagcacaattatgctatggctgagtatacaaaggggaatgccgaggtggaggctctgaaaaaggtcttacgagaggcccaggagaattccttgcgtgacgaggcttataggaatgcctgagacctgaacatggaccccctgacggacttgttcaactgctttgttgggcctacccttgctccctatgcctccgagttgacgagccacttcatcaccaacttgacccaactcccggccaaaagatatgcagcatgcgcttccatgaactccatctatgagattcaggatatcagcgctgctatgaccgctgtaagtctctgtaaatgttcttggccttttctttatgacactcggtcccccgtacttactcctttttcttgtattgtcagattgttgcagagaccagtcgcctctcatagactttaatcgatcgtgggtacatcatgtccgagtttgggggcatggacgaggccatgaagaggctgagatacttggcggctgagaggaaggcgtttcgggaggaggcccaacagagggaggctcaggcacagcagaggcatcaggaggcactgaaggccaaggctgag

SEQ ID NO: 60667 - DNA, 1811 bp, Cannabis sativa
ctgtgagtatctgtttatttatttcttgcttaacttgttgtcctctacttatttacttgtacttttagtgaatcaatctggtctcttgtttctgtttaaaatatatttttgtaaacagctaacatttattactaacatttgaatcctacttgagtacagcatacatgaagtagccactgctgcttcaatcctcatctttgttatatttttctaactagccatcttcatttctttttgacagattcatagacgtaaaatacgctcctggcaaatgatatgtgttttgtcacgttttgtttgtcaagatattgttgggcaagtcacaaattacttacatatttccctcaccgtaagtaaatgttacatttcaacaattggtgaactccatttatgtgtaccgaatttattataatattgttcaatttttttttttttttgatgattgctttatttgtttttattgtagagaaacaacttacctgcagttcgccagtacttggagacatttgccattaacatatatttgaagttcccattgttggtaaacctttttctctagtccatggtgcagatagagcccattcttattgttgctgtagaagatggatcaatctgaattcatttttaaatgttctgatattttcttaatcaggttgaagagcaaatagtccctgtattacggaattacgacatgagaccacaggtaaactagtttgcttatttatttgttttttcaaatatttttccccttatgttgtagttagctcttggagaaagcaaaagagaatgctaattgctgtattcagcagttggactgtgataacaaccttctctttaatctgcctagaggcaagatcagataatctgatattcatatacaacgggtaggggccaatctaagacaatggcctgtctctttttcaaaaagatattcatatacaataaaaggggggttttattctgtaaatgatacgatcggttaatggaaattcagtaagggttcatctttgtgagggctctcaataaattcgagtgggggccagtctaagacaagtggtcccttcctctttttcgaaaaaaaaaaagttgtagagtcattccttgtttaatttgttaaaagaaaattgtgttaatgttccccattcatatgtattctattaatattttgacatcaaatgcaggcactgtcttcttatatatttatagcagcaaatgtcatcatccacgcatctgaagctgttcagtccaagcatttggacatattacttcctcccatagttccattgttaacctcacatcaccatagcttacgtggtttcacccaggtgcttacttttactactttatactctattttctttacaaattaaactataagaggttgcatttgctttatatttatttgtatttagaattttgttgactgatggttttgcagttactagtataccaagttcttttcaaattctttcccccagctgatttaaaagctactgtaaccatgcctctagaaaagaggtgctttgaggatttgaaaacttaccttgcaaaaaactctgactgtacacggtaagaaatgttttttttttaaaaaaaattttgtgagtttggattggtgctgcttttttggctttcgtagtttggattagtgggaggtaaatagtatgacctgttctggctcaagttgatctataaagtatcgattttttgaggatgcttttgtgaaggttataattgggttcaattgtgtttctatggccctcagttttaagtaatctcattcgggctatagggttttattttttggcttt

SEQ ID NO: 60668 - DNA, 2091 bp, Cannabis sativa
gatttcatattgaatggatttatatgacaaagacttattttgcagtctacttatttcgaagtatgaaaatacaataaaactataaagtagaagttataacagtatacggtaatctcagaagttaggtcgaggactacctgaaaatctacttgtctatcctgttccattacgcttgccattatacttgatctagaagaattaggtgagaatccctcccatggtggcacaaagatcaatttggtacactggacagggactaagttccggctcagtttctcccaccaaactgatcctagagaccaccatctgatcatcaatccatgttcagaaaacgccaccagtccctacattatttaagaaattaagtaaaggcggagaagacactttgaagtagatacattctactaatttaacattaaagctttaaggggtttgcgatattcacatgcgggaggatcatagatagtatagaatgaaacttttcagcatataaaacagaagtagaacaaataaaacatgatattaaccagcaagacagtaagaaaaggcacaggtcttccctttgaaactgaaatttgataaccaagaagaaactagtgaacagacaagttgatgaccaataaaagattcaagaaccagtattacactgaagtatgggaatctaacaaagctatacctctccatcaggcgaaaagctcaaagctgaaatggcagtggctaagactgtttctgatgctgcccctgctgctgcaagcaaagttggaagtccaggaggtccacttgcatccagtacctttatcttgagcacactacagtgtagaagagtaatgaagtcagttgatcaaacagcaatgatttcaatttcgctagtatacattggcaaggttagtaagtgaaaaaatcccaatcaagaagcacattgagatattatttacttaatgaagtaagaaatcaagttttgcacattgaggctcattcacatatatacatcattgatgtagacaaacaaaatatattttatatataaataagtacaaaagattttacctgtacaaaattataaggtcatgaatttctaaacactgagtggtgatatcttttaaaacagcttctattttataaagaagtaaaaatcctgtaggatttgttgaatacctctgcaaatcatagacacgaatgctagcacttttgatctctccaataacatcacctacagccaatctggtccacgagtcattaatagctaccatagggaatgcatgtacaacttcctttagtgcagtcattgaactttgaaagcaagttttacgcataactgaattactagggtccatggtttgtaaaataaagttaacaacctgcacatcaatccaattgtcaaatagtgtttgctgctgagtagattgagttcagaaattccgagaaagaaacgccaatgcaacataaacaattaattattgttaacacaaacaagaaagagttgggcacttttaatagcatgtgaggataaatgaacgtggcaactaattaaaagaaaagaaatgatcatgacggaacatctaatatggagatgcagacatcagaatttatgtcacataaatataacgattatattacaaaacattgagtagaccaaagatccacctatatgcagattctttcactaccctcttcctattagttttctattgtaattctggttacaccaaatggcaatcaagcatctaaagggcttgtcccggacccaaaataagaaaacatgtatttagctcttttaatctatgagaacaatgttgaaaatatcagccaaagaaaagcaacttccacatcactagttcctccaaaaatgtaattataaaaatactagtcagttactactacatccacatccaaaaccagacaaacagaagtgccaatttattggataagtcgtaacaaaaaattgtgccgcatagaacaatttaagaaatgacggttttttttatttagtttcaaactgtgatacaaaattttgatgatcctgcattaaagaaatcgtccttctttgcattctaattttaaaatgacgagggaagtatatttgccaataaa

SEQ ID NO: 60669 - DNA, 1398 bp, Cannabis sativa
cctggtaaaataatttcaacatagtgttcatgcatccatggcaaaatcaaccaaatcaagtgaaatggcgggaatagaaagcttacccactataagatgtcgttaaagaagaaggtgggaagctcagatcatcgaaacagcacaaaaatcttgggaagatgatgcttgtgggtttggccctctacagacaaggagctttttctaatgtaaatttctagtgagagaaagtaaaaagtaaaaagtgagaagttaaaaaggttttccctccaaaaagcacttatgtaatgcatgtggggctcttcttcacttacttcacctacacatcaaagaggcaactaaagcagttatttttctacaacaatgagattagacagtcaagacaaagtgttttaaaaggctaaaaatgtattaacttttatttagtaaagactacaacagtctcgaccgcaccaacacagctggtaaagtccctatccgtacagacgtccgcatagggacttaagggcaaatgttatcccgatttttattctccttatgtggcatgcttacatggaaaaaatcagtgacacgtggaagtacaactcaccaataagaaggccaagtcagcacctaagcaaacgaagaccccgacactcagacaggcatcaagtgacagactagctctctcactagagttggcatggcggaccagccataggattgtaccatggctggccaacctgtcctcaataagggtctaacaggctcggaggtgttctggagggtttcttgtgcacttttacacgtagacaacaactcttggctagctcccataaaaaatccctatggccagccagggttgatgttgaatcaaaatatgtgtttttcaaaaactcaaacatgttcttcgtgttcttcctgattcaaagagccaagaatcacaacgacggtcaaaatcaaatccttttcatcagcaaatcacacattatgtattctaaaactatcacgtggatcaaaataccaaaaagactacaatctaaagtgggaatcaaagaatatccaaagcaaagaaaagcttcaaagaaaccatggaaaatacaagtaaacaagtgaagaacgatatttgaaagcttacccgctagtagaaaccttcaaggaagatggtggaaagattggatcatcaaaataatgcaaaaaccccgagagttgcaagacaatgaggcatcaacctcaagggaagtgaaagctttcctaacttgctttttgaagaaagataatgaaatgtgggaaatgagaagtgagttacttgttggattatagtttactaggatctaaatttactaccatgtatgtttttaacatcttaaatatgaatttctaaaacaatgtaatttgaacacatataaagtttgataaacc

SEQ ID NO: 60670 - DNA, 759 bp, Cannabis sativa
tcgtttgactaagtctgctcatttcattcgaattagaaaggattacaagcttacctggctagctcaaatttttgtagacaatatagtttgactacatggagtgccttcaagcattgtgtctgataaagatcctcaatttacatcaaggttttggaaggctttgcaacaagccttaggatctgaactttacttgagtactaccaatcatgcatagacagatggacagtttgagagaaccatattagggcataaaatcccaacagaaagtaatcaagattatgcgattaaatattagtctcacgatttatcaatacacggaatttctactaatatgataacaacaatatagtttacttacacttggatagtggtatatcttttctagggcattggtaaagtaaacatgtattggatgtattgttatacatcggactggactgatattcacatagaaaaggtatcttaaacttactgtaatatctttctaagtaaatatcacttagttgatcttagatatttgatctcaattgtgagatggttaggttctggttcaattgtattatttgtgttctttgacttattcattaaagttcaccaattcgatcttcccaatacttacatcttgggaacattgtagtacaattgagtaggagcgctaatcatagaaacagaatctataacttctgtaaatgcatagatgtgaaacgatgatttccttcgagcttggctaaatgagattaaatggtagagtactcattt

SEQ ID NO: 60671 - DNA, 1776 bp, Cannabis sativa
tgaggaagtcgctgatggagctgccaataaggtcgcggatggctttactgctccaactacttaatttatctcaatttttatttccttagttatcaaactcttttagcggtacatgggtactcgcattttgtacttggacaaatttctctctgctttctttatgttttgaacagtatatatcccatcgaggatatctatgtaactgtttgcttttcgcagtacacgggtactcacatattttatagacttatttttaatttgtttttccaattacagcttggtgtaataacttaaaaaggataagacttgcaaaaaatttaaaatgttaagaaaccaataacttttattattacaagaaaccaatagtacaaagtagttctatggtaggctataccccctatacttagaacatttatacaaataaattgattaagtataattatactgcgagtactattgataataataattgagactttccccattccaagcccttcgaatcgcggtaccaacgagttgtgcaagccgataggttgcgtggccaattttttcagcgataacgtatggtccttcccaattatcactaaaaactccatgcgctgggtttttgtgtttggcatgacttttcgcagaaccaaatcccttactcgcagagttcgctctttgagcttagaattgaaatagcgagcagttcgttgcttataggcagtgttctttagatgggcctaatcgcactgtattatacaaccataaaacttatggaagttcttctagccatacacctttacgcttttcgagcttacccttgatggtatgtttgattatcttatttactgcctctgtttgaccattgctctgtggataagcaactgcggaaaatgctttttttatgcccaactcatcacacagctggcgcatctccttacagtcgaactgttttccattatctgatatcaacttgtaaggtatgctgaatctgcagacaatggaattgtacacaaactttcgcaatttaacaggcgtaatagttgcaagggcttttgcttcgcccacttggtgaagtaatcaactgcgactacgacgtattatactcttcctttcccttttggtaattctctaattaagtctatgccccaaaccgcaaaaggccagggactcgttatggagtttaactaacttggttgttggttgacatacgtggctatccgctgacttttgtcacatttcttagcaaagtttgaggcatctactcgtaatgtcggccaatagtacccttgccgcattatttttaaagccatggaattacctcctgtatggttgccgcagatgccaccatgaacttcgcgaagtatgtactcacattcagtcccatctatgtatttgagcaatggttggctaaagcttctgggatagagcttatcgtcgtaaatgacatatcaagcagctcgatatcgcagttttctaacttctatcttatcttcaggaaggattccttctttcaagtaatcaattattggggtcatccaggtgacctttttgacggtatccacctccattacctcgttccaactgactgttggatgagttagcacatcaacaggaattacatcgagtaattcggcttctcttgtcgaggccaaatgggccaaagcatctgcatgagagttatgagcacgaggtattctagagacaattactttcttaaatttttgtagcaactcacaagtgagggcgaggtatctagccaaacaacctcctctggccaggtattctcca

SEQ ID NO: 60672 - DNA, 543 bp, Cannabis sativa
gcccccatcggccaacctttggccggctagccatctatgagtgcatctctatccagccaggtgagtgaactcccttcccgaggaatttgggagcgagtcaaccaaaggtcaatcttcatctggctagggccgggaataggtggaaacacctgaaataataatttgagaagtgagaccaatcacttcaagtatctagatccacctagctccagcaactagtgcgatctacctcttatcaacacactaaatacatcagccaactggggatcataggcggcctggccctaccagtacagggctggtcggccatcgataactgcccagcataggcttggctggctaggaccaacctccctacttagtagtggccgaccaaggctagaaacaaagcacagggcttgtggacctccaccatacactctcctagattatggttggccagaccatagtacatttgagtctgcaacccatcaaaggagggccaggcaaccaagtccctaaacaaacagatccttcggtgtaagcacagttggagcacataag

SEQ ID NO: 60673 - DNA, 760 bp, Cannabis sativa
atggaattaaattattattataataattgattttcttttgaaattgatataatgtgataacaatatgtaacggtaattacattatgcaatagaatttttaatacatgagagaagttatgtaattaaaattacatcacaaatgtaaagtaaaatgactcaaatactattttttatataaaaataaaaattgaagtatgaataattttgtgaattaattaattattcaaatatttattctaacaagaaaccgtaatcaattctcattattatttttattttattacattactatcattattattattccaccaaactaaatatcacctaaaattctacaattttctatattgttatttaataataagaaaataaaaagaaaaactaaaaaaaaaacacaagaaaaaaaataaaaaaatgtacatatatttaaatatactatgttgatgttatgtgcaatgcacacataattagttttttttaattaggttcaattaggtgatgttaagtacaatatatgtatgtttaattttttttaattaggtaatgtatttttttttatttttaaatgaggtttgagatttcgatctttaagaaaaaaaaaattagctattgctacattggtgtgttatttggatatgattatatatacgtatttttaaaattttcttaattaggtaatgtaactgataatgcaaatattgtaatttactatattcttaatcaaaactcacataatcaaatttgagtgtgtctatatata

SEQ ID NO: 60674 - DNA, 699 bp, Cannabis sativa
ttgagtaggaataacaaagagctaacctgtctaaatgaagtagagaagcttgtcgctctagtcacgaaactacctcccataagggtttttccaagttggtgagagagtctccacgttgacgaactggtcatatgggaattagtgttcaaggaaaaacacttaatcctcgaaatgccactacaacattgggtaattgagtaagcactaagaaaacactaggtgtggaaatcttttggagggaaagttccttcgagcaaaagcccaagaggactcaagctcaagggcgctaaccaatgggctctccacttgatgttgaatgaccttgcaatgatgagagaatcaacatgactcctccactaagtctttctcatcatcctcatgaaacaaggctttgagatcctacaaggggaaaaggacctgctactcatactaaaggaggtagtaggtgacgctactttgaaactgaaggctacaaaattcagcgggtaaagaccaatgatttgctccatactaggaagtactttagagatgaaagagaagaattgtgcccttacttttcccatggccccaatggccaacactatgagtacttccctcaagtacatcgagaggaattgaacttgagtggccaattcagttctcttcacacttgtgatctcgctgaagactacattgagggagatcgacactagaattgtc

SEQ ID NO: 60675 - DNA, 1693 bp, Cannabis sativa
taattttataactcatacaattttataagcaataaaattccattggacactgtcatggaagaagcaaactccctccccctggcccccagacgggtagtgtaagagaaaaaggcacgatcaatgctgaaaactgaagggaggatgtcgagaatgtgtttgatggcctcgacgacaaccagccccccaaagatggaaaagaagaggatgatggcaatgactatgtgagatacgagtactacaaaatggttattattatgaccacgacctgaatctgctgtgagtaaccaaagagttagaagctactcagaatgagttagtagaacagaggaagctcaccgcaaaaattaaaagaatgatggaacaccttcaaaacgagttcgacgacttggcaaattcgaatgacaaaccttcagtggatgtaatggctgaagagcatgctcacaaacaaaagaaagccaaaacctcaaatccttgtgaggataaaagtaaagacaagttgggtgagcccccacaaaaatctactcctaaacatcctcaaaaaaatacaaatccagctggtcagccgtcaaggatgtagaagaccaccggtgctttggatcctagacgccctttctgatcttagaggcagaatcctaccaaggggacaaaacacaagagtacctaagcccaaagggtggagtaaccaccctaccaattctgccaatgtaatatcccaataagcctgatagttaataattagggtttatatttatattatgggttaatcaggtaataagtgggattatgatcctactaatttagttgaacagaaattttaaatttgctataagtggataaataagcataattcataaattatggagatttatatggcatatgtaaatgtaatatgagtttttggtgtattaaaaatattttcagttttggcgaccttggagactcgatcggggatcaaaaatgtcataatgggcttaattgatagaattagtaggaatattgtgataagttaataatgtcggtattaaaataattaagagtatgtgtgatttgatgtagctccttaaaagtagaaatctcttagtggctaagaaataataagataattattaataataaacttttttattaatattattttatttttatattatattatattattattataatattataatatttttttaaatgtctaatcatcatcgtttatatatattatataagttaataagtaatatgtttaaaacagtaaagaacgaacgaaacctttgtttcttatccttcgataaaactttcttcccctatatccattttctccgattttcaatctggaacctagcaatctaagctccgatagtagcagaatagtaaattctcagagcagtgaagcttaaggtaaggtttaatttcattttaagtttaataataattaattttgtataggggttctgtgagttagaatagttatgaaggttctgaccttataggattattctcgggtattcatgggattagttccgatattttcttgctgaaattgaggtgattttgagttagaaatcgagtttgaaactttttaaagcttagtccgaccgttaatggagttttccgtttaagggtccgattttaatttatgttacgtaaagatggtagtattcgtggtatatatgtgtcctgtgaagtttggagtgat

SEQ ID NO: 60676 - DNA, 1497 bp, Cannabis sativa
ctgctcaaaagaatcaaggaaaagccacacacaacactgctattatgtccaatctgatgcagcagggacttttttccaacaaagttagtgatgttcaaggcaatcatatggcttctactactggtaaatcgagtatctttactgataatcttacaccagttacccacacatctgtgtaccagtccagcctggaaactcatatcgcaccagtaattggaaacaagagtaatatcactagccaagactctcctaaccattctgaactagatatggttactgatctctcaggcatatatatgccacttacagggcttggaatcaactctaacacatttgccacttacccacctattgaccaaaactctatgaaccataacaaaggtaccttgactgcatcattcaccaactctacaacatcttcatcggttgttgtttcaactcgggcagagagagatgataaggaaaattattctccaaaccgtagtgtcaaaagacatccagagagaggatcacttcgagacactcttaagaggtgcagaggcaatcaaccaagtgtgttcacaccaaccttgtcagttgcagatgaacgaaaccagcatgtttctattattgacatggattctactggttatcctgacaacgctgcggaggctgtgttccagccccgcaaacagccatgaaactccttagttggaatgcgcgtggtttggggaatcctagcgcacttcgtcatctccgtctgcttgtaaaagaatccccactgtactttttttaatggaaactaagttaggtccaaatgttgtttctcgctttcgtaatgtattacattttaataatggacttgaagtccctagagtaggtttggggggtgggttaatgttgctttggaaagatgatgtaaatgtatcccttttgaattttaatacaaatgtatttgactgttacatcagcttcactaatcaacctcggttgcattttactgcattttatggatctccttcagtccagttacgaccacaaacttggactctcttggaaagactaaaagatgttgcacctttatcaccatggctggtaattggtgatttcaacgagatcttatctaatggaaacaaactgggaggggctttacgtatgaagtgcaaatggatgatttcagacgaacattggatagctgccacctacatgaacaaccttttgagggtgacccatacacatggattaaaggaagacattctgtggacacaattaaagagcgattggactggtgtttcgttcgtgaatgacttttggacaaacgcattcatttgtttgatcccattatgacacaccatttggattattacaactccgatcacagagctattgcagtccatgttaacccgattcttagtgaagcacaccagcaacaaagacatactcggttcaggtttgagcaactttggcttaaacatgaagaagcctccaacatcattcagcaacaatggctctcttcaa

SEQ ID NO: 60677 - DNA, 1011 bp, Cannabis sativa
cttcctttgatgctctttacctgagctggtcggtctaccttttgcttggggttggtcggcacatagacttccttggctggccagggtgtggtccggccaaaccctcctagttggccattttctcgtgacttggtcttgctcgagtatttgaatcccttgtcaattgatgtgttgtgcatggtgactttgctcacctattgacatgatgtattccacttggcctcggtcttgcctacatggacatgcaacgttatgtggcaaacattgggataacaaaatcccaagcaaaatcatcgataacccatatataaaatgtcgatatcctatcgacaaacttcaaacttttaaaaaaataacacctaactaaaagtatcgataaactatagataaaatatcgatatcctatcgacaaactcatgacttttaaaaaattaattaataaccaaaatcccaaacaaaaccatagataacatgtcgatatcttatcgataaactcaatacttttagaaaattaattaacaaacacaatcccaaacaaaaccatcgacaaaccatagataacatgtcgatatcctatcgataaatattaaataaaattgaaaaaccaataaagctaaaattatcaatacccatttgatttttaatcgatatcctatcaataattcatcgataacactgtaaaaaataacagaccacataaatagatcaaaaaatttaactaatcttaagaacatacataaatgcacatctaaatatatgaaaatctaatatttttctttaaataactaaccttttatttgagtatggtgttggtggtggcgactgtttgaatatgtggtggagagaagtgggtctctgttatttgagctaatatcgttgtgatttcatggttggtgggggagagaagtggctctctacgtttgagcaggtcgattttggatttgggtggtctttgcatcggaagaggtcggttttgggttttggtttgggaggtcgagagagagagagaga

SEQ ID NO: 60678 - DNA, 679 bp, Cannabis sativa
tttagggcataaaatccaacagtttgaatctatagtggagtcatggagaattaataagttaaaaaatttattcataaattttgggaactgcttattgggagcttggttacataagtgcatggtccctacattatctgggataatattgccttgtagactcaatattactttcttaaatcaattagaattctaaagaagagtatatcttgtttatgaatattactaagcaacggcttatttgaaaataaaagagaaataagagtttattagttaattaagacactacatgagtctaattaataaatatatttaaaataataatttagtttaataattattaaatagataaaattaacatttaaataattagattaggaaaattagtttttcaaaaaaaaataataagataagaaagttttatttaatgtaacaaagtggcaaaaatcaaatccatgggccacacttgtgaattttggccaagggtttaattttggtccactatcttattctaaaccttattctattctaaaaccttaaacctagagagaccctataaaatgaatataaaggttttaattcaagaggcgctcattacacttttatctgccaaaaacttatgagatctgaattagaaaaaactcttttttcttttatcaaatttgaaattctctctctctct

SEQ ID NO: 60679 - DNA, 652 bp, Cannabis sativa
ctgatggtgatggtaaaaaaaaaaattatttatattatatatatttatttattatattatattatatatgtttatcctctttgactcggtcaaaaccaagtccttacaggtgctcttcctagagtcatatcgatacacatgcctcacgaagaacttcaaaatacataccgcaattgactatcacaacggtcgagcaccattacttcattagtttgttgatggaggacaagcacgacaagagcaattagaggcaaccagctatacctttccccaagagatactacgccaaactagagacgaggctcggccaacagcgttgtcaaggaaagcggagtgagggtggtatctggctgcaagaattctggcaaccagaaagtttggttgctttaaaagtctttcttggcaagcatcgcttgattgaaatgaggaagagatcgaaaactcaaacctacatctcttttgggcttgcaaagagtggaccatttgatccaagtttttgagtggttttaaacattggttccccacaaaaaatcaactatcctgaattcaagagacttgcaaatgctaacaaggagtctgaagtaagccatggactaagaggggataaattacataacaactttgctccaaacctctttgcctcctttggaaa

SEQ ID NO: 60680 - DNA, 705 bp, Cannabis sativa
caaaaagtacatgagataattctcattttataaattaatgtttctattttttgaatattaataaatatggaaattacctcatatattattttttaattttttttttaaatttacagtttgtattgttttaataatttttccaatgatttttatgtgtttgttgtaccgattttggttacgaatatgaatttttgtgtaaaattcgataaaagattaaaaaaaaactatttcaaagtgtaaaaataataataaaaaaaaatcttactaaacaatatatattagcatttaaaagaaaaaagatttagataatttggttttttactaggataaatttatagaaatattacttctttttatgagaaaaacctaaaaattgtaatacaatattatataagattgatataattgtagagagtgatttgagggtagttatcaatgctcttaatagaactaagtcaaggtgggagcttgaaaactatgtctccgtttgtattaatccctcatttactagttgtaatatttctaatatttgtagaaactgtaattttgttgcccataatgtgattaagtgggcgttttcccaccagagatttggagatattccaattatcttgattcctgaacacctattttgtaatgagatctaactatctctttttatctaatataggaacgcttttcttcaatatatatctattctatata

SEQ ID NO: 60681 - DNA, 706 bp, Cannabis sativa
  modified_base (28)..(47): a, c, t, g, unknown or other
atgtaggatgttaataaacatacttgtnnnnnnnnnnnnnnnnnnnntaaaataatttccaacagtgcgggggccgaaggctgagtcgaagcttgagtctcaattttagggatctcgagattaacagtgtgggaggctcgcttcttgttcgtagttgtcttcgtgggccttttgagaggctccacgttgacatctgatggagtctctgtgatggtcaacctcttcttccccttcttgcctgatgaatgaaagagatcttcaagattcatttctatgagataaaatagtgtgttagtattcgtttaaaaacaagcaaaagggaaattggggcataatctcatacctaagggacttaccataatcataagaagatgaagaggaaggactataatatccactaaaacccctacatcctgtgatcttgaatatatcataggagttaattggttctaaatcccagctcgcatctaaatgacttggtctatccagcatggtcacgtactacttgactctcccatagtacgagtcagtatagctaatttggatgtgaaactttggataccaactatcaaacctacatgtaatgcgatatatgaggagggaattccaggtgtgaaagttataacgactatctcgaaatgacacaaaagtgttacgctcggcgctaagcactgtgggtgaccaaccacattgattgccttgggat

SEQ ID NO: 60682 - DNA, 1793 bp, Cannabis sativa
gctctagcaaaagcatgagcaactgagttcactgaccgtttaacaaaataaatagaaacattcctcaaagtagcaagcaattctttacaatctttaataaccaatccgaataaagaaatcatatcgatggagctccgaatagcttggactactactagactgtcagtttccaacacacacttatgtaaggagagagtttttatccagctcaaggcttccctcactcccatcgcttcggctaaggctgggttcacatcgccttgtttgagaatcgtgcgtccatgaacaagaacccctcggctgtctctcagtaccatgccgaatccaaagctgtggttactctcaaataatgccgcgtccacattaatcttaacactattgtgattaggtgacacccaatgctccaaaccatctcctggtataaaaccttgttcggatgactctattaaagagttttgagcaattctccattggttaagatagactgtagcagccgagacaatatcatcgattcttacaactttgttgttccagaccaccccattccttgccccccatatagcccagcaaacagccgctattaaccccctcttctcgctgtctgcaccagaaaaaaccgacttgcaccagtcaagaaaactagtgtcctcggccacctgggtgcctatccccactctattccaagcaagggtgatcacttgacatgttaccaagcaatgcagagtagtttcattagcactttgacagaagggacaaagcaaactaacctccacacgcttagttcgaagatgtgtcattgttgggagacagtttgtgcctgcacgccacattaaatttttgatctttggagggatctttaacttccacaagctcttccaaaaagccgaggcctcttcttcgctccaacgcccattaatctgctgtaagatattataagcagacttaacagaataaagccccgacgagtcaaaactccatataacatgatctatgcactcggccacttgtaatggaatctggagaatgaggtttttatctctttcattgaacaaatcatcaatcaactcaacatcccaacacctcaaacccggagtcatcaaactactcactttgacatccgaaagagcaggatgtgaagagctaacaaaggggttgtggggatcgggcagccaagcttccccaacaacagaaatgttgttaccatcaccaacgcaccaccttgttcccttcattaccagttgttgagcctcccaaatacttctccaaacgaaacttggattattcccaagagaagcatttagataagaaccatgaggataatatcgagccttgaaaaccatggagaccaaagagtccgttctagtgagaaggcgccaaccttgtttccctaaaagagccaagttaaaatccctgagattcctgaagcccatacctccaacatctttatgcttacagagcttatcccagttcatccaatggattccaccactgttttggtttgaggatttccaccaaaacttggacatcaattgttcaatctctctgctaatctctaagggtaacaggaacacactcatggcgtaactcgggagagtctgagccacggttttaaccaaaacttccttgcctgcccgggaaaggaatttaccttcccaaccttggagtcttttgcgaacccgatctttaaggaagcctagaaccgccgttttgtttcttcccatggtgctagggaggcccaagtaagtactattctcagtggcttgagacatctgaagagtatgattcaattggct

SEQ ID NO: 60683 - DNA, 892 bp, Cannabis sativa
tcgtggtgtagttggttatcacgtcagtctaacacactgaaggtctccggttcgagtccgggcgacgccacttttattgtgaatttgttgttaatgtttaactgtcgagagctaatttgataattcaatttttttggaaaaacgaaacataggagttaaaatacaaaataaaattgataacaaaaaaattattattggaatggttttttttaagcggaataatcattctattttatttctgttgatctcgagtttaaagagatctcgtcctatgataatggtaatagcttactttcctttcaattgtattaacttgtgagataaagaataaagtattcattttcgaaagctcttacaaagatctctcaataatttactcttagatcgtgattttgctcttgaatgttctctctgattaatttcgtgtcccaaaatactaagataaaaccactatttatatgggttacacttacataagaatgttttctcttaatatataaaaaataaaataggaaattaacatgtttctataattacaatgaaaaaattagaaaatctaggttgattttcgttattctctgaaggtacgaaataatctcacaaaagtatggattgcttccaggggcggacgtatatggacctctacagaggccatggcccccccaaaatgtatatatcttatatttttgcatttatataaatggcccctacttaaagtcaaacaatttttttttcaaaaaataaaaaaaaaaaatggatactataaataagctcaacgccacttatattatatttatgtattctcaaaaaaataaaattatttgtttccttttttaaaggcaattattttctaagacgcatatttttttaattttttttacaataataaaaa

SEQ ID NO: 60684 - DNA, 750 bp, Cannabis sativa
tttgaaatgaaactaatctcaattttttttttttaattttcttacattttaaaagtaacattttggttacttatgaagttgattaaaaaccaataagtaaatttttcataaaaaggtatcatttttatattatataatttaaaatatatttttattacctcaaaatttatttgtatacactttaataatcaattaattattagattatattaacacatttgagtaacttttaagtttatttgagtaaatttaggtcgtattatattgtattatattaaattggattatatatcatattttcatgtaatattatgttaaactttaatatgtatatatactaaaatattatatatttatgtgttcatacagaccaataccacatatcattttacataaaaatatttcataaaatgtaatttaatataatactatacaatacaatacggtgtaccaaacgaaccaatatatcatacatgtttaagtcactcatgctctttaaatgtaaattaaagaagatttagaaaaagatagaataagacatgttttctatacattttgattaattaaataaagaataaagttacaaataacttttaaatcattacaaataatatacgtttttttttttggaccaactaattataattttgataagataccaattggttacttttgataaaatgatcaattttaaaataaaaatatatcatataaataataattttcagattagttactttaatattgtat

SEQ ID NO: 60685 - DNA, 1182 bp, Cannabis sativa
  modified_base (729)..(729): a, c, t, g, unknown or other
aacatgaaatattacaaaaacaactcaaacaaaactttacaacaacatgaaaataacttattttgtaatttttttttttattttttaacttttcaactttttatttcatcttccttttcaatggtgaaattatgaaaagatagattatactagtgaatgaataattttatcatttttaaatgagatgagtcaagatattgttgatgatacaaatatttttttttcccttatgatcaatatatttatctttataattcattatgaaaaagtcacactcctcattgtatttgtgttatgtgtataattttcattatgcaattatggacaaaaaaaacataacaacaatactaaaacaatatagctttattttaaaattttaacacctattcattgttctcattatactattcaaaaaatttaatttacttgttttcattcgaaattttctaaaaatactagaaatctctaaaaatatttaaacaaaaaccaataatataggagaacaaccaaataacaacacaataaaaaaaaataattaaatcaaacacactaaacaaacatcaaattaaaaataaaaattccaaattttttgggcaaggaaacatcgaaggagacctctctaggggtgttcattgcactacattcaatatttttaagcctatctagatctgatccagttatatactggaggttagattttaccattcgatccgatctaattaatttcantcatccaatcgatccaacattcattggatgtattttatttatatttattgtggttctatctattagaggtattttatttatatttattggtttaatttgagtttatctaatattttagacttaatattttttttggatgggatctgatacaagtaaaatttaatgttaattttatatatacctatagattttatgtattagatttttagacaccccatccaccatccgatccgatccaagatatttaaaaattacatctaatccgatcacaatgggatatttagtatttgacggtgggttctcattggattggatcgatttatgcacacccataaacctctcctttataatatttaaatcttttttcgtcagtttttatggaaatctctcatcgttagagcatgtttggtattgttttctgttttttgttttaaaaaattgtttttagaaatg

SEQ ID NO: 60686 - DNA, 1907 bp, Cannabis sativa
atgtcctccaagctattacacttagttagtataatgtatattatacgctaagtgttctaacagccaattcgtctcgtcaacacctttccacacattgtgaggttgatggctcgctatgtattattgatgtcatctttatggttacgtacgcggaatggtttctcgttaatacacgaatcaatagtttgtacatccttgactcgctagagactatgcagtttgtgagttataaatatatcctattgactgcacatttaatgagttattccatttaatatcttttaatataattttcattatatttgttgattcgtattcctcaaggttgacacgtgtcatcctctgaagtaccagccaaatttcaggtataacaattaccccttaaaaggttattttcagtgaaaagtgctttttaaatgattaccaaggatatttttgtcataatccattttaaaaaaatgcatgccctttgattttggcggttttgtgatatgaggcacatcatgagcattaaataaccatcttttccacttcctccttatttctacccgttggatcatttatccttaatttgacggagatcagctgaattgtataaaacgaaaaaaggaaccacctttttcattatctttgccatttcaaaaattttcttgagcttctctgcaaaaaactccaccctaattttttgaagctttgcatgccatctttgtctttgacatacttcttgcaagtttcatcgaattttcttttcgacctcaagcacccagagagatcatcacgccgttcgctgcattgtcaattgaaaaattgttcatcgttccaaaactcgacttcaaacagtaagttattcatttttctctattttcttatttgctctattattttacatttctgggtttgatcgctacttttactatttgcacctttgtcatcttatttggttttagcaattttgggttgatttttttctaggtaaattttaaggtttaggcagagcgtagacttttgggtttctccaatttacaagcttctggtttgataaatttcatttaggaattgggatcgctttctttttgtaacaatgtcccaatcaggttcagaagtttatcgtccaaaaattttagaaacagagtgccccagtgaacttgccatcccgtttaagcacagaatatcaaaacccgagtccaaattaaagataaatggtgaaaaaaatagggaccacatagtaaaaatccaccaagataatatttctagtcgccacaggcgcttcttgcaagaaataatagaaggcgaacatcgtttcttgcaagatgctgcttggcctgaacctcccagtttatcatctattcctttggctaggcctttatttttacccagagtcacgattgctttttcaccaggttactttgattttgatatcatgacttccaagcctcgtaaatcaaagactccctaagaccctaatgttaccttcgaggctaaacttatcgagtcgagggtacgagccatcgacgattatgtaggtggcatcctaaggacttgtggcattgactaaaagcaaaaatgccgggttagatcagtatcccctggtgagtttagttgttacgcaccagaacgactcactcgcaaagaatctgaggagactagtggcgaggcaagtacgagtggctcgacagggataggcacttggagactcgaacacatcagtgctggagcaattatccccttgtgaaattactataaggatttccttaaccatcttagaattgctccatcccagttggttcctatttcctacagaatccttgcatgttaaaaggttttgtacaaaattttaggatgggagtgccccactcccctagaaatagtgtatctctactccgtcaaggccgttcctgcgaggaaga

SEQ ID NO: 60687 - DNA, 1604 bp, Cannabis sativa
  modified_base (1568)..(1579): a, c, t, g, unknown or other
tcttttattgataacaaatcagattagatgtaaataggttttatttagggcataaaatcctaacaccttatcctttctatctaggatctgaagtggttgttcttcgtatgaaaagtccagttgtagctcaagattttcataacttagtacatcagcagggtctgaaatgtatttttgtagcatagaaacatggaatacgttgtgaactactgagaaagctggaggcaaagctaaacgatatgccacttgtccaaccttcttgagaatcgtaaaagggcctgtaaatctatggcatgatttacctcttttcctaaaacgtttgatccccttcattggagacatctgtaggaacacatgatcccctactcaaaactctacattcctgcgtttcagatctgcataactcttttgcctactttgagaggcaagcagtctgcctttaatcttctcgattgcttcatttgtctgttgtatagattccagacctaagtatttcttctccattgtctcatcccagtgaatgggagatctacattttctgccatataacaattcatagggagccatccctattgtactttgataactgatattatacgagaactctatcaacggtaagtacttattccaggagccctcgaaatccataacacaggctcgtaacatatttccagtatctaaattgtcctttcagattgtccatcagtctgaggatggaaacctgtactgaattttagtttggtacccatagcccgctgtaaactctgccggaatttagaagtaaactttggatctctatccaaaactatagactttgttactccatgtaatcttactatctccttgacttacaaatttgcatattgatccactgtaaaggttgtcttaaatggtagaaaatgtgcagactttgtgaatcgatctaccacaacctaaattgaatcaaataaacccctgtttctaggtaatccaaccacaaagtgcatggtgatatcttcccacttccactcaggtagtgttaaaggatgcaacaaacctaccggtctctgatttcagccttgatctgctgacaggttaggcatcgcgatacgaattctactacattcttcttcattccgctccaccagaattagggtttaagatcttgatacatcttggtggtgtcaggatctaaggagtatggagtggtatgagcctcttcaagaatttcatttctaagttccgcactatttggaacacaaaccctggtcttaaacaacaacatcccactttctcacactgtaaaatctcttgcttgaccagctgaaatctcttccctgatcttcgctaattctggatcagttaactgagtagctttaatttgttctaacagatcagactgcagcgtcaagctatgaagtttacctacaacaaactcgatgcttgatctgaccatgtcctctgctaaccaaggtgaaatctaaatcatattggttacttgtctgggacctttcctgctcagggcatcgaccactacattggctttgcctggatggtataggatctcactgtgacagtcagtagtcccnnnnnnnnnnnngggaaataccgggtaagctgtacaa

SEQ ID NO: 60688 - DNA, 1570 bp, Cannabis sativa
tactcgatttatcactttattacttgttacgattgcatacacttgcgtatacgatttttcacaacattgatccttagagatcactctctataatctaagctactattgttaataaatgttggttacaaggtggtttcccttgggaattagatccatgcagaaaattgtttgagattgaatcccattaaatctgttgtctctcgttttttatgctacaatattctgttatagcatcaatatgttattttagtttttttttttttaattttctttaattgtaattttttgttattctactttattattgaaactaatcttttcttgaagtatgaattcacaacaactaaaaatttaactaaaaatttttttgtgataagatcagaaagatttctttttaaacactatattaatagcgtgataaattataaaagtactacattaagtatttattatttcagttttttttttttttctaaaagtaactattcttattctaaatcacaaatattatattgaagggatatgatgtagtggactatacagtgtagtcagtatttattaaattcaataaaaataatgtcaaatgcactaaaaatgtgttgaatgaaaatttatggttcaatatgactatcttaatcaaatctataatcctgccataagatttaacacatattttagagcatttaacttattattagtgcatttgataatgcaaactgctctatgtaatcaactacactttattcaaagcatatatgtatgtattatattataacacttcattcaaagtgagaaaattgttggcgcaaaacccttctcatgatcttgttggttgctgttctcggaagtgatgaaagaggcacaacacgagtgacctatttaataattaaccaaacaccaaattagaattagtatacaattataagatcatcatcatagtgtggaagtgtataggataagaatagtctaattttttactaaatatacacccttgagagtcaagactaaaaattaacaaacaaaaaagttaataatgatgaaattggtaccttgaacagaggatttagtttcttctgtaaacccaagttgaaagataacctcaattgatttaagtcaattgttgtatcatttgaatcttttaatacaaagaaaactactaattgctcaggtccaccgcccaaaggtggcaccccaatagcagttgtctcgaaaactctgtcatcaacttcattacaaactcgttcaatctctatggaactaatctgtttacataaacaaaatcgtattcaattcaaatctatagttggaaatatatatatgtagagtcacaatcctatcaaattaccaaaagtaacaagagatatagcagatttagctacatttgttattatccaagatcgatttagctgacctttcttaatttagctacttactaagttgcctatataagacaagtcttattcattatttagtgaatattttttagatcacgatagaagcacgaatctagagaaagagagtgcaagaagatcagataaggagagagtactgtgaaagagtttggggattc

SEQ ID NO: 60689 - DNA, 578 bp, Cannabis sativa
cctatgccatcccttattaagtttctagcaaaaataagggcctctaaaatccattattgtagtagtgactggaaattgtcaatattaatattctgttgtgatttctttgaatatcaaatggtaacactcttttttggaaaaaaattaaggtttataatgggggttgagttgttgtatgtttttaaatgttatgattgatgttattgggatgcaaataaattgaaatgctacatatctcttttcttactcacttaggtcatctctaatggtgaaagttaaatatggtattgttgccctctattttgaacgaaatacgtggaccactatgataacgacacgtggatctaagaggtatgactcttagataaattgaataagtctttttggatcaagagtgtcaacgagaagatacctcccggaggagatatgaaaactctacatactctcggaggtcagaaccatgataaggcatctccgagagatactggactctatttcaacagtcacctcacatttaatgccgcatgggagaagacgtattggaactgccataagcaataagtctgacggcgtaaccc

SEQ ID NO: 60690 - DNA, 1447 bp, Cannabis sativa
tgcgaagttgaaagcgtcttgtcgtaggctagtaatacccttgtcgcatgatttttagggcaagggaattaccatcagtatgattcccacagatacccacgtgcacctcgcggagtatgtagtcgcaatcttccccgtcaatacatttaagtagcggctgactaaatcttctgcgatataatcttccatcatagatgacatatcgggcagcccgctgccgcagttttctcacttccattttgtcgtcgggcaagatactaagtaggcgattattggagtcatccaggtgacttctttggcaacatctatttccatcacttcttctcgacttactatcgactgagccaatacgtcaacagggattacatcgagtaattcagcttccctagttgaggccaagcgggccaatgagtctgcgtgtgagttatgagcacgcggtactcgggccacgacaactttcttgaatttctacaacagctcgcatactatggcgagatactttgccaagcgcccgcctctggccagatattctccattcacctggcatacgacgatttgggagtcgtggaaagcatgtaagtattctattctcatcttgagagcaagcttcaatcctgctattaaagcctcatactcagcttcattgttagatgcagaaaattcaaaacctaaagcagcgtgtaccttaaaattgttgggactaattagtatgattccaccgtcggaaccttcactattagaagccccatcgacgtacaacgtccatccttctccatttggtacagcagtgtcgatcttgtcgtttatgagtgccacttcagtactttggaactcgagaatgaaatctgccaaggcttgccccttgatcgcagttctcggtttgtatctgatgtcgaactggcttaactctgccaaccatttcaacaatctccccgatgtctctggttttgctaagacttgcctcaaagggtagtttgtcaaaacttcaattctatgggcctgaaaataaggtcgcagttttctcgacgatattaccatggcgaacgctaatttttccatttgaggatagcgagtctcagcatctaacaaacgtttactgacatagtacactaggtactatcgtccttgctcttcgcaaattagtaccgaactaatcgcatattctgacaccgctaggtaaatggaagactttgctggacatgggttttgataggattgggggctaccccaaatgcgttttcaatgcttgaaaaacctcctcgcatttctcggtccattagaacttcttattgccttttaaaatttgaaaaaactccttgcatttatcagacgatcgcgatataaaacagattagagcggcgattttacttgtgagactttggacttcttttggcttagttggcgatcgcatttcgactaatgctttgatcttcgcagggtttgcctc

SEQ ID NO: 60691 - DNA, 1389 bp, Cannabis sativa
cccaattgaagaaagaggaacctaagtctgaagttaagcctgcaccagcacgtgtatttgctatcactcaggctgatgctgtcgccagcccttcagtggtcactggtcagcttcttatcaacagttttgcttttactattttattttactcaggtgctactcaatcttatgtatcatcgagagttcttaatcagattgataggcctagtgatgtttttgaaattgggtttggaaccttattgcctaccggagaattaattatatcaagaaagttggttaggtcagtgttaattagaattgaagatagagaattgagcgctgatcttgtgaagttaccattggctaagtttgatattatactcggaatggactttttgtccaagtattatgctagtattgactgcaaacgaaaaatggtaactttccaaccagagaatgaggaaccatttgtctttgttggttcaattcaaggttctcgtgtcccaagaatctcagcatttaaagttagggatttattatgcagtgggtgtgtagagcgattgtagttgattccagtaaacccgtgttacctggacataaagatgttaaaatggttaaggaattcctggacgtgtttcctgaggaattaccagggttgccacctcgacgtgagatatattttattattgacctaatacttggggcagaacctgtttcaaaagcaccttaccgaatggcacctgcagaattaaaagaactgaagatacaactccaagggatgttggatctagggttcacctggcctagtgtgtcaccttcgggagctccggttctattcgtaaagaagaaggatgggactcttcagatgtgcatcgactatcgggagctgaataagttaaccattaaaaataaataccctttgcctagaattgacgatttgttcgatcaacttcagggcaagacagtattttctaagattgacttgagatctgggtattatcaattgagaatctcggaggaagatattctgaagacagcctttcataccaggtacggtcattatgaattccttgttatgtcattcggattgacaaatgctccggaagcctttatggatctcattaatagagtattcacggattttcttgatagttttgtaattgtatttatcgatgatattcttgtgtactctcggtcagaagcagaacacgaacagcatcttcgaatggtactgcaatgacttagagatcataaactctatgcgaagttcaaaaagtgtgagttttggctgtcacaagtatccttcccggggcatattgtcagaaaagacgggattatggtagacccagggaagattgaagcagtgaagaattggcctagaccaaaaacagtcactgaagttcgaagttt

SEQ ID NO: 60692 - DNA, 777 bp, Cannabis sativa
tggaggggtgagttctttcataactactgtattcctacacaattttaattaaatgatttgtaatgaatggataacaaaaaaattccatggtagaaacaaaatcaatgtctacataatagaaatgtcctatatataaatatgtacatatattatgaaatgtcataaattttacatttattagtgtcctgtttaataaataattagcaaattagtcataaaattgtgagagaatttggagtttgtgatttttgaattcagtatttcctcattagtatgcgtttttagtgactaagtagaataggttatttaggattttttttttcccaaactatgatttatgtattattgtgccccttgaatttttcaacctattcaaaatagcccccaaacattcacagtactataaagtgatccttgtgtgaagctttatgacacgtggcaaaagaaatgatgatatggctgtttagactattactacgtgtctacgtcatcgccaattgtgtaattaatttgaagaaaaaaaataatttaaatgtccttaattgagttttactttaatactttttgttaatcattaattgattttagtgtaatgactttttacgttttttattttaaattacacatatactgttgatgtgacaatagtctaacagtcacgttaatttacaacattgtgaatagtttgagaactatgtctaacgggctgaaaaattcaggaagtacaataatacataagccacaattaaggagaaaatttctaaatagccaataaaa

SEQ ID NO: 60693 - DNA, 3458 bp, Cannabis sativa
aactcgtttttgagataaataatgacaaagttggagaaataattacattgtatacccactttactttacatattttactttttacctttatttttatattttttaagatataccaatttttatagatgatgttcttgttatattcctaggttaatgtaaattatgtgctatggagggtgatagtatattaggcaacacacttataaaagtggatatattttaataaaataaagtatttttgattaattaatacaaaaaaaagtattactcaatttttttccaaatttaggggatatagatccatctgcttatcttttcaagtatgtcgtttatattatctcaaaagaaaaagtatgtcgtttatactctttaactacagttctgagttttcaagcgacattatacttgtcactttcaaaacaaatgatgtgtcgtatagaaaaatgtatattgagcatgggtattatggtcttttcgtcgaagggttttaatgtaataaagtacttccagggcttcagcgcgaggcaattagggtttttgagtatataaaacctaacatcggcgcctacttcttctaactgctttcacactctctttcgaagatccgccgatagatccccaagtaaaaaccctagaggttctttctcttcttcaaagttcttaactagtagtggttttgacgggattgttatggatgatctaatgttttattatgtgttgcagggcaggaagcaatggccaccgtacctgggcaattgatctgggagatcgttaagagcaacaactcatttctggtgaagcaattcgggagaggtaacgcaagtgtgcagttcagcaaggagagcaacaacttgtgcaatctcaactcgtacaagcactctggtacttgccttgtctttgtttagcctgaagccgttttatttgattatgttgctcattgtttggttcacgagatttatttttgtttaactcttctttttcgtttgcgtttgttttatgatttaatatctaatgtttgtcaattcgtagagtactggaaactgttaattatgtttgatgagatcttaaacctgtttgtcatataatgttcaaataatggatggggttaatgataagaaagtttatttgatgaaatgtaaattcttttattttttgctttctttgttttaagttcaaagctggaacatttggttattcgaaatatttttagatgacttatgattggattcttctattaggcttgtctaacaagaagactgtcactgttcaacccgctggtaaagatcaaggtgtgttgcttgcaacatctaagaccaagaagcagaacaagcctgctgctttgcttcataagtctgttatgaagaaagagttcggtaggatggctgaagctgtcaaaaatcaggtataatgcatgtttctccttggatatatatatattttttttactaatcactatgtcattttcatagatgatttgggcctgatttatttgttctctagttaacaaaatagaatgtcaagttaggaattgaggtgcagtaaatgctcgccgttcaagtttatatgcatgtgctatttatttgtcttctgcggtgatgtgcctttaacatctaaggggtagccatattgaatggtttcttcaatgaaatactcttgttacgcttggcttctgggcatgtcttcagaggcatctaggttccttcttgtagaatgtttgggggatagttatcattgtaggtatggtgtcattgtgattcctagatagctttgtacttttgttacacttgggcatgtcttcagaggcatctaggttcctccttgtagaatgtttgggggatagttatcattgtaggtatggtgtcattgtgattcctagatagctttgtacttttgttacacttagcttggtttccgagcatatgctcttgattgtcttagggttttggtatttgccttgttgaatgttttgaagatagtgtgtgggtgtaggaaaggcatcagtttgtttctgttggtagtttgtactgttgttgagccattatatttggaggaccatatctttttctggattaaactgaaccctgtctagctgatatactgtcttctgcggtgatgaggctttaacatgtgagacgaactatctttgtgctggtttgtcagtgagatattcttgttacgcttggcttctgagcatatgctattgatggtgtcatgcttttcctttcttgtagaaattctgaagatagtttggttttattctctctagttaattctttccatcttgcaacttaaattgtcttctgcggtgatgaggctttaacatgtaagacaaaccatcttggtgatggttggtcagtgagatattcttgttacgcttggcttctgagcatatgctattgattgtgccaggcttttcttttcttgtagaaagttgtgaagatagtgtggttgtaggaaagatgtcagcttatttcaagttaatttagcacttctgttaatctgtcagctatttgattgtttctggtccctattttgtagattggttgctccaatctcttcttttatggcttcttcacatcttgcaacttaaattgtcttctgcggtgatgaggctttaacatgtaagacaaaccatctttgtgatggtttgtcagtgagatattcttgttacgcttggcttctgagtatatgctatttggttgtttccggtcccttttacataattgtgtcagcttgtctatttagtttgtttcacactttagtcaaaccatcatcttaaggatgaatcattccctacttttagcgaactacatctttgcctcttctgcagtgatgagctttaacttgtgaccatctcaaatgatttcttcaatgagattttcttgttacgcttggcttgtgagcatatgaagttggtttttggcacttatgcatattgtgtttttatgaataatgtcagcttgtccctggtggtggtttgtacgttttttttttacctgtataacgatttactttgtctatcttgataattttcatctcaagttgtggaagtattaattctgttttttgccccctctatttgcaggtgtctgataacttctacagacctgatttaaagcaagcagcccttgcaaggttgagcgttgtgcacagaagcctcaaggtatccaagtctggtgtgaagaagaggaacagacaagctctgaaaatccgtggtggaaagtgagagatgccctagtgtgttttacctgattttgagtcctttatttccagatgttgattggattttggagtttctttattaaggttgttaatcttaattttggatatgattatgtttttcagtattaggatatttttggataaagattatgttttttctcgacttaatgtgtctttttgttctaatggagaatactaaattaaatttacatggtaaacaaattatgttttgtctc

SEQ ID NO: 60694 - DNA, 933 bp, Cannabis sativa
  modified_base (313)..(314): a, c, t, g, unknown or other
aatagatatatatatggaggaagttttaattgttacatttttagtaaccatcgtggttacatttttttaattattggatcactattaaatagttgtaattaatttgaaaattaaataaaaataaataataaataacttataacctgataatttatttccttgtaaaagtttgattatattttaaaattaaattaagcataatgattaattaattttttgcaatttattactaaataaggatcttttagcaatttttcttttacacttaaaattatttaaatttttatagcaaaactctttataatttaaaatnntacacatataatttcataattaaaattttattatacttgtaatcttaatttaaaattattacacttaattatttaatttttttatttaaatatttaaaaaagtaaaaaataaaataagtttgaaggattttctaaaaaaaaaatggctacactccttggttgaacttgtttattacactaaattaaggtgttgttacaatagatggaatgatgcatttgcaaaatctttgttgccatgcaatcttctgtcaggtttcattttttactgttaaaaattagtttttaatatatttttacaaattaaatttttaatatatttttttaatatttaaacgaattttctaataaaatataaataattttttatatcgcgtaatttgttttaaaattttaatttacttttaattttcttaatcattcaaaatgatttttcttaagatataaattaattttttaagatttactaaaaaaaaaatctttcttatttttattttgaaagagcacgatttgatagttgtcaaaatttagggagcaaagttactaattgacaaagatatgtcatcatttaaacgaaataatgggacagaacctaacggaaagactaaatttttgtaaatgt

SEQ ID NO: 60695 - DNA, 1262 bp, Cannabis sativa
gcttggatatggtctagttctaggtgctggtccagttccaagtcctggtcacggcctcaattgtgttctagggtcctggtcacgttcttgttcaagcttcagtttcgggtcccatgtttgggtctaagtctatgtcctggtccagctttgggtccttgtccgagttctcgatcaaggtccaggtccaggtccctatttggggtcaaggtccttgtcttggtttaggtcctaagtcacaggtaccagtctgggtacaagtcccggtatgggttctagtctgagtttgggtcctattactgtgccaggtcaaggttctagtcccagacctggtccgatgccgattctatgtccgggatcgggtctggatcccggtctgggtctgggtctaggtctggctacggatttgggtccatgtcctggaatcaaacactgactacgggtcaggtcaaagcctcatgtccaaattcagatctcaatcttgtttccaattgggatcccaggtcttgggccgtgtcctaagtttgggtttgggttcgggttcggggttgtgtctcggtagtcaagtactgggttctgggtccagggtcaggtctcatgtctgtctcgagtctctggagtcgagttttgggtctcggtcccagtttcgggtctaagtgccccatttaggtctacatccttccaagtttgggtctaggtttgggtttagggccccggtccatcatctaggtccagatcctaggtcccggtctaggtccaagttcagcttcgggttttgatcccgagtttgggtccaaatctagttcccagtacaaggttaggtttgagtctgggtctgggtcccagtctgattccaggtccctgttcaggtctgggtcggggtcacgatccgagtcccagtcaaggtctaggtcctggatgaggttctggtgtgggcttgggtccaggttccaggtcttgagtctgggtctagagccccgggtccaggtctgggtcctaggttctgatctcggtatgggtatgggtctgggctcgtgtcaaggttaaggttttggggtttagagttttgattttagtatttagggatttagggtttagggtttagggcttagggtttagggtaagtgtaaagagtttaggatttagggtttagggtttagggtaaataaagtggcaaaatcaatgcctagtggccggccatggatggtattgggcccccactttgcaattttgccattttctcatttttccaacttattttctca

SEQ ID NO: 60696 - DNA, 820 bp, Cannabis sativa
attttaacttaaaatagaaaaaacataatatttaagattaattagattaattatacataaaaaatatatattaattatggtatagttttcaagagttaatttgagccattaaattaaatcaaaagctataaattactatccaatcaaagactataaattacaatccctattaatacgtaaaatatcaaattcctactataatagcccctttaaaatgaatttttgaaaacaacacactatataaggagaactagaaaaataaaactaattgagtaagataataattaatcatctatataaaatttaaaaattaatattgagacaaatcaatgtgtaaaaaataaaagctttatttatatactacaataagcacctataaatagttattcaacaatgtgggacttttgtatattgaagaattgagagtgatatacattttaactttgaacaaaagataaacactcacaaaattagaaaaatagattagaaaaaatatagaatgtcacatcaccactcttagatttagttaatggagagcaaagaaataaaaacaaagctcataaaaaatgtcatgtcatcatgcctaataatatagatagatagataaatatatatattcctcattaatttttatatatatatatatattaaatattactgatttattttggtaatttatctttagtttaactacttatacattacattacggatttattagtaaattatattgcttggctagtataaatatataatgtcattctagaataagaattatcaattaaaggagtattaggagtttttttaaatgaattttgta

SEQ ID NO: 60697 - DNA, 590 bp, Cannabis sativa
cacattgaaaatttgtcttatgataggattggttaatcttaagaagtatataaagtttctccctatacttaaacatgagtacttgttgattattctatatgattcttagttgtcaatgtaataatgtatacttagtcaccacaaagtataagttcttccattgaaaaaaaaaaaaacaagttgaaatattttcatgaaaagtggctctataattattgaggttagaatattaatattactattattttcacttccaccatgtgtagggaaataaagtaattaatataatactatagtacacaagaatttgaatcacttgaattataaaataaacaagctgagctaggcaacaaattaatgatatttaatctgaatataatattattagtagtgctcaatattatcataaattgacactttttgagtagatatccatttttcaatgatagtaaattaaaatatagaaaactcaaattgtattaataatataagaattttttttatttttacattttaaagtatttgttttttacattttatgaaaattcatatagcaactcaaaccctaaatataaaaaaattaaaaaaaa

SEQ ID NO: 60698 - DNA, 931 bp, Cannabis sativa
ggattttttattgccttgcaagacattgaaaaatgggaggcacttattagttgacttcgagatgaatctattgagtgcttccattcttcctgttaaagtctgaaccccttcgtctttgtcggtgaaggcatctcgattaatgcttttatttttctctagattagcttcaattcctcttgcataaccccaaaagaacatttcttagggtttagcttcatatcatactttctaagcatggcaaaacattctgcgagatcctctttatggtcctcgctttttactgatttcaataacatgtcatcaacgtagacctccatgtttcgtccaatctggttttcaaacataccatttacgagacgttggtatgttgctctagcatttttcaattcaaattgcatgactttgtaatagtagaaccccatatttgtcatgaagcttgtatgttcttggtctgggatttgcattttaatctagttatatccagaatatgcatccatgaaagccattaattcatgccctactatttcgtgtaccaatttgtcaatcattggtagtggaaagaaatctttaggaaatgtcttatttaaatctaagaaatctatacaagttctccatatgccatgtagatttggtatgagaattggattagagatccacgaggataaaaggcttaatttattagttaataatttaccaacttcttctttgagtgtgttttgtctctcgagatccaatggtcatcgcttttgacgttttgctagataattggggtcaatattgaggtggtggcaaatcacatttggatttatcctgaccatgtctaaatggctcaaagtaaattgatctcagttttccttcaaaaaagtgattaattgctaatttagttcttcccccaaactttccccaatataaatatacttaatgggatggt

SEQ ID NO: 60699 - DNA, 2084 bp, Cannabis sativa
  modified_base (207)..(208): a, c, t, g, unknown or other
aataggaccctgaactgatttttggccaaaataaaacttaataataatctgatttagagatgttatgataaaagtggttacattttatatatttgttcgtgttagaaattatcttaaagttagttatattaaaagattgttaaaaaaaaaagctcaggatcttatttttactatttttaaaaatatatggttcattttgtcatttannaaaacagagggtccaattaataacttttgcaaaacacaaggtttaaaatagtatttactctatatttatagtatacaaaatttatccatattatatacatagtttacatatatttataattattaactcgattaatttttttatatgggaaaatttgatttttttactaataatatttctactactttttgtatatttaaattatataaaaatatatgctatttttttttttttactatttttatcttttatgagctatctttaatttcttaaaataattaacagtttatgtgctaacttatataagtatttatatagattttatccttatatatggtggtattttgctgtgtgatattttgaaaaattgtaattcaattgttttggttaggataaatattattttctatattgtgtctgcaaaagtgacaaatttaattttatattttgttgaataacaaattagactttataattctaaaatggtataaaataatagcttgagatcaatttttgtcaattttctattttaataaaaccaacctgaagctatttcttaacatgaatatatgtaaaaaagaaatcaaatatttgattgcatgggtaattattttttcttatacacgtggtaagcaattattggtaagcaattgtttaaaccttacttttttgcattgtaaactatacaaaaaattttgaaaatttataggtagtcctaaataactacaacatattgacgatcatgaaaaaataaattggactaaaaactttcttggatgttgaaatagataaggaagtctaccaaaacactcatttagtggtgttctacatattttctctaagttattcattttactacatttgaaatgattatgggttaaaatttttatagtagaattaagaagcttttatggtgcaccctctactattttgacatccagaaaaaaaaaaatagtctgtttttatagttgtgtacgttgcaattatttaagacatcttataaattcttaaaaaattcaaaataatttacaatatacaaaatagtattcaaaaaatttatagcccactttagatgtttgtccttactcttgtatttctaataaataataaaacttatatttgtaatttgcactatacaattaaaatgtaaaaactaaattatataaatttttgtcacaattatttatgaaataaaaatcaagcaaacaaaaatataaataagatggaacaagaagaactaggcatgtgcatagcacatgctaatctcacctagtagtataaaaaagcataatgattcattagccacctctctcacattcaagattaggaattgtagactagtcttccaagaatagtaatctttgaaacgtttctctccatgaaacaaaagaaccattctttttggctataatcatagttcaaaagagttaaaaaaatattttgattcagaacataacattgttgtctacatgctcacacacatcttgagatgtagtaaacaccccaaaagatctaggtttgagtatgcaatgaatgaggataagaagattattgtttatacgagaaaagttttgaggatcttgatatgctttaagagatatatattatatgttcttaaatatgtgttacatgcatgatatttataggttatatatatagaatacatatatatatatatatatgtaggcgtgtatatgtttgtgtatatatatgtatggatgtttatatacattacatgattgataatataatatatcaatgaaattcgattttgattaaataaaatatttatatgttgagtataattttttttaatatacaaatgtctatttatgtgcctacaatcataattcgcaatttttatgttctctactct

SEQ ID NO: 60700 - DNA, 1746 bp, Cannabis sativa
caactctatatatattatggtattgaaatatatggattaataatatttttattaaagatacactcacgagcctccacagacaaatctcattgcgtctagagtgagtggaaaatccataaacacattgtacctgtaaacccacattattcaacaaataaaaaaaaatatgattacatattgattttttaatttttaattttttttttacctttttgtaacaccaaagtcatggcaaaatgtacaccgatcgagtttaagatcagttttgtgaacaatttttttcccgtcagctgaaaatgcagagggaccaagttcatgtaaaattacaacctttcctttaactacttcatttctaatctataaaaaatgatgcattttataatatttattgagatcgctttatagttatgtacctgaaattactcctaactcaacatagggttttattgcattcatcccaattataacaagctccccggtacctggagctttctgtatacatatgcatattgtagtgttcaaatattttacaaaaatctcacacatatatatatatatatataaataaacatacaataaagttaaaatttacagatactgttgtataatgtatggtactaactatatataattaaggtaaatgatgtaaccttaggatggcttgcaaatggtctattccaatgattggagagatcccaatcgcctaatgtttgtaaggtagaaatgtcaatttcttgaggtacatgattttctgctacggaatataattttccggagtgttcaaacacattggtgttgctcatgtatttgtccactttgccaaatctcagctgaaaattaattaaaataatttattaattaattttatggggtatatatagaaaatgcatatatgctaagacataacatatatacgtactaaattgaggagagaagcagctattagagcagtagagtcgccttctatgatgggaaggaaagatggcttgtttctttgtttttcaaggttgaaagtttgggtttcaacataacggttgttgtagtgaacactccagttatcatttttgtcttttgtaaaataaagagcatgaagcattccttctccttctacccaaatgcgacttgactttccaaatatagattttgttgactttagtcctccaaacagaggatttgctcctgccatttttaattactatttattatccatcatatgttgcggaaatgaatgaaattacaagtgaatgtttttctatatatagaatacacagaattgttaacaaacttaaccaatatgcctaactagcttaacataataaagaaataactaatctttaacagaactaacactaaactaatggctatattgctataaccaacttacaaaacacactaaactgaaaatcaaaataatcgaattcctattagctagccaccctccccaaagtagactgtataaattaggattgaacattttgacctgatttgattcggatccggccaacctgtctggacccgacccggttaactcgtaaaattaaagaaaaccattctattcgggcgaatcggatccaatccgatacacttttaggcaggttcgtgagttgattttcttatagacatcggattaccggtggccattttttatcttttatttttattacatatataatatattaaaaataaaaaaactctaaaatttaattattttatttttattacatatatataatatattaaaaataa

SEQ ID NO: 60701 - DNA, 3811 bp, Cannabis sativa
  modified_base (28)..(32): a, c, t, g, unknown or other
  modified_base (87)..(92): a, c, t, g, unknown or other
aaaatgaaattaaaataagtattgaaannnnnataaaataatgtgaagaaaaatttaaaaaaatatattaaaagtaatttttaaaannnnnntaagtttatatttttttaataatttggtgcattgataaatttatggggtgcaaatagaactctccaaaaacaaacatcgtaatcaattcttattactattcttattcgattccattactattattattcatccaagctaaacatcacgtaaacttgtataattttttacactattatttactaataagaaaataagaagagaaaagataggcaaaaaaatgtacaaatgattaaaaattgttatacccatatttcgagcaattaatatggtaatgatgcgtattaaaagctggaatataaaccagctcgtgtgataaaacaataaatgcgctcaataaactcgcctcggaaagtacaattagtagaaatattagaactcaccctttaaagataaggatgagtcgtgaataataactaccgatttatgagactggcgagacaaacaatcaacgtagaagatccatctcgagatacacagaatactcaactgaaagtatgattggaaagtgtagataattaattctttaaagagcttacagctcattgatccagagtattacttagagtatacttaggcgttgaaaaccctctttagaataaaacaacttaagaagattgtttgtattacgatatgaatagagcataatcagcataaccatttacagataaagataaagagcgattatagcagttatttattactatcccatgtgatgtaaatatgaaatgtggggaatgtccacattttacaaatggttacaaggataagatcccaagtgaataactctcaccctagaactcctataaataaggacaaaatctagagaacaagggacgaccaatttgagaaaaaaaaaagaattctacaactattttattgtattctatatacaattgatgaaattccagaataagatggactcgtggagtataaaaaattaacttcaaaaacacgttaaaaaccttcttgccattattattattaataattatttattttagagtttatttattacttcaaggttcatttattggttaacaaaaatttatgttaacagtttgatgctttcattgagagccttgtaagaaaaaacacaaaaaaataccctctctaaaccacagtagaaccttctatccctgacagacgacactcctcgaaatgaagatactcaacaaggagaaacaactcagtgtcctggaaaagaacatcagaattctcatcggaaaaatgtgactgagactcctcgctcgggggagcaaatggtggaggatttgaacaagttgggggtgaaatcccaaaaagactcaatgaggacgcttatgatcctaccagatataaccattagtggaattagaaaatagacaactctgacaaagattggctgaatcaaatcggaggaatgaccagttggaacgcgaggctgcgactacaagagttggacgcaatgattcacctcctaaccaaccgaacacatccgctaggcgacctcgaggaagacctagaggctcgaggaccagaacgcatagggaagcccctacatgtgataaccatggaaatcttacgaattcctaagatgatcaactagggaacataagggatatttcagtggacaagggggcccctaaaatccaagaaacactggcaatagagaaactcgacccaatgatccaagaacctcccgtggaaacacaaatagtgggaatgtacatgaaagcccagagtcatctcgcatgaacacagatgctagataaacacaacttagggaccaagggttcactcaacatgatgtgatgggtgtaggcggtcgactaccaacacactcgcgaagaccaaaccaaaatgacagagatagcatgtatacctacttgagaaggggacgtgtgtcaaatcttttttgaagacggaggtcaatgcgagaggaaccccaagagacaggatcgagcgctggtcctagtgggtcgagatcaaggatgcatggtcagagtagattgagcagaacccatgcacatgaaaggaaaacacggagtggggaagatacatgtcaccattatcaagatgaacaagtgagcatgagtaatactcaaagttatcagtttgaaagtcactctacaacaaggttggttagcaattacgaccaaagaaatgaaaaatgacacgactctaatcttcgtgaacacttaaactgtaaatagcccaacttgcacgagcatctcaaccgtaatgttcaaaatctctaagattgattaaattagaacacaatttgtcagcagcaagtcaagcaaccagtcatggatccaatttaactgagagtaattcaattggaggataagttcaagcaataacaagatggggaatatgagaaactgttagggtatgattcaaatgaggacatagagcctttacaccctgatatacttaattcccaattccctcaagaattcaagaatccacatgttgcacaatatgacggaataactgacccagttgcacatctaaataatttcaacacaataatgcgagcaagtaatgattccaaaaacttgtgttgcatattattcccaacatctctgactggggcaccaagcaattggtttgataaattcacttaccactccattacctcatgggagcagttatccaaagaatttaagaaatggttcgaggctgcaagagatagaaggccagaggcatcctcgttgacaaacatcaaacaatagccagaagagtctctaaaggcttatctaagtcgtttcaatacagcaacaatgaaagtaaggagcttgaatgataacattcagttaacgaccctctaagctggaataaccactgatttgtcaactgcgggaggaaaattgtgggatgatctatacggtcacccagttagaaaaattaatgaatttaataatagagcattattcttcgtgcagaaagaagatgcatgaaacgagatgaaaatgctcaaattaggctcgggagataaacccagctcaagtactgcaactgttagtactataacaataaaagtgggaaattcgagccggaatgggtaaaatggaaaaaggaaagatgaatcaaaagatttatcaaaggataagaagaagcaaatgaaacatgagaagtatgttccaacatactgagtttatacagagctaaacgagactcaagagaatattatctcgcaaacgagaatcgggtcgctttttgaagacccgaacctatgagacactcaagaaataagtgagatccaaacaaatattcccaattccataaagacattggacataccactgaggaatgtcgccaattaaaagaagagatcaaaggactcatttcccaaggctacctaaggcagtatgtcagaaacaaagggaatgaacaaaacttacccaacaactaaaatcaaaactaaggtgtacaacctcccccagttgagggcgaggaaatcctggttatttttagggggctgcatctcacaggaaacaacaatagtgcccaaaaaaggtatataaatcaagttaaaaaaacaagaatcaacctttgcaccacagcccctgaagcatacaaagcctgaggaatcaccaataattttcactgatgaaaatgcagcacatgtgcggttcccacatccaaactccctggttattacagtctagctcgcgaacaaaagaataaaaagagttctctgttgggttttgtgccctaaataaaactcatttta

SEQ ID NO: 60702 - DNA, 919 bp, Cannabis sativa
  modified_base (284)..(288): a, c, t, g, unknown or other
tcaaaattcgatagtttgatatttttaaaattaatatttattgttaaatttgtttagtagccattaatgtgtaatacctattaaaaagtgttccatatatatatatataagacataaaatgataacatcactttttaaaattagtttaaatacattttttattttttttcttaagtttctcattttttttaaatttttattaagtttataatattgaataatattgaatctttacttctctcattttttttattttttattaaatttataaatattaattaatnnnnnaattaattaaaaaaatatatttatatataattcagaaaaaatatgctaattgtttactgagattttttaaaaactaataaaacgaaacctacaaaataataaagtacaataataaagaaaacgggaatttttacgtggttcaggtattaataaactctagtcgacgagtcagtataattggccttaagaggcttgtgtaatgtatttacaataatgtttgcaagaaaccataactctgttctcttgctttctcttgaagaagaagaaatcttagagaaattttagtagagcttcggctatctttatttgtatttcccctttcgtatgaaaatagaagggtatttataggctaaagtgcgagtatggacatacccatgacccgcatagggtttctataatatgcagggtaaaatacatgcaataatctgactgttgggcctgaagaaggttgtgtgctcgtatgtggaagcagctagacaataagggaccaccaggacacgtgttgtcgaaaggttttaccttacaaaataaatgttagaagtggacacatgtcatcaaaaggtgtcacctagcaaaggaaacgcctagacaaattgtcaggcaaaaaggtaagtttagaggcgaggcatac

SEQ ID NO: 60703 - DNA, 1233 bp, Cannabis sativa
taattagtaccttgtcggagaaaaagagcctcaattgttgatcgcgggggacatcgcgcttggattgaacccatgattcgcaggagaaattaacaagcttatggtcggaagagtggtaatggagtgaaatagttttcatgtaaatctctctttcgaaatcattttcaataataacagcaccaacatcaccaaaatcctttggaatatcaacctttgcttcatagttcatcaccttgtcctttttcccacctttttttgattctgggaaacatttcatctttctttgctttccagtttctaatcatcacaaccacatcaaatataaacttataactatattatatattgtcaaataataacaacataataattacattacacatcattgtgtcataagtgtgtacgcaatttaaatatatattaattataactattgtataacaatcctaaccattaattaataatgtttttatgaatgaattttaatattaattactaatttaaaatatgtgaaatttatccaatatattaaattatataaacaatttatgtacacaaacaagatatctacataataaagatagattaatagaaaataattgtcaatatataataagtatatgtaattaaagtttaaaatttatataatttatcaaaataatcaagataaatgatcatgacttgaaaaatagacaccatattttattataatcttgcaaaatgacttttttttctaataatttttaggataaaaaattttcacaacaattttcataaagattatttaagtaaatgtattatatattatctatatatattgacatgtatttttttttaaaaaaataattatataacaaactatttgaattaacttattataaaatattctaaataccgaacagataacaaatataactacaccataaattttttcaatattatataatatgcaaaatatatataacatgaaaaggctatatttttgccaaaatacctcttaataatatattatttacatatatgtactttttttttgaaatattacatatatatatgtacttaccagcactttttcagtactcaaagtaaaagtactatatattattcctacttatgtatttttttcaaagattatattgtttttgcaaaaattttatgaatacattgatatattataaaattttctagctatatgcaaaatatttatagcaagagaaaagactatatttttgc

SEQ ID NO: 60704 - DNA, 813 bp, Cannabis sativa
tttatgacagagttggcactgcactcgattggctggtgttggatatctacctcctctgttgacagtggaaacactacgactgttagtgaaattaggtgatccataattgttacatgtaggagttgatcgagaggagtacccacggcctccaccacgagttgtgccataaggagagggagtgcgattgaaatttgggaatctggtgccacgattgaagttctggtatgcgatattggcctgaaatgattgatcaagttcaatagttgcaagatttgcactgagatcaacatcttgatcgagatcaatcttttcaatccgagattcagaggccaacagtaaagcttcgatttctgaaacagtgtattcctcaattctggtattagtagagataataaatgtgtcatactcactgggcagtcccttgaagatggccgcaatatgatcccttgagctcagaacttctccaacagaggcaaggaggtcaacatgttgcttaactttcaacagatagtcattgagggacatggaaccttttcgaagattctgtaatttggttcgaaattccaagatcttgaaggagacttgaagtgtgaagtgcttttcgagtgcattccagatctgtcgagcggtgttgcatcccaccatgcgagtgaggagactttcagacattgaggacaatagccaactcaccaagagttgatcctgcacttcccaatccagaaagtctaggttgaatgtgttcgagatctgatcagaatcgctcaagaacagtggtggtggagctcgatcttcatcaacctatttccacgaatt

SEQ ID NO: 60705 - DNA, 774 bp, Cannabis sativa
cctcatttattttttcaataaagcccatttcactttcagccacatgggtctttgttataacctcttcaccactcccattatccaccaactgttgggccggccctaagctttgaatagtaacctggcccaactcatcattatcctcaactcttcttcttttaggatccgtgaaaacaaaagcaccattttcaaatgaactttccttaaccgcatccccattgattgatatccctccattcacggcatcaattctttttccttgattcccgcccacaatcccacgattctctcctacgatttctccctcaacttcctcattaatctccatgtcctctctgtcaccctgatatctcggatcggcctctctcctggaactggtagcagtcgccggagtaccactgctccttggaacggcgacgtcagtttgtaatggtcttgccatattatcacgaagccaccttgcaccaatttgtttttgagaacgacgatctggggctttcatgaataagccatatggcttgacaatcttctctactggtccgtcaaaaacacgggggcaaaatctttctccatgagtataccacagatgaaacagaaagtgggcaccctctcatatttgaaatttgcccagaaatagtcttccttggtgtagtaaattttcattcttctcttcagtggtttatcaatgttaatcaaaacccggactctcaagtattccctccaaatgccagaataattcttaggacaagatgaaacaaattgtccaatgtaagc

SEQ ID NO: 60706 - DNA, 541 bp, Cannabis sativa
gaaaaggccttgtttcaaatttcgccataggcctctcatcaccttgagacgaccctgaggagacttcaaccattttgtctatatcttggcctttgggagatactccaaataaaatcatgtggtgtcttgagaagcattcagtaaaaagcgtttattggcaagctatttgtgatgtaactgagtccatcgcttcttcttaattttagctcctaaggtaaaaagttttacttgaagattatcatctagttggatccctattatgattaatcttcaaagacatgacttccttaatgacaatatttgcccaatgtgctctacacatttagaaatagctcatcatgctctttggggatctagccaacttgtgcaagttccaaaattttactctttcaatcttggtgacgtatccgtcattgtgagtggcatttataatttcatttgtatttttattcaacatctccttcaccatgaaattgaatggatcctcaccacttagtgaagaatttggtaccgacgaaacaagaaagtccatgaacaaaag

SEQ ID NO: 60707 - DNA, 997 bp, Cannabis sativa
aggttcggttttagattgaacacgatcaatatcaacattgtcattaaaatccgttgtagtctttaaacagaaaaaaaaatgaaccagttataaaaagattattaaaaataaactataaaacaaaaatatttagaaattgattctaataaatacgaaaaaaaaaaaattctaattttaaatcattatatataaaataacaaacatatactgaaaaaattaagactaattgattaagcaaaaaaaaatttctactcaccttctttttcttgcttcgagtttttttagcatctcgctttttaaactcttcaagtagaacctcagaatcggctccaatttcaccaagaacagtatcaacattgctagtaacatctcctatagtcttttaacaataaaaaaattaaccggttataaaaagtttataaaaaaaaagggatattggcggctaaaccacttaaattttatgttttgtaacacttaaccacaaaaatcaattttttaggggcaaaactacataaactcccattctgttttgcactgtatcccttcgtccaaaaagcacaggtaaatgccacagtggactgtccatgtgtacacacttgtacacgtggtaaatttttaatggtacacataatattaattttaaaaaaaaattataaatatttaaaaaaaattaaaaaattagaaaaaaaaaatttaatattttttttttacttttctttctttgattaattattatccaaaaaataatttaaaaatcataaaaattaaaaattataaaaaaaaataatttaataattataaaattataaatatttaaaaaaattataaaaaaatcagaaaaaaaaaattaaaatatatttttttttacttttctttttctttttcttcttctttctccttcttcctctttcttcttctttttcaactgaaccgaagcaccactggagccaaaccgaagcacccaggccctctttttctatctctcgtctctctctct

SEQ ID NO: 60708 - DNA, 2376 bp, Cannabis sativa
gttttcagtagaaaaaaaaaaagaagaactcccaagtcttggtgctctagtctcttttcttttttatatgacgtcttggtactcgaatgttgatttctcaaatctcaacatctttggctcactgagtgttggagactaacaagaatgccaaccatctctgccaaaaagaagaaactaaacttaataacatagatattataaaaatcttgataataaaatttcttagtgtaataaaaaaacatgttaaattaaaaatttcccaccatgttaagtgtgcaacatcactggactactcatgaaattagttttccatactttcacaaaagtgataaaaatttcttgagctcctttccttccataagctagcctggaggtacatttagaattagagttatacatcaactttaaaaaagagattaaaatactctaattgtagttttaagttatctacactactataaacagagaataagaaattccatgactaactattgtcattaaaaagaacataaaaattagatttttcagtctcttgagttttctatttctacaaaacaacatttgttaatcattaaaaaaagaagtaaatgaataaaataaataggagaatgaagagacacatcaggagcaatacattattgcacccaaaacacaatacaaaagaaaataaaacaatcactcataaatatgtacttaacagtagcaaaaaaaaacatatgacaaaatattatattaaatattaaaactaagtatgcttaagcctagatttcttgtagtcaaacccagagaaaatagctaggcagatgagttatatgatgatcacataaaagtgtttgttagttacccgatagttacctgaacctaaaaaacaaaatgtttccatagtatttcctaaatgtaaaaatataatatggtatgagaaagttatagtaagagacatctaaataattagatatttcaaagtcacaaaagtctcaacaaacgtactatagtttctgaaataacagatacaacaaacttcttaagaaaatttattttcaaattactttacaggattcaactagtgaatatatactaaaattatgaaataaagatagttgataagttgaatagatgtacagattatatatatactatttcaaaattaacttactcatatgtaattttatctttgaaagcataaaacaaacagtactacaaaaagaacacctaaataaacatgatctataattgaaatctttctcaatgtccaaagcatcatcaaaaaagcctcagcaccaagttcataagtgaaactcacttgttgaaatgtttgaaaggaacaaagatttatataagcaattatataaatttcaggtaaatggatactattagaacaatttggatctcaaaacataatgtagcaattatgtatttgtaactaaagataatctagcaaaacaaactaattacctgaaaaaccattagtaagtttcaaagtttcaaagccaccaagctatatccaaaagaaaatcaaagccacctaaccaatgaatcaaaaataagtacagatttttcacaatacacataaaaacaaatatttactaaaacaaaaaataccagaaataaatagactcaactaatttgatttaaaatttacagagaatgagaaaaataaaataaatcaaaaacataccaataattgatggaagattcaacacatatacggcagtggccaagaagagcctgagaaaaggaggcctctcaaaaaagcatctaggcttgagatcggaggaagcctcgcaaggaggtggcatctgggttcgtaaatgatcgaacacgtatgtattcttgatcgaaggcggcattttgaagaagatggcctctaggttcgtagatggtcggaagcatttggtgagagttgtctggtttacaagagaggcggctgagcattttcaagagagaagagagggattctacaaaggtgtttagggtttagtttgtgttctcatagttttacatatacgtgtaatatattaattaatgataaaaaaaaatatgtatatattatacattttataatataatgaaatggaaagacacctaggataaatatgacaagtgtcacttatgtgtataataattgttgacacgtaagcatatctatttaaataaaaaataaaatataaacaaaattaaaaagaaaagtgagcgcctaaaagtaaaattgtttccccccaatataagaatgatcattttaaaaaattacaatactgaccaatatttacttacatatagtctctacaattagaatatttgtcgctaaaagctacttttacctacaaataaatatctgtaagtaaaatatttgtagataaaggtcagatttcttgtagt

SEQ ID NO: 60709 - DNA, 1140 bp, Cannabis sativa
  modified_base (744)..(745): a, c, t, g, unknown or other
  modified_base (900)..(900): a, c, t, g, unknown or other
gatgacatgctcgtcaaatctagaaaggctggggggcacatagacgacctggacgaatgtttcaaagtcctcaggaaatacaacatgaaactaaaccacttaaaatgctccttcggagtaagctcgggaaagtttctaggcttcatcgtcaatgccagaggaattgaagccaatctagaaaaaattcaagccctcctggatatgagctcgccaacaaaaaccaaagaggtgcaaagcctaactggtcgaatcgccacacttagcagattcgtgtcaaaatcaacggacaaatgcgttgcattctttaacatcctgtgaggaaacaaaaagttcgagtggataaaattatgtgaaagagcttttcaagatttgaaggcacagctcgcaaaacgtcctgtactttctaaacctctggatggtgaggagttggggatatacctagcagttacagagcatgccgtgagtgtcgtgctgatcagagaagagaacaccgtacagcacccagtctattacatcagtaaaagattcattgaggccgaaggccgatatccgttgatagaaaagctcgcttactgccttattctagcaacaaggaagctgaggccttatttccaagctcaccctgttcgggtatacaccgatcaacaactacgaaaaatactgcaaaagccagatgcctctggccggttactcaagtgggcagtagaattgggtcagtgtgaaatcaacttccaaccccgaacnnctatcaaaggccaagccttggccgacttcgtggtagaatgcacaggcaaaaaagaaagcataccataaagcaatcccgagccagtaccacagccaagtaacagtgaagacagaccgatctagaaagtacatgtggatgggtcggcaacagatcanctatctggtgcaggaattgccctcgtcacacctgggtggcaacacctgcacgctgcagtcaagttcggattcaaaccctctaacaacgaagcctaatacaaggctctaactgctggacttaagctagcacgggaaatgaaggacgaacacattgagatgtgcagtgattcacagctggtggtaaatcatgtattcggcgaatacgatgctcgaggagaaaaatgatagcatatctgagca

SEQ ID NO: 60710 - DNA, 725 bp, Cannabis sativa
ttggtaattattaactgtaaaaaatagatgacaccttaaatttacaagcagtttagtagtttgtagagttttaccattaaaatttctacttaaaagattaactgcaagtgaagtgataattgagagaatttaaccgcaaaaatacatggagaaataacccatcaaactagataaataaaatcttaatatcagataaaaaaaatctctaactttaagttgtgacttttcagctcattggccaatagaacatatctatagaaaaaaaaaatagatttgtatcaaatataaaaatataaaaaaatgttaagaaatatgtgccctgtttgaatcctatttttgcatacctagctagtataattattataatgtacacaacattcaaataaaaaaattggtttattctttaattatataccaaaaaaataaatgtccatatacgaagcaaaactgtcaccaaagaatttatgtaatatatattttggtgacttacactgtgtttggtatatgggggagagaaggatggagggagagagacaaagggattgaaaaattcttttatttggtaagatcttggaaagaataagggagactaagtacatttttaacattataattaaaaaattatttgttaagagcatgtttgatattagtttttgttttttgttttcgaaaaattgtttttagaaatgagaacaaaaaaagtttttaaaagcgagtcatgtttg

SEQ ID NO: 60711 - DNA, 581 bp, Cannabis sativa
taggagttttgggatatacttgaaggattttagttgtgattggtccaggttcagacaaaactggggcatcatcgtcagcagccaattcttctatcatttccaaatcatcaaacttcacgttcactgattctgttactgagagagttcttttgttgaaaatcctgtaagcctgactgttgatagagtagccaagaaatatcccctcatcacttcaaggatcaaacttccctaagtgatctcattcattaagaatataacaaatgcatccaaaaatgtgcatatgacttacctttggtggccttcctttccataactcatatgtcgactgagatgttccagtacaaagatgaactcgattgcaaatgtagcagaaagtattgactgcttctgcccagaaatgcttagacatgtccttggcttgcagcatcacccaagccatctcttgtagtgttttgtttttcctctcaaccactccattttgttgaggatttttcggggcaaaaaactcatgatgtattcccattccattactaaaatcagaaaatatagagttttctaattccttcccatgatcattcctt

SEQ ID NO: 60712 - DNA, 2055 bp, Cannabis sativa
ccttggtgtatcattggtgacttgaacaatgtttcttcgcaatcggataaaagaggaggtaatccttatcccaattggcttattgatggttttgggagtatgttggaagattgtaggttgtttgatatggacttatgtggctatccttttacttgggagaggggaaggggtaccaattcatggatagaagttcgtattgatcgggctctagtgtcccaaagttggctagatatgtttccacttgccaaattgttaaacttggaggtcacgacttcggatcactgcccattgcagctgttgctaaataatgagactaaggcagtttttaagaagcaatttaggttcgaaaatttatggcttcgggaacctggctgcttacagattgtgaaggatgtttgggagatttttcctgggcgttctatcatggagaagatcaagttttgtggtgaaaagttgttgatatggggcaaggattattcgggtaacttcaaagagcaaattcaaagttgcaaagctgagattaaaaagtggaaaagaggcagggacgatttgtctatttcgaagtaccaggcggctgaagcaaatcttcaagaagtattgatgcagaaagagattttctggcgccaaaggtcgaaacagttgtggttaagggagggtgatcagaactcaaagtactttcatgctatggcgacatcgaggagaagaaataactcaatacaaaagctgaaaaataatcaaggagattgggtcgattggcaacacaacttatctggattaatgattgattatttcagcaacttgttctcttcttcttcacctgatattgccgaggtaactaatgctattcctaaacttgtatctgatgctcaagctaatgttatggttgaacctattgcggatgatgaggtaaaaaaggcactttttcaaatgcatcctgataagtctcctgggccagatggtatgacaccaggattctttcaaaagtattggcatgtggtaggccatgatgttatttctcaggtcaaggatttctttgatacaggtttcttttctcctgttttaaatgaaactaatatagttctgattcttaagaagaaacatccggaaagcatgggtgatttgcgacctatttcactctgtaatgttgcttacaagatcatagcaaaggtgatagctaatagaatcaaagtggtgctcccttctgttatttctgaaactcaaagtgccttcatacaaggaagactaatctctgacaacataatgatagcctttgaggtaatgcactatttaaagcggaaaagattgggtaagactggtacaatggcgctcaagctagatatgagcaaggcgtatgatagggtggagtggagttttcttgagtgaatgatgacacaattgggtttcccttggaaaatggtggcgttaattatgcgttgtgtctcttcggttacttatagaattacttatggtgggaacaatatggggcctattaatccgagcaggggaattcgtcagggagaccctctatctccctacttatttctcatctgtgctgaaggattttcctcattggtaaagatgtttgtgcaaaaacaatggttgtcaggttgtcgtgttgcaagaaacgctcccattgtctctcatatgctattcgctgatgatagctatattttttgcaaggctaatgaaacggaagctgctaacgtgatacgattgcttcagttgtatgaaaaagcttctggtcagaagatcaattttgagaaatcggctgttttcttcagcaataatatccaagatgagatgagagcttatttgtgtggtttacttggaatggtggctgctactaataatagcttctatttggggttaccgtgcactatgggaagaaataagaatgctattctggggttcttgaaggaaaagatgactaaaagaattcaaggttgggaatcgaaatttctctctaaagctggcaaggaggtattactgaaatcggttgcccaatcgcttccaaactatgctatgagcgtatttcttcttactaaggaaatttgc

SEQ ID NO: 60713 - DNA, 571 bp, Cannabis sativa
aggtataattggttgagtggaattggccgtggtggaatatgtgtgagtagatgaactggtgtcatcatatgaaatagatagaggtgttgtatgtgtatgttgagtgtctatggtaggaatgagagcagatggagagtattgaataggtggatcagatgagtgtttttgagaagaggcatagggaaaattaaactcatcaaatatgacatctcttgagatgtagattcgaccattagagtcaaggcacttgaagcctttgtgatttatgctgtatcctagaaaggtacagggtgaggatcgaaattgaagcttgtgtttgttgtatggccgaatattgggaaaacattggcaaccaaatgtcttgaaggtgctatagtcaggtttgatattgaaaaggacctctataggtgactgattgttgagaacagaagtgggaagcctattatggatatagacagctgttctaaatgcctcatcccaaaatttcaagggcatagaggcatgtgctagaagggttagaccattttccactatatgcctatgtttcctttcagctagaccattttgttca

SEQ ID NO: 60714 - DNA, 1077 bp, Cannabis sativa
tcctttgggactatgaacttactatagctcatgataagttaatccgaaattgagttttgtatttggtaatttgaatatgatagaatattgatatgagttcctcatcataattttactaactgtcaacatgtaactttttatttttcttgaaacagaaaatgataacctattttctcattattgcttgtgtgggtgcgcgtgcctgttttttgtttttattttatattcaactttaacgtaatatttccatagcttactgttactctcacgatagtttggttataacatccatttatcccacatttaatcaggggctctgggatgtgaagagagatgctgatgaatcaaaagaaggctgctttttacgggtgtatttgaatgttgcattttcaaagagaactgtttggaaaggtattcttctaccagtacttattgttttgattgattaacatgctctttaggagagaccaaagtgattttccctttcaaattattttgaatacattataaaacgacaatttatggtaggataatatgggataattttgaaagctgagtgactataactgttagattattagactccaagcacaagtcctctagactttggttagtgtcttgtgtataagcacctttgatagttttgcatgagggtagtgtagtgtgtttgtttggacgattttagcttcaataactgtttgtttatgacaactattagccttgctgcaagctgtatatttctcagggacttccaatcgattcttgtcaaattatgaatgcatctttactacattacagtaatcttgatattagaaatccaattttattgtgggcttcattcagtttttgattgtgggctacattacaataatcttgatattagaaatccaattttattgtggcttcattcaatttttaatggggataaataattgcaggcaaaatagtgcaatctacgttagaagaatgtcgagaagcttatggaacctggataaaaatggtatcttttttattactctcttttatcatcttacgaattttctctaacacaccttcagtttatagtttgactttgct

SEQ ID NO: 60715 - DNA, 846 bp, Cannabis sativa
  modified_base (64)..(67): a, c, t, g, unknown or other
  modified_base (227)..(234): a, c, t, g, unknown or other
tttatttcatatcgttttagaagtccatatttaggatgttaaataacatacttgttagtaaatnnnngatcctggtaaaataattccaaaacatcttccctttctgatcaagaaggacgctgagagtgtcttagaggtagcccacttatcttgggttagtttccaggtttctctcattgccacaagggattccctgatccctaggtcgaggctgtctcgcgtcctcnnnnnnnnaagaagcttctggtacatcattttgttcgttcctttggttcataaatccttgggatccttgaggaatgtctcgccgttgctcttgattatttgtttgattatccattgaaacatcccttgtacccccaagttgttcttcctgggtgttttggggatttccctggtttgcttcctgtctcctagttctagaacctcgaggtctgtcatatggtcttcttaccgcatgatcgggttgattgtgaggatttattccttgtgtcgcctagctgttgtagcctctctttccgattcagtgttttttagttagattcagctaagcgttttcagagttgtctattttctaattccactaatggtacatatctagttggatcataagcatcctcacttctaggcacatatccggcagaattattggtatcttcattccttctttttggattttgaccatcaccaccatcgtttctcattgaacgtgatgttccaatggtatggggtctttgagatcccattggctctttcccaaggcaatgtgtagtttcctcaggacaattttcatcattttgattgttattagccattgaatatggatagatttctgtttgtaaggag

SEQ ID NO: 60716 - DNA, 1438 bp, Cannabis sativa
tgaatctgattatgctttttcattttagccttccaggcaaactattctggatggtgttcgatggctacaggagtcgtacatactttgctggaaatagctgaaggtgaaaagttattattattattattttgtttttttttgctctttcttcttcttgtttttgcgatttgtgaaattcttcaactttgattactttttctcaagctaaagacaaaagtatatccttctagtgttattgtaatgctgaatttcttctcttcagggttattatattttatttttccaaacatatcaattttgtgtgtgaaaaccatattacgaaatgttagcataacaaatatggtatcacgccacttgcaattgcaatatagaagggggaatgaatgaaattagagaaggacttagcattttttttaatcctagtgtctacagcatactcagttataactagtcaggtactcataggatgggttacgatgatgaaggaaaataagagttaaatctatcgagttcattatattattgtgaatgaagggtaggttaggatggctgggtgttaaagatctcaagtagtgagatgtagggtgggacaatgaacctgattcgtaaggggaagacgaagaactgtgatttttctttgtgttgtgtaatcaacttacttactgtgtgctttgtatttttacctgtacaattgtgagacatgtattaaatagctcacatatcttgtattgtataaatgcagaagctcaatgctcaaccaactgaatttctggcctactaataaagatgaacacctgcaaatgataccattatgtatggctcatggtgagtaactttaacatcattttctttttagaatatttttccattttatggttctgtacagtgttcttgctttgtatttcaatgcaaattttcagtgctgtacatgtaaattattttctatgcctgatcagtgatcagatcaacactcaattacaactctagagaaggaaacctgttttggtgctttttaatgtgttcaatctcctgtaattggtcttattggctaactttatgtccagctcattgagagtgctcactgaagtcctcggaatttgaaatggtttgtaacaaataaaaatcactaggtgttacatttcagtaatgttgcagactatgttactaggttatatgttttgctaaatgcctgaaggaactttctttctctttgttttattttaatcaggttgtttgttggaaggtctttatatatgtgtgtgtgtgtacatatttaaatgtatataagttttgatctgtgtataccccagatgaaatctcattgaattttctatgatgaatttaatttcatcagtttgtaattgcattacctgataagctcattgttgaaatatatttctctttaatgcttgatcacaatttgggaagtgaggattca

SEQ ID NO: 60717 - DNA, 1002 bp, Cannabis sativa
tggtgaagatactattgttcgtgtctgggattctgaggtgaatataactctctggttttaatttgaatggttaaacttaaattagagtattttgcaaatggttcctttttattttgattgtgtaaattgatgttacttgtatccatcaaatttatagaccggaaagctgcttattgagtcacagaaggaagttggccacaagaaacccattacttcacttacaaaatcagcagacggttcacactttattaccggttcgctcgataaatctgccaaggttcttttctaatactagtcatgttttattctcatttgttttcatttaatatattttctttctggggctgtagttgatctttttgctttctttgaattgtcaatttgttagctttgggatacaaggaccttgactcttatcaagacctacgttacagagcgcccggttaatgcagtcactatgtctccattgcttgatcatgtatgtatctatctttttttagaaaataagagttatgtattgtataaggttcagtggtttaggatgtgtttaagatttatttgaatgtgttttgtgctccataggtggtacttggaggtggtcaggatgcatcagctgtcactacaactgatcatcgtgccgggaagttcgaggctaaattttttgacaaggttagtgatttgattgtttgaccaactgattactttcttgtgtaattgggttttttttcttagtttttacatcatatattcctattgttcatctgtttagattcttcaacaagaaattggaggagtgaaaggtcattttgggccaataaatgctctggttttcaaccccgatggtaaaaggtatatttctagtcagtaatgcaatttatttaatttgaaatgtttacttggttcaaaaagttatatttgtttttgaaaaagagaaaagatccttttgtcattgacaggatccttcccgataaatattagaagcctcccttgtggtgggagaaa

SEQ ID NO: 60718 - DNA, 553 bp, Cannabis sativa
cgcagatactgatggagtatctcaccaataaatataggggtatcggtcccaaaaatcttcactaattttgtgaaaacaacaaattttccatttaaagagagtagagagagcttgaaagtctaatttctcaacccgaagctattactggtgattgaagctcaaagatcaatgtctagagatattttgctcctttcatcgcatgtatgattttgatatgtttatactttattctgtttttcatattgaatatatatatagactagtgtagattcaattgtgatacaactactactgtacctaaactaactgtttagttagttaattagttaaaacagttattactgtttccttgtaactactttctgttatctttttttcttgtttactcaatgtattctctcctatataaatgaaatcatttcctaaagctagttagcttttgctagttttgaattgcaatctcatagattggattctgttagatttttagcatagataagctcttacaaatcggatgaactcctctattgactgtctctttctttgcaaaact

SEQ ID NO: 60719 - DNA, 990 bp, Cannabis sativa
atgtaatattataatttagagaaagaaaatagagaagaactgagaattttcttagtgttttatttcaatgggtgatctcctattagtgaaatattaagaaacaaaaaaacagagcaactaaaaaaaaaatattaattacaattaataataataaataaaatatttagacatccacatattattaatatttataacatacattacatttttaactacatatacacaagaaaaattattgttatataatctttacatgtgcccttacacatgcctttattcatcacaacaaaacaaactgtcgaaagtaacatcaaccgccacaacctccgcagcctccacaacctccgccaccacagccaccaccaccaccatcaccatcaccaccgccaccacaaccgccactgtatccgctagttacagtattgacaacagccgcagtagcaagaacagcaccagctcctgccaaaataaccatattaccgtcctttgttccactgcttttcttagttccttcccccttttcaacgtccactactgtaggagtggttttgctcaagctgtgtataccgattgggattggagaacttgtttgcttcttctttttgtttgctttcacacacacaccaaaaattatgattgtaccaattactgagccacatactataagaactattgcataagctttcatctgactttctttttcttttccttttgcttggcactaaagttaattggaaacctcatactatatatcatctataatatactgcctttttgtctgttgggtagggattattgggtggaagtttactcatgacattttcaattgatctgacttttagaaacaataaaaaaaaaaatctgtagaatttagtttattagtttttaatttaaaacatatatattaaataaaagaggaatcgtgaaggaaattgcgtctttgaccatgactattatatataactactactagtttggaatatcaatata

SEQ ID NO: 60720 - DNA, 735 bp, Cannabis sativa
attactaattggattggattggttgaggagaaaatattagatcggatgcccacccctagttcaatcagcttcagggaaatttagttttcttcaagaattacccttgctcgggttgtcatttgttgataatttgagaggaggatattttaaaacctgtcttccgtagcttttatcaatttgatgattatggtaatcaaggattttctcaaaatacacgtcatagtgtatgttaatgatatccttaggcaccctttattaaaaaatgaagtgtggacaaaatctattgattgttttaaactgactatagaatcataatcgacacggggtaagattggataggtgaagattttgcagaggtcacagataattaatggaattgaagttttctgggtttggatgagttatggtattataagatctcaatgcttttaatagggttaattaagaggaagaagccatctatatagacagacaaatattgaaactagtttatttccaagagttgaagtaacaattgattatagctttggcattatcttgggcatcgaatcaagaaaaattcatgatctattgcaagacatccagagaggatctgaagtgtattttattctaaattgatagggttagtgcttattctccttgacaattgaaggagtataggtagtgttactcaaattattacctggaacttatgaacagaagttttgtacttagaagttggcagaactatttcta

SEQ ID NO: 60721 - DNA, 1365 bp, Cannabis sativa
tgtgtattccacacatgggcaccccgaacttcacttttttctttctacggagtgtatcaaaccactttctacgaaatgaaacttggaatagacaaattgcacccaaaaactacctgggagacaagttcatgctgcccacgattaaaaatttcttcttgcgcaacatggtgtatgccacccaaggtatgaagcttcctcttgggtggcgtacctcatactgcccaggcggttcatcccgaacttgtcaaattttgattcttgtcttgtgcggggtgtacctcacaaaccttcttcatgatgacgtatcctttctttaattattttccacatcacttagcgaaaatattggataccaactctgctttaatatatgtaaatgaaaatataataaagctaaacatcatgacaattacatataaaagatcaactaaataataaaagatcaactaaataataactaaaaaacatatatatgttcactttaatatagttcaataaaaacactaagaatttattcaacttagtgcaataacaaaaagatttaaacttaattaaaaataaactatcaactaaaaaatatacatatacttatttttttttatgtaactaaatatacaagaacgaataactaattaaacaataagtacaatgtaatgactaaatacctaaaatatgaaatttgtagacaattaatatcaattatttgtaaattataattatgtgtgtattatgtcatatggaatctattcgcaagaaatatgcatttgataatttataagttccaaagattttattgaattctaagtgtatcataaaaagcatacatgaaacttaatattttcatattttatgcccaaaatagtagacatatgacatacaaccattttagtcacatagatacagtttagtatcaagtatttcacaaaataatattattagatatttttgaatatcaggctaatagaattgaactattttacccctagagttacaagcttatttagcaagtaagtaaagggcaaaatagtaattttacatcataagcttaatcacccttttatttgatccatatggaagcgccgaggcagttgagtgggatgtgtgggcttgtaaaagcgccagtgggcgtaagtcacacaaagacatcgatagagatgcaaagttgtggaatgaatgcatcaaagaagccagtagggctaagaagaccgagcgcaagtgttaagatggcgctagagtttgagtagaggccagatggtcgtgccagtgagacttagtagtcatgtgagcctgcgaagttcaagaagggttttagagtttgcatgaaggccagagggctgcatcattggaacttagtacatcgtggga

SEQ ID NO: 60722 - DNA, 1139 bp, Cannabis sativa
gttagggcagacctctacagttcgtgagttgaagtccctgattcggtcgcgctcaccggatttcatctttctgaccgagctcaaagttgattctacgttcttggtacgtattctaacttccctccatttttattttcatattattgttccggctgtgggtacggcgggaggcatcattttagcttggaaaattgggtttgattttgaatgtatagcttgtacacaaaaccatatctcgagatttgtttactcagaccctccctcgaaaccttggctcctgtcttgtgtttacggccctccgtatttccatgcaaaaaaagctttctgggagaatttaatgaagataggggacagatttggtggcccttggcttatattcggtgataccaattttgtccttagtgcttctgagcgggtcgggtcaagaggaaaagacctttttatccctgtaatttctgatttagtgaatgataggggtcttattaatatgcccatccagggagataagttgacatgggataaccatcgatctgggtccaatcatgttaagtcggccctcgacaaaggtattgtgaatggtgattggtttgggcttttctcgaaagcggttatttgttcccttcagacttccaactcgaatcatcgccctctgtgtctgtactctggtggtctaggagagaacgtccgaagatttaagtggaagcctggactagggatgagcgaagcaatttcgtggtagattttgcttggaagtctgtttcttacccttgggccccggccaggatttttaagaagattggggctactagggttgcccttatgcattggcaaagatctcaatttggtaattttgacaaccaaattcgtgatcttgaaagaaggctggatagcttgcagaagctgcctgtgggatctagagtgtgtgcagcggaggaggatcttcgtaactctctaaatgaggctcgagctagaaaagaggtgtattggaatcaaagggctagaatttcctggctgaaggagggagataaatgttccaaattcttcttcctatcagcttcaattaaaggtagaaggaatgccattgagagcatcctcaataaagacaacatatggatttccaaaagggagctcattgggaa

SEQ ID NO: 60723 - DNA, 875 bp, Cannabis sativa
caaaccatgagcagcatggttagcgtttctcttaacatgagagataaatgcttcagggaaaaaggataaaagacaacgaacatcagagattaaatccgaaaaacaagataaatccctagatgaagaagttaaagcctggaaaactctaagggcatcagtttcaatgtgggtgatgcgtatttggtgttgcaatgcctagttcaggctatgaaataacgccttagcttccatttcatccgatcgaaagtcaccttgcgcaggcatggaaaatgcagcgagaacttgaccatgatgattacgaacgatggctccaattcccaattgtttagacaccgagttaacagcagcatcaacattaatttttacacccgagtgtggtggaggatgccatgaaacatgatcatttggagcaaaactgcttgaggtggcagctgtaggatcctggacgattctgcaataagttgcagcaggcaaatctgggacattactgctatggacagcagcagaaaaaggggcaggtgatttggtagcatgctgatgaggcttggcagagtgaacccgaaccttgtctacatagtcttttgcaaaagtagcagtatttttcccatcctgaatagagctaccatgtaaagctttgtttcgacttgtccatataacccacattgtacaaatgagaagttcaaaatcttgctgtgagtatagcttggaaaggtggaaaaggtagtcaccattaaacatttgttgtgccggcctatagtccaaagaaaaagaggtgttaagccatattgatttcgcatgcttacaagagaaaagggcatgcccaatagattatcaagcgcaagtacacagccaacacgctgcagaatctattactt

SEQ ID NO: 60724 - DNA, 2079 bp, Cannabis sativa
aaatctcattttcttctcctcattttcctgagaaaatccaaacagcctccactctggtgcgaattgtacctcgatcgaacttcaaacgatcgccctagctttagtgttttgagttcggccactcggatgtctgctatctcaaggtgaagcagtaagattcgtctagtcgtcaccgtcgttcagtttggtgtcttccccttctggtactctctctctatatatatatgtgtgtgtgtgtgtgtattgggaaattgaagaaagctaagcaaaaggttagattttttagctgattgagtatttttcacaggattatttgatgctttcgacatcattatcacaataaacccagtgagctttctcaaaaatgttgtacactggctaacttaggtccaaggccggcgcaactcaaccccattttgatcctcttccctggctcactacccaaatgcttgcgccactctttcttgctcccatttggtagatatagataagcctctccaaatttctcaccactgttctgtttctctaaaccccaggtgacattttctactcccatctatacttttgatgcaattctcaggattttttttattaattgttgtttcttgcttatttttatcactggggtttatggttgctgcgacttttattgttttttttttttaatgcatttgggataattagttgggtcgtagctttctggggttttaggggttagttgattttgatggagtattcatactctagcaaatttttggcttgattttcagttatagtttatagtacatttacttggctcaggttattgtttgctcttgagtcttggttagggtagttgaattaggctttttcttttccttaatacgtcgtttttactaattgtcgtttgctggctggctttgattaacaggttttggaggatagatttgtggtagaatatacacttttgggtttaaatttgctgcatttattatcttcccttttctctcttagatccgagttttgccactttaagatggcgacatatacttcagcctatgttaccctttcggatgctcgaaacccagcaggggttcttactgtacttagagggagagttcaagcagagaaccattttggaagaagtttcagtgggaaactgtatgatgataagaatggatatttgggtataggccaaaaatcacatttgcctcaaatcaagtgttcttccaagtctcacaatgttaattcatatcagaataaagacccttttctgaatctacaccctgaaatttcaatgcttagggaaggtaacaacacttccaacaatccaagaaaagatagttccagtggaagtgttactgagagtttagcagacacatcgagtacgactagttacaatgaagcaaagatcaaggttattggtgttggtggtggcgggtcgaatgctgtaaatcgcatgatagagagtgcaatgaagggtgtggagttctggattgttaacacagatattcaagcgatgagaatgtctcctgtctatcctgagaaccgtctacaaattggtcaggagcttactaggggtcttggtgctggtggaaacccggagataggcatgaatgctgccaaagaaagcaaaacatcaatagaggaagcacttcatggatcagacatggtctttgttacagtaagttcagttctaatacgttctaagttctcagtttagactgcctttggtgattatgctgtaggaatgaatttctgagtttgttttgtcagtaaatcaccttgtttgtgtgctctgcaggctggaatgggtggaggtaccggcacaggtggtgctcctgtaattgctggggtcgcaaagtcgatgggaatattgactgtgggtattgttacaactcctttttcatttgaggggcggaggagggcagttcaagcacaagaaggaattgctgctttaagagagaatgtcgatacactgatagtcattccaaatgacaagttattgacagcagtttctcagtctaccccagtaacagaagcatttaacctggcagatgatattcttcgacaaggtgttcgtggtatctctgatataat

SEQ ID NO: 60725 - DNA, 575 bp, Cannabis sativa
aatgatagtattaaataaaatgacaaattttaattttattgtagaaaaatttatctttgatatttctggagttagggatgtcactgctaccttacaccattttcaagatgaatctaagaaaaaatcttaaacaaattaccgtacatgacaaaccaccatatatagtataaataagtcacacagtcacaaaaattaccatacttggcaaactactaaatgtggtacaaaacaaacaagagcaaccacatataaacaaaccaatacacacaaaaagaccacttattaattacatataacacaaaaatagaatctatgtagtatatgaagtatattagagttatagtttggtagtttcttggtgtaatataaattctacaaatagctcatgtaatataaatttcaatcagagcaatatgagacaaacacactcaagtttatttattttgatagatttaattacaccaaattaacatttattcaattatataaactcaaactcacacaaattttttttagttagatgcattatttttacaattaccgtactaatgttttctattttcaggatctaaaaa
